United States Patent Application Publication US 2026/0103690 A1 - sequence listing, part 64

SEQ ID NO: 311669 - protein, 392 aa, unidentified
MSEATSRVVIGMDPHKRSVTIEVMNADETVLDGGRFGTDEAGFAAMTDHVSRFPDRVWAIEGCNGIGRHVALRLVGLGEEVLDVPPKLSARARVFSTGQGRKTDATDAHSVALVGTRMSGLRPVVANEQREVLRVLVDRRGWLGEEHTRKVAQLHHLLLELIPGGAKKNLSAAQAKALLAKVRPRDAAGKARRRVAAELIADLERIYLRKKAADKELTELVRATGSTLLDLHGIGPSGAARLLVDVEDITRFPDRGHFASWNGTAPIDASSGDHVRHRLSRQGNRQINRTLHIMATVQLRRPSEGRAYFDRKTATGKSNMEAMRCLKRRLSDLVYKTMLDDLVRTQKTGPGGQQGNDSDSSATGSQPRTSSSDKPLPGPATPQPRTPLPAAS

SEQ ID NO: 311670 - protein, 444 aa, unidentified
MHVGKQFWKAVLPRQELIWMKAESAETVRCKKRKRGNPMYIVGVDAAKGKSTVCMIDEHGQVFISPKDIGHTRNDLKSFIDELNKTGRKEDVCVVMEATGIYHRPVFNQMKKEGFKVFVINPLKMKAFAKDVNFRNVKTDKIDAGIIALYGAQKYNFLAKVKELSSERDELLRLARAYSSMQKPKISLKQQLDVQLETMMPGIKEVFSDDEKFYDFLLEFHHYDKIERYSEETFMKRFIQWAKKKGYRFKRSTPAKIYELSKTNISSIPYDETAVLCLSSIVNSLKAIDKGLKDILARMHKIASLLPEYEVLSAMEGFGYTLVPLIIAEVGDIRRFKNKKSLVCMAGIDVPPYESGKFKAGKRKITKKGNAHLRRHLYLAMGSIMKVKPKTDTAIYDFMIRKKNEHKLNKQVRVAGMRKFLHIYYARVKEKYKELGLWYIEEFS

SEQ ID NO: 311671 - protein, 334 aa, unidentified
MQNVALIGIDLGKHSFHIHCQDQSGKALLRKKFTRTKLMQFLATCPSSVVVMEACAGAHFMARRISDIGHEAKLISLQFVRPFVKSNKNDFVDAEAICEAASRPSMRFVQPRTEVQQAMRALHRVRESLIRDKVKTINQIHGFLLEFGISLPIGDAVIKRLSLVLAEHEIPEYLSHLLMKSHAHYLYLVEQITELESELNQSIKADAAAQRIMTIPGVGPITASLLSSQLGDGKQFSCSRDFAASAGLVPRQYSTGGKSTLLGISKRGGKNLRRLLVQCARSFMMQLEHQQGRLAEWVRKQLDNKHSNIVACALANKLARIAWAMTINQKEYQV

SEQ ID NO: 311672 - protein, 415 aa, unidentified
MVERCAGLDVHRDNVVATARVPGQGRRRFEQETRTFKATLGGLAQLGAWLAELGVTLVGMEATGVYWKTVFQALEERFECWLLNAHHLRNVPGRKTDVKDSEWICQLVQHGLVRPSFVPPPEIRRLRDLTRLRTAQSNERTRTIQRLEKLLQDAGIKLSSVASTSYSKSARAMLEALLSGVSDPDQLAELSKGKMRAKIPQLRDALQSRFQVEHHGVMVAQLLAHIDTLDVVLQNLTARIELVLAPHAHIVELLSTIPGVQAQAAQVLIAECGLDMTVFPTVGHFASWAGACPGHHQSASRRKSGRTRPGPSWLTSQLTECARAAVRTKGTYLASHFAQLRGRRGEPKAIGAIRHDLLVAYYHIVRDQVPYHDLGPDWQRKRYSVEHRARRLQRQLEALGYAVTLEQTEPTEQAA

SEQ ID NO: 311673 - protein, 316 aa, unidentified
MKNYIGIDVSKSTIDVYDGKKSYKFENSELGFKEVVSLAKKIKETILIFEPTGIYSYALTNFCATHKIQVVMVGPKESRDFARSLKVRSKTDKIDAKVLYKYQSHVEPKMVQVPIVNHHAVKIQEMLNIYEGILSAKQKFKNQIESTSKEHKDLVRTLNRMIDNLDVEAQKLFNKIEFLLLKDKHVKSKYDAISTIPSIGQKSALYLAAFFLKYPSANAKELTALMGLDPVMRDSGTYRGKQRISKHGGQQLRNLLYLPTLCAIQHNDRIKAFYEGLTSRAKTKKLAVIASMRKLILMAFSIFKSEEEYQPLLVKI

SEQ ID NO: 311674 - protein, 412 aa, unidentified
MQPERPYVRAAKVARPRSKQATGIAPDGPAPSPMLKRGRTVEKDSELFVGLDTSKLKISVAVAGGDRNGEIRFFGDISAEPVSVASMVAKLAKRSAKLHFCYEAGPTGYDLYRQILELGHHCEVVAPSLIPKRAGDRVKTNRRDAVSLARLHRAGELTAVWVPDQTHEAVRDLVRAREVANDGLRKARQHLQSFLLRHGRIYAGRAPWTRVHSRWLATQSFEHPAQNIVLAEYIQAIEDAAVRLDRLTKQVDEAIASWTMGPVVEAYQAMRGVALITAVTFVVEIGDVRRFDSAPQLMAYLGLVPSESSTGERVRRGGITKAGNVRARRVLIEGAWTYRFPARVSRDIEARLDGLPRSVREIAWKAQIRLCARYRKLILAGKTKTVAVTAIAREMAAFLWAIGQEVPPAVQA

SEQ ID NO: 311675 - protein, 399 aa, unidentified
MGQQLWAGVDAGKSDHYCVVIDAEGQRLLAQRVANDETALLELISTVSTVVDGAEITWAIDLNGGGAAVLIALLVGAGQRLLYIPGRTVYHASGGYRGDGKTDAKDAAIIADQARMRRDLQPLRPGDEIAVELRILTSRRADLVADRTRAINRLRAQLLEYFPALERAFDYSTSKAALILLTGYQTPDGLRRAGAAELAAWLRKRKARNADAVASKALAAANAQHTIVPGQHLAATVVARLAKEVMALDIEIDDTETMIEERFRRHRHAEIILSMPGFGVVLGAEFLAATGGDICGFDSVDRLAGVSGLAPVPRDSGRISGNLKRPRRYHRRLLRACYLSAQIAIRTDAASRTNYDRKRSEGKTHTQAVLALARRRLNVVWAMLRDGTAYQPAPTAAAA

SEQ ID NO: 311676 - protein, 435 aa, unidentified
MSSLQKLNPHCAGIDIGSEFIFIGIEEAEVASFGTFTDDYLTAIAYLKEHAITAVAMEATGVYWITLFDMLEAAGMTVTLVNGKQVKYVPGRKSDVADCQWLQQLHSFGLLRPCFIPDEVTRQLRTYTRLRTDHLSMASSHIQHMHKALTLMNIKVQNVISQIHGASGMRMMHAIVQGERNPERLADLCERSILNTKHNRVIASLKGNFKAEHLFALKQALCAYEFYQKQITECDKQIEALLNDHTNDLPTPPQITPPKDIRHNPPQIDGLHTKLMKMTGGNDPSRITGLTDKTLLELLGETGTNLQEHWATEKHFASWVALAPAIHQSGKSNRRKRIKKHSRAGQIFREAALSIAASKHAALSAFYKRMKARKGFLHALKATARKIAVLYYRIMTKGLAFVEYGIERYQLKFKEQQLRLLQKRAKTLGMMLVST

SEQ ID NO: 311677 - protein, 428 aa, unidentified
MDEVDRNRLEEFRQLRQEVRHSEEYLIVGIDIAKDRHHAFLGTATGKTLLRRLVFSNDHEGFRKLLDQAEALRAQHGLKKVVYGMEPTANYHKPLGEYLITLGRTVVLVSGVTVKRNRESLDGRWDKHDTKDAANVADLISQGKCLYYEYPSAELRGLRGLLSLKRRLKKQEHGYKVRIRNHLIAQYFPEMDRDYERLGTVGLSIVRWCFPASQITELDVEPFIQRVTSRRIRVETRQRLEEVWEKAGASIGCEGVPGMEHEAKVMVEGLRQIREVIKETEDKIQQLCEQFPEYPYVLTIPGFGPDVSAKVLGAIGDPNRFQNGKQVLKMGGLDLSADRSGKDSDKAIPEISKRGKADLRYALYQAALIASVKNRDVMIYYTNKLRGREREKGIHVKMRVKLAAKLLVIAWTLMKKKEKFNPAYLNAE

SEQ ID NO: 311678 - protein, 407 aa, unidentified
MQVVFGIDVSKAKSNVCELIGEARNEFVIANDRLGFKQLLCELSVFKEHPQIIFEATGVYSRRLQAMLEDYGYSYVIINPLKAKKEMDSGLRRNKTDKADAYRLAMIQRLYKHPVNQVQSRIYNQLASMSHFYDQLTSDIVLAKNRLHQALQSTFPNIEELFSNDKGENYWKIVKHYPHCDLVSSDGVKAIADWLKGLKGVSSKRARSTAEKLLKLAQKSYPAVDDRSIETKQARYYAQRLLALDKTRASLLSDMIKLAEALPNNDLKNLESIPGFAQTTAVRVLAELGDVRRFANPSKINAFIGIDPGRYQSGEKDASLSISKRGNAIARKLLYRAIGQIANAAKTNPCHIADYYESKKRSLQTQGFKKIAIASISRLLRTIYALIVNDQTYDYDVAKQNQKRLLS

SEQ ID NO: 311679 - protein, 433 aa, unidentified
MIKINYMSTLFVGIDVSSKSNVVCAMDFDENQYLTSSFSNNQPGAVELTNAISDCMRKHPDLNTIVVVLESTSVYSIHIANFLSTCEELLPYKPYVFCVNPKMTANYCKTYIGMDKTDPMDAYLIADFARVGRIKKLEPWRGAQYLALKRLTRHRLHLAECITREKTYMVSNLYLKFSELQLLDSDDQPFSNIYGATASAVITEFFSLQDIIDASEEDLLTFLAEKSRNRITDISKTSELLKKAARDSYRLDKCMYEPINISLASSFNCIQTYQKEIKLIDQAIEKCINGMHPNALTILKSIPGIGPVWAAGILSEIGDITAFHSSDALAKYAGLTWKKNDSGDFVSEDNNLTKAGNTYLRYYLGEAANSVRRFNPEYKDFYAKKYAEITKHQHKRALALTSRKLVRLVFGLLVKNQLYTGEKLDTEFNTESE

SEQ ID NO: 311680 - protein, 351 aa, unidentified
MLIIGCDLHTRYQVIAMLNSETGELVTRRLQHENGEAGAFYASLPAPAQVGIEATGYTQWFERLMAELNYELWVGDAAQIRARALRRQKTDSRDAEHLLELLSTQRFPRLWIPSPEQRDLRQLLKHRHKLVTMVTTLKNQLHFLAMSQGLCRKSKLWSERGREELESLSLGPWARRRRQELLALLDQLQPQIAELDVAVAQAAAADPAAVDLMTQKGVGPVTALAFVLTLGPVERFQNSRQVVSYLGLNPREHSSGGRQRLGGISKQGNPMMRWLLVEAAQTAVRFDPELRRKYQPLKFRRGGSVAKVALARRLAVRLYWRLRQRKAETQPVRMPGSSGSAVVLPRAGSRH

SEQ ID NO: 311681 - protein, 347 aa, unidentified
MRFYTEQHEYYCGIDLHARTMYVCVLDATGAIVVHRNLKANPEQFLEVLAPYRSGVAVAVECIFTWYWLADLCAREKIPFVLGHALYMKAIHGGKAKNDRIDAHKIAALLRGGMIPQAYVYPEGMRSTRDLLRRRMHLMRQRAERLAHIQNTNHQYNLPPIGKKIAYKSNRAGVAERFADPGVREIVRLDLELIGEYDRLLTALELQIVKQAKQHGPQAFHRLRTVPGIGKILALVILYEIHDVRRFPSVQDFVSYARLVKPKKESAGKVSGSGGAKIGNPNLKWAFSEAAVLFLKNNPKGQALVARLEHRHGKGKALSILAHKLGRAVYAMLRRGEAFDMNRFFNR

SEQ ID NO: 311682 - protein, 437 aa, unidentified
MVGSRERGHSSKSIPSAVAESVPLFRQYCSCECPMSPIGPSRHFALPHDSGRYRGKANIASESRRWVYDGVDAPPTASMCQSGDVEHHLREASVSEVIIIGLDIAKHVFHAHGADGRGRAMFSKRISRGKLLDFFAAQPSCMVALEACGGAHHWARQLTQLGHEVRLIPPAYVKPFVKRQKNDAIDAEAICEAALRPSMRFVAVKSEEQQAAGLVFRTRDLLVRQRTQLINAVRGHLTEYGWIAPKGPSHVARLADLIEEEDMVSSLPEAARVMFRLMLDLLAGLNNRIADLDKEIARRAREDEVSRRLMTIPGIGPISATAIAALAPPAETFAKGRDFAAWLGLTPLQKSTGGKQKLGATSKMGERTLRRLLIIGSSAVVQQASKRGAPKGSWLEQILTRKPRMLVTVALANKMARIVWALLVKRENYRAPVAARA

SEQ ID NO: 311683 - protein, 361 aa, unidentified
MSNLILKEVRTQCPPAPGQQVIIGVDLSRTKWVYACRWEGRERRRLGSAGALPHLQALVHEYQDRGCQVHVVYEACGFGYEIAWWLQEQQARAIVVAPSTVERAPGAHVKTDRLDAGGLALKYEQGLLTSIYIPTRAQHEWRQLSRTYAQVLKDRRRQQVRVRLLLQEHGYTPPPRASGWCALERWLTAEPLPAALALCVEQLVAAHRAASASARRLATELRTVACGPQYGPLVNALVQQPGVGPLTAVRFALEIGDVHRFATAAALPNYLGLTPREYSSGELVHRGAVRKCGPGPVRAWLVQCAWTAVRHGHDQGLADCFERVAARGGRKKAIVAVARKLAVRLRARWLAFEATRHAHAA

SEQ ID NO: 311684 - protein, 379 aa, unidentified
MKKDNTTVTDLFVGMDTHKDSIEIVTAEAGALGEVRPYGQIAGDLAALDKVVRKLDTPKHRLRFVYEAGPCGYVIYRHLTRQGYDCVVVAPSMIPKRSGDRVKTDRRDATALARLHRAGELTAIYVPREEDEAMRDLCRAREDAKHAQTRARQQLLSFLLRYDIRYPGGRRWTGEHKKWLSELKMPNPAHYVTLHEYINTIEEATSRVERLTEQIRTLVSEWRFAPVVKALQAMRGISLIVSVTLVTEIGDFTRFSNPRQLMAYLGLVPSEHSTGPKRRLGGITKAGNTHARRALVEAAWAYRSPARLTRIIRDRQRNLPAEVCAIAWKAQLRLCARYRRLVMRGKQKPVVIIAIAREIAAFVWSIGRQLSVTPIVSGR

SEQ ID NO: 311685 - protein, 404 aa, unidentified
MFKFGIDWSEQHHNLCIRNSKGAIVSRVEFKHTLEGFQRFDDERRKLGVPPSECLVAIETAYNLLVDFLLDRGYLVYLIPPQATKGYRNRQRSTDAHTDDTDAALLSSILHTDLDSHRRLQPNSALTQQILAQVRLIDLLRRSIQRQANQLRAVLFRVYPQALGLFGKLTAQINLHFLMAYPTAQEAQALTQPAFEAFCREHRYGRANLISRRYAHLMEPAPEANPIAVTAYRDQVRILAELLLPQVLRRTEARSSLAQLFSQHPDSFIFESLPGAGELLAPGLLVKFGDHRDRFPTPGSVQALAGTCPVTKQSGKRKVVIFRRGCDREFRRITQQFAKASVRQSGWALAYWRDVRPRCRSDSDAYRRLANRWLAIIWRMWQDGKAYDESYHIQQRAQRRRSRS

SEQ ID NO: 311686 - protein, 342 aa, unidentified
MYYIGLDVHKKTISYCVKDAGGQIQREGTVGSTRSELDVWVKTLPQPRMMAMEATIFTGWIYDHLLPHAAQVKVAHPLMLRAIALAKKKNDRIDAGKIADCLRCDFLPECHMASTEVRDRRRSLRYRNLLVRQMVQMKNRIAGLLMETGVSYNKKRLHKVGYFRELLATHPEISDSIRPLLQLSRETIVRCQRTESALVRSLERDPLLAARIERLKTVPGVGPITALTWALEIGDVSRFRTAKQAISYCGLCGAEKSSADKVMRTPISKQRNKHIQQVLVEAAKLAPRQSHELALVYEKEKLKGNRNRATLAVARKMVAYLVAVDRQNRVFVAPEKHGAAAA

SEQ ID NO: 311687 - protein, 349 aa, unidentified
MALTIVEEARSVTGGVDTHAGTHVAAALDPVGGLLGVREFPATAAGYSRLLGWLGGFGTVCLVGIEGTGSYGAGLARHITAAGIRVVEVDRADRQDRRRQGKSDPLDAVSAARAAQSGRARGAPKGRDGAVEAIRTLMVARRSAAGERTRTINQARALVLTGPDDLRTRFARHTPAALITGLASLRPRTGDVAGHATRIALRELGRRARFLDGQLQRLDELIVPLVTAHAPGLLALYGVGPRTAALLLITAGDHPGRLRSEAAWAHLCAAAPIPASSGKVTRHRLNPGGDRQANHALWRIVFTRLGSDPRTRAYAERRTAEGKSKAEIIRCLKRYAAREVYPHLRPAGG

SEQ ID NO: 311688 - protein, 379 aa, unidentified
MRKDIRYVGLDVDSEKIVVAVAEPAGEVRSLGAIPYREESVRQLVKKLGPARRLRVCYEAGPHGYGLYWQLSGLGVHCDVVAPTLVPVRSGDRVKTNRRDAEKLARCYRSGDLTAVWVPDAEHEALRDLVRAREVAKKDQLRARHRLGKFLLRRGLRAAAGMKSWTAKHLLWVKTLRFEHAAQEATYLDYLHEVEHAAERVARLERAIDQAIEALPTQMRAVIAGLQALRGIKKVSAATIVAEVGPLSRFSRPKQLMGYSGMVSSEDSTGSSVRRGAITKTGNAHLRRIVGEAAWAYQYRPAMSPELKKRQEGLSEEVKEIAWKAQHRLCTRHRRLVAKGKLRQKVTTAIGRELLGFIWAIGTQVEREQRSAKLTRRAA

SEQ ID NO: 311689 - protein, 448 aa, unidentified
MPRKRSKAASLPIVEPDAAGIDIGATQIFVAVPGDRDPEPVRCFQTFTVDLLRLADWLQQCGIRTAAMESTGVYWIPLFQILEQRKIDVRLVNAHHVKNVPGRKTDVADCQWIQHLHACGLLRGSFRPDHEICAIRSLWRHRDNLIELATIHLQHMQKALDQMNVQLHHVISDLAGTTGLAIVDAILAGERDPGKLAELRDWRIRATKETIMKSLVGDYREEHIFTLGQSLKCYRYYQSLIEEVDRQVKGMMRQLPSKVADGKKPPKEKNPRKTPWRNEPPQLRDDLYRAFGVDLTQVPGINTLTSQMLLTEVGPDLSRFPTAAAFCSWLRLCPDPKISGGQVLSSKTRPTKNRAALALRMGAQGLHHSQSFLGDYFRRMKARMGTPKAMTAAAHKLARIVYHMVTTQQEYDATVFQEQERRTQERKRAKLCLQAKELGLQLVPLAVP

SEQ ID NO: 311690 - protein, 347 aa, unidentified
MVTLGSDSHKQSHTLVAVDENGRRLAELRVAATQAGHVQALVWARQWPERRWAMENCRQLSRGLERDLLTVGEQVLQVSPKLMGRSRRAGRELGKSDPIDALAVARVALREPHLPVARLEGRSRELKLLVDHREDLVGERTRIQNRLLWHLHELEPGWVIASSGLTRGVVLEEVARRLQARHEVVAEIARELVERMAELTASVNQLQRRIEALADDLAPSLLALPGCGGLTAAKLVAETADVRRFHSKDAFAMHNGTAPIPVWSGQQQRHRLNRGGNRQLNVALHRIAITQLRLGGQARAYIARRMSLGDSKTEAIRALRRQLSDEVYRRLRADVQEPVSESAALAA

SEQ ID NO: 311691 - protein, 339 aa, unidentified
MKTYAGIDLHSSNNYTAVIDEHDQRLYRKRLPNRLDAVVSALKPFKETLEGVVVESTYNWYWLVDGLKEKGYKLHLANPSAIKQYEGLKHTDDQWDSFWLAHMLRLNILPEGYIYPKEERPVRDLLRRRLLFVRHRTSHILSLQSMISRNLGTQMPGNAIKRLEHGDAEILFNHPHLVLAAQSSIAVIRFLRKRIKLIEKEIKSHITLREEFSYLLTIPGIGDILALTIMLEVGDITRFPKVGDYSSYCRCVKAERLSNGKKKDENNRRNGNRYLSWAYVEAANFANRFSPHAQTFYQRKMAKTNGIVAIKALSNKLARASYYIMRDKVAYDADKLFRK

SEQ ID NO: 311692 - protein, 349 aa, unidentified
MRCYQPPADSRFYAGVDLHARSLFLGILDRAGQPCFARNLPAAPQPFLRAVAPFRDGLVVGCECMHCWYWLADTCRDEAIPFALGHAWAMKAVHGQKTKCDRHDALAIARLLKGGNFPLAYAYPKQRRGLRDLLRARLRLVRQRAQLYGHVHTARRQANLPAVSNDVKYKSKRGAITADVADPFVRRRVETDLALLEPLDTTIRRLEAEIEDAAQQHYPTELAVLQSTPGVGVVLSLTILLEIDAIDRFDTRQQFCSYARLCGAVQTSDNKRVGMGNRKAGNAWLKWAFSEAAVLAAQKDERIGAFLERLASRLGKPKAYSALAHKLGRAFYHMLHTKEVFDVQRFVRH

SEQ ID NO: 311693 - protein, 356 aa, unidentified
MEYIAFDAHKRYTQVSVETVDGARRYEGRIAHTRGDLQRFLETRERGSPVALETVGNWYWIVDEIEAAGQVPQLVHARKAKLMLGMVNKTDKLDARGLNRLQRTGTLPTVWIPPGALRDQRDLPRTRMVLTRERTRLKNRIHATLAKYGLRCEDASDLFGRRGRRWLQTALPVLPPHSRYATECLLEQLEVVTAQILGFEQRLRTVFAPTPELQLLRTLPGVGWVLAVVIWLEIGDIARFPSAAHLAAYAGTTPRVHASGGRIRYGQLRADINRYLKWAFIEAASTICLHRQVRPHRHVSRLYARIQQRKGHPKAVGAVARHLAEASYWILTKREPYREPAARPASSTEEPARGYS

SEQ ID NO: 311694 - protein, 431 aa, unidentified
MAKVITFEQVNARAAAIDIGAEKIFVSPDGIEVFIYQTFTADYRRCVSDLQLWGIERVCMEATGVYWIALYELLEQAGLEVCLVNPKEVKQVKGRKTDPKDCRWIQKVFSAGLVRQSYVPSGKLKELRMMVREREDIISMGSAYVNKMQKCLELMNIKLTTVLSQIHGASGIRLIEAIIDGERDPGKLLLLCDSRIIDNKAEKVIKALEGNYNESWLFLLAQNLYMWKLHQQHIITIDKKIEELLDELQKGKSFVEGKVAPKLVRHHQPKITDLHQKLLNIYGVDGNSLSGVNDYTLLRLLGEVGTDMERFPTIKHFVSWCQLAPICNQSGKMQRRIKMRNGSKAGQIFRSIAQGLLNSKHIAIGAFMRRLKAKKDSKIAIKAGARKLAEAFYNLLTKGAAYVEQGVAKYQQQIQQRERGRNLNCVKVNNH

SEQ ID NO: 311695 - protein, 410 aa, unidentified
MDVVYARCCGLDVHKASVVACVIREDGQETRTFRTMTRELLQMADWLAERGVTQVAMESTGVYWKPIFNLLEDSFTVLVVNAQHIKAVPGRKTDVKDAQWIADLLRHGLVRGSFIPDRPQRELRELVRERRRLIQNRAQVVNRLQRVLEGGNIKLGVVVSNVVGKSGMAMLHALAEGQEDPNVLAELAQGSLRDKIPALREALEGRIGLHQRFLLQSQLRHLDFLNAEIARLDEEVVQRMHPFEEAIQRVDAVTGMGRRNTEDVLAETGTDMSRFPTDKHLCSWGKLSPGNNESAGKRKSGRTGKGNSWIKTALTEAARAAGRAKKGYLGAQYRRLAARIGAKKAAVAVAHSILTIIYHMLKHGTTYHDLGDNYFIQRQSNKALLAAVKKIQALGYVVQLRPADNAEAFS

SEQ ID NO: 311696 - protein, 410 aa, unidentified
MRIIALDVHRSFAQVAILENGKLRDAGKIDLDRNRLLQFAKKLKSDDEIVIEATGNTSAIVRLLSPFVGRVVISNPILVRAIAWAKVKTDKIDAATLAKLHASGFLPEVWMPDEETETRRRVTAERTQLVSQMTRLKNRIHSVLHANLIPPYKGVLFSKRGRAWLEAQPLSEDQRRVVLRHAGELDRLGAELAEVEKNLAQKALDEPLVKRLMTIAGVNAIIAISVLAAIGDIQRFSSPQKLVSYFGLNPRVRQSGDRPAYHGRITKQGRAHARSMLVEAAWVISGAPGPLRAFFIRIKDKRGKQVAAVATARKLAVIVWHMLSKNEDFIWNRPALFQWKLRKLDLAAGNPSRRGGKQKGPAADYSKKSVRDSEREMIGDAEEEYRRFVATWKTQSPKGRSGAINEVRRS

SEQ ID NO: 311697 - protein, 365 aa, unidentified
MSHYKIGCDAHRRYSQFAILDHEGRFLQQVRVNHTPGAIRDFLEDYPPGTPVALETVGNWYWIVDEIEAAGCVPLMAHAAKAKVMMGNVNKTDNLDARGLATLLHLGSLPTVWLPPSEIRDERELHRTRMALSKIRTSLKNRVHSTLAKYALSLDTDSDIFAPKWRPELTQACNALPPETQRCMQQHLSALDHVQGQIKDLEERIKQRVEATPNIQLLKTLPGVANILSIVIEREIGDVNRFPSSAHFASYSGTVPTVKASGGKIRYGRLRKQSNQYLKWAFIEAANVVVRQRRHANWRVKHVTILYERIRQRKGHSIAVGAVARHLSEAAFWMLRKQEIYKDPARQVVSRGKGQRGANMVKVKP

SEQ ID NO: 311698 - protein, 341 aa, unidentified
MKYVGVDLHKQTISVCVMAEVAQKRKVEQRRSLLCKDVQAIRRFFEELGTFRVVVEATSSYEWFLLLIEDLADRCVLAHPKKLRVIAESKHKSDKIDAQILAEFLMLDMIPEAYRPSPRVRQHRVLVRHRNRVQRQITKMKCQLRHKAAGYNADIVGLFSTRGLIHLAKIAMSHADRFECRALQDQLEFLQQQLKAADQELRVFAQTGPVAEREARAILATVPEVGPVTADVILSETADVRRFRGAKRIVAYAGLDPAIRESAGKSKQLSISKEGSPLLRWALIETAWRLVRKTTRWRRLFERLWASTGHKKKAIVGVARRLLCVLYAMLRDGRAYRLAAH

SEQ ID NO: 311699 - protein, 343 aa, unidentified
MQSISTIGLDIAKSVFQVHGVDAAGQVVLRRQLRRRHVLAFFEKLPPCLVGIEACASSHHWSRELQALGHTVRLMPPAYVKPYVKRQKNDSTDAEAICEAVTRPNMRYVPTKTVEQQSCLMLHRARHLFIRQQTAVINSIRAYLAELGIVAPVGRRGVEQLLQVVADRADRRLPEVARECLAALGSQLRALKAQILEFDRRIIAWHRSNATSKRLDAIPGVGPALATALVASIAEPGAFRSGRDFSAWVGLVPKQNSSGGKDKLGSISKQGDRYLRSLFTAGALAVIRYAKIHGTGHRPWLTGLLARRPTKVAAIALANKLARMAWAMMARNERYREPAALAA

SEQ ID NO: 311700 - protein, 341 aa, unidentified
MQQDVSVVGIDLAKRTFHVVGMDATGQILFRKRLSRDALMPFIRQLPPVVIGMEACGGAHYWARRFREHGHTVKLMAPQFVKPYVKSPKNDTRDAEAIGEAVTRPTRRFVPVKGLAQQDIQSLHRARERLMKVRTALINELRGLLSEYGIVLPTSVRKFRTAFIAKLEAERSKLTELSHELFTHLFDEFLEVEKRLVYYDEKLTTMGRTHPECQRLLPIPGIGPLTATALVAAVSDAEQFHNGRQFAAWLGLVPRQHTTGGKARLLGISKRGDGYLRKLLVHGARAVIQWVGSKTDRRSQWIRQLVERRGKNRTVVAVANKNARIVWVLLSRQQDYRPVTT

SEQ ID NO: 311701 - protein, 408 aa, unidentified
MLFVGDDWAENHHDVEVQDEHGRAIRTARLPEGVDGMTRLHDLVSRFLPDDADPSQVLVCIETDRGPWVRALIAAGYQVYGVNPKQAARHRELLSLSGAKSDKADAHTLADMVRTRRHQLRQVAADSDLAEAVKVVARAHQTLIWERTRHTLRLRAALRDYFPAALQAYQALTLTGSDTLELLAKAPTPAAAAKLTITQISAALKKARRRDIPAKAAAIQQALRAEHLGQAEIVATAYAATIRATIAVLQTLNAEIRTLEGEVEAHFGLHPDAEVYLSQPGIGVILGARVLAEFGDAAQRYADAKSRKNYAGTAPITRQSGKSKTVHARFVHNDRLVDALHMQAGMAILHDAHVRAYYNELRTREIGHNAALRQIGNRLVGILHGCLKTQTHYDQTTAWAHRAQPLAA

SEQ ID NO: 311702 - protein, 418 aa, unidentified
MKIIKTKKQRIVNGKALIVTVDISKDKHFGYWRCPDGTDVKPFSFPNNGTGFFEFWERISRAKEIHRLDEIVFGYESTGPYGEALVHFMKARGARLVQVNPMHTKRVKELQGNSPNKTDQKDPKIIADIIELGRALTVVIPEGPAAELRRLTQARERSTERHTALVNQLQSLLAIIFPEFLQVLNNVKTATAQYLLKHCPTPQGLVAYGLDNLTKTMWDVSRGRLREDRAKALYEAAECSIGVVEGQASILLETEAILAAMEASEKFTEELEKEMSHHLEQIPYSNCLLSIKGIGEVTAAGLIGEVGDFRKYSTLGEIMKLAGLDLYEVSSGKYRGTRRISKRGRPLMRKLLYFAALRAVRSDGLMGHQYQRYLDRGMLRTKAVIAVARKLLRIIFAIVRDNGVFDYSRTSYQFQEAA

SEQ ID NO: 311703 - protein, 391 aa, unidentified
MTIFAGIDIAKEVHWVCAVDAQSRVLLDRKLLNKPTDLDQLVSELNAMGEPVRIGIDVLGGIAGLAQAVLLEAGFELVHVPGLAVNRARQGTVGGESKSDPRDARVIADQVRTRGDLRKVVADSELDVEIRLLVSRRRDLSEEQTRRLARMHDLLVGIFPELEQAIDLTSKTALTLLRRYVTAAELRKASAKSLAKQLGGLAHRAFGQELIATARACAERQTIALPGERLSAQIIKDLANEALVAIDRIDALEDAIEQRLAGHPDAALIRSLPGMGVVLTAEFIAEAGRIDRFKSSDALAAAAGLAPVLKQSGKSRWLKRANHGDKSLKRVFYQSAFASLRHADSKAFYTRKRREGKRHHQAVIALARRRVDVLWAMLTRRQPFLARTEMA

SEQ ID NO: 311704 - protein, 311 aa, unidentified
MTDDTIGIDISKATLDIHRLSDGKTMSFSNCPAGFKALSRFCAKTAVARVVYEATGAYHSGLERALGAHLPLVKVNPLQARRFAQAQGLRAKTDAVDAKMLADMGNAFALEPDEPAAEIQHDLKELRSFRSGLIKDRTGIMSRMKTQTLSITRRQSKARLAQVDKQIAEINAEIERLINSSDTLAHSMKILRSIPGVGAICAATILIEMPEIGSMDRKQVASLTGLAPMTRQSGQWRGKSFIQGGRKIVRDALYMPALVAMRHNPDFKAKYQALIKAGKPPKVAITALMRKLIELANALIKADRNWVTKGA

SEQ ID NO: 311705 - protein, 427 aa, unidentified
MKEQSRTIVGIDWSADSHTCYDLQTDKSFKITDSVEGYEKLLKNYPEAVFVIEEANNRIGDYLLINNREVYVLPPCRSKEARKYHFSSGTKSDGLDAKAIALTFKEHPSYCLKARYSKVGVKITKLVTAYNIVSKTHSQQCNRLYSLLLRYFPEYLHIMDKQYRSDTSLRILSVCPTITELKKVSNEELRKILNKENYRMTSILKNKLDRIRSEGISWEDTSCEGKLILLLVNTLLSLRKGLEVLKKEMEKTLKNSPYRIILSIPGVKAVIGSYIVKAYLTHDFKSYQEIQKYAGTAPLLFQSGRKSIMLMRKKCDNDLKGMIHMAAFASLKTCGWARNYYRRKRKEGKTYGHALRALGNILLKIAFSMLSKMKEYDETLFLNAKGIKTTQLNDTTFSETFPYPEYSQDAQLSLAATKDVVDNLIVT

SEQ ID NO: 311706 - protein, 403 aa, unidentified
MKHVIAFDISMGKSYMVIYNAQKQCVFESEIKHSKPEFKKLQEKIHELTDKTGELPEIVFEATGIYSRQLERLMQDNQYTYCLLNPLEAKLQCDSLRIHKTDRSDAHRLALTHFTATRRVFTGTDNLFYQLKSLSRLYSELDSELSIIRGRMHKVIQLTFPELERMFTSKSDLFLNFVQLFPHPDCILGLSKTIIKNRIRANTNKKISNITAEKKAIQILEIAKTSYPAVSQNDVLCDQLKLYARRYQELLHQKECCINKMVYIAKQRAEYDIILSLPGIGPNTAVRLMAEIGDITRFNNNKQLNAFAGIDIRRFQSGKTFFKDKINKRGNKHLRKLLFLIIQNMIKQRRYGQNHIVEYYDKLKTQPYNKCHKVASIACVNKFLKLLFHLITHDIHYDYRLTA

SEQ ID NO: 311707 - protein, 334 aa, unidentified
MLDENTGELTERRLDHESGEAHAFYQSLPKPVRVGIEATGPMQWFERLLAELGHELWVGDSAKIRASDLRKQKTDERDAQLILNLLLANRFPRIWVPTPAERDLRQLLWHRHKLVRLRTMLGNQLHFLAMNQGLCRKKKLFTKRGRGELGQLRLGPWASRRREELLRWLDQLEPSITELDRAVLEEARRRTDAARLMTHPGIGPVNALAFVLTLGPVSRFRRSKQVVSYLGLNPSEHSSGGRRRLGAISKQGNTLVRWLLIEAAHHTVRFDSALRQDYQRLKFRRGHGIAKVAIARKLAVRLYWMLRSGADYAQLVRMQGSPGATLVNASSSLG

SEQ ID NO: 311708 - protein, 415 aa, unidentified
MALKIVYKICCGIDVHKTFVVACIASTDSNGVTIYEHHRFSTYTKGLKDLLQWLLKHNCKDVCMESTGKYWIPVYNVLENDCSIVLAHPKYVKAIRGKKTDKKDAKWIADLFKHDLVAGSFMPPADIRQLRDLMRYRFKLTCFQSSEKNRLQNCLTVSNIQLGNVVSDTFGKSAQAILDKLLENPADTSFDLEPLVYKSLKKKLPELRDAIDGYITPEQADKLKVIKAHYENLESRKAELEELILALAAPYQQELAILQTAPGIRSDFTAIGIISEIGTNMEAFPSAKHLCSWAGLTPTNNESAGKKKSVRVSKAGCYIKPLLVQCANAVVTSKKHPEIRNRYLRIKKRRGHRKAIIAIARMLLTALYHMLKNGENYNAELYRKSDLPPVDREITVEQAIIIARNQGYKIKSATA

SEQ ID NO: 311709 - protein, 386 aa, unidentified
MIVIGADTHKGSHTLAAVDEGTGRVRGSRQIKAEDAGHLAAVRWARELDPERVWAIEDCRHVSGRLERALIAAGERVVRVPPRMMGASRRGERTPGKSDEIDALSVARAVVKDGVERFQAAYLDQRAMEIRLLCDHRQDLVGERTRAQNRLRWHLLELCPELERTLKRGSLEQTRSLERIDRKLRRSAVSARVRIARDEIAQIRTLTRQVDALEQELLELVAVHRPQLLAETGCGTITAAILIGRTAGVERYRTDASFARQAGVAPIPASSGQRDQLRLDRGGDRQLNRALHIIAISRARYDPATKEYLARKQAEGKTKKGALRCLKHFLARRFHRLLSLPAEPIPDKPEQDDRAGPAEIPAHPLRRDSVDTTITATAAGRMPCVS

SEQ ID NO: 311710 - protein, 357 aa, unidentified
MKIIGVDLHTRQQSIAMLDDQTGELVEKELPHEGDQVRNFYAGLAKPVLVGIEATGSMHWFLRLLEELEIEFRVGHPAKIRAADPRKQKNDRRDARLLLTLLVENRFPAIWMPSAEQRDLQILLRHRDQFVRIRTRVQLSLQALALSHGLRRGHTLWTRGGQHTLRTLPLAAHASEQRDTLLALQPQLQSPIDALDREVEKQAQQRPQSQRLMTHPGVGPITALATEVFLGNPRRFADGKAVASYVGMIPSEHSSGGRQRFGRISKQGNSLLRFLWGEAAIHAVRRDSELRRFYRRKLVQKGMGKARVAAARKLGIRLWIMLRDEIDYAEFCRRGRQRRQGSGAACAGMPAAGQWSN

SEQ ID NO: 311711 - protein, 347 aa, unidentified
MNFYHSTHRHYCGIDLHARSLYVCIIDQQGEVLLHKEIKAQPKPLLALLEPFRDDLVMGVECMHCWYWISDLCEEHGIHFILGHALYMKAIHGGKTKNDRIDSFKIAMLMKGGNFPLAYVYPKAMRATRDLLRRRTRIVQHGAMLKAHVVNTTSQYNLPPNKANLKDIGAREQVRATFADRDVQHNINLDLAIIECYHRELSRLEEHLERQAKQHDPASLSVLRTIPGVGRILALTILYEIGDIQRFETVQKFASYARLIKCKAESAGKVYGTQGNKIGNAHLKWAFSEAAVLYLRGNDKAQRYLQKLQKRMNKAKALSALAHKLGRAAYFMLKHQRVFDEQRFLKG

SEQ ID NO: 311712 - protein, 461 aa, unidentified
MAHPMVQVKPSRRQRDMSPVHPNAAAIDIGARMHVAAVGPDRDPEPVRTFNTFTDDLHRLADWFEQCGVKTVVMESTGVYWIPIYEILEQRGFAVSLVNARDAKHVPGRKTDVSDAQWLQRLHEYGLLRSSFRPQGEIATLRAYLRQRERLLDNAAAHIQHMQKALTQMNLQLHHVVSDITGVTGMRIIRAIVNGERDPDVLASYRDRGCHASVETIRQALIGNDREEHIFALSQALELYDTYQAKVVECDKRIAAVLKRLKEASPTPADPLPAARHKGRSSNPLTFDVREALHAVIGIDLTQIHGLGPYLALKLVGECGTDLSAWPSAKHFTSWLGLAPHNKISGGKVLSSRTRRSGNRAASLLRLAAVTVGRTDTALGAFYRRLSARVGKAKAVTATARKIAVLFYNALRHGMDYADPGASYYEERYQQRVLANLQRRAKSLGYVLQQADTAPAAVGVS

SEQ ID NO: 311713 - protein, 356 aa, unidentified
MIRIAKAKSTAIATLGVDIGKNTFHLVGLDKRGAIVLRERLSRSQIEIRLANMAPCLVGMEACVGAHHLGRRVEALGHDVRLMAAKYVRPFCRKQKNDFNDAQAIAEAVTRPTVRCVALKTPAQLDLQALHRVRQRLISQRTGVINQIRAFLLERGIAIRQGWHALRAELPRALTMTDRLTPRMLHIVEDLAGDWRRLDERLEAVSTEIAQLAHADEGAMRLMSVPGIGPIISSATVAGIGKGDVFDKGRDFAAWLGLVPKQTSTGGRPILGRISKRGNRYLRQLFVQASRVVLLRPQTWERYGLKHWIDAAAQRLHYNKLAVALANKLARIAWGVLHSGRTFETHRENGHAPQPT

SEQ ID NO: 311714 - protein, 329 aa, unidentified
MCNVGIDVGSKELVMVIRHKGKNHKARSFNNTPEGHAQIVKTLSSKKGEVRVCLEATGIYHFDLAVALSRSNTLKVMIVNPKAARHFAVALMTRSKTDQVDANVLAQYAEIMPFEAWQVPSDKVLELRAFSRRIAALTKLKVQTKNQLHALQSSVSVPEIILEETQASIEFFEMQIQRLKEHALTLIGSEETLQRTLEIITSIKGIAESSAIQLLGELLILPKDMNNRQWVAFAGLDPRHYQSGTSVSKKPRISKAGNSYLRQALYMPALCASRRDPYVSAYYQHLIENQGLKKMQAVCAVMRKLLHAIHAMLKNETHFDSTRFFNMAA

SEQ ID NO: 311715 - protein, 398 aa, unidentified
MEVMDAAGRRLSAAKLPEGIAGMARFHAMIAAQLDPDADLAAQAGQVLIGIETDRGPWVQALIAAGYRVYAVNPLQAARYRERLGVSGAKSDPADAHLLADMVRTDSHQLRVVAGDSDLAEAVKVVTRAHKTLIWERTRHTLRLRSTLREYFPAALAAFEDLTDADTLELLAKAPDPVSAARLTTTQIMAALKRARRHYRDRRAGEIQAALRTEQLGQPAVVARAYAVAVRAQVAILGVLNEQINLLQEQVEAHFGQHPDAEIYTSQPGLGQILGARVLAEFGDDPTRYGDTRARKNYAGTSPITRQSGKKKVVLARYVHNDRLLDALGGQAFAALTRSPGARAYYDKQRDRGLGHRAALRQLANRLVGILHGCLKTGTRYDEATAWSHAQQDQQVAA

SEQ ID NO: 311716 - protein, 356 aa, unidentified
MEEIYVGVDLHKTQFTICILINEEVLDQGQKYPMNDKGYHEFASYMKDLSQLRGMGVSIAIESTANARFFRDLMVKEGFRVTVVNTLRFKVVNLSTKKTDKNDARTLAEFLSKGMLPESYLCSAKSEGLRRVLKSRALMVQNSVALKNQVHAVLLAYGKITKTAQFQSKASRKRLLESLPPEIKDVVGVICGTLETVEQQKKDLEKRLREITSDDENVRLLMTIPGIGVVNACTIRAYIDDIGRFQSFKQFSAYCGLVPWVQASNETYKIGRITKHGPPELRTAIIESVIAMVRMEEKTGKYVLMEQYKQMKAEKSSGKAIVATARKLSRIIYVMLTSKTAFNPKMLINRLEKSVV

SEQ ID NO: 311717 - protein, 351 aa, unidentified
MEYIAFDSHKRYTLACVEKLSGGQLCELRVAHERGSIRQFLSRWAVGSPVAVETVGNWYWIVDEIEEAGMVPRLVHARKAKRMLAMVNKTDKLDARGLNRLQRSGTLPTVWIPSRHLRDQRELPRTRMVFSRMRTRLKNRIHATLAKYALSVQQVSDLFGKKGRELLQQVLAQLPPQTRFATERLLEQLDTVDRHIQLFEGRIHEVFEPAPELALIMSLPGVGFILGIVILLEIGDVQRFASAEHLASYAGAAPRVNASGGKVHYGQVRQDVNRYLKWAFMEAANVICLNHRRFPQRHVHRLYERVALRKGYQKAIGAVARHLAEATYWILKKGESYREPGTQKKVSSTKG

SEQ ID NO: 311718 - protein, 372 aa, unidentified
MNQDSRLFVGLDVSKLKISVAVADSERGGEVRFFGDIPSDPASVSSIVKKLAKRGAKLHFCYEAGPTGYELYRQLIEMGHDCVVVAPALIPKRPGDRVKTNRRDAVSLARLHRAGELTPVWVPDRGHEAMRDLVRARDAAQEAQKRARQQLQSFLLRHGRIYPGRTVWSQAHMRWMSTLKFEHPAHFIVLKEYCQAIEDAEVRLRRLTDLITETVKSWTMGPVVHAYQALRGVSVMAVVVFLVEIGDIRRFENPRQLMAFLGLVPSESSTGEHVKRGGITKAGNGRARRVLIEGAWTYRFPARVSRTKQRQLTGLPRAIREIAWKGQVRLCARYRAMLAAGKHKAVTITAIAREMGAFLWAIGQEVQPAAQA

SEQ ID NO: 311719 - protein, 410 aa, unidentified
MELLHRRCCGLDVHKETVVACLRLVADGKVTTEVRTFQTTTADLLRLSEWLAANECTHVAMEATGVYWKPVWHILDDGEFVLVLANAAHVKNVPGRKTDVNDAMWLAELLAHGLIRASFVPDTQTQEMRNLMRTRKQLVREQSSHVLRVQKTLEDANIKLDSVLSDLMGKSGRAMLEALIAGETNPAKLAGLADRRVKASPEELREALRGRVTKHHRFLLRLHLNQIDALDAAMATLDAQVEANLGPFRTAVELVTSVPGVKNLGAHVIVSEVGIDMSRFPSAEHLLSWACICPRNDESAGKRRSNRMRKGGAWLKTTLVQCAWAAVKKKDSYLQAQFYRIKARRGPQKAIMAVAASILTAIYHMLKDGTMYKDLGRDHFDRRSTDRQKKRLIKRLTDLGYAVAIKPLAA

SEQ ID NO: 311720 - protein, 388 aa, unidentified
MPVAAANRSEAPTAIRTDLGAIFVSLELSRSKWLITSLSPGGGEKMAKHSVAAGDVAGLLDRFAELNRKAEARTGRCFPIIVIQEAGLDGFWIHRVLQAEGIENHVVDPASIATSRRRRRAKTDKIDGEALVRALLAYKRGEPRVCAMVRVPTPEEEDRRRLSRERKALTNECVRHANRIKGLLFAQGVSGYEPLRRDRRKRLEALKTGDGRPLPAHLKAQIDRELDRLELLLEQIKAVEAERDAMLAAAEAVSPAPAMLLNLKGIGPEFAAVLWSEGLSRHFDNRRQLAAYAGLAPTPWQSGRIDHEQGVSKSGNSRLRTTLIQLAWLWVRHQPDAALTLWFRDRVKQNGGRLKKTTIVALARKLLVALWKYLNAGVVIEGAVMKTA

SEQ ID NO: 311721 - protein, 320 aa, unidentified
MTNYSTFIGIDVSKEHLDIHILPSNKRFRVDNSKSGCAKLCRQFAKLEKPAAAVEASGGYERLALRMLSAAGIDSFCLDPVQVHAYSRSRLQRAKTDPIDAEMIACCLMQNHEIVRPHIYDPVTEELAELVAFRTKLIREATKLTCRIDQAEASLVLRILKTQKRQVKARIALLNKAIDDIVENTDEFAQKGKILRSMPGVGPVLCFTLLARLPELGKLEGRKISALTGLAPFARESGKSKKPGRCQAGRSDIRSVLYMASLSAMRMNEHPLRLFSERLTKSGKPFKLVIVAVMRKMITMLNAMIRDMKNWQQNQLQKAL

SEQ ID NO: 311722 - protein, 387 aa, unidentified
MIYYIGIDISKYKHDFCIISNTGEVIVENDSFENNKKGFQYFVELLKPYDKSKIQIAFEATGHYSLNLELFLTNQEFSYMKINPLVVHQFLKARSLRRTKTDKADCLTIANYLMSVSYKPNSSRLYHIYTLKSLCRSREQLIKERSKFYVLLTNELDYTFPELKPFFNNSFSATLLYILEKYINKEHISLMRDFESISKTSHGTFSYAKFAKLKELAKNSVGHHDNNTDLLISTYVSIINHFNDKINPIEKQISTIIKELNPKMLSIPGLGEISAATILSEYGDISNFSSPNKMLAFAGLEPSIIQSGTLENNGKMVKHGSGHLRYSIMNTAMIILRYSPTFYDYYLKKRSEGKCHRVALSHVCKKLIRVIYCLEKFNINFDPSLLK

SEQ ID NO: 311723 - protein, 372 aa, unidentified
MAECIMVGCDLHDKTMLLKIAEGRGRALKRSYDNNPSGRKAMIAALRKRASEACGAKIVFVYEASCQGFGLHDELTEAYIKCYVLAPTKIAKSVKQRRDKTDEKDAQRLLELLRGHVLAGNELPTVWVPDPQTRDDREVVRARLDATEKLTCLKAQVKSLLKRNGLKKPSGLGKGWTGKYRRWLRELLGKDSALSPGGRVGLGTLLRQMETVEQEIRVLDKEVMSLSNTERYTKLAGAMTQEKGVGVLTAMVFLTEMGDLSRFSNRRQIGAYLGLAPSSGESGENNDRKGHITHHGNARVRKALCQATWSRVRSDAGENDVYKRIVRKNPKHKKIAVVAVMRRLAVRLWHIGCNVEVRAGSMFSQKKRAAVV

SEQ ID NO: 311724 - protein, 417 aa, unidentified
MNSLPETIPIKRYIGIDSHKHYVMVGGMNAQREWTLRPRKVQMPRFRAWAAQNLKAGDAVVLETTANVWDIYDIVSPMVTKTVVANAYKVRQIAEARVKTDKEDVKRLITLLIADIVPEVWVPPMHVRELRSLISFRWRIGKQLTMSKNRLHSVVQRFNLRPPEGQLLADKNQTWWNEQEFSALTGFQVQLDLEIITHLEAQKAKIDQKLAELSNTAPWSDEMVYLMQIPGFGLLTSMILLAAVGDISRFSHSKKLVGYAGLGAGVHSSGQKHQEKSITKQGRKELRWILVQAAWAAVRSDPYWMAQYKRLSKIKHPNKAIVAIARRLLVSAWHILTKHEPYRRADDETIAYKMMIWSQRMDEKALRGLSRQQFIKYGLLRLGVGQDLTRIERKGIPRRIAPTDEVLKLLPDLKPPG

SEQ ID NO: 311725 - protein, 339 aa, unidentified
MKKSDCPTYLGIDVSKGSLDCCLYNGTEHKTRSFNSNKLSTVQKIISHFKISPVSCRVVLEATGVYHSAAFIGFTSQDFDVAVENPLRIRSFATMKNLLRTKTDPVDAKTIAEYGFINKPVSTKPKEAYQCKVVARLKLIGFFKKLIAQNRNYIEALNNNSFECNATSLITHVKNEINHLNVTINEIKSDIEKILTKHCPELYKQYKSIPGIGPTVAGAIICFYGDFSGFSNSKKAAAFAGLCPKVCKSGSSVDKKGSISKKGNSMLRTLFYMAALSAARCNDTCQEVYLRLRQAGKPAKVALIAVANKLLRQAMALARKGESFIENYKEISPCAAKTT

SEQ ID NO: 311726 - protein, 364 aa, unidentified
MSERICFVGLDVHARKTAGAAVQLGSGEVFKAQIPGPPVNAIDWIQTLPGPVRAVYEAGPTGFGLARSARAAGIEMMVCAPGAIPRQPGDRVKTDTRDALKLARLLAAGQLRPVVVPDRELEALRDLVRCREDLRGDLMACRHRISKLLLRRGLLYPGPGAAWTRRHASWLGTLQFTDPLLQLTFAEHLSCHEVLLARRDRLDRLIAEQATVGPWAPLIARLRCLRGIDTLTAIGLLTEVGDFTAFAHPRRLASFIGLVPSENSSGDRRRQGSITKSGSSHARRLLIEASWHYRRHPAMSVDLRRRQAGQPPAAIDTAWRAQLRLHRRWTHLDHARGKKRTTVAVAVARELACFVWEIANQPDT

SEQ ID NO: 311727 - protein, 346 aa, unidentified
MQATIIGFDIAKSVFQIHGEDASGKKVLTKRLKRDATEAFFASLPPTVIGIEACGSSHHWGRLLSAMGHEVRLIPPGYVKPFVKRNKTDARDAEAICEAIRRPSMKFVPVKSVDQQSGRALENARGMLVRQRTQLMNAIRGMLAEVGVIAAKGQFGFNELRDLVDNADPTIPASLLPALRPLLEQWRSAGEAAEGIETQIVARAKKDPSMRLLTSIPGIGAVSAHAICIAIGDGKRFSCGRDFAAWIGLTPLVYASGVRTRVGNISAKGDSGLRRLLVLGASTVVRYAKTRAAKTEQDQWLHGVLARRPVKVATVARAAKNARVAWAVLTSGTPYQAKPLAAGGVA

SEQ ID NO: 311728 - protein, 315 aa, unidentified
MTITSEECVGIDVSKDKLDVAVLGQKVTTEVANTKRGINALVKRMHKLIPKLIVVEATGGYEEALVLGLYEAGLPVALVSPQRVRQYAKARGLLAKTDKLDAQNLAEYGKNIQPRLFVAKSEAGRRLSALVGRRRQLEEMRKAEKNRLRTAYLEMKHSIQTVIDCLEAEIERLDEEIRNFMKEREDFGEQEKLLRSAKSIGPVTAATLLADLPELGRLDRKQIAALVGVAPMNHDSGKKRGYRKTKGGRPEVRSVLYMSALSAIRYNPVIKAQYEQLVTRGKEKKVAITACMRKMLTILNAMMRDQQPFRAIPMF

SEQ ID NO: 311729 - protein, 415 aa, unidentified
MEIRYPRVAAIDVGKKEIAVAVRTPGDRPGERTQQIRKYKTFYPVLRQMVAWLVEQGVTHVAMEATGVYWKPVFHALGEVDSLEVLLVNARHVKNLPGRKTDAKDAKWLAQLLECGLLRGSFIPPKDIAAIRELTRYRKKCIQARTRELQRLSKVLEDGGIKIDSVASSITTLSARDMVEALIAGERDPKVLAEFARGVMRKKIPDLTMACAGRFGDHHALLARMHLDHIDQLTTMIDGLNTRIEEVVDPFSEQLRLLKTIPGIGEGAAQVIISEIGVDMSRFPTSAHLASWAGLCPGNNESAGKRKSGRTGKGNAEIRDILTECAWSASHTGTYVGAQFRRMHRRFGKKGGGKAAIAIAHTLIVITWHVLHDQVEYRDLGSDYFTRYDNPDAKKQRLIRELQALGHKVTVEPAA

SEQ ID NO: 311730 - protein, 391 aa, unidentified
MICVGIDVAKDKHDCFILNSEGTVLADVFTIANNRIGFETLLSRIQSCSQGESKIKVGLEATGHYSYNLLGFLLDSGLATYVINPLHTNLYRKSLSLRRTKTDRIDARTIAMMLMSDVDLKSYSNTAYHNEELKSLTRYRFDKVKERAKLKSSVARLVNILFPELEKLVSSLHIAVVYALLSNYPGASYIANANTEELAETLCTASKGRYTKSKTAEIQVAAGASIGSKMPAKSMELKHTIALIRELDKEISEVESAIDKITSQMDSPIFTIPGIGRHMGAMILAEVGDFSNFASADKLLAYAGLSPSTYQSGQLQNCYAHMEKRGSRYLRYALFNAAKYVCLWCPTFSAYLEKKRSEGKHYNVAISHAAKKLVRLIFAMQRSGKAFLADY

SEQ ID NO: 311731 - protein, 351 aa, unidentified
MDTTRVAVDLAKSVFQVAVSSVPERIDQHQRLSRERFERFFAQRESTDVLMEACGMAHHWGRHLEALGHRVWLLPPADVARYRDGNKTDRADTVAILEAGRNEAIDPVPVKTLEQQALTSLHRLRSAYVADRTARINTVRGILREFGHAIPQGARTFVARARPALVDEELPEDLRVELGQALDEIEAFRQRARALSSRIEAIGDQMPEVQHLRTIPGIGVLTATALVAFVGEPRRFRSGRHFASYLGLTPKESSSGLRRRLGRISKRGNIYLRMLLTHGARSALLAAHRTDHPDALQLWALRLELRSGHNKATVALANRLARIAWRIWRDQRPYERLPEPGPLGRGGRQPH

SEQ ID NO: 311732 - protein, 315 aa, unidentified
MLPIIAQTVGIDISKATLDVYLHPQASARQFPNTTAGIAALMAWLAQGAVHRVIFEPTGAYHHRLERQLDNAGVPMVKVNPLQARRFAEAIGQRAKTDAVDAAMLARFGALDALQVRPMVSQTLSDMKELLVARRGLVKDRVAASNRNHVHRAPLLKQLADQRLRQVERQIAAIDAALRALCQADAELKARLDILVSIPAIGEVTALAMLIEMPELGTMDNKCVASLAGLAPVARDSGQHSGKRFIRAGRAHLRQALYMPALVAIRFNADMKAKYQALIATGKPPKVAITAVMRKLLILANALLREHRNWMSKVA

SEQ ID NO: 311733 - protein, 407 aa, unidentified
MSTSTDVFVGLDWAVHTHAVCIIDASGAVRDRFDITHDRQGLAELMRRLGRFGASVRIAIERPSGLIVDALLEAGHQVFPIHPNAVKASRPRYRSHGAKSDASDAYLLADLLRTDGHRWAALLPQSDSICALRALVRSRDDLVATRVALGNQLHSTLEAFWPGAACVFADITSPIGLAFLRRYPSPASAVRLSEAQLLRFCRTQHYSGRRSPADLLARLHAAAQGLTDKLTAESMAQVVRSLVAVLNPLVAQISDLTRRIERFVESLPDGQIIMSFPRAGHVCAAQILAEMGDVRERFSTLDQLAAEAGAVPVTYQSGNTRSVTFRWACNHRLRQAITCLADNSRHANEWARGIYVAARARGCDHPHAIRILARAWLRVIWRAWTDRKLYDPKLHLGALKLASDTGG

SEQ ID NO: 311734 - protein, 415 aa, unidentified
MEPIHKRVAGMDVHRMEHVVTILLEQEDGTVLNETRKFGGFKRDMRALVDWLRSHRIELVAMESTGIYWKSVFSHLEAAGIKALVVNAFHVKNVPGHKTDVSDSEWLAQLARFGLLRGSFIPPKDLRELRVVSRYRRKLVQSLTGEKNRLHKVLDDAGIKLGGVVSDIDGVCARKMVEGLIAGKTPAELSALGHGKLKSSDELLQASMDGDLSPRHRLVLSMALNHLRYLEQQVAQLDRYLIEAMKPYAWAWRLLQTIPGIDEMSAAMILIEIGVDMQRFGSASRLASWTALCPGNHETAGKRKSGKIRHGNPIVRYLLCEAANAARRTKTVFQAKYTSLAIRRGHKKTIIALAHKLIRTIYFVLTRRKPYHDTTVDYEAAIVARNAPRWIKALKKYGYWPKAAAANPATATAMV

SEQ ID NO: 311735 - protein, 318 aa, unidentified
MLNESFVGIDVSKDWLDLGWEPSGQSERLVHDEVAMVGLCERLARERPCLVVLEATGGLETHLASALAAAGLPVAVVNPRQVRDYARACGRLAKTDRIDALVLAAFARAIRPQVRAPRDDETLELGALLARRRQLIDMRVQEKLRLERASPVQRDSIKEHIAWLTERIARLDTDLTHRLRSSSLWRDQEDLLKAIPGVGTITRVTLIALLPELGKLNRREIAALVGLAPFNRDSGQHRGERVIWGGRAQVRRVLYMAAVAAIRSNPVIRTFYQRLRAQGKPGKVALVACMRKLLTIMNAMLKYNTPWNPNALDLEHSC

SEQ ID NO: 311736 - protein, 341 aa, unidentified
MSNANAYIGVDLHKKICFITVMDEAGKIKRQTEIKNEKNKIFKFFKRYSSASVAVESTMNWMPFYENLESMGCNVVLSNPLATKAIAAARIKNDKVDSRVLADLLRTNFLPTAYIQPREIRDLKELVRQRMNYVNMRTQIKNQIHSVLFKSGVSHNFTDLYGKAGMEFLKTLELRDVYRQQLNWHLTALSNISIQIKEMSDIIEETAQADYDCRLLMTIPGIGYFNALLIKSEIGDISRFTNANKLCSYAGLIPSTYASADKVRHGRITKRGSKWLRKALVDSVTSGCRHEGRLAYVYRKLKKSKGTGKARVATARKLCHIIFAMLSDKQPFREFTPVKQR

SEQ ID NO: 311737 - protein, 456 aa, unidentified
MKIPQSTIRLLTGRLVKILLNREVSTMKSNTQNAKIEAITEKTLVLGIDVGSETHYARAFDYRGIEYSKKPFKFSNTEAGFATFKEWILDLKERHEKDKVVPGMEPTGHYWFNLGKFLQDNEMKPVLVNPHHVKKSKELDDNNPTKNDRKDPKVIAGLVREGRYMIPYLPDGVYADLRTASNIRFQLQAELTRIQNRISRWFNIYFPEYKTVYGKPDAKSGMLILKAAPLPEDILTLGIDGVNQIWRDAKLRAVGKARAKTLIEAAEHSVGSKEGAVSARMEIRMLLEDYESRSIRLQEVMTLIEGLVKQIPMAEKLLEIKGVGIRTVSGFLAEVGDISRFNNPKELQKLAGLALVENSSGKHKGETTISRRGRKRLRYLLFEVAMSLVAKNPEFRELHNYYTTRRLNPLKKMQSLMAIAAKLIRVFYAMLTKGVDYDPKKMVSDIKRPAVYLQAA

SEQ ID NO: 311738 - protein, 421 aa, unidentified
MHVVYERCAAIDVGKDEIAVAVRMPGDGPEGRVTVKRTFRTFYGVMGEAARWLVSLGVTHVAMEATGVYSMPVYYALVEHGDFAKVLICNAAHVKNVPGRKTDYADAEWLAHLLECGLLAGSFIPPAEIKDARDVVRYRAKVVRQRVSEIARLGNTLQDAGIKIDSVAWSIATKSGRAMIEALIDGERRGPVLAQLAKGTMRAKIADLSMALEGRFGDHHALMCRLHLDHIDHLEAAIARLDARIEQMMEPFQCWRDLLATIPGIGQHAAAAVISEIGVAVAEFFPDDAHLASWTGLCPGNHQSAGKRRSGKPRPGNTHLQTLLVECAWAAVRHDGYLKSLFHRHVMKNGGYRSSTAKKKAIVVVAHAMIVIIWHVMVTGKPYHELGAGYFASLQDPERETRRLIARLQALGHTVTLDPAA

SEQ ID NO: 311739 - protein, 372 aa, unidentified
MPDVSSNAPADVRLWVSLDVHKLSIVAATLPPAGGQPEVHQIETTRVAIRRFVDRLGGPEGLAVCYEAGPGGFALLRVLTELRVACDVVAPSLIPVRAGDRIKTDRRDAKKLVRLYRAGQLSFVAPPTPETEGLRDLMRCREDLRRARTSARHRVSKQLLRHGRIYRDGRSQWTKMHRAWIARQRLDDDLAQAAFEQMLIHLDGLDRQLDALDRDLEQIAQRERWTETVQILTRFRGIATRTALGLIAEIGDFHRFSHPRELCAWLGIVPSEYSSGQQRHRGHITKTGNHHARRLLIEAAWGYQHPPRRRDRGPEPDARAWQAQIRLHRRYRHLTTERGKRSTVATVAIARELTGFLWAAATHQPLAPEAAA

SEQ ID NO: 311740 - protein, 402 aa, unidentified
MNAVGIDVSKGKSMVAIMRPFGEIVSAPFEIKHTASDINSLVELINSVEGESRIVMEHTGRYYEVLAHQLSEANLFVSAINPKLIKDFDNDSLRKVKSDKADAVKIARYALDKWQNLKQYSVMDELRNQLKTMNRQFSFYMKHKTAMKNNLIGILDQTYPGVNTYFDSPARSDGSQKWVDFASTYWHVDCVRKMSLNAFIDHYQNWCKRKKYNFSQSKAEEIYGKAKELVPVLPKDNITKLIIKQAVNQLNIASATVESLRTLMNETASQLPEYPVVMAMKGVGTSLGPQLMAEIGDVSRFTHKGAITAFAGVDPGVNESGSYEQKNVPTSKRGSSNLRKTLFQVMDALIKTHPQDDPVYQFIDKKRAQGKPYYVYMTAGANKFLRIYYGRVKEYLSSLPES

SEQ ID NO: 311741 - protein, 418 aa, unidentified
MTKKLDTTFIQVVHPVCCGLDVHKKKISACLITIDEHGQEQYEIEEFGTFTNDLLEMKEWLTDNSCPIIAMESTGVYWRPVHNVLEGFMEVILVNARHIKNVPGRKTDISDSKWLAGLLRYGLLRGSFIPPKEVRQWRELTRLRRTYTESLADYKRRIHKLFETANIKIDSVVSDLFGVTGRNLISLLCDESELSLENIRANAKRGLKSKSKELLSSVQGFFEDHHRFQLIGMMEVIASFEEKVSEITARLDALTAGHQNLLDRLDEIPGIDKKSAQSIVSEIGVTLDEFICMSALASWAGLCPGNNESAGKRKSGRTSVRSHPFKTILIEVAWAAVKKKGSYYRAKYFKLKARRGPKKAIVAIAHRISKAIYNIIKHGDTFRDLGEDYLTAQTKQRTIKNIKQRAKQLGYELVPCMN

SEQ ID NO: 311742 - protein, 349 aa, unidentified
MTLVGCDLHTRKQQVAVLHTDTGEVVEQELLHAGDAVEQFYRTLPRPVIVGIESTGYALWFHELMQRLGHTLLVGEAAKIRAMVVRKTKTDRRDAQHLLDLLKHDRFPAVWIPDPATRDLRALVTHRVRLVRIRTMVKNSLQAIALNRRLALGSTLWSQRGRAQLVALALPPHTAQRREDSLDLLAWLEAHIAGLDARIAAAADAHPGARLLLTHPGVGALTALTTVLVLGPTARFPGSKHVVSYVGLAPAVSASADTCHLGQITKQGSTLLRWVLGQAAPLAARADADLHRVYRTLIHRRGRPKARVAVARKLLVRLFIMVRDQIDYAEFRRRGCLSPPRETLLPRRA

SEQ ID NO: 311743 - protein, 383 aa, unidentified
MTDHQVIIGMDPHKSSNTIAVLTRDETMLTRRRFVNSDDGFIEMLDAVADYPDRVWAVEGANGVGRSIAQRLVAFGEVVVDVPAKLATRVRVYSTGHGTKTDNADAVAIARAAIHSKHLRRVLPDDATVAMKLLSDRRHELVGLRTQAMCRLHRLLRELIAGGAPRQLSAEKAFDLLNDLKPDDPANVMRLEIAFDHIEDVMRLDRKIDDYNRRIVADIKTCGTTLIRLYGVGPINAALILGEVGDVSRFPNRDHFASYTGTSPISASSGDHQRRRLNRAGNRRLNHALHIAAITQIRQDTPGRVLYRRKMAEGKTHKEALRCVKRRISDAVWRQLQTDRSEDRTQDTKWPRRPAKDTFLVAYRSPDTPRANGRPKQFKPAVV

SEQ ID NO: 311744 - protein, 423 aa, unidentified
MEVLYPRCAGLDVHKETIVACVRLSVGGKTTRECRTFDTSTSGLRALLAWLTEQGCTHVAMEATGVYWKPVWNILSDGAFELIVANAAHIKNVPGRKTDVNDATWIADLLACGLIRASFIPEPEIQELRALLRARTQLTREQTRHVQRLQKTLEEANIKLDSVITDIMGLSGRRMVEAIIGGEASPARLADLADRRLKASRQELIEALCGRVTDHHRFMLRLHLDQYDRVAGAIATIDAAVDAAIARMDQRETAGQASFRALILLLATIPGVGVLAATVILAEIGTDMSRFPTAGHLLSWAGLCPGQNESAGKRRSSKLRKGAPWLKVILVQCAWAARRKKGSYYKAQYHRLSSKHGPKKAVCAVAASMLTAIYHMLKDGTEHRDLGADHFDRRPTEVKAKRLVGQLAKLGFEVELRPLAQAA

SEQ ID NO: 311745 - protein, 367 aa, unidentified
MKEQENKRNKITIGLDLGDRRHRFCVLGEKGEVLEEGSVGNNRAALSELGGRYPEALVVMEAGCHSPWVSRHLEQAGCEVVVSNPRKTRAIYQHERKSDRRDALMLARIARMEPALLYPVRHGSEEAQQDLLRIKLRDSLVRARVALINSLRFTLKSLGYSIANPSTERFHKVIQSALPQSVAQVIAPSVQALEELTLRIKLLQREISDQARSKYPDTAWLEQIPGVGPITALYFVLKIEDPARFKRARDVGAFLGLCPRRDQSGENDPQLRISKRGDAYLRRLLVSSAQYILGPFAPPSALRQYGLALASGATARAKKRAVVAVARKLAVLLLTLWKNKSSYQAFPQRSSREKMRTNDLERLRCIA

SEQ ID NO: 311746 - protein, 401 aa, unidentified
MVSDFMKGRYNLMKIFVGIDIAKLNHFAAAISSDGEILIEPFKFTNDADGFQLLVSKLESFDKNSIIIGLESTAHYGDNLVRYLVAEFYQVCVLNPIKTCQMRKNNVRKTKTDKVDTFVIAKTLMMQDDLRFITFFDLDMMDFKALGRFRQKTIKQRTRLKIQLTTYVDQVFPEIQYFFKSGLHQNAVYALLKEAPSPKEIASMHMTHLANLLKVNSHGHFTKEQAKELRVLAQKSVGANDSAISIQITQTIQQIELLDSQLEKIEAEMTDIMKFNDSVIMTIPGIGYINGGMILGEIGDIHRFSNPNKLLAFAGLDPSVYQSGNFQAKTTRMSKRGSRVLRYALVNAAWNVVRNNATFKAYYDAKRAEGRSHYNALGHCAGKLVRVIWKMLTDEVEFNLE

SEQ ID NO: 311747 - protein, 310 aa, unidentified
METKVFVGIDICKDSLDVAIGPGKEIITFANDQKGVNALIKELSRIGPELIVLESTGGYERLATSSFVEAGLPVVIVNPRQVRDFAKSVGILAKTDAIDARVITRFAEAVKPDVRQLKDRETSELTALVTRRRQIVEMIVAESNRLKLANKRNKKDIKDHIRWLEKRLDKIESDIGKMIQNSPIWRCKDDILQSVPGIGPTTSAVLICDLPELGLLGPKKIAMLAGLAPLNCDSGKFRGRRRIWGGRASVRSALYMGTLAATRYNPAIKAFYQRLTAAGKCHKVAITACMRKLLIIANAMLRDQTLWQQN

SEQ ID NO: 311748 - protein, 389 aa, unidentified
MIYVGIDVAKDKHDCCILESEADKLYPVFTIPNNKAGFDELYEKIFTVTDDKTKIKVGLEATGHYSLNLLGSLIDKGLPTCVINPLHTNLYRKGLSLRKTKTDKVDARSIAMMLMTNKTLKPYSDTSYHSEELKSLTRYRFDKVQERAKLKSSVARLVNILFPELEKLVPSLHMASMYALLSKLPGASYITECHLTHLKNLLETASKGHYGRDMAITLRNTARDSIGSVIPAKSMELKHTIHLIEVMTEEIDEIEDSIKSIMDTCNSPIMTIPGISYRMGAMILAEIGDFTRFNYADQILAFAGLSPSTYQSGQLDSSYSHMEKRGSRYLRYALFNAAKFVCKWDENFGAYLSKKIGEGKHYNFAIGHATKKLVRTIYRMELTGEAYRR

SEQ ID NO: 311749 - protein, 403 aa, unidentified
MNNVAGIDVSKGKSMVSVLRPFGEVVAKPFSIGHTGSELKELADYLKSLDGETRVVMEHTGRYYEPVARFLHDEGVFVSAVNPKLIKDYGNNTLRKVKTDKADSRKIARYGIDNWAELRQHTPMDTIRMQLKTLNRQQSLYTKTKTMMKNNLIALLDQTYPGVNALFDSPVREDGSQKWVDFATTFWHVDCVRNMSLTAFAERYRKWCKRHGYNFSQSKAVEVHAGAQDLIAMLPRDALTKTMVRQAIDALNAISASLERLKAEMQALAAQLPEYPVVMAMHGVGDSLGPQLMAELGDVTRFTHRNAITAFAGVDPGADQSGTHEAKSTRVSKSGAPELRRALFLVMDCLLKTQPQDDPVYRFMDKKRAEGKPYLVYMTAGANKFLRIYYGRVKEYLASLEGN

SEQ ID NO: 311750 - protein, 394 aa, unidentified
MIYAGVDIAKTDHVIGAVDERGAEMCRPMPFKNTEAGLERAVAWLEGLAGSPSDVVVGMEATGHYWMACYSFLVARGYSVAVINPMQVKAVRKLKKLDKVKNDRIDAWLIAETLRIGQYDETRLATDEVASLRSLSRYLQSLRGMAAELKTQCVCLMDAHFPEYAGIFSDMFGAGSRAVLSKSPLPFELARRRADSLARDIAEASRRGGKSAGYAARIKAAARSSIGVRLGQEAASFQVKSLIRQIEFADSECAKVEARVRALLDEVEPLVLTIPGVSYATGAQIVSEIGDVSRFRSASALVSYAGLNSSVSQSGQFDSGGGPITKHGSPYLRRALWLAANRARQYDPGLRAFYDKKRAEGKPHRVAVTAVARKLCHIVFAVMRDQVPYDPGRE

SEQ ID NO: 311751 - protein, 321 aa, unidentified
MSTFVPLGIDVSKAKLDCALALDRKYRNKVFANTPSGFAELAEWFKRHAPGPVHACLEATGVYWEAVAQYLADAGHRVSVINPALSRAHGQSLGLRSKTDAVDARMLADFCREKQPAEWIPPTLAERQLRALVLRHQALTEMQTQEKNRAQVVREEVRESVDTHLAWLGDELARIERAIAEHLDRDPDLRSKRDLLDSIPGLGERTIAVLLAYGLSRERFDSARAFVAFAGLSPRLHESGSSVRVRPRLSKIGHAFLRRALYMPAMVTLYKTQWGQRFRQRLAGNGKPPKLIIGAMMRKLAQVAFGVIRSGNPFNPTLHGA

SEQ ID NO: 311752 - protein, 340 aa, unidentified
MDVFLGVDVGNGEHHAVALDGAGTKLYDKVLPNDEATMRAVIEQLTAHGTVLFVVDQPATIGALPTAVAQAAGITVGYLPGLTMRRIADLHPGEAKTEARDAAIIAEAARTMPHTLRSIEVADEQGAELSMLCKFDDDLAKQLTATSNRLRGLLTQIHPALERVLGPRLDHPAVLDLLRTWPTPAALRAAGRKRVATRLKKEAPRIYARLAQEIFDALDAQTVVVVGTQAAAVVLPQLAGMLSQLRTSRDTLHAQVEALVAAHPLHAVLSSIPAVGIRTEARILTEVVGKDFATAGHLASYAGLSPVTWRSGSSIRGDHSSRRGEQGPQTGPVPLKPSPP

SEQ ID NO: 311753 - protein, 390 aa, unidentified
MVASRVGLVTIAVDPHKRLNAVEVVDAGAVVLGQRVFEHSTGGFKELMGFARGWRRRQWAVEGATGVGKHLAQRLAAAGEVVWDVPSKKSSLVRSFSATSGRKTDQVDAHAVALAALNTPGLEQVRPDDHTVALRLLACRRHELVGSRTQAVNRIHRELQILLAGGAKQKLTATQAKVGLASVRPREEVGKVRKALVADQIVDLVRIDTRLADIDKQIKAAVKAAPTTLPALFGVGPVITAIAVGEVRDIARFAGADHFASYNGTAPTTWGSAGEARPCVNRGGNRRLNHAIHMAALTQLRNPGPGREYYQRKLDEKKKPKAALRCLKRRISDAIYRRMLADAAIERGPGGHLGATTKISAANPTPTVDSSIKPQPGPQPQATPHAAKAS

SEQ ID NO: 311754 - protein, 521 aa, unidentified
MVEREGLRLGLRARRKVSSFPPGLSRGLTWCMTPDNHKDDDAWHPDILNKGGNAMKSFYLGIDVSKGYADFVIINQQKQPVVKSFQLDDTFDGHSLLHEMVSRFLTDHPQAVMYAAVESTGGYENNWYNTLIRLQASLNIKTARLNPLGVMHNSKADLQKNKTDKISAQNIAEYLIAHPEKVVYQQQDQLASLRKQWGFVQMLTKQCTQLLNQLHSLLYTANPELLSYCRDGMPAWVLKLSLKYPTAAKLEKARDKTVAKIPYVSLTRAKQLIAGAKHSVASATDPITAQLVTATAGQILQIKKTIAAQTDLMAAQCDVSEVKLLKTFTGIGDISAIGLILEIQSVARFKTVKKLASFWGLHPVYKISGDGSGAFKMSKQGRVNPRKILYTVTLSAIEHNPVIKPIYQYHLQQGKHKMDAIGICMHKILRIVYGMLKNNTAFDPKIDAANRQRSLPDITAYPKKTKDRRFQSYDSKAPVSRRQRKKRLERERSHSVITDTKSGISAPVPIGDIISDMLSNI

SEQ ID NO: 311755 - protein, 419 aa, unidentified
MKIVYPICCGVDVHKNTIVATIAITDKSNITQYVVETFSTFNSDLIRFRTWLLVHKCFNVCMESTGKYWIPVFNILEEANINVILTHPKYVRAIKGKKTDKKDSKWIADLFKFDMIRSSFIPPKDIRSLRELGRYRFKLVCMRSSEKNRYQNCMTVSNISLASVLSDPFGKSASGIMKHLLSSSVFDEELCKKLIQKSAKKKTELILESIRGYMIEADQRFKMNEASAHVEYLNHAILRTEAELYIRIQPYYHLVEHLSSQLPGVSQLSAALIISEIGSDMSVFASSKHLTSWAGLTPTNNESAGKKKSVRISKAGQFLKPLLVQCALAAIKSNEQTYFAAKYQKLKKRRGHKKAIIAIARMLLTCIYHMIQTGEVFNPSDYEEFINPIPRKAVLTDETAIAFLAAQGYDISSLTKTAV

SEQ ID NO: 311756 - protein, 308 aa, unidentified
MTIAPSKIGIDISKAWLDIFDATTGRASRIANAPVEIEAFLASLPEVSCLAFEATGPHDTALRQALSKPSLRSARLNPARVREYARYKGFLAKTDAIDARILAMMACEVEFGLDQVYDTGREALAALHRRRDQLVDQRAAERTRIADAPDQRERESLKRHMAFLDGEIATIEAEIEALLEQPAFAAKVAILRSLKGVGPVTATTLLALLPELGTLSHKAIAALAGLAPFNCDSGKFRGQRHIRGGRARVRRALYMAALNAIRAIPRFKDQYTAIAARSGVRKVGVVAVARKLLVTLNAMLREGKPFAA

SEQ ID NO: 311757 - protein, 412 aa, unidentified
MQVVYARCAGLDVHQKTVSACASVCEPNGKKRRQIRVFGSFTGDLLALAGWLREQGVTHVAMEATGVYWRPVWAVLEGQFEQLLANPRHMKAVPGRKTDAKDCEWIADLLQHGLLKGSFVPPTPIQDLRDLTRYRVELRQSQSRVANRIQKLLEQANLKLGSVASNALGVSGRQMLEAIVAGQDTPEQLAQLARGKLNNKIPQLVQALQGRVRDHPRFLLAEFIEEWDWFEQRIVRLEAEIDKQINPFEQALALWQTMPGVDRVTACSLVAQIGVNMNQFPTAQQLASWAAICPGNHESAGKRKSGKTRDGNKWVRRTLCQAAWAVSRKKNCYLSSQFKRIATRRGPKRALMAVAHTMLVIGYPMLKTGQGYRELGGNYLEQINKDQLQRHFVKRLEKLGFKVTVEPSLEAA

SEQ ID NO: 311758 - protein, 398 aa, unidentified
MTESSDYESVQIFIGVDVGKDTHHAVAVNRSGKRLFDKALPNDEAKLRSLISDLKQHGQILLVVDQPATIGALPVAVARSEGILVGYLPGLAMRRIADLHAGEAKTDARDAAIIAEAARTLPHALRTLKLADEQIAELSMLCGFDDDLAAQTTQASNRIRGLLTQIHPALERVLGPRLDHPAVLELLQRYPSPEKLASLGEKKLATQLCKLAPRLGKRLAADITQALTEQTVVVPSTNAAVVVLPRLALQLITLRKQRDELALEVEQRVLAHPLYPVLTSMPGVGVRTAARLLTEVACRAFASAAHLAAYAGLAPVTRRSGSSIRGEHPSRRGNKTLKRALFLSAFAALRDPISRAYYTRKMSQGKRHNQALIALARRRCDVLFAMMRDGTFYTPTAS

SEQ ID NO: 311759 - protein, 365 aa, unidentified
MQDAITKINYSKLFIGMDLHKNTSTFSVKDEYGTMVASRKILTDRNDVTRFINSIKELSENLSLAVEPVSQWYFYADLIESLGVDVHLAHPMKVKAIASARIKTDKIDASVLADLLRANLLPEAHHANAKTRSWKEQCRFRASLINLRTQIKNKIHAILFKHALKHNFSNLYGKGGRAWLAGLKLSEPFKTNMNKYLGLINQLTELIASADELIEKTVADHPQAKLLISIPGISYASALTIMAEIGNVDRFLSVKHLQSYAGLVPSTYNSGDKQIHGKITRQGSKWLRWIMIEAAHHQIRCKRIPGFGSYYNTLKKRKGSKSAAAATARKLLAVVWRLLKDNRPYEVIDPRCRKSGVVDLKYIVS

SEQ ID NO: 311760 - protein, 427 aa, unidentified
MAYRIAGVDVHKRMLAVVMSDVEVDGEYEFERHQFGSSPQQLRLLAAWLLEQQVEEVVMESTAQYWKPVWGALERYWKPICQKGEGARPMSGALHLAQAQSNRGRRGRKNDFADAERLVKRLVAQELILSFVPDPEQRLWRTVMRTKYQLTCNRVQLQNRLEALLEEAHIKLSSLVSDLLGASARRMLKALADGEADPAALAALADCRLRATPEQLCDALGACQELNPVYRRLVKMMLEELDLIERQIGQLDQEMADLLRPHQDQVQRLAEVPGLGVDSAQQIIAEVGATAETFPSEGNLSSWVGACPGDDESAGVNYSHRSPKGNRHMRRILNQAANAAVKHKGSIFAILYRRYVPRLGHNQTIGVIAHRLCRLIWKILHRGVRYEERGPAVSKRSKRERTARMIRQLRSLGYRVELANSQSSVPA

SEQ ID NO: 311761 - protein, 321 aa, unidentified
MANVNKIIGIDISKEKFDACFSFQPYGYSSRTYTYNEEGIKSFLTEVPSDCICIMEATGVYHLRLAYALTKAAIYVSVVNPLSVKNFSRAVMCRTKTDKADARQLVDYARRMELVEWKPTSENYIRIQQIYRTIELFVTNITQLENQLEAISNSPVQDRMLCRILKRSITIQKRRIERLEKQIDELIAEDDKTVVKRLCSIPGIGKKTAVAVLTATKGMHGFNNYRQVSSYFGLCPRIYDSGKSVHGKAHICKMGMGWIRRLLYMCSVSAAKHNEACKDLYLRLTERGKPIKVILIAIANKLIKQIFAIVKNNSLYHKTFA

SEQ ID NO: 311762 - protein, 307 aa, unidentified
MGIDVAKDRLDVAVLGRRQEKQVENTQEGIASLVQQMEVLQPELIVVEATGGYQRAVVEALVQAGLAVAVVNPARVRQFARACGLLAKTDKLDAQVLAVFGQRVQPRQYEAKSEAGKQLSALLVRRRQLDEMLKAEQNRLRTLPQSLRGSVERIIACLKEEKKILDAQIQQFLAEQESWQEQTEILNSAPGVGKVTTATLLAELPELGKLDRKKIAALVGVAPMNFDSGRKRGYRKTKGGRADVRSVLYMSTLVATRYNPVIQAQYQQLLNRGKLKKVALTACMRKFLTILNAMLRDRQPFHSAAIA

SEQ ID NO: 311763 - protein, 424 aa, unidentified
MNDKRNERLNQITEQTIVIGIDIAKHKHYAIAVDDRGRELSKAFPIDQNRKGFEKFTFQIQELLDKHGKDHVLIGFEPTGHYWMNLAAYLIGADIPFVAVNPMHVNRSKEFDDNSQTKNDQKDARIIAKLIVGGYFSYPKVPGGIEAELRNGSAFRWKLREEQTRIKNQITGWMDQYFPEFTSGIKGLGQLSCAVLKQTPLPEDLLGRSVEDLAKLYKEEGAKLASKPKIRELQELAQRSIGLTEGSQMARIEIGTLIDQYRLVERRLTALDQELEKLAKQLPEFEFLLSVPGIGVNTVTDLLAETGSLKQYNSPRQIINLAGLSLRENSSGKHKGQKKLSKRGRRRLRSLLYKAIMPLLRNNDVFHELYTYYITRTNNPLKKKEAMVVLCGKLVKIFFGLSVHESYFNEDKMRQDLHCLEKAS

SEQ ID NO: 311764 - protein, 316 aa, unidentified
MTRAEVFVGIDVSKARLDVALGFAGELLGVENDARGIVELAGRLQKLAPALVVLEASGGLETALVGELAAAQVPVAVVNPRQVREFTRCTGQLAKTDALDARALALFAERIKPPLRELPDEQTRQLQALVTRRRELVEMLTAERNRLASMPVVLHREIRAHIRWLQARLKQRDHDLDRTLRNSPLWREREDLLSSVPGVGPVLCATLIAGLPELGRLNRREIAALVGVAPYPHDSGTMRGRRTVWGGRAQLRAALYMATLVGVRYNPLLRSLYRRLRAAGKPAKLALIAAMRKLITILNAMLKHRTHWSPPCPIPA

SEQ ID NO: 311765 - protein, 376 aa, unidentified
MEKFLKWAIEIMNKNDKEKLVIGMEPTGHYWFCFAQFLRDKNHKVVLVNPFHVKRSKEFDDNSPTKNDRKDPKTIAMLVKDGRYVEPNIPEGIYSELRIVVDIRERLMKDLNRIKNQIVRWLDIYFPEFNKVFADWEGKAALITLKEFPTPAKVLENGTQGILATWKKEIKRAVGIKRAEKLVEAANKSVGKKHGIEMAELEIKLILEQYEMLLRQLKNIESKIEELFMQVQGSNDITAIKGVGVITAATFIAEVGDITKYEHPKQIQKLAGYNLVENSSGKHEGQTTISKRGRRRLRSTLYKMVMPILANNKEFQELHKYYTARKENPLKKKQSMIVLCCKLIRIFFAILKKGVKYDGNKMLKDVKRPEKIRNVA

SEQ ID NO: 311766 - protein, 345 aa, unidentified
MHHSTTVGVDLAKNVIQVSVVNGRGKELSNRSLTRTKFAQFLGKQKPSLVAFESCASAHYWARAAKRHGHEARIIPAKAVAPFRQGHKTDSNDALAVAEAVRRPNIKEAPMKTAEQQGLQAIQRSRELLIGECTALSNHLRGILLEFGVAIPQGFASLLRALPEILEDGDNELPDLYRPTLHRMHSRLLELREDIDTMTKEVDGLVKQHPVCKRLTAIEGIGPIGALSLYAVMGSGKAFTKSREFSAYLGLTPRQYSSGGKTNIVGISKKVGNRRLRSILIQGARAYVYRMKEPRSLKDRWLKDLIERAGPNRAAVALVRLDPSANDLLVIVAPSFDTRKRVRPG

SEQ ID NO: 311767 - protein, 407 aa, unidentified
MDITPLYSRVIGLDVHQAKISACALIEEPDGSVTVEYREFGAFNRDLRALAEWASALGPEVVVMESTGIYWKSPYAALERAGIRAWVVNARHVKTVPGRKTDIADAQWLAILARAGLLSGSFIPPVALRNLRLIARQRQKLGGMLASEKNRLHKILSDAGIRLTVLISDLHGQAGRAMVKAIIAGQPMAEILKHTGRLKASREDLYEALQTEDLSETHRFVLSEILSHIETLEAQIQRFEAQLLKGLAPWQSLLVLLQTVPGIDQVGAAMLLVEIGTDMSQFGSAERLASWVGICPGNHESAGKRKSGKTRKGNAWVRRLLCEFAQAAARSRCALKDKFTALTIRKGHKKSIVALAHKMLRIIYAMLSRHTPYQDRAVDYEAITVQRNAPRWIKMLLKHGFITPATA

SEQ ID NO: 311768 - protein, 369 aa, unidentified
MNKSTMYIGLDVHKESIEIALAPHEGGEVRHYGRIAGDLEAVDKVVSRLKKTHAKLNFVYEAGPCGYALHRHLTRKGFSCSVVAPSMIPKCSGDRIKTDRRDAIMLARLHRAGELTAVFVPRAEDEAVRDLTRSREDAVANHRRSRQQLGALLLRQNIRYTGKSAWTKAHMRWLSEVAMPLPTQQIVFQEYLNATRETDERLARIDEQLRIAVEGWRMAPVVNALQALRGVSMNVAATTVAEIGDMTRFDRPRQLMAFLGLVPSQYSSGPRVRMGHITKTGNGHARRVLVEAAWAHRFPAKIARAHQVRQENLPQAVRDIAWKAQLRLCRRYQRLLAKGKTKNVVVTAIARELVGFMWAIAREVKPIAA

SEQ ID NO: 311769 - protein, 315 aa, unidentified
MVEQVVVGIDISKAKLDVAILPGGEQFTVSNEPHGVAQLLQRLQPLGPSRVVLEATGKLERLAVSELAAAGLPVVVVNPGQVRHYAKARAQRAKTDNIDARLIAAFGRDLQPEFHPLPDTETQALAALCQRRNQLMGLAQMESNRLERAPHSSQKSIKTVLRFLQRQIEEIEREIEQSIKHSPIWQAKRKLLESMPGIGHVSCSILLARLPELGLFPRQRICALVGVAPYPDDSGDRHGRRRVAGGRAGVRQVLYMAALTAVRYNPILRTYYHRLLARGIDKKAALIAALRKMLTILNAMLRDNTPWRPPCPEPA

SEQ ID NO: 311770 - protein, 372 aa, unidentified
MDYNTVYVGMDVHKDSFTLCSYTVDADKGSYHRKTPADYREVLKYLDFLRTVYGNDVSFVCGYEAGCLGYCLYHQLTDRNVNCVILAPTTMLEQRSKKRIKTDKRDADIIGRCLAQHNYSPVHVPTASDEETKEFLRMRSDHKLALKKIKQQILAFCLRHNYRYEGKSNWTDRHMKWLRSLKPAALYKEILDEYLMTYTVLSEKIERLDTRIEELAREDKYSESVKKLCCFIGVKTHIALSVLVEVGDFNRFATAEKFASYIGLVPGEDSSGDDQVKLGITKAGNRHLRILLTEAAQCYGRSQVGYKSKDLRTRQSGNPPQVIAYADKANDRLKRRFYKMVLGKNKKHNVAKVAIARELACFMWGMMTDNIA

SEQ ID NO: 311771 - protein, 451 aa, unidentified
MTATKSRRAGSAAQITVVHPHAAAIDIGAQFHVVAVGPERDPQPVRSFRSFTKELHDLADWLEQVGITTIAMESTGVYWIPAFEILEAHGFEVVLVNARDAKNVPGRKTDVSDAQWLQKLHAYGLLRASFRPRHDVATLRSYLRQRERLLEYAAAHIQHMQKALMQMNLQLHHVVKDVTGATGMKIIRAIVAGERNAVELARHRDVRCKASVETIRDALIGNYKAEHVFELTQALSLYDYYQTQVAQCDERIELTLRQLQTGAEPPAAPLPAARYRTRQPNGFSFDVRAALYAMLGVDLTQLHGLGPYVALKLVAECGNDMSRWPTAKHFTSWLCLAPGNKISGGKILSSKTRRSSSKAAAALRLAAVAIGKTDTALGGFYRRLSARIGNAKAVTATARKIAVLFYNTLRYGMQYVDPGAAYYEERYRQRVLNNLTRRAESLGFVLQAKPT

SEQ ID NO: 311772 - protein, 346 aa, unidentified
MKSITVIGVDLGDKSHCWCGLDHDSSVVGRGKLSNTRKDLGNFFQPLPECRVIMEAGTHSPWISEFVTELGHEVIVANPRRTRAIWDNVRKSDANDAEMLARLGQADIILLSPIKHRSSACRADLALIRSREVLVRQRSSLISHMRGQLKSFGYRLPTCTTPAFVKRAEALIPEPLRPGLKPVLKIIDELTEQIRYFDHQVKRLGRERYPEAMLLGSVIGVGALTSLAYVLTIERVDKFDSGRSVAAYLGLVPRRDQSGQVDKKLPISKSGDELLRRLLVNCATYIMGPFARDSALRSWGLDLAKRGGGRGKRWATVAVARKLAVIMYALWRDKRLYQPYPHQDVA

SEQ ID NO: 311773 - protein, 401 aa, unidentified
MVSDFRKGKYNLMKIFVGIDIAKLNHFAAAISSDGEILIEPFKFTNDADGFQLLVSKLESFDKNSIIIGLESTAHYGDNLVRYLVAEFYQVCVLNPIKTCQMRKNNVRKTKTDKVDTFVIAKTLMMQDDLRFITFFDLDMMDLKALGRFRQKTIKQRTRLKIQLTTYVDQVFPEIQYFFKSGLHQNAVYALLKEAPSPKEIASMHMTHLANLLKVNSHGHFTKEQAKELRVLAQKSVGANDSAISIQITQTIQQIELLDSQLEKIEAEMTDIMKFNDSVIMTIPGIGYINGGMILGEIGDIHRFSNPNKLLAFAGLDPSVYQSGNFQAKTTRMSKRGSRVLRYALVNAAWNVVRNNATFKAYYDAKRAEGRSHYNALGHCAGKLVRVIWKMLTDEVEFNLE

SEQ ID NO: 311774 - protein, 358 aa, unidentified
MAGKVTETAVVGGVDTHKALHVAAVVDQNNKVLGTQYFSATRQGYRQMLTWMASFGTLKRIGVECTGTYGSGLLRYFQNAGLEVLEVTAPDRMERRKRGKSDTIDAECAAHAAFSGIRTVTPKTRDGMIESLRVLKTCRKTAISARRVALQIIHSNIISASDELREQLRNMTRMQLIRSLGTWRPDAREYRNVTNVYRIALKSLARRYIELHDEIAALDVMIAAIVDELAPELIKRNAIGYESASQLLITAGDNPQRLRSESGFAALCGVSPVPVSSGKTNRYRLNRGGDRAANSALHIIAIGRLRTDAKTKEYVARRVAEGHTKMEAIRCLKRYISREIYTLLRNQNRQVNSIPITA

SEQ ID NO: 311775 - protein, 400 aa, unidentified
MLSIGIDVSKGKSTVCGMKPGGEIVYTPFEIQHTREGMSELVSLLHNSGEEVRAVLESTGSYHCPVVAALLENGIFVSVVNSLRMKRFCSQSIRKVKTDQIDAMQIALYGLAYWQELQPTKLPEDTYRELQLLARQYYQMTSLLIKAKVDFNAICDQVLPGMQELMSDHAGRHKLSDFVLQYRHTTHILEMGETRFRKDYCKWAEKKGYRNHERMAALIFATAQNGIPVLPNAPSTQIVITEAIRVLHTVEASRDAILTQMQALAKTLPEYSLVREMPCIGDTLAPRLIAEIGDVRRFHSKRALIAYAGIDAPPYQSGKFCANNRHISKRGNRYLRKTGYEVMQSYVMHKPANDPIFTFIEKKRGEGKSGKLAMVAGLNKFLRVYYGKVTELYRSLPAIE

SEQ ID NO: 311776 - protein, 418 aa, unidentified
MEVLHERCAGLDVHKKTVVACVRRARDGGVEKEVRTFKTTTADLLALGEWLDGHDVNHVVMEATGVYWKPVWHILDDGDRELVLANAAHVKNLPGHKSDVSDCDWLSDLEAHGLIRGSFVPNRQTQELRGLLRTRKQKVRERSSNTLRLQKTLEEANIKLDSVISNVIGVSGRRMIEAMIGGETDPVALAALADRRIKAPPEVLCEALRGRVTGHHRFLLGLQLEHIDALDGMIDKIDQQIDASVEPFRAAAGLLTTISGVNQLAGRAIVSEIGIDMSRFETAGHLISWAGLCPRNDESAGKRRSTRIRKGAPWLKDILVQCAWAATRTKATYLHAQFVRIRSRRGPKKAIIAVAASILTAAYHMLKNGVPYRDLGPQHFHSRNKQAQAKRLLARLRDLGFTAEFDSLKPIPDAVVSY

SEQ ID NO: 311777 - protein, 393 aa, unidentified
MKKHSKVTSITKQQTVGQRHESGKREIRELLKKIDHAAMEQHSGWGVGIDIGDKKSNYCFVDASGKIAAEGALATSREEFGHYFCRIPKMRVALEVGTHSPWVSELLEALGHEVYVANPRKMESIHKNKRKNDKVDARVLGRIVRLDPELLYPIRHRGAEARHDLVLLRARDALVSARTGLINSMRGMVKSVGARLPKCSADTFHKQVIASIPDPIKKALLPMVAQIATLTEKIREYDRQVNQVAAKKYPETGMLKQVNGVGELTSLAYVLTLENPERFKKSREVGPYLGLVPKQDESGESSPQLGITKTGDMMLRRLLVGSAQYILGPFGADCDLRRFGLKLAARGGKNAKRRAVVAVARKLGVLLHRLWTTAEVYEPLRQQELALTAEVKG

SEQ ID NO: 311778 - protein, 339 aa, unidentified
MKKTDRPIYLGIDVSKGSLDCCLYNGTEHKTRSFNSNKPSTVQKIITHFKISPDSCRVVLEATGVYHSAAFVGFVSQGFDVAVENPLRIHSFATMKNLLRTKTDPVDARTIAEYGFTNEPVSAKLKEAYQCEVQAKLKLIDFFKKLITQNRNYLEALNNNSFECNAPSLIAHVKNEIKHLNVTIKEISSDIEKILTKHCSELYKHYKSIPGIGSTVAGAIISFYGDFSGFSNSNKAAAFAGLCPIVCKSGSSVDKKGSISKKGNSMLRTLFYMAALSASRCNDACRETYLRLRQAGKPAKVALIAVANKLLRQAMALARKGESFTANYKEISLCRAKTT

SEQ ID NO: 311779 - protein, 350 aa, unidentified
MVVVGADVHKRTHTFVAVDQAGRKLGEKVVAATTVGRHKALVWARVEFGNELVWGIEDCRHLSARLERDLLSAGQQVVRVPPKLMAQTRASARTRGKSDPIDALAVARAVLREPDLPVASHDAISRELKLLIDRREDLVAQRTSAINRLLWRVHELDPERAPKPRSLDLAKHRELLRAWLATQPGLVAELARDELADISRLTEAINALAKRITERVRVVSPALLALPGCAELTAAKLIGETAGVSRFKSESAFARHAGVAPIPVWSGNTTGRVRMTRSGNRQLNAALHRIAVTQVRLDGIGRAYYRKRRDAGASKTEALRCLKRRLARVVFHHLHTDHQTRNQPCQTAAA

SEQ ID NO: 311780 - protein, 416 aa, unidentified
MEVIVERCAALDVHKDTIMAAVRLPDEKGKRRTELRQFRTWTSSLRELRSWLVGHGVTQVAMEATGVYWKAPWHVLCPEPSFELLLCNAQHVKNLPGRKTDVADALWLASLLECGLLRGSFVFDPVMSRLRDLTRHRKKFAEELGWETQRIQKVLEDAGIKLDSVVSDVLGKGPRNMIEALIAGERDVKVPAEMALTRSRARIPELRLALEGGFDEHHAFMLRTHLDTVDHLSAQIVKLDERLEVEMAPFARHVERLSTMVGIGKVTAQAIIAEIGVDTSPFPTAAHLASWAGMCPGNHESAGKRRSGKARKGNAALRTALIEAAWSASHSHDSYYAAQYRRFSRRFGKKSESKAIFVVAYSMLVAIWHILSNECDYQDLGSDWFDRRTDNESHARRLAHQIERLGYTVTVEPIAA

SEQ ID NO: 311781 - protein, 345 aa, unidentified
MKKGITIGMDLGDKKHQVCILDKTGKIIAEEEVTGTRAAVTQFFKQYREAVVAMETGTHSRWVSQIAEAEGLNVLVGNARKLRMIWQSRQKSDTRDAVMLARIARMDPALLYPIRHRGEQVQMDLEIIRARDLLVRERTRMVTHVRSVVKSMGERLSPSSAASFGHKAKMPEALNEAMKPMLEMIRELTKKIRGYDLMIKEAATEKYPATERLSQVGGVGPLTALAYVLTLEEPQRFAKSRMVGAYLGLVPRLDQSGQTDKQLRITKHGDGYLRRLLVGSANYILGPFGPDCDLRTFGLKLMQRGGKNAKKRAVVALARKLAVLLHALWRSGQQYEPKRKQPLAA

SEQ ID NO: 311782 - protein, 305 aa, unidentified
MEHIGIDVHKRDSQIRILAEGGEVVEQRIRTDPPRFAAVLGARPRARMLIEASTDSEWVARCLEALGHEVIIADPNFAPMYATRSRKVKTDRRDARALAEACLLGAYRAAHRLSDPQRHVRGRLGVRDALVHTRTRYISIIRALLRQHGYRVPSGSADRFIDRVRDLPLPGRLRSVVAPLLAVMRRLNQQLAYWDATIEHLAVQDPRVPPLRSVPSIGPVTAAAFLAAIDDVGRFRHAHQLEAYLGLVPREYSSGETQRRGPITKAGLFARALVAHSIRPLDPAPPAPRGRGALDLGPAPRRASG

SEQ ID NO: 311783 - protein, 326 aa, unidentified
MNKVNQIIGIDISKDTFNAYSLRMGDANSSNNLKGFKAFEKFLEKESWCVMEATGSYHHQLATYLYEKGYKVSIVNPLVIKRFIQMKLRQTKTDKSDARMIALYGTEQPLQEWYPDPEYIEQCKMIGSAVNLYFKQSTALKNKLHSLESKGSMTGALVRSLKRQLKNVQKEIDKMEVELELLIKNNEGEMLTKLSTIPGIGRKTAMLLISSTNGFKMFENHNQVSSYFGLAPMERTSGSSVRGRSRITKTGDVKIRNHLFMCSFTACSSNKQCKALYDRIVAKGKSKKLALIAVSNKLLKQAYAIAKTGLEYDSEYRSVRQTTLLK

SEQ ID NO: 311784 - protein, 344 aa, unidentified
MDYFAGLDVSVKDTSVCIVDDTGRIMREVKVLSEPDALLTVLKNPVHHFKRIGLEAGPLSQWLFSALADAGLPMICVETRHMRAALKAQINKTDRNDARGIAQMIRVGLYRPVHVKTLRSRKLRMLLTHRQLLQSKAIAVDNDLRGTLRNFGLKVGMVGAARFEARIRELVEGLPDLAVLVEPLLVVRQVLRQQLAVLHRRMLAVVRDDEVCRRLMTTPGVGPLVALTYRTTVDVPARFQKSKSVGAVFGLTCSRYQSGEIDWSGRISRCGDEMMRVMLYEAAQTLLTRSTRWSWLKAWAIQVARRRGKKKAIVALARRLAVILHRIWVDGTEFRWTREAVPAA

SEQ ID NO: 311785 - protein, 402 aa, unidentified
MTSIGIDVSKGKSTVCILRPYGEVIASPYEVQHCEPEIQKLISCIKAIDGEVRIVMEATGAYHLPLLSSLKDAGLFVSVINPLAMKRYASSSIRKGKTDKMDSVRIANYGIDNWFKLTDYTLPDEIYAQLRLLGRQYAHYITIRVESKLALTDLLDRTMPGIKTLLSGKRSDEPTKDKLCDFVAEYWHFDNITKKSEAQFIRSYCSWAKKKGHHASESKAKAIYALACDGIPTLPSSAASTKMLTLEAVRVLREVNKTLETILTQMQELAITLPEYNTVRAMNGVGDVLAPRLIAEIGDVRRFHSGNALIAFAGIDSPPFQSGSFTGTRRKISKRGSSLLRKTGYEVMKCLKTVKPDQDNAVYLYMLKKEAEGKPKKVAKIAALNKFLRIYYARVSEVYAIG

SEQ ID NO: 311786 - protein, 358 aa, unidentified
MRLFIGLDVSLAKTAICVISEHGQIMKEAQAASEPEALVNWVGELDGSIAAIGLEAGPLSQWLHHGLTNAGLDVVLMETRQVKGALKAMPIKTDRRDAEGIARLLHLGWFRPVHCKSVSAQEVRAVLGARKAVQQGMIALEMSLRGLLRNFGLKVGGISRGRFELRIRELAVGNLMLEAATEPMLRARACLRQELAGLERRVRHLAQNDPVCHRLMSMPGIGAVVALTFRSAVDDPARFTSSKKVGPWVGLTPSRNQSGERDVSGGITKAGDVNLRRALCQAATVMMYEEGQKTVQWTVFPTIGGRSTWLRTWAAQVARRRGAKRAMVALARRIGVILHRMWVDDTLFRSDIAVPYAA

SEQ ID NO: 311787 - protein, 339 aa, unidentified
MALYTAFDLHSTNSYLGIIDEDGKKIWKKKLRNDPSLISTTLRRFKRDIVGVVVESTYNWYWLVDLLMEEGYHVHLANPSRIQQYAGLKHGDDEHDAFWLAEMLRLKILPEGYIYPKEQRPLRDLLRKRGHLVRLRTALIQSLQNILARNVGTKMNTNRMKALRTDHVAPLLAGDDDLSLAGKVSKDAIDSLTRQINAIEIAVEKKLPLRKPYDLLLSMPGVGRILALTIMMETGSIDRFPKVGNYVSYCRKVPAARFSNEKKKGTGNRKNGNKYLSWAYAEAAELARRLDSEARAYFDRKCRHTNAPIAYNALANKLSRAAYYIMRDGVLFIPERMFT

SEQ ID NO: 311788 - protein, 344 aa, unidentified
MSIAILGIDIGKNSCSVVGVDAQGAVKLRRTMRRSTLVDFVGKLPACIVAMEACCGAHHLGRLVAGFGHEVRLMSPEYVRPYVKAQKNDDRDAEAIAEAASRPTMRFVDLKSQAQLDIQTLHRVRYRLVAERTTLINQLRAILLERGVIFAAGRCKFALELEGLNFDEHSPVSIRIQTLIKEMCSAWSELDARIEALNQEFVDLARQTPAMRRLTQIPGIGVLNATALVAAIGNASGFRRARDLGAWLGLVPRQHSTGGRSRLLGITKRGNVYLRTLLVHGARAAVRALSQSDTPLGRWIQGMLARGVHRNVVIVAFANKLARIAWAVLRREQPFAGDYGMVQA

SEQ ID NO: 311789 - protein, 342 aa, unidentified
MKITTVGIDLAKNVFVAHGVDQRGKVALRKSLKRDQVLPFFANLPPCLIGMEACGSAHYWARKLQELGHTVKLMAPQFVKPYVKTNKNDAADAEAICEAVARPNMRFVPIKNAEQQAVLSVHRARQGFVKARTAQANQIRGLLAEFGIVIPQGIRHIAKQLPDIIEDADNGLPGVFRDLIDRLGTQLKDLDQQVDELDAQIQAWHRASEASRRLAEIPGIGPITASALVATVGDATNFENGRQMAAWLGLVPKQHSSGGKQTLLGISKRGDSYVRTLLIHGARAVIRVADRKANHPDSWLGKLLGRRNKNIAAVALANKNARIVWAILTQDRRYDAEYASAA

SEQ ID NO: 311790 - protein, 430 aa, unidentified
MSTNFYLSVGIDVGADFSFMSIALPNQTYVGNPFKITHANPASLEKAVLTIKEAEESNSLKARIFLESTGIYHYPLYCYLRDKGFNVSIINPIITKSSTNINIRKVHNDKFDSKKLALIALKPDLKVSVIPSDLVLDLRKLTREYYNLMDCRSAYVNKLQGELRVAFPQYLGIFSKLTVDTSLALLEKYAVPAAFLAAKKKTVIKIISSTARFGAAYAEKKYQAIVAAAQAASRFGHTLPSNAKLIKLFVSFIKKYDEEVDLILDAMHELVDTQPDEPFVKQIHLIETFKGAGFLSAVTVMCEIGDFSVFKSPKQLFAYFGLDPAVKQSGKFIGTNVKMSKRGSPLARRVIHTMALVSIGLTRNGVANNSVLREYYLSKCQTKPKLVALGAVMHKVCNIIFAILRDDKPFSVITPAQHKLNYSHRRCLVA

SEQ ID NO: 311791 - protein, 381 aa, unidentified
MQEVRTTSTMTSELLSLGDWLAGLGVTRVVMEATSDYWRAPFYLLEDRFETWLVNAHDVKHLPGRPKTDRLDAVWLCKVAERQMLRPSFVPPPAIRELRDLTRYRVDLLAVRTAEKQRVEKLLEDALIKLSVVASDAFGASGRAMMAALIAGERDPAVLAELARGRLRAKTTPLIEALTGRFTDHHAFLLTQMLQRVDAITADIATVQARIDAQIGDQAPAVARLDAIPGIGPVAAQMILAEIGTDMSRFPTPAHLTSWARFAPGVSESAGRPKGNAGTGKGNRYLARVVGEAAVSAARTDTFLGERYRRIARRRGKKRAIVAVGRSILVIIWALLSDEQAQFIDLGADYYASRTNPERKVRQHVRELQTLGYAVTLNPAA

SEQ ID NO: 311792 - protein, 404 aa, unidentified
MWYTGIDWASDHHDAVVIDEKGHQVGALRIDHSPQGLSKLNAFLEQIIGSQSKEQMACIIETTHGLLIAHLLETGWPVYPVNPRTVDRRRSASGAKTDTIDAYLLAKTGRSDLADLHRLTPDSEKITELKLLTRDQDGLIRMQTRLTNQLTACLKAYYPVALDLFTKLQQRCTLLFLQTYPTPQAAMAASVHQLEEVLRRAKHPNPTAVAAQIFEQLHQPHLQADAVTTRSKARLMLVLVSQLLPLIEQIAQYDKEIATLFLTHEDHELFESLPRAGQRLAPRLLAEIGDDRSRYRDASSLQALGGTSPVLFQSGMYSKAHRRLGCIKPLRNALHQFAWQTTQSEPWAKQYYQRKRAEGKSHTVAVRALANVWVRIIFAMWFHHHCYDTTTFEQAQRQHARKAA

SEQ ID NO: 311793 - protein, 332 aa, unidentified
MKKKQFIIGIDVSKATLDVFIHEIKYYFKVENSPKGFVVLLESVFKLTKCKQDDILFCFENTGKYSKMLSTFLHTQSISFVMEPALKIKKSLGLTRGKNDKIDARRIALYAYEKIESLTCTVLPGEKIDQIKSLLSLREKLIKHRTAYKNGLTDLNDCYKEGENDMIKDVQKRLIKILNEEIKQIEQKIKDTIKNDNSISKSFKLLISVRGIGEIVAYYLIAFTANFTTFSKARAFACYAGIAPFGNSSGTVKGTPKVHPFANKQLKMLLNLAAMSAIQQRGEYRIYYIRRVNELGKSKMSTMNIICNKIVYRAFAVVQRETPYVDLLKFAA

SEQ ID NO: 311794 - protein, 410 aa, unidentified
MEVLHPICAGLDVHKETVVACVRHMSGGQVKSEVRTFSTTTGALLELSAWLGAEQVTHIAMEATGVYWKPVWHVLADGDFALLLANAAHVKNVPGRKTDVKDAEWLADLLAHGLIRPSFVPDEPTQQMRDLLRTRKQLVRERISHTQRIQKALEDANIKLDTVVTNILGLTGRRILQRLIDGETLPQALATLAHRNIQASRDQLEAALRGRVTPHHRFLLKLHLDQIDALDAAIASIDKEVEGNLEPFRAAIELLSAIPGVSQLSARVILSEIGLDMSRFETAGHLVSWAGLCPRNDESAGKRRSTRMRKGAPWLKTILVQCAWAAMRTKGSYFQAQYYRLRSRRGSRKAICAVAASLLTTVYHMLKSGACYQDLGANHFDQKAQAKHVQRLVNRLENLGYDVKILPKAA

SEQ ID NO: 311795 - protein, 318 aa, unidentified
MPSFLGIDLSKETFHAFLLGDRADAKKVFPNTPKGFEQLTTWLKNRHTDEVHFCMEATGAYWEALALYLHGLDQHVSVVNPARIKAFAQSELLRTKTDAVDAALIARFCKSQSPEPWVPPSPEIRVLQALMRHCDHLKKTRAKQSVYAQSSDSSVVTASIREVIATLDEQIVQVERTIRQHFDEHPDLKRRRDLLTSIPGIGETTAGSILSEIPHLDRFESAKAVAAFAGLSPRERQSGTSIHGRPRMCKTGNARIRKALYLPAMVAIRFNPTLRLFGERLSAAGKHKRLINGAVMRKLLVLAYGILRSGVPFDPNYA

SEQ ID NO: 311796 - protein, 455 aa, unidentified
MQAPVEIAVDEVEQVVARVAGIDVAKASGMVCTRLPHESVPGRRVTRVWPVKSTTAALGELADQLREQGIERIVIESTSDYWRPFFYLLEAAGLSVWLVNAAQVKHVPGRPKTDKLDAVWLAKLAEKSMVSPSFVPAEPMRAVRDLARARFDLVEDRARVKQRVEKLLEDALIKISSVLTDVHGASGRAMLEALIAGQRDPKILAELARGRARARRVELEAACSGRFTDHHARLARLLLDQIDQLGKHIDTVTTLLDEAIAALPAPVPDPTGGSTADAGTPGPSTVDTGPAGYACAVERLCQIPGAGPDSVRAVIGEIGLDMSVFGTARRLCSWAKVCPRTVESGHKKGRARTGKGNRYLKAALGQMAVGAAKTDTFLSERYRRLVKRMPKAKARAALARSILVIIFQLLDDPTAEFADLGTDFYTRRIDKDRRAHQLTRQLQALGYTVALTPAA

SEQ ID NO: 311797 - protein, 468 aa, unidentified
MKKRTARRNRKKQAQFPGHLSHINLNAAGIDIGAESHWVAVPEGRDPGGSTVREFGCFTADLYALADWLVQCGITTVAMESTGVYWISLFEILDQRGIHVALVNPHHLKNVPGRKSDIIDCQWIQPLHTYGLLRGSFRPEDQICVLRGYLRQRAMLVRYASHPIQHMQKALDQMNLKLHRVVTDITGVTGMRIIRAILAEERNPVTLAQMRDPRCKNTTETIAKALEGNWREEHLFSLRQAVTLFDTYQDQIAACDAQTEAYLGTFVAHTQSPLPPKPGRKNPRIRNDPGFDAQSHLYRISGVDLTRIDGIHTHTALKLISEVGLDMTRWPTVKHFTSWLGLCPGSKISGGKVLNSRTKPSGNRAAAAFRLAAHSLHNSQSALGAFLRRKKAHIGGPKAVTATAHKLARLFYSMLKHGTEYQDPGVDDYQTRYQARVISGLRRKATALGYSLTEIEDLDQTLCAAVPG

SEQ ID NO: 311798 - protein, 400 aa, unidentified
MRTVFGIDVSKASSEVAIVINGEKIHGYTMPNDTIGFTRLLDDLKTVQKPEIIFEARGVYSHRLQAFLEENGYTYTRLNPLEAKKQLDSLRVRKTDKIDAETLAISQFVLNRKPTYIQEEVYQELRDLSRFYQNLTEDIVRTKNRLHKVLQVTFPEMENILSTPTREQYWNLVMTFPYKDFVLELSKDELLEGIRQSTSKRISDKRVAYLAQKLAALANQSYCAVKKNSPILEEVRYYAKELLRLSEQRQAVLEQMVELAQPLPEYEILLSIPGIAETTATSMIGELGDIRRFQSANQINAFIGIDLRHYESGNFLVKEHITKRGNPYARKILFKCIHNIAAASHTNHCHIEDFYEKRKRQSQTTSTKPHTIASIHRLIRTMYYLITHNKLYDYTSTQNR

SEQ ID NO: 311799 - protein, 343 aa, unidentified
MGEVSTIGLDIAKSVFQVHGVDVDGAVVIRKRISRAKLLEFFATLPTCLVGIEACPTAHYWSRRLQGLGHTVRLMPPSYVKAYVKRSKNDANDAAAICEAVTRPSMRFVATKSEEQQSGLMLHRSRQLLVCQRTMLSNAIRGHMAELGIISAKGRNGTAELLKIIADEQDDRIPAAARFSLNILARQYAAIREETVAIERRIHAWHRSSEESRRLEEIPGVGPIVATALMAEVGDWKTFSSGRSLAAWIGLVPRQHSTGGKERLGRISKQGNRHLRWLLVAGAMAVIRYARQHGTKRPWLARLMDRRPIKVAAVALANKIARMAWAMMVRGKRFNEPKLLPAA

SEQ ID NO: 311800 - protein, 406 aa, unidentified
MSTNACSDVFAGLDWAVHTHAVCVIDASGTVLERFEIAHDREGLSELMRRLARFGARVRIAIERPSGLIVDALVEAGHHVFPIHPNAVKASRPRYRSHGAKSDASDAYLLADLLRTDGHRWRELSPQSDSIRALRALVRSRDDLVATRVALGNQLRSTLEAFWPGAASIFADITSPIGLAFLKRYPSPARLSEAALRRFCRSQHYSGRRSPAELLARLNSAATGLAGPLTNEAAAQLVRSMVAVLQPLVEQIAVLTRRIERFVESLPDGQIIMSFPRAGHVCAAQILAELGDVRERFPTLDQLTADAGAVPVTYQSGKTRSVAFRWACNHRLRQAVTCLADNSRHANEWARGIYTAARARGCDHPHAIRILARAWLRVIWRAWTDRKPYDPELHLGAHKLASHQGG

SEQ ID NO: 311801 - protein, 370 aa, unidentified
MSYYVGLDLHSNNTYVGVIDSKERRVLKGKFPNQLEVILALLEPYKKRTVGVVVESTFNWYWLVDGLMDNGYKVHLAHPAAFKQYNGLKYTDDEHDAFFLAKMLQLGILPEGYIMPREERHLRDLLRKRLKLVRQRTTHILSFKSLVSRNQAISMDSNKIKTLTEESIDGMFENEHLVISAKANIAIMNYLKEKIVAIEKQIRNVTQIKPEHDFLTTVPGIGKSLVLTVMLETGDINRFKAVGNYASYCRCVSSKRLSNNKSKGENNRKNGNKYLAWAYVEIANCAKRYCPQARAFYLKKSMKTNKTLAIKALAHKLARACYYIMKDNVAFDVTKIFGKPILKNGCGREPNWGLGHQPSAPIGQPAAADL

SEQ ID NO: 311802 - protein, 430 aa, unidentified
MKQSELLHSLFVGIDVSMKENVVHAMPFSPEDHPGHAHLRFSAPNTPAGSVGIVEKVSDFLKFYPDVIQVVIALEATSVYSFHLATFLSVAHFNGHIPAIVYSVNPKEIHAYKKTFTDVGKDDYVDAMVIADYARSNKIRSRPWKGPELLGLRVLTRLRFRIAKLMGIVKNSTGNSIYLECSGLMTGENPFCNVWTTTCQELLTTFQGPDEILSLSDEELLNFITEKGHGRFSHPLDVVEKVKKAARNSYRLDKRVYEPLTSGLSVSFFIIHSLEAAIKKLDKSIETMAKSFSSDSYQILLSIDGVGPVIAGGLLAEIGDIKRFKTDDALAKYIGLTWRGKQSGQSESPVKHLSKAGDVYLRYYVLLATGQIINYSAKYREAYERIRSRKTLFPYRAALNLVARKIVRLIFTLLDKHQLYSDNKVMVTLE

SEQ ID NO: 311803 - protein, 453 aa, unidentified
MCLEDRPVLEPNAAGIDVGAREMFVAVPPGRDENPVRVFATFTEDLERLTDWLEQCGVTTVALESTGVYWIPLFEILEQRGIRPCLVNARHMKNVPGRRTDWHECQWLQFLHSVGLLRAAFRPGQDVCAVRTILRHRNELVAAASQHVQHMHKALTQMNLQIHHVISDITGLTGRTIVDAILAGQRDGAELAKLRDPRIKADTETIRKSLEGNWRPEHLFTLGQSRDLYRIYQQQIVNCDLEIEKMLQGFAPRIDPGEKPLPPDRKRNRAGSKRRRKNGHPHPEFDLRTEAYKLFGVDVSQIPGLEENALPLFSEVGRDMSRWPSAAHFVSWLALCPDNDISGGKLLWRGARRVKNRAGHLFRMAAYALHRSLTPLGNYLRRMKAKLGPQAATMATAHKIAVIFYTMIKNQVEYDETIWDARDAQREKKLQAKLKRQAKQLGYELVPIEPQAA

SEQ ID NO: 311804 - protein, 330 aa, unidentified
MDNSYFFLGIDVSKENLVVAGSDRQTRSFLNNAHGVGKLIKWAGENCDGRQPWFVMESSGAYSIRPATQLCGNHEARVSILNPGRVKAHGKACGIRSKTDPADAKLIRSYAVKHCDKLHPWKPAPQAYRRLKHLVDQVDFFNKQIRRIENRMEAQEFLEAGRAIEKINRQVIRGLERQIATLEKLLEELVAADELLDTQIKLMVTIKGVAKNSARQILALTRGMITEYSGNELTGFAGLGPAQRQSGTSLHGHSYIDKQGCPRLRGILWMCSLSAAESNLALKKFYQRLITRTDNRLTKKQARVAVMRKLLLLIRAVLVSGKPFDPQMNC

SEQ ID NO: 311805 - protein, 371 aa, unidentified
MKSILSVGMDVHKNSFSLCAYDGYTGEIVSESTFASDVKLVIKFIEALKSRYENDVEIKCGYEAGCLGYSLYKLLTARGVDCVILAPTTMQVSAKNKMVKNDRMDALNIAKNLASGSYKTVYIPDEEDVEIKEYIRMIHDFKKELKRVKQEICAFVLRHGYQYDGKSKWTIRYMNWIRELEMSEIQRETLNEYIAEMENLNDKIDRFMNRINEIYQSERYHEKVSKLRCFKGIETFAAMTIQVETADFERFPNAKAYASYTGLTTGEHSSGDKNNRIGITKQGNTVIRKTLVECAQALVKGNVYAKKSQRLKSRQKGMDVNIIVYADKATERLKKKYQKLIERNVPRNKAIVAVARELACFIWGMETGNIH

SEQ ID NO: 311806 - protein, 311 aa, unidentified
MNQSVVYIGIDVAKAHLDVAWAGVARRFPNDQRGRAALVAWIKQSRIAAPLHVICEASGGYEQALLESLEQNALKATLVQATRVRQYARAAGILAKTDTIDAKLLAAFGAVMQPKPTPALSVEQKRLRQYEAQRRHLGRVLLAEENRLVQVTCAELRTLSRSLISKIKRQIDTLDAGIAKLIAQDQALCDKAQKLTAITGVGARTAALLLAQMPELGQLNRSEAAALAGLAPFNHDSGSIRGKRAIFGGRRALRSGLYMAALSAARYNPILSSFYQRLRAKGKPHKLALTAVMRKLLLALNSSLKPEPVLA

SEQ ID NO: 311807 - protein, 406 aa, unidentified
MIYAGIDWSDRFHSFCVLDADGARLDRFEIPHGQEGFESAQARLGRHAQRVEDIMIAIETKDSLIVDFFSELGYVLHFLNPKQTDRFRDRHRMAHSKSDDFDAYVLADALRTDAHLFNALSPLDEQSLALRVLTRSRVNLVKRKVAVVNELKAALKRYFPVALELFDDLEHPGSIGFLLEYPTYAQARTVSAARITSLLKKAGAGEKSAVKRAEQIRQKLQTAQPSPSASAASAYPPAVKSLLRQLRSIVIELEGLDREIQTISKDHPNRDLIQSLPGIGDALGPVFAAEIGADVARFSGLKTLKAFCGSSPVTARSGKHQGVHFRRACNAHLRRALHLASAGAIITCAWARDLYDRLRAKGKSHGRALRAVGDQLVEILYAVLTRRKSYDEAYHLRMKSLHGKPV

SEQ ID NO: 311808 - protein, 456 aa, unidentified
MTHYFLGIDASKGYCDFVMLNANKQTVIENFQLDDTFEGHSRLYELLRRFNQDHPQSTIYAAVESTGGYENNWFQSLLSFQGSLPIKTAHLNPLGVSHNSKADLKRNVTDKISAKNVAEFMIAHPEKVSYQHQDSLASLRKQWGFITMLTKQSTQLLNQLESLIYNANPEILSYCKDNTPQWVLKLLMRYPTALRLSKAKVKSVARIPYVSAERAKQLVATAKKSVASANDEVTEQLIVATVKQIRHLKQIIDTQIQILANECRIPQVELLKTFIGISDYSAIGLMLQIQSVNRFLSSKKISSFFGVHPEYKKSGDGTFKYRMSKKGSKEGRRILFLVAMSAIQSNPLIRDVYQQAVGRGMEKMAAMGLCMHKILRIVYGMLKHKKPFDPQIDLRNRHKTASRQSSGDQDKNRRYQDFDSKAPISRRQKMRRKERKQSQNVDNVEYGIIEASVPVN

SEQ ID NO: 311809 - protein, 303 aa, unidentified
MDVHKETVVACLLKGSVNDDKPQKTIRTFSTLLPGLEELKAWLESENCRYVAMESTGVYWQPVYNILESALEGTMVVIVTNARHMKNVPGKKTDMKDAEWIATLLRAGLLNGSFIPPQTVRELRDLTRYRKSIIEELSSQKNRIEKHLQSCGFKLSNFLTDIFGVSGRAIINHIAEHGSITAEEVESYVKTRAHNKLQEIKLSVNGRMNRHQREFLRLLLKHLDETYEHLGEIEKNINSELEKFKRQIEQLDSIPGIDKTAAAAIIAEIGIDMSKFKTAEHICSWAGLSPGNNESAGKKSPLE

SEQ ID NO: 311810 - protein, 365 aa, unidentified
MQKISTMRTSGKNIFQGQLTMGVDLGDRSSAYCVLSEAGAIVLEHKLATTPETMKQVFGSMPRCRIAMETGTHSPWVSRLLTALGHEVIVGHAQKVRLITKSRRKDDRLDARTLARLARIDPELLSPVKHRSAQAQLHLTEIRARAGLVSARTALVNATRGLVKSYGERLRKCGTQQFTREITSGLSAGLREALQPLLREVESLNEGIQEYDRRIAKMAKQTYPETALLKQVKGVGDVIATAYVLTVEDPHRFRKSRDAGCFVGLQPGRRNSGDSEPQMHISKEGNEYLRTLLVQGAHYILGPFGEDSDLRRWGQKLAARGGKNGKKRAVVAVARKLAVLLHRLWVSGEAYEPLRNSQKAMSAAA

SEQ ID NO: 311811 - protein, 338 aa, unidentified
MYYTGIDLHKKTSFFTTVDKTGKVVARKNLLNDEEIILDYFATLEQQSRVVIESTASWYWLYDLLEAHGFDVVISNPLKTKAIASAKIKNDRVDSHMLAQLLRADLIPTVYVSPLELRELKELIRYRQRLVSDAKRMKNRIHALLRKNNQVVPFSDVFGVRGLQYLEQVQLPQYHRDQLHTYLSMYQKLVEEIKPLTQTLNGLATDKPIAKLLMSIPGIGPIVAMTIFAEVGDISRFPSYRNLASYAGLVPCLDASGGKYRMGSITKRGSRYLRTALVESAHAIARIKNCRLTLFFRRRIVRGGYKKAIVATAHKVLKIVYYVWKNRIPYQETYPVCA

SEQ ID NO: 311812 - protein, 355 aa, unidentified
MNDAKYIGMDVHQATISAAVRDSRGNLVMEAILETKAETILQFIRGLRGSLYVAFEEGTWAAWLHDLLQPHVARVLASDPRKNALLKAGNKSDRIDARKLSELLYLNKLSPVYHGEQGIRTLKELARSYITITRDLTRVMSRLKAIYRGWGIPCAGQQVYAPRYRAEWLSKISEAGVRRRAELYYQQFDVLAALRQGTRRELLAESRKHPAMRLLRQIPAIGPIRAALLIALIQTPNRFRTKRQLWAYSGLALRTYTSGEYRFVAGQLKRSKKVLAVRGLNINHNHDLKNIFKGAATRAAATAGPLQGFYQACVARGVKPHLARLTLARKITSITLLVWKKGARFDAEHLKQQAA

SEQ ID NO: 311813 - protein, 427 aa, unidentified
MKYTQNEKILQVTDETLVIGVDVASEVHYARAFDFRGIELDGVFQVPNDAEGFRNFTIWINELKTKHGKKNVMVGMEPTGHYWFSIGHYFQDRGIKVVLVNPFHVNRSKELDDNNPTKNDRKDPKTIAMLVKDGRYMIPYIPEGVYSELRIAMESRWHLVKQLNMIRNRVKRWLSIYFPEFNTVFKSWEGKCALIALREFPTPAQVLSKGTEAIAERWKKDKIRAVGLKKTMQLVAAAKSSVGVQEGLWAAENDLMMLLEDYEIKMKQLDRLMKMVESLVNQIPGIHEVLKIKGVGLVTVAGFMAEVGDISRFDHPKQIQKLAGLNLRENSSGKHKGKTTITKRGRKRLRALLFLAMMPLVAKNAEFRTLHQHYISRANNPLKRKQSLILLGCKLIRIIYALLKKQIAYDPEKMMNDIQRANASLAA

SEQ ID NO: 311814 - protein, 372 aa, unidentified
MTEFSKTLYVGLDVHKDSIAVAYAPEDRGAEVVSLGAIGPRQCDIDKLIRKLQAKGATLVFAYEAGPCGYGLYRYLTRKGFTCHVVAPSLIPRRAGDRVKTDRRDAITLARLMRSGDLTSIYVPGLEDEALRDLSRGRDDAMQDLKRSKRRLKSFLLRQDIRYEGRANWNAAHLRWLAQVVCPTPPQQIVFQEYVRAVTEQQERLQRVERELHEAVKGWRRYPVVEAIQALRGVELTGAVILMAELGDITRFETPRQLMSYLGLTPSEYSSGARRQQGGITKAGNSHARRALVEGAWAYRYPAKVSRHLQLRLEKLPAEIQAIGWKAQVRLCKRYRQLTARGKHVNQVVVAIAREMAAFAWAIARLVPVAAA

SEQ ID NO: 311815 - protein, 338 aa, unidentified
MALYCGIDLHSRDCWLAILDERLKVVQEAKVGNDLDALLQVLEPYREDLEGVAVESTFNWYWLVDGLQEAGYPMHLTNTWAVQQYEGLKYTDDRHDARWLAHLLSLGILPEGYIYPKEERSTRDLMRRRSFLVRKRTAFMLAMRGAFENRTGTRINSNDLKQWKVEDVEAHVDDPAAAFGITCLLEPMHALSLQIKKIEKEVLARGRLRPEFAPLETVWGIGKILGLTIMYEVGDIGRFRKVGNFTSYCRLVNTARLSAGKRKGSGNRKNGNPYLSWAYSEAAHHAVRHHPEAQKYYQRKRSKTNGIIAIRALAHKLARASYHVMRDHVDFDPGRVFG

SEQ ID NO: 311816 - protein, 424 aa, unidentified
MKVTYQTCCGVDVHKSFLVATIIKTTGGIEPSYQKKRFSTFNNSILEFKQWLLDNDCHDVCMESTGKYWVPVFNLLEDEINVVIANPKWVKAVKGNKDDTKDSKWIGDLFRLGLVKGSYIPCKAVRIMREYTRYRYKLVSCRSSEKNRYQNALTVCNVALDSVVSDIFGKSSTSIIDYLLDQSGTSINHEEIASKLLRNLKSKEDAVIESVEGYQMTDAQKYRVRLVRAHMDYITAEINDVDKMIENMISSNPDFENAVRFLCTIPGVKRDSAITIISEIGTDMSQFSGSKRLCCWAGLTPGSNESAGKKKSVWITRAGVYLKPALVQCAHAAVKSDKSPYYKKKYESLVKRRGKKRAIIAIARMILTAIYQMLSTGEEWNPSNLYKIDMPVALVEKQKAKAIRQAKKLLQREGTLPPDKPLAS

SEQ ID NO: 311817 - protein, 407 aa, unidentified
MERINPRCAGLDVHKDSVFAAARVDGKVLIEKFGATVAEILRLGDWLAGHGVRIVAMESTGVYWKPIWNLLEDRLELMLVNAHHIKQVPGRKTDVQDCAWIAQLLEWGLLRASFVPPRPQRQLRDLTRQRTQLLGDRARVVNRIQKVLEDANNKLASVATDITGKSARAILDALIDGKLSVQQMVELVHKRMEAKKPALRQALALPLKDHHRFMLRQLLSQIDDLDRMIDAFDARVQEVMSPLEQEAVKTLDQVPGFDRRTAQIVLAEIGSDMGRFATPAHLASWAGLCPGNNQSAGKRKGGKTRKANPWLKAALTQAAWGASRTRNSYFAAQHRRLAGRRGSKRATLAVAHGLLVTVHCLLSRGTSYVDLGPHYFTKLETDDQHAQKLVRKLRCLGYDVELKRTAA

SEQ ID NO: 311818 - protein, 348 aa, unidentified
MRNQPKGAVVYGIDLGKSVFHVVGLDAAGKPIQRAKFSRETLMQFFAVAAAARIGMEACPGAHWVARKLTALGHDVRIIPAQFVKPYVKSNKNDTVDAEAIAEALTRPTMRFVPIKRVDQIDLQARHRVRDQLVASRTALICQMRAFCLEYGIAMRTGAGAFRFDMQRVLADDTNDLSPSIRQLLQDLWSDLLVMETRIEKVSREIQAVADMDDVTRRLMSIPGIGPLGATALIAAVGDGKQFERGRDMAAWLGLVPAQYSTGGRTQLGAISRRGNPYVRRLLIHGARACLIHMDRIKNRLGEWLSGLQARLHHNKVVVALANKIARIAWVILTKPGATYQRIEPAAA

SEQ ID NO: 311819 - protein, 411 aa, unidentified
MDKVYDICCGIDVHKKLIVACLRNGNKNAIREFGATTRELLSLADWLKESDCKMIAMESTASYWKPLYNILESSGLNAMVVNAHHMKAVPGRKTDVKDAEWIADLLQHGLLQASYIPDKDQRELRELVRYRKSLTGERSRELNRLQKMLEGANIKLSGTVRDINGKSARNLLESLITGERFDEAKFDEMYSKKVIAHNLKASKEQIIDDLNGVMSPLQRRMMKELLVHLDELNAHIKNLDDEIDNFMKPEEKKASEAIQSIPGIGNTSAQAVVSVIGTNMNRFPTDSHIASWAGLCPGDHESAKKRKSGKTRKGNALLRSTLVTCAHSAVRNKQSYFYAQFMRISAHRGKKRAYVAVAHSMLIAIYHILKDGMVFKDLGADYYNQFNKERKINAYLKKLKALGWEAPVVAA

SEQ ID NO: 311820 - protein, 381 aa, unidentified
MQRIDPHQIRTAAEGYDTTIYVALELSKASWLVAINAPGGDKVSKYTVAAGATTALLAILTRARAQAERWCGESVRIVAIHEAGMDGFWVHRWLEAQGIESHVVDPASIAVDRRKRRVKTDRIDVEKLLRTLMGWARGERRICSMVRPPHPEQEDERRLTREREILVGERTRHVNRIKGLLMTQGISYFQPLRRDRRARFEALRLWNGTTLRSRLKAELLREFDRLELVMNQIQVIEAERDRALQIKSRDTIGALLVRLRGIGPEIASVLCGEMFHRDFVNRREVASYAGLAPSPWKSGTIDIDQGISKAGNPRLRKTTIQLAWLWLRHQPGSSLSRWFHARVGDRRGRIRRITIVAVARKLLIALWRYVTLGLVPEGALV

SEQ ID NO: 311821 - protein, 317 aa, unidentified
MTASDIFVGIDISKNRLDVALSPGDQTFTCPNNEAGIHQLVRRLQKLNPQIILLEATGGYEFLIVAALREAQLPACFINPKLVRSFARSAGIAAKTDRLDAKVLALFASRMQPQPRPLPTAEQQELKHLMTRRRQLLDMIQMEKNRLDPCPSPRIAQSIQQTIKSLDDQLAALNRQIDDFFQQHPLWVELAKTLTSVLGIGHLTALLLIAYLPELGRLNRKEIAALAGLAPFNKDSGQWRGQRHIEGGRSRLRQALFMATLAATRHNPVIRDYYLRLLNTGKAKKVALIAAMRKLLTILNSMVRKHQPWCPNAPITP

SEQ ID NO: 311822 - protein, 329 aa, unidentified
MNPQLRLSVVGIDVSKASLAVCYLRQEQVQHLEVSNSKTGFQQLVKACGAHCLFVMEATGSYYLALAYHLHEQGGQVAVLNPLVIKRFIQMHLSKGKSDRKDAQWLLRYGQQQAVKLWQPDENVLVECRQLEQVTEQLLKQKTMVSNSLEALQQQPIISKQALKRLQQTLNVLTQQVQAGEAELLTLLEQRFASEMTLLCSIPGIGRKTAGMLLLFAGGFTRLDNYRQLIAMAGLSPREHSSGTSIRGKVRITKMGGRLIRGKLFMCSFAAKKCNAACQALYNRLVAKGKNGKVALIAVCNKLLKQAFAIIKSGVPYQANFTSKLALNP

SEQ ID NO: 311823 - protein, 358 aa, unidentified
MAQHVGVQVLAFVGNPNSYLNSFRMLQGRDMTNADVRELTSLAFVGVDMAKESFDWAVHGEASRHTLPNDDKGFEGLLVALKAYRVGLVVLEATGGWEKRLARFLLGYGLPVAVVNPRAAREFARSMGHLAKTDAIDAMALAHLAQTLAAKADQAGVAFAPPLAEVEQLQLLVTRRAQLIDMRTAETNRLSGAGRALQRSITAVVKTLDKEIARVEGDIDAHLKSHFEEQARRFDAIKGIGPITCAVMLAFMPELGRVSNARAAKLAGLAPLNRDSGKERGQRHIFGGRSIVRSTLYMAMCSAVRFNPVMKIFHDRLIAAGKPKKVVLTACAHKMLRILNAMARKGQPWNEDLHPVAS

SEQ ID NO: 311824 - protein, 402 aa, unidentified
MTTDQLWAGVDVGKEYHWVCVVDATGAVVLSRKLLNDEQAIRTVIAEIDTLGKEAVWTVDLTMAYAALLLTVLADAGKPVRYLAGRAVWQASAIYRGGEAKTDAKDARVIADQSRLRDADLPVLHPDDDLIAELRMLTARRADLVADRTRTINRLRQQLVALCPALERAAKLSSDRGWVVLLARYQRPKAIRQSGITRLAKTLTDAGVRNAPTIAAAAVAAAKSQTVRLPGEEVAAELVAALAQEVIALDDRIKQTDADIEGRFRRHPLAEVITSLPGFGFRLGAEFLSAVGDPTRIGSADQLAAWAGLAPVPRDSGKRTGRLHTPKRYSRRLRRVMYMSALTAIRCNPQSRAYYQSKRAEGKQSIQATICLARRRTNVLYALIRDNRTWQPDSPPITESAA

SEQ ID NO: 311825 - protein, 337 aa, unidentified
MGHQARIQIARMGENDVMTPECFVGIDVSKDRLDVALRPTGERFSVDNTDPGVERLIRRLVEVSPALIVLEATGRYHRLALGELLAAGLPAIAINPRQARDFARAIGVLAKTDRIDAAVLAEFADKIRPEVRTIADEDTQQLEAVCTRRRQLILMLTAEQNRYPIASKAVRPKIKKHIHWLEAELEDLDEELKTRIRSSPAWREKEDLLSSFKGVGKVTSHSMLAYLPELGRLDRRQIAAIVGVAPFNQDSGKRRGQRHIRGGRRRLRNVLYMATLVAIRHNPTIREFHRRLANAGKAPKVAIVACMRKLLTILNAMLRSKSRWQPDFPLVSQDSLS

SEQ ID NO: 311826 - protein, 415 aa, unidentified
MKVNSHKHYAAIIGLDWADKKHDVCIMPSHKEQFEYSQFAHTPESIKDWSIALHQRFSGQKIAICLELKSGPIVYALLQYPWFDLYPVAPSTLAKYREAFSSSGAKDDPSDAYLMVDFTLRHSDKLRLISSDNEETRILTRFVEQRRLLVSEKVRLTHRISRALKDYYPQALDWFSDIDSVIFCDFIKRWPTLKKVRRAHESTLIEFFHQHHVRYQSRIDKRLEGIKNAIPLTEDNAVIEPSENYVLCLIKILRDMLSILHEYDQKIAERFKRHPDHEIFQSFPGAGPVLAPRLLTAMGSKRGRFASSDELVRQIGVAPVVKRSGQSTWIHWRYNCPKFVRQTFVEWANQSIHYSYWARIYYEQQEAKGKARQTILRSLAYKWARIVYRCWKNHEPYNEARYLMALKDKGSPLVA

SEQ ID NO: 311827 - protein, 435 aa, unidentified
MDIVHPRVAGIDVHKKVIWVAVRVPGAAPGERKVIVRSFKTFWRSLQKMAAWLAELGVTDAAMESTGVYWWPVYHALAQTEVIEVCVCNAAHMRNVPGRKTDIKDCQWIAELHEHGLLRPSFIPGQQVAALRARTRYRKKLIEHRASEGQRLSKVLEDAGIKIDSVASELLGVSGRDMIEALIGGERDPFRLAGLARGRLRAKLDQLEMACDGRFTAEHAQLCRVHLDAYDLLTGQIATLDQLVERAAEPFAAVIARLLTIPGIGPRIAQVIVAETGGDMSRFASSARLAAWAGLAPGDNESAGKRKKAAARKGNPHLRSAMVEGAWAVSRTASRPGARFRRLARRFGRLNIKKAAVAVAHTLLCIAWAVMKDDSDYAEAGADYYDLRDQRNHEHLVRHHQQALARLGYQVALMPPGDGKPPPGTDSSSPQQPAA

SEQ ID NO: 311828 - protein, 353 aa, unidentified
MANQAHSAVVYGIDLGKTWFHVAGCDATGRSLHKVKLSRSRVFPFFANTSVALIGMEACPGSQWLARRLQALGHTVKIMPAQFVKPYVKSNKNDAVDAEAIAEAVTRPSMRFVQVKQTEQVDLQALHRARDLIVSTRTRLICQMRAFCLEYGIAMRNGAGAFKLDADVLKVLNDDTNELTPAVRHLLRELWNQLQELEARIQKFTRQIESIASRSQFARRLLTIPGIGPLGATALLAAVGDGKQFKSGRDMAAWLGLTPAQYSTGGKSTLLGVSKRGNAYVRRLLIHGARSCVIHLDRTRDRLGSWITDLQRRMHINKVVVALANKLARIAWVVLTRPGALYQRVDPAFSGST

SEQ ID NO: 311829 - protein, 338 aa, unidentified
MNEFKVFVGIDISKKTFDAAVLKSDSPSKVIHQCFNQHQQGYKSFVSWLADQQISINEEVLICMEHTGMYINSLVDFLVSIHANIWVEMPLRIKRSLGLQRGADDKLAAINIAQYAFRFRDMVKLWKPVDTTLAQLRSLLAQRDRLVLTITQLTVPLNEMQECGNEAEAKQLKKLQQKAIAGLEKSLKAVEQAIDSKVCQEQGINKVINQVTSIKGVGRQTALKLYVYTHGFSAFENAKQLACYCGVVPFSKTSGTSVRGKAGVSPFANRKLKKLLHLCAMAALRCDKEIRTYYLRKVAEGKNKMSVVNAIRNKLLHRIFAVVRDERYYVENYTYRCA

SEQ ID NO: 311830 - protein, 433 aa, unidentified
MQDAQDEPLFAERVAGLDIAKAEAEVTIRVPSDTTPGRRQQETRTFTATRAGLLSLADWLRCWGVTKVGMEATGDYWKPVFFLLESRGFDCELYNAAQVKALPGRPKTDRADSIWLAKIVERGMISASFVPPEPIRRLRTHTRYRRHLTQARTAEKQRVEKLLEDGHLKLSSVISNIHGVSGRDMLDAIAAGQRDPKALAQFARGTMRGKIRRLEEALECSFFTDEHAAVLAMMLAVIDHYTAQIEALTATIETLTEPWLHQIAQLDAIDGIGTVCAQDIIAEIGPDMTVFPTAAHLVSWARWSPQVKQSAGKRKGSNATGRGNPYLSAALGEAAISAGRTQSFLGARYRRLTRRMPKKKALVATGNSMLVIIHALLSDPAARYADLGADYYEQRMHARRQARNHVKSLERLGYKVIIQALSPDTSQPLTTAS

SEQ ID NO: 311831 - protein, 458 aa, unidentified
MNRNKSKSKIDRTMPMVHPNAAAIDIGATMHMAAVRADRTPEPVRSFGTFTTDLHRLVDWFKECGVETVVMESTSVYWIPIFELLDARGFTVFLVNARDAKHVPGRKTDVSDAQWLQRLHSYGLLRASFRPKGQIAELRAYVRQRERLLEYAASHIQHMQKALTEMNVQLHHVVADITGATGLRIIHAILAGERDPKVLTRLRDYRCHSSAETIEKALTGSYRAEHLFALEQALALYDAYREKASACDARIEAVLKELSIGRGHSSDSLPSLGRDRSDQANALAFDARALLFALLGKDITQINGLGPYLSLKLIAECGDDLSAWPSAKHFTSWLGLAPSNKISGGKILSSRTRRCGSRASALLRLAAVSVGRTDTALGAFFRRLSARIGKAKAVTATARKIAVLFYNAVRYGMEYVDPGASYYETRYRTRVVNNLHRRAKAFGFVLQPMEPAPGVAVS

SEQ ID NO: 311832 - protein, 374 aa, unidentified
MQGTSPSRSVRARAERGNECHDGVANLINSLQKGKSMAILYVGIDLAKNVFAVHGVDEGGKPALVRPAVPRARLHELIASLAPCTVAMEACTGAHHWARLFAARGHAVRLIAPKFVTPYRMSGARGKTDAADAAAICEAVQRPNMRFVPIKSVQQQSQLMVHRARQGFVQARTACINRIRGLLAEFGHVLPLKANTVRRQAGALLEDLPGWANTVIGDLLSELHRLDERIAQYDRHIAQIAREDERAQRLMALPGIGSTTATAVVAMIGSGHEFNCGRQFAAWLGLTPGQYSSGGKTRLGRITKAGDGYLRSLLILGARAVLARAKASSDDISSWALALQQRRGYWRAVVAVAAKNARLAWAVLRRGEAFKMPA

SEQ ID NO: 311833 - protein, 329 aa, unidentified
MEHYVGLDVSLKLTAICIVDRTGKIQREGVVRSDPEAIAAFVISNAPHVVRIGLEAGATSTWLWTELNKLGLPVICIDARHAKAVLKMQINKSDRNDAVGIARIMQCGWYKEVRVKDLDSHAVKALLVSRALLVKIKRDLENQVRGLLKNLGLVIGPAKMNTFALRAEELIEERPELAVAVTPLLTARVAIEQQIADLDRRVMKLARNNVQVRQFMTAPGIGPVTALCFLATIDDPSRFKRSRSVGAYVGLTTRRCASGEIDWTGRISKCGDKMLRGYLYEAANVLLTRVAKWSPLKAWGIRLAKRSGLRKAKVAVARKTCRHPAPDVG

SEQ ID NO: 311834 - protein, 403 aa, unidentified
MSKRFFGFDTHKNFIVAAAVNAQQEVIVRPCKIASADLEDWILKHLGREDEVVLEAMSGSWIIHDLLVERVSRVVVAHPYHIKLIASSFVKTDKRDAIALAKLLAANIVPEVWIPPMHVRQLRSLIYERSSLVHRRSAGKNRLRGIYQSYRIVAPEGREAFEPEYWNSVDLPEVEKLRACHISEDIQVLTRQIQETEEMISQLSGRSPWVEDVAFLIQLPGIGLVTAMTILAAIGEIGRFPSSKKLTGYAGLGARVHSSGETHKTGGITKQGRRELRYAMIEAAWNAIKNNAFWKQKYEQLSRHMSNQKAATAIARKLLVLVWIVLSRHEVDRHADHATVGRSLLIWSWKNKLATSLGMKPIEFTSMQLDRLGIRLEKVTYCSRVYQVPIVDVPKEVSGVPNK

SEQ ID NO: 311835 - protein, 348 aa, unidentified
MQKLFVGIDVSKKNLDVAYWQQNENKDSKAIFLGKFANDADGFQTIAQAVEKIKDIEGCESIFLVMEPTGGYEQPMTYFAYNLGWQVSLPNPKQVKDWIRGTGTRAKTDKIDALMLAKYGAVQNPLDWKPLPEEVAQLDSMLSRLQVLKDMLASEKNQCESLGYRVVNHPIVSQNLGENMASLERQIKELEKAVQEHYKKHQHLREQRKRLKTVNGVGDRIADVMVVAMNRFDSLTDSSGTSKGITAYYGLDPKPYESGSSVRKRPGISRQGNTEIRHYLFMGALGGVGGRSGRKVDTPLRSFYKSLVDRGKPKKVALVAAARKILVWCWAVFRQGKPFDPTRCQHSH

SEQ ID NO: 311836 - protein, 319 aa, unidentified
MAKARTETFIGIDVSKDRLDVATYPREETWNTTQAPEDIDALARRIKKLKPALVVLEATGGLEMPIAAALSELNVPVAIVNPRQVRDFAKATGKLAKTDRIDAAILARFAQAVRPDARPVPDTQRQELKAILARRRQLIEMITMEKNRLHSAKVAKVRSSIKQVIASLKKQLHGIDDDLDQAIKASEAYRVKDDLLRSVPGVGPVLTSTLIIDLPELGCLNRKEIAALVGVAPFNRDSGKYKGTRRIWGGRVTVRTGLYMGALVAARHNPVIRTYYQRLLAMGKPQKVALTACMRKLLLILNVMLRDQSRWGQIRTAPA

SEQ ID NO: 311837 - protein, 397 aa, unidentified
MIAVGIDVSKSKSTVAILNGDGSIRAKPFDVHHVADELQALVDYIKRTSEPPTILMEPTSHYHYPLLKAFTEAELPVCLINPYQMKKYGDTELRKAKTDKRDSLRIAQYALEKSYSLIPYTPQDQKYEDLRFLSRQYSQRISTLTVAKVQLLSLLDETMPGITTILPLKSRDPDNCVLLRFIKRFKSFDVIRKMGKTRFLDSYQVLVKKTKDRFAGSKGLAIYELVLNSVTTRGENPLSAMTQDQCVDLVSTSQKAADEINLQMRIIAETMPEYKVLRSMAGVGDRLGPIILGEIGDIRRFHSGKALNAYAGNDAPPYQSGQFESRNRHISKRGNPALRKACFEVMQGLKLTKPQDDPVYLFLLKKEQEGKPYNVAKMAAVNKFLRIYYARAMELYK

SEQ ID NO: 311838 - protein, 407 aa, unidentified
MVETIWVGIDVGRHAHHAAAVDDAGTVLWSRRVPNDQAAIEAIVDQACRVESVVWAIDMTAPESALLRGVLSRRGQHIRYVPGRVVHSMTGAFAGEGKTDARDAVVIAQTARLRGDLATVAVPDDVAIELDLLTGHRRDLVTERTRGINRLRGLLTRIFPGLERCFDYSTLTGLAFVTRFTTPSAIDGVSDEEIYDHLRGQGVRRPTIPKMISKARAAAAAQTVTLPGEATTALLVQHAATSLVMLTRQIADLDKQITEVFRRHRHARILESVPGIGTRSGAELVAITGGDLTSFGSPARLAAYAGLAPVPHDSGNRRGALRRPQRYHRGLRKVFYMAALNSSQRDGPSREFYQRKRREKRSHVHALIALARRLVDVVWALIRDGRVWLPRPTVERVSVDEVGAMAG

SEQ ID NO: 311839 - protein, 339 aa, unidentified
MEKSEQIQPHAWILGIDVSKQSIDACLVRTSDGQLFESKFHNNLSGFRHLKRWCKEMKCECDSSTLCCMEHTGLYTRLLVHYLLSREVHVWLESSLQIKRSQGLIRGKSDKIDAQRIARYAHLYQDKARVMQLSVLTLEKLKDLQANRKRLMKALQSLRTSVQELKPFDPAIGKVLEQTNREAIRGLEKSLDKVDEQILSFISEDQELKEKYDLMLTVKGVGKVLAAMLLVYTHGFNRLTDSRKLACYSGVAPFVYESGTSIRGKTGVSKFANNDLKQVLHMAAISSVQHNSELHEYYQRKVLEGKNKMSVINAVRNKLLHRIVAVVKRGTPYELNFKK

SEQ ID NO: 311840 - protein, 441 aa, unidentified
MSRVIVGVDPHKKSVTIEAVNEHGQVLATGRFGTDSTGYRLMVRYVHEQWPHRRWAVEGAHGVGRPLAQRLLAQGEAVVDVPAKLAARVRVFDTGNARKTDATDAHAVAMVALRTPRLNQLAFDEELIALRLLTDRRDELSHLRVQTVNRLQRLLTELLPGGAKRDLSALQAKRLLATVKPRTLVGKTMRRMATEEIEDLVAVDAKLKAIKKELRIAVVARGSHLMDLHGIGPAGAARILSDVGDVARFPDRNHFASWTGTAPLDASSGDQIRHRLSRAGNRRMNHVPHIAAIVQIRHDTQGHAYYRRKLAESKTPMEALRCLKRRLSDAVYRQLVADARTPGADSADQQQAGPGGHSGATSQSSAADLHTPVIGSSDKPQPGPTESTLPRTKPRSNPSAASVASPSRRRAGAVKVERPTGRTTLTATSAGAHSTASRPRP

SEQ ID NO: 311841 - protein, 465 aa, unidentified
MTPRRDFIPKMYDPDSASLAAAVDTKLHILHPNAAGIDIGEAEHWVAVSPDRDPQPVRRFGTFSADLHALADWLIACGITTVAMESTGIYWIALFELLESRGLEVVLIDPRQAKRAPGRPKSDVLDCQWLQRLHTYGLLSGAFRPEEQVCVLRVYLRQRQMLISRAAEHIQHMQKALQQMNLKLTQVVSDITGVTGMAIIKAILAGERNRLKLAQLRDPRCRHSEADIAKALEGTWRAEHLFALRQALELYEVYQQQRLACDEQIEAHLKTFDDKSDGQPLPKPPRRKSAKANAPSFDARPLLYQMTGVDLTAIEGIDTGTALVILSEIGTDMSRWPSVKEFSSWLGLSPQARISGGRVLSSRVRPGAQRAAHALRLAANSLHNSQSALGAFFRRIKARRGTPKAITATAHKLARLIYSLLKNGSAYVHQEMQAYEAQYVERKVKQMTQQARALGYQLVPLNAEP

SEQ ID NO: 311842 - protein, 340 aa, unidentified
MRLIGCDLHARQQSIAMLDRDTGVVVEKTLKHEGEAVREFYASIPPPVVVGIEATGSMGWFLRLMEELAIECRVGHPMAIRKAEVRRQKHDRRDAALLLQLLAEDRFPTIWMPSTELRDLRALLLHRHQWVRMRTRVQNALHAIAMAHGVRRGHTLWNREGQALLASLPLAPHTAHRRSELQALYQHLDAHVDRLGERVKEVADERPRATLLMTHPGVGAVTALATEVFVGDPCRFPDGKAVASYVGMIPSEYSSGQRQRLGALSKQGNPFLRFLWCEAAAHAVRRDPDLQRFYRRKMAQKGFAKANVAAARKLGIRLWIMLRDQIDYAEFCRRGLARQS

SEQ ID NO: 311843 - protein, 313 aa, unidentified
MPQFVPKAGIDCSAARLDVHIHPLDIAFSLANDADGWRELDRRLKLVQVEVVALEASGGCERETCRFLIEHGYSVRLLDPYRVRQFAKAAGKLAKNDRIDAAVIALFVATLPTRPMVRLKHLERLAELVLARAQLLDQLTASRNQARWHQNALLRRLDSRRLERLEADIKTLDRNIAEQVEADRQLKATNAILRSMKGVGPVLAHTLLALLPELGRLGRKQIAALVGVAPIEDQSGKRQGVRFIQGGRPTVRTPLFMAAMVAGVHNPALKAFRERLRQAGKKPKVAVVAVMHKMITILNALVRDGVKWQNNHV

SEQ ID NO: 311844 - protein, 390 aa, unidentified
MEARTVNNLPPAASHDDDAVRCVLAIELSKKSWIVAVNTPLSDKISRLTLKPCDGKELLDLCERIRTRVARETKQRVEIVSCYEAGYDGFWLHRLLEAHGIRNYVIDPASLQVDRRARRAKTDRVDAERLLRSLMAYLRGEPKVWSVVRVPSVAEEDDRRLHRERGRLINERIQHVNRIKGLLAIHGIYDYQPLRRDRMQPLDRLRTADSRTLPPRLKAEILRELQRLELVIGMIKAIEAERDAIALAKAQTEHTSAKKIQDLAKIKCIGPEFANTLAGEVFYRSFDNRKQLASYVGLTPAHFQSGATCHDQGISKAGNAKARRVMIELAWLWLRHQPDSPLSVWFRGRVGKLKGRIRRITIVAVARKLLIALWRYLETGLVPDGAALKL

SEQ ID NO: 311845 - protein, 286 aa, unidentified
MTITTIGIDLAKNVFAVHGVDQNGKTVLVKSRVTRAALPGLIAGLPPCVIGMEACSGAHYWARLFRQYGHEPRLMTAKFVSPYRMAGKSGKNDAADAQAICEAVRRPHMRFVPVKDESQQAMQCLHRTRQGFIEEKTATYNRLRGLISEFGVIAPQSTDALRRMVSVQKSSLPLQVQQCVDDLLEHVDCIEANISEYDRILSRMAKTDHRSQRLMELKGVGPTTACALVACIGNAHDFKNGRQLAAWLGLTPSQYSSGGKSKLGRITKAGDSYLRTLLAQGARSVL

SEQ ID NO: 311846 - protein, 357 aa, unidentified
MTTEQRQQTLFVGVDVHKDTHTAVGVSPFGEKLFEITVGNYKKDFEVLTDKVKEMSGTLSPYYGLEDCHGYGERLSAYLYENGHQVLAVPAIMVDHARQKATHPEKSDSLDALGVAKVMMQNMDSLPAYTISEESKKAKQIKELSMDREYLVEERTRLKNQLHSLLHRIWNTEYKDKYKDPFSLKALRYWSKSKPKCDPFLLRSMKRKVKRVLDIHYEIIDLEKEMGTLLDENHTVQTASGCGVTIAGMIVGEIGDINRFQSPGALAKYAGCAPRECSSGKTHRHKKTRSGNRRLNCAFHRMALSQISRSGNEKAKAYFKRKVSEGKSKSQALVCLRRQMVNIVWCMMKNKTVYRIA

SEQ ID NO: 311847 - protein, 343 aa, unidentified
MKLSRVGVDLAKNVYQLHGVDRHGKTVWKRRLRRGQWLQALLDKAEPGCEIGMEACTGAHHWARELQSRGYKVRLIAPQFVKPYIKSNKNDANDAEAICEAMSRPTMRFVTVKSVEQQDIQATHRVRTELKEQRVAKANQIRGLVAEYGLVAPQTLLALRRAIPCWLEDADNGLTDHFRSLLHGLWGDLVALDDRMTELDKQIKALADNNEVTRRLQQLRGVGPLVATALVATVGTGEQYRKGRQMAAALGLTPRQCSSGDKQRLLGISKRGDVYLRTMLIHGARAVVSQAKHRDDRLSRWVTSIAKRSHANVAAVALANKTARMAWAMLRNDSNYDPDFVNS

SEQ ID NO: 311848 - protein, 344 aa, unidentified
MLIIGCDFHSGFQQLAIFDMKTGEIQERKLLHPGEAAEFYRSQGGPVRVGMEAGTPCQWFRRLLAECGHELWVGDAARIRAAEVRKQKTDRRDAELILDLMRHGRFPRIWVPSEEERDVRQLLMDRHHRMRRRTQVKNQLQALALNQGLQKGRKLWSAAGMQQLRELPMMEHAARRRDALLRTVGELDAQIAELDVLVRRQAEGRPDARRLMTHPGVGPQTALGMVLTLGEVGRFESAKKVASYLGLIPGEYSSGNKQRLGHISKQGSSLMRFLLVEAGQTAVRGDEPLRRAYARLAAKKNRAVAKVMVARRLAVRLYWMLRREWTYAELARHAGEPGSFRGEQ

SEQ ID NO: 311849 - protein, 382 aa, unidentified
MSQTASRWNSTAMGSGLFMALELGWSKWRLAFGSAMDQKAWQMTIAARDVMALTRAIGKARQRLGLPSDCPVFSCYEAGRDGFWIHRLLLKMQIHNIVVDSSSIEVARRARRAKTDRLDAAKLLSMLQRHHAGEKKLWSIVHVPTPEQEDGRHLQRQIRTLKKEQTRQLNRIRGLLANQGVAVRANRGGLLEPLDSIRIWDGSPLPVGLRRRLEVEIARHAFIHRQLLDLELERDARIRQSQDRAAQIARHLMRLRGIAQVGAETYSREFSWRGFTNRRQVGSLIGLTPTPHQSGDSSREQGISHAGNRHMRGIAIDLAWLWLRQQPHSELTLWFNRRFAHASPRLRKIGIVALARKLTIALWRYADFAEIPKGALLKSKAI

SEQ ID NO: 311850 - protein, 408 aa, unidentified
MAGKIAGIDVHKKVLMVVVIDARTPEEKPERRRFATMPTELRRLLNWLQAQEVEEAVMESTAQYWRSVWMELEPHMCLHLAQAFSNRAPRGRKHDFKDAERLVRRLIAKELILSFVPDGEQRIWRNLSRMKLQLVRDRVRLRSQIECLLEEMRIKLSVVVTDLLGSSGMRILHALAQGETDAKRLALLGDERLKCSEEQLIEALTGRTHPVHAQMLMLQLERLRLLDEQITKLNSLIAQAMTAHQDAVIRLAAVPGLGIDSAQQVIAEVGVTAATFSSAAEFTSWVGTCPGREESAEKNSSSRSAKGNKYMRRLLNQAAHAAARSKGTHFQAVFRRLLPRLGYQSAVWAIAHRICRIVWKILHEGVSYIEQGTQPEPKLLIYRAQYLAKQLRKFGYNIQITPPNTATA

SEQ ID NO: 311851 - protein, 336 aa, unidentified
MKIVKQCIGIDVSKDALDCCIGSIDSNQNQSFSKSKKFTNCEDGFKEMLKWVKIEKEEEIVFIMEATGVYYENLAYWLNHHDQKLCVLLPNKVKYFAKSLNLKTKTDSQDARLLSQLGLERKLSYWYMPSKMMREIKFLSREYRETKAKLVQMKNQLHARHHSYGCPKSVERRLKKQISLLETQLLEIEAELRLQAMADSKLYDKIVSLSTIPGVSFMTIICILAETNAFALVDNAKQLVSYAGLDIQHNQSGMKEGKTRISKKGNSFIRNALYMPALCASKHNPAMKEFYNQLIERKPAKKIGITAVARKLLILMYVLWKNDTEFNPLFEQQKVA

SEQ ID NO: 311852 - protein, 392 aa, unidentified
MICVGIDVAKDKHDCFILNSEGEVLADVFTIPNNAEGFDTLLQTIRRCTRPEDKIKVGLEATGHYSYNILGFLLDNGLNTYVINPLHTNLYRKSLSLRKTKTDRIDARTIATMLMSDVDLKSYTDTSYHNEELKSLTRYRFDKVHERAKLKSSIARLVCILFPELEKLVSTLHMASVYALLSEFPGAKQVASAHLTRLTNLLHEASKGRYGREKALQIRDAARKSIGSAMLAKSLELKHTIHLIGELDAEIEEIEAEIDSIMETLHSPITTIPGIGNRMGAMILAEIGDFSNFDSADKILAYAGLSPSTYQSGQLTSSYAHMEKRGSRYLRYAIFNATKFVCNWDPSFAAYLAKKRGEGKHYNVAISHATKKLVRLIYAMEQTKQPYRQAAV

SEQ ID NO: 311853 - protein, 400 aa, unidentified
MLLFFEVITMIFVGIDVAKDTHYAAVSDDSGAVLVKPFAFQNNAEGFCLLLKKLSEFDRSKLLIGLESTGIYSENLICFLYESGFRLAVINPIQTATLRKTAIRKTKTDKVDTMLIIKSLMVNSYRLYSQRDADSLKLRTLCRFRQNLKKSKARLKIQLAGYVNIVFPEFGKFFKSGIHIAASYALLKKYSSPKEIAALRTSTLCTLLSKASHGRFGKDTAEALKSLALSSVGVKNPYISIQIAQTIAQIELLEQQIKDLNSAIEEAMESINSVLMTVPGIGAVNAACILGEIGDIKRFSKPCKLLAYAGLDPTVRQSGQFTAKSSRMSKRGSALLRYALINSAWQLTLNDTTFKAYYDLKRSQGLNHYGALGHVAHKLTRVIFKLLTSDTPFNPAKLVA

SEQ ID NO: 311854 - protein, 403 aa, unidentified
MNMNAVGIDVSKGKSMVAILRPYGEIISKPFEVKHTVSGIRSLIEKIQSIDGESRIVMEHTGRYYEPLVRELSKADLFVSAINPKLIKDFGDNSLRKVKSDKADAVKIARYTLDSWTELRQYSLMDEIRNQLKTMNRQFDFYMKHKTAMKNNLISILDQTYPGANTYFDSPAREDGSQKWVDFSATYWHVDCVRKLSLNAFIDHYQKWCKRRKYNFSRSKAVEIYEASKELVSILPKDDLTKLIIKQAVEQLNTASQTVEQLRTMMNEAASKLPEYPVVMAMKGVGKSLGPQLMAEIGDVSRFTHKGALTAFAGVDPGVNESGSYEQKSVPASKRGSSTLRKTLFQVMDVLIKTKPQDDPVYLFMDKKRAQGKPYYVYMTAGANKFLRIYYGRVKEYLSSLPE

SEQ ID NO: 311855 - protein, 465 aa, unidentified
METKKQSERRKKNRASKTQHSVNTVAHPDAAGIDIGAEELVVAVPHDRDAQSVRTFSTFTSGVLAMRDWLVSCKINTVAVESTGNYWITTYDILEQAGIEVYLVNARHVKGVPGKKTDVCDAQWLQQLHAAGLLKKSFRPAQDIVPLRYLMRHRSSLIEDSSRQIQLMQKVLTEMNLKIQHVFSDLDGVSAQAIITAIVAGERDAKTLARLRDPRCRSSEQTIIEALGGNYRTEYIFVLQQSQNLWKQQIGAIATCDEQIEQLTRKIYTPSRPLAEPPATGTRSKPRPQKGKNAPGYDVLAEAKRFYGVDLSEIDGVNSGLLSVLMSEVGTAEQLKAAFGTSERFCSWMGICPDNRISGGKVLKAKTRSVKSRLAGALRLCAFGLCNGKIKLGDYTRRMKGRLGKAEGITATAHKIARIIYAMITNQQPYDEETAFKITPRNRERQILRIEKQAAQFGFKIVALA

SEQ ID NO: 311856 - protein, 342 aa, unidentified
MQITTIGLDIAKHVFQVHGIDANEKVIVRKQLRRGQVIAFFKTLPPCLIGMEACATAHYWARELTKLGHKVRLMPAKDVKAYVKRNKNDAADAEAICEAVRRPTMRFVRIKSAEQQGQLMQHRTRDVLIRQRTQIINALRAHLAELGIVAAQGDAGVNELRAIVADDRDERLPIDARASVIVLAAQLEALQTLIGSIEKRIKMQHRSNETSQRVETIPGIGVLGATAIVATAADPTVFRSGRDFAAWIGLVPRQDSTGGKQKLGPISKQGDRYLRRILVVGAIAVLRRAQENPGKYPWLTQLLARRPFKVVAVALANKMARTAWALMVHGGTYRAPELAEAA

SEQ ID NO: 311857 - protein, 349 aa, unidentified
MMIIGCDCHPSFEQIAFVDTETGELQERRLQHREEAEKFYRNLAAPGMKVRVGMEASGHARWFERLLAELQFELWIGDAAVIRTKRVRKQKTDRQDAQLILQLLLENRFPQIWVPSWENRDLRQLLWHRHRMVQTRTRVMNQLQAVALNEGLRCKKRLWREAGREQLEAFPLAPWASRRRRDLLELLDRLSPTIAELTQTIEQEAEKCPAARRLRTHPGVGSLTALAFVLILGRAERFQCGKQVASYLGLVPSEESSGDRRRLGHISKQGNTLLRFLLVEAAQVTVRSLPEWRSKYFHLAMRRGRKIAKVAMARKLAIQLYWMMRKEWDYEQVRRFGPHAGQPEHRRGV

SEQ ID NO: 311858 - protein, 307 aa, unidentified
MMIIGCDFHPSFQQIAYVDRETGEYGERRLSHREEAVGFYRPLAGRSVRVGVEATGNDRWFRKLLSELGHELLVGDASAIHASAPRQQRTDKRDARHILKLLVEERFPSVWQPPAANEEQRQLLLHRCRLVRMRTRIKNQLDSMAKSEGLTGSRRWSQKRRRQIEALRLTGWYAERRADLLGLLDEMELRIKPLDQAVEAAAEQNGAARLLMTHPGVGPVISLAYVLVVGDWRRFPRGKQVGSYLGLIPSEASSGKRQQQMGHITKQGNTLLRWLLVEAATTAQRYDPSWHRQYLRLSMSKHHGVPR

SEQ ID NO: 311859 - protein, 343 aa, unidentified
MESIHYVGLDVHKKTIAYCIKTFSGKTVRHGVISAERKALRQWVSELPTAWMGAMEATIFTGWIYDFLTPHAVTLKVAHPEMLKAITAAKKKNDRADAEKLADLLRVNLLPECTMMPEELRELRRILRYRNMVVRTAVKMKNKMSGLLMEVGAPYDKRRLHGRKYFDQLLERVEDVPASVKELLQLSRSNLELFEAVQKKLIKTLRQNPRIRERVERLMSIAGVGEIMALTWILEVGDSERFSNSRQAISYCGLCSAQRESAGKEQRGPISKKRNKHLQTMLIEAAKLAPHWNPQLAALHERELARGNRNRATLAVARKLVEYLLAVDRRGTPFVAEVPSQVA

SEQ ID NO: 311860 - protein, 417 aa, unidentified
MNLPPETIPIQRYIGIDIHQHYLMIGGQNRHQEWTLRPRKVQVSRFRDWAEKNFQPGDAVVIETTGSVWDIYDIVAPLVSRTLVAHARKVRQIAEARVKTDKEDIKRLITLLIADIVPEVWVPPMHVRELRSLISFRWRLTKQITMSKNRLHSVVQRFNLDFPEGGLLTDKNKSWWDRQEFSDLTGFEVKQDLEIVKALEGQKEAIDQKLAELSNTEPWSSDMVYLMQIPGFGLIFSMVILSAIGDIKRFSHPRKLVGYAGLGAGVHDSGKKHQGKSITKEGRKELRWALVEAAWVAVRFDPFWKAQFQRLEKRMPRNKAIVAVARRLLVSIWHILTKREPYRHFDEETIAYKMLIWAQAIGEEGRQGLTRQQFAKYGLLRLGIGKDLERIVKGGGPRRIAPTEEVLALKPELAPPR

SEQ ID NO: 311861 - protein, 423 aa, unidentified
MKLAAEQPFTALVGIDWSDKKHDFCLQGADSRQREFGVVAHRPEAIDSWAKALHQRFGGSIAVCLEIAKGPLVHALQRYPFIVLLPVNPATIAKYREAFVPSHAKDDPTDAEIALELLLRHRDKLQVLKPQSAAMRALTTLVEQRRNLIGDKTRITNRLCSTLKEYFPQALDWFEDRDTALFCDFLQRWPSLKHVKRARQATLRSFFCEHNMRRTELIEERIRGIRSARALTEDVAVIGPHQLLVLALIAQLRVTLQAIDQFDVEIADVAKRLPDYALFAALPGAGAILAPRLLVAFGEHRERYASAAQLQQYAGVAPVLERSGNKRWVHWRIACPTFLRQTFVEWAGSTIPRSFWASAYYQRQRDKGCSHHAALRALAYKWIRIVYRCWQTRTPYDESTYLHALKRRGSPLIAALSVALQSP

SEQ ID NO: 311862 - protein, 375 aa, unidentified
MNDCITKTVYVGIDAHKKTHTLSCFSLGMEKPKYSMKIDADIDHILIYLETMRGEFFGDETDFICGYEAGCLGYTLYKELKEKNIKCKIIAPTTLKHETGSSKRKNDKRDSLDISKALAIGDYSEVHVPTEEDEAIKEYIRMRDDHKAQLKAIKQQISAFCLRHGFKYGKKTLWTSEHIKWLESLGIEGVLKETLDEYLITFRYHTNKVEKFDNRIQEFADSDNYKEKAGKLGCFLGIKTHTAMSLLTEVSDFNRFEKAGQFASFLGLTPGEHSSSDSINRLGITKAGNSHLRRLLIEAAQSIGRGKVGYKSKALKQRQEGNTSQVIAYADKANERLRRRYYKMIQSGKSSNTAKTAVARELACFIWGMMNDKVL

SEQ ID NO: 311863 - protein, 337 aa, unidentified
MEYFAGLDISMAETQVCVVAQSGAVIHKAKVPSTPADIAGELAQLPACRRIVFETGRMAPMLYHGLRELGLPVICVESRQAYQALKLLATHKTDHNDARGLAHLARTGFFKPVHVKSLPAHAIRSLIIARKKLVGQRVTLENQIRGLAVVFGVRLPRALSSDFIRQALQASNGIAGLSAAMQGLAAARAAVLAAILAIDADIRRMVRASDACQRLMSIPGVGQLTALAFTAAVDDPGRFRRSRDIGAYLGLVPRRHQSGEMDYTGSISKCGDRRVRTLLYEAANVMLTRYKGPLQLKDWALAVARRSTMRKARVALARRLAIIMHAMLKHGTEFKPA

SEQ ID NO: 311864 - protein, 406 aa, unidentified
MRYVGIDIAKKDHQIAAVDEFGNVILKSFSAGNNESGFAKIAEKLEAARIESDECLVGMEATGHYWISLWEFLDANGYEVVVINPIQTDAFRKVDSLRKTKTDAIDSVLIAEYLRFANPESSKMANPDVEQLRELARFRSFLVEQATQLKNKAIRVLDQAFPEYGKLFSNTFGEASKALLKQSPTPEEVLATDIRTLTRILKENSGGNCGRAKAEAVKDAARSSIGAKFGARALSFEIKLLVKRLSFTQVQIEELEDEISELLHRSDGHWLTTIPGIGDSLAASIAGEIGDPDRFETPKKLIAYAGMDASKYQSGANQDTNGHMSKRGSSELRRALMLAADKVRIYDPYFGEYYDSMKARGKHHYVALSGVARKLAGVCLSLMREQRPYESEPPEHHLPGHLQRQA

SEQ ID NO: 311865 - protein, 325 aa, unidentified
MFQAHGVNAAGEVIVRQRLTRSRLLAFFDKRPPCLIGIEACGSAHYWARELIRLGHEVRLIPPSYVKPYVKRQKNDMADAEAICEAVTRPSMRFVPVKSPDQQSVLVLHRTRSMLVRQRTQLSNAIRGHLSEFGLIAPKGRNGLQVLKEILEAGDERVPAAALACLQMLYGQLELINEQILVSDRAILASARSTEVGRRLMEIPGVGPLLASALVATISDPAAFKSGRNLAAWIGLVPRQNSSGGKERLGSITKQGDRYLRQMFVVGAVAVIRYAVRNGARRPWLVQLLARRTPKVAAVALANKNARMVWALMTSGERYRDPVAA

SEQ ID NO: 311866 - protein, 429 aa, unidentified
MNFRPIAGIDVGKFFSEMAILSPSNEVIARMKIRHDSSTDVERAVELLKKTEKDFDSRPFVVMESTGHYHKILFHSLYKAGFEVSVINPIQTDSIKNIGIRKVKNDKVDARKIALLYRFQELKTTNIPDEDIECLRSLCRQYYKLSDELTAYKNRLMGIVDQLMLNFKDVFPNIFSKAALAVLEKYPAPVHILKANRNKLIALIQKNSRRSLKWATAKYELLNSKAKEFAPLSISNSSNVAMLGVYISMIKTLEENLEKVLKAIRSLIIEDMAKDMPMLALTLELLQSIPGIGLISAVTILAEIGDFSAFSKPGKLVAYFGIDPSVMQSGEFTGTQNKMSKRGSRLLRRVLFTIALANIRTKRDKTACNPVLMEYYKNKCQSKPKKVALGAVMRKLVNYIFAVLRDRKPYELRSPQEHAQMLAAKHTVA

SEQ ID NO: 311867 - protein, 337 aa, unidentified
MNYVGLDVSVGRTAVCVMDAAGQVVREQSVASTPQAIAKAIGATGVVERIGLEAGINSAWIARALADAKLPVIVIDATHAAAALKTGFRNKTDKNDARGIADLMRVNKFRAVSVKSVAAQRDRALLTVREQLRRQSLDARNIIWSILQVEGLKPPKLTSPAFQVLVTQSLDDDALAPLLRPLIAVVEQIDHQLAGLDREISARAKKSAACKRLMTVPGVGPLVALTYAAGVDDPARFSDSRTVGAHFGLTPRRFQSGEMDWSSGISRAGDAGVRRALYQAANVLIHHSRGWCALKSWAMRVAKRRGLGKAKVALARKLAVVMHRMWITEEDYHLKAA

SEQ ID NO: 311868 - protein, 366 aa, unidentified
MSSVTRDRESIHLGLDVHKNSITAGVLEPDADTAVMTRIGPDDDAVRRLIRKFPDKTQLRVCYEAGPTGFTLARTLTKWGVDCEVIAPSRIPKQPGDRVKTDKRDAAKLARLHRAGMLTPIRIPTEGQEALRDLCRARQDTYEDLKRVRRRLLAFLLRHGQVYRTTSTWTREHHRWLNQVHVDEPAARAAFEHYRAVEQVREAELDAMTRELLGWLDREPFTEPVHRLAAYRGVAYISALGITAEIGEWSRFRRATGFMSFTGLVPSEQSSGDWRHQGEITKAGNVYVRTHLIESAWQYRHHPAVSTELRRRHEHVASDTIARSWKAQQRLCGRYRRMTARQVNPNIVITAIARELAGFLWAEMTS

SEQ ID NO: 311869 - protein, 424 aa, unidentified
MVDMQVLYARCAAVDVGKDVIAVAVRLPGDGSDGRQTLKRTFKTFYGVLRDAAVWLTSLGVTHVAMEATGIYSMPVYHALVEHGEFAQVLVCNAGHVKNVPGRKTDLADAEWLVHLLECGLLRGSFIPPAEIKAARDVVRYRTKLVQSRTSELQRLGNVGQDAGVKVDSVASSITTKSARAMIEALIDGERRPGVLADLAKGKMRTKIADLARALEGRFAAHHALMCRLHLDHIDHLEVMIARLDAQLDAMMQPFRAQCDLLSTIPGIGELTSAAIISEIGVEVTEFFSTAAHLASWSGLCPGNHESAGKRYSGKRRKGNQHLQPVLVEAAWGAMRHEGYLKSLYHRHVMKWGGYRSPAAKKKAIIVVAHAMLVIVWHVLATGTPYHDLGADYFTTRLDPERETRRLVTKLQALGHNVTLEPAA

SEQ ID NO: 311870 - protein, 320 aa, unidentified
MLSFCGIDVSKDRLDVLVLPEGHRSWVPNNVAGWAELVEQLRDCSIAAIGIEASGGYERGAMRALLAADLPVRQVNPFKLRQFARASGVLAKSDPLDARMIASFVATMPTRPAPRQAPAAERLTEMLAVRRQLSAEKVAAENASRLVEDAMLQRLSRRRIARLAADIDVLDQRLVEIVATDVALAHRYRLLTSMPGVGSVLACTLIALLPELGRLSSKQVAALVGVAPYAFDSGALKGRRCIWGGRANVRQVLYMAAMSASNWNPVLKAFHDRLAAAGKLPKVVIVAVMRKMITMLNAMVRDDVLWADRLSGRHIVPTTR

SEQ ID NO: 311871 - protein, 408 aa, unidentified
MNPLFVGIDVSSKNNVAYLMKPDGSKHSSFSVQNNLGGAKLLSERIVSALGSMQLERVVIGLEATSIYGDSLVYALREDGRLGRFQRKIHVLNPKQVRKFKEAYSDLPKNDWVDAFVIADHLRFGRINREVYMDDYRYKALQTLTRARFDVIQNLTREKQRFANYLFLKCSGMAQDKDIQNTSATTIALMEHFETVDDLANADLEELTAFITETGRGKFADPDATAKAVRAAAKGSYRLPKTVNDTVNQAMAVSIASMRALKGQVKVLDKAIEQQFEIIPNTLTSIPGIGKVYSAGIIAEIGDIHRFDSQASVAKYAGLVWNRSQSGDFEAEHSRMIKSGNRYLRYYLLEAANSVRRCDSEFRRYYDLKFKEVNKYQHKRALALTARKLVRLVFRLLNDNRLYIPPEG

SEQ ID NO: 311872 - protein, 317 aa, unidentified
MAKVPPTYIGIDVSKARFDMASSPCRTMKSFLNDRSGTDELVKYLCAVKPVLIVLEASGGIERALVRALVAAELPVAVANPRQVRDFAKATGKLAKTDALDAQTLARFAEAVRPALRLLPNEMTLELRALVGRRRQIIEILTAEKNRLSRASRRIQTRIQAHIDWLESELERSNEDLDEAINQSPLWREQQDLLKSVPGVGYVISRTILAELPELGCLNRKQIAALVGVAPLNWDSGLMRGRRVIWGGRAHVRTALYMAAVTASRCNPVIRDFYKRLRAAGKPANVALVASIRKLLVILNAILKHHVRWRPVVDQLD

SEQ ID NO: 311873 - protein, 343 aa, unidentified
MDYFAGLDVSVKETSVCIVDDAGKIVREARVASEPEALLQVLTNTIYRFKRVGLEAGPLSQWLYSVLAEAGLPVICVETRHMRAVLKAQINKTDRNDARGMAQMMRAGLYRPVHVKTLRSQKLRVLLTHRKLLQSKAIAIENELRASLRNFGLKVGMIGTMKFEARIRELVERLPDLAVLVEPLLIVRRVIREQLGILHRRLLAIVRGDDVCRRLMTIPGVGPVVALTYRVTVDVPARFRKSKAVGAVFGLTPAKYQSGENDRTGAISRCGDEMMRIMLYEAAQSMLVRTAKWSWLKAWAMKIARHRGMKKAIVALARRLAVIMHRMWVDGTEFRWTRELPVA

SEQ ID NO: 311874 - protein, 413 aa, unidentified
MSDQKRWYGGVDWASESHHVRLIDEQGRDVGEKIFKHAGEGLAEMVAWLLATSGAAEPGQIDVAIEVPHGPVVETLIERGFAVHVLNPKQMDRFRDRYTLAGAKDDSRDALVMASALRTDPHCFRRLAATDPIIVELREWSRIAEDLGGERTALTNRLRQQLWRYFPAFLDLDADLGAPWLIELWQAAPTPDKARRIRKASIDGILKRHRIRRLDAPQILEILRQRPLAVAAGTTEAARAHIVTLIARIRLINRQLAEAHHQLDTLTARLGAAEEAEPGQIKQRDADILASLPGIGRIVLATLLAEATDALQRRDYPALRTLTGVAPVTKRSGRSHFVVRRHACHRRLANAVYHWARIATQHDRTSRAKYAALRARGHSHGRALRSVADRLLNVACSMLKTGTTFRPAFANPK

SEQ ID NO: 311875 - protein, 403 aa, unidentified
MVKYHVGVDVGKDRHYVSIRVLSNDTYCKAFPITNDHDGFMELVAIVEKLSPEKSDFLIGVEACSYALNLSYFLMEAGYNLVEVNPFRAGQFRKAQGKKAKSDKIDARTIAAILSLGDHKSLSVPDPILDNLKELTRFRAGLVDEKATMIIHLREALSALFPEYAKVFRQLDSAGSLALLAAFPGPEHVIAAGEETVGKTLSMASPRRMSRGMARRIIEAAKDTVGVVQKQPALGIKVSVLAKRIVGLKSTIRDLEKQITILFNQLPYKPQGFPVGRPPTLAAIVSEIGDIRKFPTLKKFLSHLGWCPQSFQTGNFRLEHPRMSHAGNKYIRRLIWMLSVLSIRMVPRCQEYFQRRVMEGKAKMHILVALGRKLLSALYAMLKRGVAYDPNWEENRCVAMAGR

SEQ ID NO: 311876 - protein, 352 aa, unidentified
MQIVYERCCGLDVHKKSVVACAITPEGKEIKTFGTTTKEILALLDWVTAKGCTHVAMESTGVYWKPIYNLLEQADITAFVVNAAHIKAVPGRKTDVKDAEWIADLLRHGLLQGSYIPDRSQRELRELVRYRRSLLSERSREVQRIQKVLEGANIKLSSVATDILGASGRAMLEAIVNGIDHPETLAKMAKGRLKNKHDQLVDSLQGLLSDHQKMMLDLQLRHIDSLDQAVARLNKEIEERMRPFEREIELLDTIPGVGRQAAEEIIAEIGVDMSRFPSSTHLSSWAGMAPGNNQSAGKRKSGRTRKGNKLLRTTLTERGPRGCTHQRYLSICSISPDCLPPGSKSSRCCRRS

SEQ ID NO: 311877 - protein, 458 aa, unidentified
MAQSRPKSANRRSAPPEALPHINRNSAGIDVGSASHFVAVPADRDDHPVREFAAFTGDLYRMADWLQACGIETVAMESTGVYWIPVFQVLEERGFEVKLVDARQLKRVPGRKTDVADCQWLQQLHSFGLLGGAFRPDDQVCVLRSYMRQRAMLVRYAGQHVQHMQKALVQMNVQLQHVIEDVTGATGMRIIRAILDGERDPHCLAALRDNRCKNSVSTIAKALQGDWREEHLFALQQAVELVEAYQAKIADCDTRIEAQLQTFEDRSGGQTPPKGHPSRHDRHDLGFDATAELFRMTGVDLVAVNGLEAHTVLKVLSETGLDMSKWPTSKHFGSWLGLAPNNRVSGGKVMSRRTIPTANRAAAALRVAAQALHHSRSALGAFLRRKAAQLGMPKAITATAYKLARIIYGILTEGTAFVERGQDYYEQQYHDRVLKNLTRRATEFGYCLVKQEQAPSSA

SEQ ID NO: 311878 - protein, 312 aa, unidentified
MSSALYVGIDVAKAHLDLALRPAAAPQRFPHDEAGLSALVQYLHPRQPTLVVLEATGGYEADVAAALAVAGVPVAVVNPRQVRDFARATGRLAKTDALDAVVLAQFAEAVRPPARPLPDAAHQALTALVRRRQQLVEMLTAERNRLPLAPPTIRADVQAHIHFLEQRLKQTDRDLKQVLRASPIWRTADQLLQSVPGIGPATTAMLLAWLPELGQVSHRALAALVGVAPLNLDSGTRSAPRSIWGGRAAVRGALYMATLVATRWNPVIKAFYGRLRDAGKPPKVALVAAMRKLLTILNAIMRSKQPWTVENA

SEQ ID NO: 311879 - protein, 341 aa, unidentified
MNVTTIGIDLAKTVFSIHGTNPHGKVVVRKRLNRPKLLAFFAQLPPCLIGMEACSGAHYWARELTKLGHDARIIAPRFVAPYRKSSKNDDNDAEAICEAVSRPNMRFVPIKTEDQQAVLCLHRIRRGLTKERTAQINQIRGLLAEFGLIIPQGRYHARHRIPEILEDAENGLPMLARRLLNNINQRILQLDEEILAYDREIEAMARRDEQAKRLMAIPGIGPQTATAILASAPDPRQFKSGRHFAAWLGLVPRQYSTGGKPRLGRITKRGDKYLRTLLIHGSRAVIAKLADKHDQLSEWVKGLVERRGYKRAAVALAAKNARIIWALLMNQTEFKTQPVAG

SEQ ID NO: 311880 - protein, 340 aa, unidentified
MLYIGLDVHKEFCQACVIDESGRALSNERFSSTSEELDRFLDRFQDAKFVLESTGIWEFIYEGIEKRGFEAVLAHPLRVRAIAEARVKTDKVDAETLAQLLRADLIPRSWVPSRDMRDLRQLVRQRAYLVRQASRFKNRIHAEILRRGVRRPENLKTPFAQRSIRWMRSLDIPTVTSCLNCLENIQAQVEEMNIQLLEEYNRRPDAQLISTVPGIGFYGALLILAEIDDVSRFRHPEKLCAYAGLVPTVSQSASSVKYGSISKDGSAYLRWILTESVHVHTRYEPGSQLSRFHARLAKRRGRRVATVATSRKLLRIIYWMLVRHEPFHSHGFNPVKRVHC

SEQ ID NO: 311881 - protein, 416 aa, unidentified
MNAAGIDVSSRKSTVAVLRPFGEVVKLPFDVRHSAEDLAALAAQLKSIDGETRVVMEHTGRYYESIAKVLHEAGLYVSAVNPLLIKEYGNNSLRKVKTDKADAMKIAKYALDNWTELRDYTPMDTIRYELKTLNRQFQLASKQKTATANNLIALQEQSFPGIRKLFDSPVRSDGTQKWVDFTHDFWHVDCVRSGNQNAFAERYRKWCKRNRYQFSMEKATEVYALAKSSVVLVQKTSVTKTLVQEAANQLTAISRSVETYRSEMNKLASQLPEYPVVMEMYGVGESLGPQLMAEIGDVRRFERKQSLVAFAGIDPAPSESGDYCSRSNRTTKRGSPYLRKTLFNIMKVHLQRAPADEPVFQFLDKKRAEGKPYYVYMTAAGNKFLRRYYGKVMAYFSTLEGLPPVDMDSTGLHHAE

SEQ ID NO: 311882 - protein, 323 aa, unidentified
MLTRAQGVNMKKAMEIFVGIDVAKAWLDIAVHEQEEAFRTGNDDIGIVSLVKRLKKLKPTLIVLEATGGFEMLMVAELTHTGLPVVVVNAKRIRDFARATGRLAKTDKLDAKVLAHFAAVVRPALRSLRSEEEEQLTALLTRRRQVLDMLTVEKNRLVTVRAKMRSEIEAHIQWLSRSLKELDHEIKDFVAGTPVWKEKDALLQSVPGVGPVTSATMLGMLPELGKLNRQEIAALVGVAPVNKDSGKKQGKRRVYGGRADVRSVLYMAALAAKKFNPVIRKFYERLIKHGKEKKVALTACMRKLLVILNAMMHTNQPWRTQAA

SEQ ID NO: 311883 - protein, 414 aa, unidentified
MEVKYERCCGLDVHKKSVVACVIMPGSDKQAVKDTRTFDTMTEDLEALSRWLSESGVTHVAMESTGVYWKPVYNLLDGRFEVLVVNPEHVKALSGRKTDVGDAEWIADLLRHGLLKGSFIPSALLRELRDLTRYRTKLGDERKSEVNRLQKVLEDANIKLASVASDIMGASGRAILNELVQRNTDPVLLAELAKGRLREKQDLLEKALRGTLKPHHRFMLAQHLSHIDFLDEAIERLDAQIGEQMHPFEATIQRWDSLPGINRRIAEIVIAEVGADLKSFEDADHLASWAGMCPGNNKSAGKRFSGKTRKGSKWLRRALIEAAHGAAHTKEKYFQAQYRRLAARRGKQRAAVAVGHSLLVTGYHLITRQETYQDLGANYFDERDRQAVKRRAVQRLERLGFQVQLQPVAALAVS

SEQ ID NO: 311884 - protein, 423 aa, unidentified
MAQIQTVKELGHGIRAIAFFIVDKMEGPVVTTIVGYAFESFSCFENTEPHWEYWSMSKLRFIGLDVHKDTIVMSVAVAGTDEANLVGSFPNDVNRILKQLKKMSSDRSLLRVCYEAGPTGFGLCRRLNQAGIDCIVVAPSLVPRQAGLRVKTDRRDSRKLAHFLRSGDLTEVWVPDEQTEALRDLERSRDDAKNAERSVRHQLSKFLLRNDRKYSLGREWTQKHMAWVRTQQFDDPCRQCVLDEYIKAVEDVTERVKGLMKYIETYVQTHSLQPLVKALMSFRGIQLLSATVIAAEIGDLRRFKTARQFMAFLGLVPSERSSGKSIRRGSVTKTGNAHVRRILVEAAQHYRHSPRMSAALRQRQEGVSEDVVKISWEAQQRLCRRLKHFIDNGKTRNKAIVAMARELAGFIWSIGQVSQLLKS

SEQ ID NO: 311885 - protein, 374 aa, unidentified
MSFQSNTILVALELSNTLWFVGTRLPGAQKSCMHRIKAGDTTALLTVIGELRSRQSVVSGCSSTLACCFEAGRDGFWLHRLLTAHEIPTYVVEPTSILVNRRAKRAKTDRLDAEGLLRVLAGYLAGDHQICSMVRVPTPAEEDGKRVHREREYLVQERTRIENRMLALLATQGVRSRPSLRSWERDMASLKTGDGRMLPSRLTAELNRLRRRLGLVLEMIRELDTEREEFLAATPDDAIAAKITALRGIYGVGDNFAAVLVREIFYRTFGNRKQLASYVGLAPMPHQSGSIDRDRHIGRAGNARARKTLVQMAWLWLRYQPTSELSAWFRQRVGELQGRTRRIAIVAMARKLLIALWRFTETGEVPTGIVFRTA

SEQ ID NO: 311886 - protein, 460 aa, unidentified
MNQYFLGIDASKGYSDFVMLNAKKQPIIENFQLDDTFEGHSRLYEFLRRFNQDYPQATIYAAVESTGGYENNWFQSLLTFQGSLPIKTAHLNPLGVSHNSKADLKRNVTDKISAQNVAEYMIAHPEKVSYQHQDALASLRKQWGFITMLTKQSTQLLNQLESLVYNANPEILIYCKDGTPQWVLKLLTRYPTALRLSKAKVKSLVRIPYVTAERAKQLVATAKKSVASASDKVTEQLIVATVKQIVHQKNIIKTQTQILANECDVPEVQLLKTFVGISDYSAIGLMLQIQSVNRFLTSKKISSFFGIHPEYKKSGDGIYKFRMSKKGRKEGRRILFIVAMSAIQSNPLIRDVYQQAVERGMEKMAAMGLCMHKILRIVYGMLKHNMAFDPQIDLKNRQKKPSRQSKVDQDKDRRYQDFDSNAPISRRQKMKRKERKQSQNVDNVECGIIEASVPSTQLAN

SEQ ID NO: 311887 - protein, 353 aa, unidentified
MKYVGLDWAYRTAQWCALAPGGEIAGEGRIAADRDGLARLVLELGDEVKACLEMMSGALWVRDELVECGWQVEVADARKVKTVAPLAAKTDKVDARLLAELCRRQLVPALWLPSLDERALRERLRRRMHLVRLRTSAKGRIFGLQTQWGVRVSLARLRRGDGLMLLERAGVPEVWRRSVSECLAVIDFLDARLQPLDRELKPFAHADPRALLLDTIPGVGELLALTIAVEIGEISRFANPQKLVSYGRLAPRVRQSGQAQPRSGPLSKSGSRLLAWAAVEAAQQAWRESNPWHELYREVSGRSRNSNSAKAAVARKILIAAWHMLSRNEPFKPAARCTSGTSVPASSRLALAA

SEQ ID NO: 311888 - protein, 338 aa, unidentified
MTIVYIGIDLAKNVFAVHGVDQAGKPALVRPSVPRGRLHELIASLPACTVAMEACSGAHHWARLFAQHGHTVRLIAPKFVAPYRMSGVRGKNDAADAAAICEAVQRPTMRFVPPKSLEQQSQLMVHRARQGYVENRTACINRIRGLLSEFGHVLETKADTVRRQGCALLEELPGWANTVIGDLLSELHHLDERIAGYDRHIQAIAKEDARARQLMQLRGVGPTTATTIVAMIGSGHEFRCGRQFAAWVGLTPGQYSSGGKTRLGRITKAGDAYLRTLLILGARAVLAAAKNKDDSISRWAMALEARCGYWKAVVAIAAKNARMAWAVLARGESFKMPA

SEQ ID NO: 311889 - protein, 319 aa, unidentified
MVCAGIDTSKRKLDVAIAASAKRLQVDNTAEGHVALSAWLRQHLVERVGIEASGGYEQEVVAHLRREGFIVIVFQPAQVRAYARFLLQRAKNDKIDAGLIAACTAATTKIHAPPDPRLAPFAEQMTLIDQLTDDISRFKNRRESCHEPHNRQFWKTQISQFKRMQKVEIKALARAVRQHQDLAERLDLILSVDGVGLPTALAILARMPEIGRITREQAASLVGLAPFDDASAEREGERHIAGGRARLRGRLYMAALPAAMRWNPELMALYQRLTAAGKPHKVALVACARKLLIFVNTVVERGTPWVSKRSPSAALGAAT

SEQ ID NO: 311890 - protein, 341 aa, unidentified
MKIFVGIDIAKLNHFAAAISSDGEILLEPFKFTNDADGFQLLVSKLESFDKNSIIIGLESTAHYGDNLVRYLVAEFYQVCVLNPIKTCQMRKNNVRKTKTDKVDTFVIAKTLMMQDDLRFITFFDLDMMDLKALGRFRQKTIKQRTRLKIQLTTYVDQVFPEIQYFFKSGLHQHAVYALLKEAPSPKEIASMHMTHLANLLKVNSHGHFTKEQAKELRVLAQKSVGANDSAISIQITQTIQQIELLDSQLDKIEAEMTDIMKFNDSVIMTIPGIGYINGGMILGEIGDIHRFSNPNKLLAFAGLDPSVYQSGYYQAKQTTMSKLGSRVVRYSHVYAAWKVV

SEQ ID NO: 311891 - protein, 375 aa, unidentified
MLQPLLGKLARGAKVKEHVMSEKLNSAIAVIGIDIGKNSFHVVGQDSRGAIVLRQKWSRGQVEARLANLSQCLIGMEACVGAHHLSRKLQALGHDARLMPAKYVRPYSKGEKNDYRDAEAIAEAVQRPTMKFVATKTADQLDLQALHRVRERLVGQRTGIINQIRAFLLERGIAVRQGLHFLRAELPAILAKRTDVLSPRMLRIIEDLAIDWRRLDDRIEGVTGEIGALARQDKACERLMTVPGIGPIISSAIVAAIGAGDAFSKGRDFGAWLGLVPKQMSTGDRTILGSISKRGNRYLRCLFVQAAWVVLVKIGPEGWERYGLNSWIEAAKKRLHRNVLAIALANKLARIAWAVLNKGRAFECVKTNATASQSA

SEQ ID NO: 311892 - protein, 450 aa, unidentified
MEPRVITVGLDLALRSKHTAVMQAPGGKPRNLRPFPTRPQDLSAMLEQVRSQAGTSDKIEFIMEPTSNAWFPVSRWLMARGFQVYLVRPEKVADLRRYLRKHHKSDTIDAKTLVWLGQRDRDNLFPARLQTEKQTACFRMCKQRARMVADISRIKTRIGDLAELAVPGLHAKLQDLFTQMGRKLLREYMNPHRTARLGLERFCRMCAQAHHGPIDREDLKSLFEVFVDASHLYRQAAETEELDLDLDVLQREITDELTHLTFLEPQIQKLDPMIEELYEQIDPRKVLTAIQGIGPIIGAALTSKIGNIDNFKNIAAFRCHCGLIPRKKQTSKTDREGMKITKAGNRYLKLYLYMAAECARQWDPEFAQFYARLAGKAKKHHKKVIVALANKMASRVYAVMKKAVRNPDTQEALYQLRDLHGNAVSKTEARRLSLEILRQGKEERSAGAVH

SEQ ID NO: 311893 - protein, 350 aa, unidentified
MIIIGADYHPGFQQIAFVDTETGELQERRLEHREEAEKFYRDLAAQGMKVRVGMEASGHARWFERLLSELQFELWIGDAAEIRTKRVRKQKTDRQDAQLILQLMLEDRFRQIWVPSWENRDLRQLLWHRHRMVQARTRIMNQLQAVALNEGLRSKKRLWRDAGREQLESFPLAPWASRRRRDLLELLDRLNPTIMDLTHTIEQEVEKCPEAQRLRTHPGVGALTALAFVLIIGRADRFQCGKQIASYLGLVPLEESSGQRRRLGHITKQGNSLLRFLLVEAAQVTVRSDPAWRSKFFHLAMRRGRKTAKVAMARRLAVRMYWMWRKGWDYEQLQKFGSHAGQPGNRDGVQ

SEQ ID NO: 311894 - protein, 417 aa, unidentified
MADDLGWFAGVDWASETHQVTLLDALGTVIGEHAFLHGGAGLGALCEWLLAVTGAPAETIAVAIEVPHGPVVETLLERGFLVYAINPKQLDRFRDRFTVAGAKDDRLDSRVLGDSLRTDRHCFRPLHLADPVVVELREWSRMAEDLQQERTRLGNRVREQLWRYYPQAIQLTDDVAADWFLEFWALVPTPAKAVKVRKETIAKFLKAHRIRRIDAEEAQRILHQTPISVAGGTTEAATAHIRMVALRLKVVNRQLKEAHRRLDTLCVNLAGSEEPEPGQSQEQRDVTILRSLPGVGRIVLATLLAEAWEPLRRRDYHALRSLCGVAPVTKRSGKRCVVVMRQACHMRLRTAVYHWSRTAIQHDGLSHRRYAELRKRGHSHGRALRTVADRMLAVACAMLRTHTLFDPSRAGAEKAAA

SEQ ID NO: 311895 - protein, 316 aa, unidentified
MTTSSIVVGVDVAKDRLDVAVRPTGETWSTANDEAGITALVARLRPLGPGLVVCEATGGFERAAIAALAAAGLPVVVANPRQVRDFARATGQLAKTDQLDAGILALFAERVRPTPRPLPDAAAQLLDAVLTRRRQLLEMLVAEKNRLGFAPKPLHRGIQAHIRWLERQLDDVTKELARLIEASPVWRAKDDLLQSVPGVGPIVSFTLLGELPELGTLSHKQIAALVGVAPLARDSGSLRGKRLVWGGRASVRTALFMAALCGRRWNPTLKVFYERLKAAGKPTKVALIACARKLLTILNAMMRDQSRWTSNVQYSC

SEQ ID NO: 311896 - protein, 430 aa, unidentified
MGLIVPTAMHPEREDQPMPYEWFVGIDWGSQRHQVCVLDRDRRRVGERAIDHDGASLAQLAAWFWTVSAGPPQRVAVAIEVPRGAIVEGLLARGFHVFALNPKQLDRFRDRHSVAGAKDDRRDAFVLADAVRTDQPSFRRLQLDAPQLLRLRELSRAEETLLEDFRRSANRLQDQLHRLYPQMLKRCSAAEASWLWDLIDLAPPPAHAALLSEENVQGGLKAHRIRRVTAQEVLACLQTPALPVAPGAAEAAPAHCGCLLPCLRVLAEQLQACSQQVSVLLRTLAEEPGEGEGPSHVAMVLSLPGVGRKITAWLFAEAAQPVAERDSQVLRTHGGVAPITKHSGKRRVVVMRRGCNPRLRHALYHMARVAMQRDAHFRRVYAALRAKGQRHGQALRNIGDRLLRILMAMWRHRTCYDASRIRREPVVQMG

SEQ ID NO: 311897 - protein, 395 aa, unidentified
MKFKMQNKQNQLIERISLKHLVVGVDIAQQLHVARAVNFRGIIVGDPLTFKNNEEGFASLLEWIKSLQRLNNLSEAIVGMEPTGHYWINLSKWLNKHHTEVVTVNPHLVKKNKENRDNTQSKSDKKDALVIADMVKNGYYSEVRYTSEPFEKLRVLMSNRDVVVKRLVSSINQLNRWVDIVFPELRQVFKDIKAKGAIATLRLFPSPKELETMQPHEVIAGWKSIMKRQPGLKKALLLLQLAKKSVGTRQALDAYKFHLEQLLEEYDLAVTQLERVEQQVTEALNRIPFAKKLLTIKGISEISLAGILGEAGDLSGFSHGNSLLRHAGLHLAEASSGKWKGQIVISKRGRSRLRRFLYLATMSLVMNNPEFQAIHSQNVKVKKSEENEINYEANR

SEQ ID NO: 311898 - protein, 349 aa, unidentified
MRNEVKKLDFSNQSIFVGIDVHLKQWKITILGEYCSFKTFSQPPYSKILINHLDSNFPNASIKCAYEAGFSGFGLYYDLLEEGIDCIVVNPADIPTKDNEKRQKTDALDSKKIASCLRSNSLDPIYVPSWETIGIRNLIRTRNRFITNRTAVKNKIKHFLYFNDIHLPDEFKGTKWNKDFIIWLKQSAFCLEMYLGLLYSVEAQIKKCTVKINDLAKQDKIGKMLSLLKSIPGIGTMAGLTILSEIDDIRRFRKLDQLSCYVGLVPHMHTSGESEYIGGLTVRGNKKLKSVLIECSWISIKKDPAMLLAFSKLCGRMQKNKAIIRIAKKLLNRIRHILITNEPYKMAVS

SEQ ID NO: 311899 - protein, 310 aa, unidentified
METYVGIDVAKDKLDVHVRPGGEAFCVPRDANGLIELVQRLQALPAPLLIVLEATGSFERTAAAALAAAKLPLVVVNPRQIRDFARAVGRLAKTDAIDAAIIAHFAEALQLEPRPIRDDEAQALDDLVSRRRQLIDMIVAETNRKKAIASKRIVREIDHHLLYLQKLLTELDGDLDDAIRASPVWREKEELMVSVPGVAQKTARSLIAELPELGTLDRRRIASLVGVAPMNRDSGTMRGKRKIRGGRATVRSALYMAAVAAIRWNPPLRETYQRLRVAGKPAKLAIVAVIRKLIVTLNAIIRDKTPWKTA

SEQ ID NO: 311900 - protein, 338 aa, unidentified
MKQILLTVGIDISKAEFHVCIVIKYDDGSVKIKGKHSFSNNYEGFLECISYVAKRKNDDCEVLYVMEATGSYYENLALYLHDNQQPVAVVLANKIKHFAKSHNVKSKTDKKDSELIARYGQERNPSRWKPMSKGFRNLRDYSRELLSIKTKRTMAKNQLHALSSTDATAKKIIELKEQEITFYDKQLNVIESMLFQEIEKDTVLHSRVKKVATIKGIGLSTVITILCETNGFELFSNIRQVVSYAGLDVSQNESGTIQKRTKISKKGNSRIRSCLYMPALSAIQHNQPITQLHARIVERNPTLKKKGIVAGMRKLLILVFVLWKKNEEFDPNYQWKAA

SEQ ID NO: 311901 - protein, 346 aa, unidentified
MPIVGGLDIHRKQITFDYLDTATGQVRRGQVSPADREHLRGWLARFAGRDDAAFAVEGCTGWRYVAEELAAAGVTVHLAEPADTAFARGRKRHAKTDKTDCRHLRQLLAEGRLPECWIPPGHILECRALLELYNDLRREHTAWAQRIHAVLFHQGGPAMGEGALRTEQGLAALREAAAAHLSPAGQLQIVTALEVTEALEARMHVLRHQLVDAARHLAGAKVLAARLYGVGPVTALALTCWLGGAGRFSSSRKAVRFAGLDVTVWSSDRKGPPGRLSRQGPPVLRWAVYEAGKTHARSSAPDHAYYAQVKENNGGKRAALSEARKIIRQACHILTELGDDALAPAA

SEQ ID NO: 311902 - protein, 358 aa, unidentified
MTKKHTQTTLDVSIEYAVIGLDLAKYDVSLAAVTLNEGEVILIDRVTYAELYEIADKLSPTLFAVEPCNGYSQLNLELEARGHEMRVISGKAVKMWIDTHMSGQKTDINDALALARLTADPDLRPIRAKSLEECRIMTVQGVRQQLVGQRTKTIVSFKGFAQAWGIGIPAGRRNLKKMREAVEAKAELMGAAAVSALTTMLDRVKTLDDQIHQLDKDLEALVSANANGRLLKSVMGVGTQIAGRFITVVGDVKRFEKPRSLVAYIGCVPKNFITGHVNKPRQKKSSAPDLSSKGQGRISRRGDKLLRSLLMQGAACIYMQYCKRQLPDCQLTKWIDKQLAVRKPYGKIMGGALLRRKI

SEQ ID NO: 311903 - protein, 362 aa, unidentified
MEKVHFTGLAERLQLISEVAMTTIKYSVGVDIASSTFTASVGEIPWQVVVKPQTFENTEDGYQTLLEWFAQHHLSASETVVCMEATGVYSEGLAYFLYAKGYRVAVQSPLEVKRTFKPYGPKSDAVDSLQIAEYACRHTDKLSFWKPRGEILEQVKALLAVREQFVSQNTAHKNALKAIQRKVVRTPFAEQAYLQLIEQVKRQIQAIDIEIRRLIESDPTFKEMLLLLLSVPGVGLLLAAHFILLAQFSLEYKILASFLGISPNEHSSGTSVFKHATSRHFGPPAIRKLLYLAACSVCTHRPQFGMYLARKTREGKPARLVLNNVENKLLRIMCAVLQSKTAFIENYHPVQPLVFQKTLTAS

SEQ ID NO: 311904 - protein, 388 aa, unidentified
MQHVIAFDVSMGKSYMVIYNAQKQCIFESEINHSKPDFEELRKRIDQLMNENKKPPHIVFEATGVYSRQLERFMQDNKFEYFLLNPLEAKLQCDSLRIHKTDRSDAHQLALTHFTASRRKKTGTDNLFYQLKSLSRFYSELDDELSLIRSRMHKVIQLTFPELEQIFTTKSDLFLNFVQLFPHPDFVQNLSKTVMKNQIRKNTNKNISISIAEKKAMEVLEAARYSYPAVRQDDVLCEQLKSYAKRYQELLYQKEQCITKMVRLAESRTEYPIILSFPGIGPNTAIRLLAEIGDITRFENNKQLNTFAGIDIRRFQSGKTFFKDKINKRGNKHLRKLLFLIIQNMIKLRRYGQNHIVEYYDKLKTQPYNKCHKVASIACVNKLLKLLF

SEQ ID NO: 311905 - protein, 299 aa, unidentified
MPQSTTLYVGMDVHKESIAVAYIANAPHAEVIYLGSIGTRQCDIDQLIRQLQSKSKELVFVYEAGPCGYWLYRYLTKKGHVCWVVAPSLIPKKAGDRVKTNRRDAIQLARLMRSGDLTPVYVPQVEDEAIRDLSRVREDVLHDLKTAKHRLKAFLLRHDIRYTGRATWGPAHLRWLSEVVCPTPAQQIVFQEHVHAVTEHTERLQRLERALQEHIQTWRLRPVVDALQALRGVQFTVAVTVIAELGDLARFDKPSQLMSYLGLTPSEYSTGDHRRQGAITKTGNAHARRAMIEGAWAYR

SEQ ID NO: 311906 - protein, 336 aa, unidentified
MVSVATYAGLDYHQHSVQVCVLDEEGRLLGNRSVENDAAVVAQAASRYGRPRRVAVEACCGAADLADELAATHGLLVQLAHPGYVNRLKQSPDKTDWGDARLLADLTRINYLPRVWLAPEAIRQLRRLMRHRTQLVRRRKDVKLRLRGLLRENRLKCDQANAWTKAWLAWLATAPLGETDRWLAEDHLEEIAWLTQRLKAVEAQIVQRVKDDPVVQRLMTLEGVGLVTAATMRAEIGDFSRFDTGKQLARFCGVTPRNASSGQRQADSGLVKAGSPELRRVLVELAHRLMRRPGDRWGRLGHDLVRRGKPKNVAIAAVANRWVRQLHHRLREQPTA

SEQ ID NO: 311907 - protein, 345 aa, unidentified
MASHSSQRVLSHFVGIDVAATTATAVVRHHRNSPSPPYTFKQTSDGIAAFIHHLEQLGLVPTQTLIVVEATGSYWITLATRLHAVGYHLSVINPAHAHYFAKSRGQRAKTDPVDARMLSEFALERQPPSWSPPPPVYHELRHRLTARDGLRQMRLLAANQRHALEQWPLAVPSVLAHLTTQIATLDAQIEAVTAEIAAVLQASDWCEAARLLQSIPGIGIITTAWLLVTTVNFTLAGSADTLTAYAGLAPMPHESGTSVRGRATIGHSGNRQLRTALFLATLSAARYNPTIKVFYDRLRAAGKPAKVARCAAARKLLHLAWAVVTKGQPFDPAYAERTVPAGSMT

SEQ ID NO: 311908 - protein, 350 aa, unidentified
MKIIGCDFHTRYQQIAMLDEATGELIERRLDHQSGEAQAFYRDLQGAVRVGIEATGPIRWFERLLSELGHELWIGDAAKIRASEVRKQKTDERDARLILDLMLANRFPKIWVPTPAERDLRQLLWHRHKLVCLRTMLGNQLHALAMSEGLCRKKQLFTKKGRVELLHLGLGPWASRRREELLKLLAQLEPNIEELDRAVLEEANRREDAVLLMTHPGIGPVTSLAFVLAIGPIARFARSKKIASYLGLNPSEESSGGRRRLGAISKQGNTMVRWLLIEAVYPAVRKDPALRQDYQRLKFRRGHAVAKVAIARKLAVRMYWMLRSGAEYAQLVRRQGSPGATLVDASSSLD

SEQ ID NO: 311909 - protein, 343 aa, unidentified
MQTITTIGLDIAKSVFQVHGIDAQGGVVIRRQLKRRYVLAFFEKLPPCLVGIEACASSHHWSRELKTLGHNVRLMPPAYVKPYVKRQKNDAADAEAICEAVTRANMRFVATKTPEQQSCLMLHRTRHLFIRQQTAVINAIRAHLAEFGIVAPVGRNGVEELLDVVADPSDKRVPEIARACLLALGAQLRKLKEQILEFDRMIRAWHRSSEMSMRLDEAPGIGPVLATALVATVTDPKAFRSGRNFSAWIGLVPKQHSSGGKDRLGSISKQGDRYLRSLFMAGALAVIRYAKINGTRHRPWLTALLARRPTKVAAIALANKIARMVWAMMVRGERYKQPVALAA

SEQ ID NO: 311910 - protein, 388 aa, unidentified
MQTAADHPEAPTAIRHDLGAIFISLELSRSTWLITSLSPGGGEKMSKHSVRGGNVAGLLERFAQLQEKARARTGRTFPIIVIQEAGLDGFWIHRVLQNEGIESHVVDPASVATSRRRRRAKTDRIDGEALLRTLLAYKRGEPRVCAMVKATTPAEEDRRRLCRERKVLTNERVQHVNRIKGLLFGQGVSGYEPLRRNRRQQLNELRTGDGRPLPKHLKTQISRELDRLELLLEQIKAVETERDALLAAQKVALPGPAAMLLDFNGIGPEFTAVLWSEGLFRHFDNRRQVASYAGLAPTPWQSGSVDHEQGVSKAGNPRLRTTLIQLAWLWLRHQPQSALALWFKERVARNGGRHKKTTVVALARKLLVALWKYVTAGVVIEGAVMKTA

SEQ ID NO: 311911 - protein, 415 aa, unidentified
MGGRQQWYAGVDWGSQSHHVVLTDGDGRKIGERSFKHGGEGLAEMAAWLMAASCAAEPGQILAAIEVPHGPVVETLIERGFKVHAINPKQMDRFRDRFTMAGAKDDSRDAEVMASALRTDPRCFRSLAAADPIIVELREWSRIAEDLGVERNRLINRLREQLWRYFPALLELEDDLGAEWLLELWEAAPTPNTASRLREATIAKLLKRHRIRRFDAASVVNTLRRPPVRVAAGTVEAASAHVALLVPRIRLLNRQIKDAHSRIDGLTARLMPAEAAEPGQKKQHDAEILASLPGVGRTVLATLLAEASDALQRRDYAALRSLAGVAPVTKRSGKSCVVVRRQACHDRLANAVYHWARVAVQHDPRSRAKYAELRSRGHSHGRALRSVADRLLNVACAMLKSGAAFNPSSAAQKPA

SEQ ID NO: 311912 - protein, 341 aa, unidentified
MSIVTIGLDLAKHAFQIHGIDAAGKVIVRRQLRRDAVEAFFKALPPCLVGMEACASAHYWARLIKALGHEVRLIPPTRVKAYVQRGKKNDANDAAAIAEAVTRPHMMFVPVKSEDQQSILMLHRARELLVRQRTMLINALRAHLAEFGIIGAQGRAKVAVLIKDLPEMRIPSLARDAMSEVAAQIEVCDQRIEALEKQIVAWHRNCEASRNLATIPGIGPITASVLAATVCDPTLFKNGRHLAAWLGLVPRQNSSGGKDRLGHITKAGNPYIRRLLVTGATGVIRYARGKAPGEAMWLKGLLERKPPRLVTVALANKMARIVWAVLTRGEVFRETCSVMVA

SEQ ID NO: 311913 - protein, 413 aa, unidentified
MDVILERCAGLDVHKAPVTACIRYPGPAGERTQVSHTCGTTTPDLLALRDWLAAHRVTHVAMESTGVYWKPVYYTLEDGVPEVRLVNATHVAKVPGRKTDVSDSVWSAQRLECGLLRGSFVPPPVIRELRDLPRDRKTLIQDRTREANRLHKVLEDAGLKLATVATDVLGASGRAMLTALVEGTTDPGLLADLARGRLRAKLPALRQALTGRFRGHHAFLLTQLLAHLDYLDEAIATLSHAIEEHLAPFAEAAVRLQTIPGVKQRTLEAIIAEIGVDMRRFPTAGHLASWAGLCPGNNESGGKRRRGRVRKGNRWLKAALVEASLAAIRTKGSSLGAVYRRICRHAGHNVAIVAVAHAILEIAWHLLAQGTTYRELGADYLHRRNTEQTARRHIRFLETLGYRVTLEPVPAAA

SEQ ID NO: 311914 - protein, 353 aa, unidentified
MLIIGCDFHPGFQQVAIFDNQTGEIQEKRLQHRQEAEQFYRSLAGQEVRVGMEACGHYPWFERLLAELGHALWLGDAAEIRASVVRKQKTDRRDAAHLLDLLRHDRFPRIWVPSLEERDVRQLLVHRHKQVQARTRVKNQLQAMALSQGVQKQRKLWTAAGRTELEQLPMLPYAAQRREQLLEALDGLGAEIEQLNRRVEEEVAQRPAAVKLQTHPGVGPVTALAMVLTLGPAERFASGKQVASYFGLIPSEHSSGGRQQLGHISKQGSSFLRFLLVEAGQTAARQDAELSRFYRRLAMHKHRALAKVAVARKLAVRLYLMLREDWTYAQLCREVVQASPSHPVVGRQNRALE

SEQ ID NO: 311915 - protein, 332 aa, unidentified
MKKIIHFIGIDVSKETLDIALIRNNDKSNIYSSKVTNNTTGFKKMKQWLKLEKISLQEAVFCIEHTGMYSKPIGHFILSLQGNLWMEMSLKIIRSMGVQRGKNDKIDAMRIALYAQRCQDEMKLYEPPRPIVEKLRTLLQLRKRLINSRNSLQVPCNELTTIDEKAGKEATRLIRSSVSALEKNIDVINEEIDELIASDEQLTHEFEIGTSVPGIARITLAYIICFTNEFKNYSGGKQLACYCGVVPFEYTSGKSVRGKPHVHNMANKFLKKLLHMGAIAAVTYYDEFKWYYKRKVEEGKPKMLVLNNVRNKMVLRLAAVIKNNKPYQKIAA

SEQ ID NO: 311916 - protein, 394 aa, unidentified
MKLVGIDIGKNKHFFCVMDKDTGELFVKPVSFPNNKEGFDFLVNKLKPYSKKSILIGMEDTGHYHFALLKYLLDKHFTVALINPKTTDFTRKLQGGITKNDRLDTLTICDVLDTPERKKQYRITKVNSFDLYEQKQLTRHHHNLKEELNVYGNRLQKCIDIVFPEFNSLFKSKYGTVYMNLLKTFGSAEAIADTDIRTIRKCFDINGRGNRISLTPEQLKECAKSSIGISSIAEVIQIKHLVNQIELISEQITETDKKIEEFSVKNNSPILSIPGISHFSSTSILAELGDISNYKKPSQIIKFAGVAPMHYESSQFTAQHTAITKKGSKYLRKTLYQIILPVIHHNPVFRQYYDLKISQGKGHRCAQGHCVRKLLRIIYHLLSTDQKFDPELLR

SEQ ID NO: 311917 - protein, 455 aa, unidentified
MSQRKRKPRKSKINVNSLPKHLRHINLHAAGIDIGSDRHLVAVPEGSDEVSVRQFGTFTSDLHEIANWLEKCGVTTVAMESTGVYWIPLFEVLEERGFEVKLVDARHVKNVSGRKSDVLDCQWLQQLHTYGLLKGAFRPPNEICVMRSYARQKEMLTQASSMHIQHMQKALQQMNLLLHNVVSDITGVTGMRIIKAILAGERDPNVLALNRQEECRNSKETIAKSLVGNFRADHMFALKQAVELYETYQAKIAECEHALISHLGTQPDVTDDTPPDSGKRVRARERVRAGIDVREKLFKMTEVDLFAVPGLAADTLLTLGSEVGFDMSPWKSVKHFTSWLGICPGTKRSGGKTLDRRTKRNANRAAQAFRMAASSLARSQTALGAFYRRIRSRTDGRRAITATAHKIARIYYSMLTKGTTYVEAGQQVYEQMYRERRIKALKKQAHSLGFQLYPA

SEQ ID NO: 311918 - protein, 341 aa, unidentified
MENCGIDLHQKSSQVTVVDQEGEVLERASIPTTRAGLERWFGRRERMRILVEASGSSPWVVRLLLELGHEVEVIDPRRVRLIAQSTLKTDRIDADILAELARLRTKLRTLVWQRSETTQRQRGHLRVRRALVEARAGFIVTVRGLLRSFGVRVASCRSDRFAARCQATAIPPELAEVMTPLLDAIHDLDARIATMDAVVEQVGHLYPAVGSLQDIPGVGPVVALAYVLSIEDPSRFRRSRDVPGYLGLRPTLRSSAATVRQGRITKEGDADVRRLLVQAAHAHLRSHADTALKSWAESLIPRIGKRKTIVALARKLAVLMHRLWITGEVYQPFPHDTAKAA

SEQ ID NO: 311919 - protein, 424 aa, unidentified
MTQHQDTSILRVMHEVCCGLDVHKKLINACLITTDENGQEDSELKVFQTFTDDLYRLRDWLLDHNCPIVAMESTGIYWRPVHNILEGLFEIILVNARHFKNLPGKKTDMSDSHWICGLLRVGLLKGSFIPQKHVRQWRDLTRYRRSKIEDLGDAKRQVHKLFESANIKIDSVASQLFTRTGRNLMELLLKKDQELTLEEVKECLRGTLKSKGEELYRAIQGFFEDHHRWLLEKMLANVEHLEHLINDIQLRLRSLLQPYEDVIDRLNEIPGIDFISAYSIISETGPTLSTFPNTASLCSWAGVCPGNNESAGKRHSGRSPVHKGNLKTILIEVAWAAVRAKRSYYRAKFFSLRSRLGPKKAIMAVAHRILKAIYHVIKQGAKFKDLGEDYLSNLHKNSKLNYLIRQAGKFGYTLTPSGVAEKSF

SEQ ID NO: 311920 - protein, 435 aa, unidentified
MEEVTDEPLYRDRVCGIDIGKAGLVATIRVPSDRDPARRMQETRSFGTTKREVLALADWLRSWQVPAVVMEATGDYWKGPFYRLEAEGFDCVLADAKQVKNLPGRPKRDPADSRWLAACFERGAITSCFVATPEFRIIRLHTRYRRDLTEERTREKQRAEKLLESAAIKISAVLTDLHGVTGRDIMDHLIAGERNPKVLAQLARAAARRKISQLEEAVEGAEFFTGEHAALLAKVLARIDRLSADIDDLSQVIERLLAPYEEQLQQAESMPGWGRRAAQDAVAETGVDMTRFRTGPHLVSWAGRAPQDHQSGKRKGRAKTKKGNRYLGAITGETAVAAGRTQTREGARHRRLARRRGTAKACVATGNTQLKVYHKLLSNPGMRYADLGPDYYERQRDTRRQIAHHVGKLGSLGFEVTLCRIPEPDPDGTDPAQAA

SEQ ID NO: 311921 - protein, 342 aa, unidentified
MKQYVGLDVSQRETSVCVLNETGHILFEGKAKSDPGALTALLRKRAPHAERIGFESGAMASWLWHELRRLDLPVVCIDARHAHAALSVRMNKSDQNDARGLAELVRVGWYREVKVKSEESQKVRAILVARSRLVAIRRDIENQVRSLIKEYGLLFPRAIGLQFRNQVSELLGHDHQLIGVIAPLLSIHEHICEQQSKFDDEVRWLAKSDETTRRLMTVPGVGVVTALTFRHTIDDPSRFRSASTVGAYLGLTPRRNQSGETDTNGKISRWGDRLLRSYLFEAATVLLYRTKKWSSLKAWGIKLAKRIGVKKAKVAIARKIAVILHCIWVDGTSFDWGQAKRA

SEQ ID NO: 311922 - protein, 376 aa, unidentified
MIETTRCAISVNEPTLFVSFELGLKTWKLGLTSAPGNKPWVRTVAGGDLPAVEEVLARAKSRFGLDASARVVSCYEAGRDGFWIHRALTTRGVDNRVVDSASIEVNRRARRSKTDRLDAVKLVLMLMRVCGGEPGVWREVRVPSAADEAARQVSRERSHLVQDATRLVNQMRSLLATVGSRLPERRQGAWWTTVRDWSGAALAPSVQQRLAHAQRRLALLDEQIAELEQQQRADVARAEAATGVARLVQLKGIATTSASVLVDEGLVWRAFHNRRELGGLLGFRPVPHQSGEAARDVGIDRAGNKRWRSIMVQLAWGWLHWQPLSALTQWYQRRFAEGGSRARRIGIVALARKLLIALWRYATSGVVPEGAILKVA

SEQ ID NO: 311923 - protein, 347 aa, unidentified
MRFYTQQHKFYCGIDLHARSLYVCVLNQAGEKLVHRKLDCDREELLKALKPYRQDLVVAVECLFCWYWMADLCQENGFSFVLGHALFMKAIHGGKTKNDRIDSYKIASLLRGGNLPQAYVYPREMRPTRDLLRRRLFFARKRGELFAHIQNTNTQYNLPPLEQRVRKTKDRGAVIEHFEDETIQMSVAVDVGLLETYDQVIREIELFLVHEVRKDHNAGFFLLRSIPGIGEILALTLLYEIHDIKRFPRVQDFISYCRLVKGVHESGGKTIKSTGGKMGNVHLKWAFSEAAALFLRGNTLGQKFFARLEKKHGKGKALSILAAKLGRAVYYMLLRGKPFELERFVTV

SEQ ID NO: 311924 - protein, 342 aa, unidentified
MYYVGLDIHKKSIAYCVKQPDGVIVREGTVAARREDLRSWAAALPQPWTGAMEATLFSDWVHDHLTPFAAALKMGHPARMRAIATSKKKTDRLDARTICDLLRCDLLSPAFVMPPHLRQLRRVLRYRNLLVRAGVQMQNKIAGLLLEMGVEYDTPRLHRKKYFGQLIEEKQAEIPASARRLLAFSREQYETLHRMELQLLRGLEQHPDIAQRVARLMTIPGVGPVLGLTWALEVGPVERLGNLSRAISFCGLSSALRESAGKQTRGPISKQRNAHLQTVLIEAAHLASRWNPLLAEVRERELQRGHPNRATLAVARKLVAFLMAADRGHQPHPRASPAKAVA

SEQ ID NO: 311925 - protein, 386 aa, unidentified
MTKVNDLSRSLAALDQDTTLIAVVELSSKSWLVAAAVPGIERHPLKKLDPDASALLKLIERWRGEAERRGRTIKRVVLAYEAGRDGFWLARWLKERDIEAYVIHPASVAVSRERKRAKTDRLDAAMLLRVLLGWLRGERGHCSMVAIPSMDEEDARRPSRERETLVGERARITNRIKGALVRFGIRSFNPLLRKAPQSLEKLQTAEGGPLPVNTLEEIKRDLARMAVVREQIAAIEKARVDRLKQAPKTGSNAMVQLLARVIGIGIETADMLVREVLSRTLRDRRAVGRYAGLTGSPDESGSRRREKGLTRAGNARVRRGLIQLAWRFLMFQKQSALTQWYRARTAGATPTQRKSLIVALARKLLIAVYALLRDGVVFDEQKFATV

SEQ ID NO: 311926 - protein, 336 aa, unidentified
MQTLEFEVVHLICGGIDVHKKSLVAAVCVTDPVTLEAKYSVKVLNSSNSDIAALRDWLLAQDCHDVCMESTGKYWIPVFNILEPHMNVCLTHPKYVKAIKGKKTDKRDAKWIANLFRFDIVKASFIPPADIRALRELSRYRLKLSYMRSAEKNRYQNSMTISRIRIDCVFTDPFGKSASRIMDYLLSDRPFDEKECLSLIHGGVKASDNEILDSIRGYEILDEQRFKLTHAKSHMDFLSQSINEIELELFRRSRSYDIQIKRIATVPGITEFSALFILSEIGADMSVFESDKHLCSWAGLTPANNENANRKKSTRCSKAGQYLKPLLIQCALAAGI

SEQ ID NO: 311927 - protein, 370 aa, unidentified
MLDTTTFVGLDVHARSIKAVSLDVMTGEVRCATFGYDAGAVAEWVRSVDPKARCVYESGVTGFDLQKRLSGLGVDCVVGAVSKMIKPSADRRRKNDRNDAEFLARMLSVGNVVEVWVPDDECEAARDLTRALEDARDDLSRAKQRLSKFLLRHGLAFDERTPTGRRKGNWTRAHWSWIESIRFAEGADNDALAYYVDAVRRAAEEKARLEGLVEAEARKPRWKKRVDSLRCLKGVDTATAADLVFEAGEFSRFGNARSFAAWVGLTPSEHSSGESDRRGAITKAGNKHLRKALVEAAWHYLTCSGRPKDLARGQAPDRGARRHAAKGVRRLVERRGALLARGVHNNKANVATARELACWVWAVGLMAEEA

SEQ ID NO: 311928 - protein, 351 aa, unidentified
MHYIGVDYHKKYSYVVVKDREGKVERRGKVDNTKEEFQQLLKPYQAGKAVLEATRNWGLVYDWLEEILDDVALAHPLKVRAIAEARIKTDKISADILCDLLRSNLLPEAYVPNKETREAKNILRQRMFFVRVQTMVKNRIYTILDRHPEIVSQAPDVSDLFGASGMKWLRQAVLPGQDDQLLSSELELLEVLKQKISGSNGMVKELARGDKRVKLLRSIPGLGPFFSVLVAKEIDDVTRFRDEKKLCAYAGLVPSTYASGGKVFHGRITKTGNKWLRWAFIEAVQPAISCDADLFAFYQRLKMKKGANAAKTATARRLLTIVYRVLRQGRLYERRNKRARRSLAPAALVTS

SEQ ID NO: 311929 - protein, 374 aa, unidentified
MQEHSVAYVGLDTSKLRNAVAIAQSGRDGEIRYLGEIDNTPAATARLVRKLAKQHPELKFAYEAGPTGYGLYRQITNLGHDCLVAAPSLIPQRPGDRVKTNRRDALSLARQLRAGDLTAVWVPDPHHEAMRDLSRTRGAAVRELRAKRQQVSALLLRLGQSYPGKKTWGKAHTAWLAGCKLAHSEQRLALEEMLHAVRQANERIARLEQAMRAAAPDWSLAPLATALMALRGIDFVAATTLTAEIGDPRRFTKPRELMAWLGLVPSEHSTGEHIKRGPITKTGNRRARSLLIECAWSYRHPARVGPNKLAKLEAVPAAVQEIAWKAQTRLTARYRALRRAGKLDVVAIAAVARELAAFVWAVGQAVGAGATTAR

SEQ ID NO: 311930 - protein, 413 aa, unidentified
MQIVYERCCGLDIHQKTVVGCRLLSQPKGNIEKSIRTFATTISGLMELDSWLAEGQVEQVALESTGIYWRPIFQLLEGRYEIILVNAQHMHAIPGHKTDIKDSEWIADLLRHGLLKASFIPPKPIRELRDLVRTQTHLMQERNRHINRIHKILETANIKLSSVVTDIVGKSARQMLEALIAGESDPAQLAKLARGRMRPKVAQLQQALQGHLEPHHRFLLRETLAHLDFLQQRTEQLEQEVAERLSPFEASIVLLTTIPGLSRRSATILISELGTDLAAFPSAAHLASWVGLCPGSQLSAGKRRNGKPTKGNSYLRSVLVQVAWVLTRMSDNYLSAQFHHLKPRLGAKKAVVAVAHSVLVIVYHVLTKGEPYQDLGPDYFRGQNKEQQARRFVHQLETLGYHVELAPQEEVTS

SEQ ID NO: 311931 - protein, 394 aa, unidentified
MIVIGADTHKGSHALAAVDDGTGKVRGHREITADDAGHLAAVRWARGLDEDRVWAIEDCRHVSQRLEQALIAAGERVVRVPPQRMGASRKGEREPGKSDEIDALAVARAVVKDGVEAFPVAYLDQRAMEIRLISDHRNNLVADRTRVVNRLRWHLLVLCPELESALKRGAFNRARVLDRVERRLRKLPAGARVQIAREQITQLRARNRQIDQLHRELAELVAAHRPNLLAEQGCGAVTAAILIGHTAGNQQFRTEASFAMKAGTPPVPCSSGQRTQHRLNRGGDRELNHALHIIAITRAQRDPGTKQYLARKEADGKTSKGALRSLKRHLARRFHKLLAEPPADQQQAHGQPPVKPQPADSNNKPPEIPPRPAPRRPVDPTIKGQGPFPMVCIT

SEQ ID NO: 311932 - protein, 355 aa, unidentified
MSQEKYIGMDVHAATISAAVKNAEGKLLMECVLETKAATILEFIQGLRGTLALTFEEGNLATWLHDLLKPHVSRLVVCDPRKNALMRDGNQNDRVDARNLAELLRTNQVHAVYHGKHGTRALKELGRSYLTLTKDSTRVMNRIKSVYRSWAIPCAGTSVYSRRHRAQWLAKLVEPGVSIRAEHLYEQLDSLQPVRQAARRELLQESRKHAAVKLLRQIPAIGPIRSALLVALLQTPHRFRTKRQLWAYSGFAVQTYDSGEYRFVRGKLHRNRERITVRGLNHNHNHDLKNLLKGAAISAIERPGPLQDFYAALVEKGMRPSMARLTLARKIAAITLTMWKKGVSFDPKQLQRQAA

SEQ ID NO: 311933 - protein, 423 aa, unidentified
MEVLHRRVAGLDVHKETVVACVRLMVRRKPTRECRTFATTTEGLSALLGWLTASRCTQVAMEATGVYWTPVWKILSAGDFTLIVANAAHIKQVPGRKTDMNDAMWIADLLACGLIKASFVPEEDIQELRALMRTRKQLVREQTRHVQRLQKTLEEANINPGLNPGDIMGVSGRRMIEAMIAGERDPHRLAALAARGIKASPKALYDALYGRLREHHRFLLKLHLQQWDALDAAIQQIDRQVAGQIARMDEEAGDQASPFRELILRLSAIPGVSRLSATAILAEIGRDMSRFPTAGHLVAWAGLCPGQNESAGKRKSARLRKGAPWLKTMLVQCAWAAKRAKDSYYMAQFHRLRSRRGPQKAICAVAASILTAIYHMLKSGTPHRDLGADYFDRRSPEAKAKRLVTQLTKLGFDVKLQPVAVAA

SEQ ID NO: 311934 - protein, 408 aa, unidentified
MEILYPKCGGLDVHKDSVVACARIHSNDGVKQHVETFGTTTNALLRLTDWLSEHGCTHVAMEATGVYWKPIWHILEGSFELVLANAMHIKNVPGRKTDVNDAMWIADLLAHGLIRGSFVPPTSIQELRALTRTRKQLVREKAQHVQRIQKTLEDANFKIASVIADIMGTSGRAMLEAIIAGETDPERLVALTRGRLKASRATLVEALRGRATQNHRFLLKLHLDQIDALDRAIAAVEKELGSVLEPFRVLTELLTTIPGVSDLVAQVIVSEIGIDMSRFPTVGHLISWAGLCPRNDESAGKRRSTRIRKGAPWLKTTLVQAAWCATRAKGTYLQAQFLRLKSRRGPRKAIIAVAASILTASFFMLRDGVEYNDLGSEHFDRTDKSKTINRLVRRLEDLGCEVELKKVA

SEQ ID NO: 311935 - protein, 340 aa, unidentified
MKDFIRIGVDIAKSVFHVHALESEGGQIVTRKLNRAGMRKFFSSIGPCLVGMEACGSAHYWGRELRAFGHDVRLMPPAYVKAYVRRGKNDAIDAAAACEAVSRPDMRFVPIKSEEQQATLMAHKTRDLLVKQRTMLVNCLRGCLAEFGLVAGKGIERVDDLIAKAGEATLPEMARQAAQVLIEQLEGLDAAIADLAKRIVKAHGRDEMVRLLKTAPGVRDFFATQAVASVSDPNAFKSGRDFSAWLGLTPRQVTTGGKPKLGGITKKGNQALRRLLVLGATSLLKVAHMHKGAVGDWLKAIKARKPFKVAAVALANKLARIVWAIMTRGEAFRAEAFARA

SEQ ID NO: 311936 - protein, 405 aa, unidentified
MYYVGIDVAKEKHYVSILDKDAEFVVKPFWIYSDILGLQELEKRLTSLSLNRDDFIIGVESTGAFSENLYGHFTDSDYKVILLNSYQTAKYRDFSTMKKIKNDAIDAYVIAELLSTGKYRSSHISSDDYHSLKVLGRLKSSLDKKIKTIKREISTVMATVNPEITKVFPNIFSKTALEIIKVYPTATQLQKATPKKLTKLFRHIKGNNFSEDKAKLLIELAKSSVYTGRAEISRALMIQTNIRILELYIQEKSKVESQINDLINNQIDNSPDSPIENLQTIDGVAMKTIAVLLGECGDISRFASSKSFIGYLGLYPTQYQSGNSLSVGRLAKRGISTAKHALYMAAIASVRHNTQLNKLFRDKVSSGKSKKEALIIVAKESATIIYSICKYNKPYEPNRVFIPRK

SEQ ID NO: 311937 - protein, 402 aa, unidentified
MRFFVGIDWASQTHAVCVIDEAARVRWQGSVAHSADGLAELIRQLRRFRAGSALAIAIERPSGLLVDTLVDAGFQVVPIHPNVLKASRSRYSAAGSKSDPGDAFILADLLRTDGHRFRPLRPLTDDTRALRALVRGRDDLVAQRVALANQLRAVLEHGWPGAAVIFADLDSPIALAFLARYPTAQHAARLGEKRLAQFLTQHSYPGRRSAAELLARLRDAPPSQAGEAEADASGEVVRSLVTVLTPLVAQIQQLSAAITAALRHHPDGPLVQSLPRSGAVNAAQILAELGDDRARFPTDEQLAAEAGVAPVTHASGKHHAVVFRWACNKRLRHALTTFADNSRHASAWAAAVYTRALGRGCDHSHAIRILARAWVRVLWRCWQNHTPYDVTRHRAAQLVLAA

SEQ ID NO: 311938 - protein, 335 aa, unidentified
MEFTYFIGIDVSKNELDFAVMHGKNLLFHREIANDAKTISAFIMELKKMPGFKLSEALFCMEHTGIYNNILMSQLYKNGSNCWLEPASQIKNSMGNVRGKNDKVDAMRIAEYAYKNREYVRLWQPKRDVVKQLAHLVAVRTRLIAAHKMLKTPLSEGAGFVDRDIQKQARLLCRKAIASIGESLKNTEKAIAETIASDKELSRLFGIISSVHSIGTVTAVQIIITTNEFKDISDPKKFACYSGVAPFVKESGIYRGKGRVSHMANKTMKTLLHMSALSAISRDGEMKAYFERKVKQEKKNKMLVINAVRNKLIMRVFACVTHNRKYEKDFVRRVA

SEQ ID NO: 311939 - protein, 316 aa, unidentified
MSHTLYVGIDVAKDSFDVASDPSGLALSLPNDPTGRQRLLDALQNHPVALIVMEATGGYERSLVADLIGAGHKVVVANPRQVRDFARGIGQLAKTDRIDAQVLARFASMVKPKPRQESSQQAVNLAELVTRRRQLSDLMTQESNRLQMARHAKVRKSLQKVIRLLEQQIIDLDKLIRDNIDSDDGLRRKDEIVQSFKGVGPGTSAMLLSHLPELGRINRQQIAALAGLAPWDFKSGKWAGQSKIWGGRMPVRNMLYMAALSAIRSNEIIRKFYQRLESQGKKFKVAITACMRKILVILNTLVRNDCLWSPPPPKNA

SEQ ID NO: 311940 - protein, 356 aa, unidentified
MESTKYIGMDVHKEATTIAVLDPSGRLVMESIVETKAATIVQLVQGLRGDLHVTFEEGTWAAWLYDLLKPYVTKVVVCDPRKNALLQSGNKSDRIDARKLAELFRAGLVSGVYHGQISLRTLKELARSYLTISKDLTRTMNRLKALYRSWSIPCAGTSVYAPRHRAEWLSKIQEAGVRRRGELFYQQLDSLQLLRQQARQDLVAESRQQEATKLLRQIPYIGPIRAALLVAMIQTPHRFRTKRQLWAYSGLALETRSSGEYRYVQGQLERSHKPVTPRGLNQNHNHDLKSIFKGAAVKASSAAGPFQDFYLALLTKGMKPTMARLTLARKIATISLLVWKKGVCFDAGQLKRQESV

SEQ ID NO: 311941 - protein, 367 aa, unidentified
MTNVRYIGLDVHKDSIVMSVAETGHAEAKHLATLPNDVSKVIKQLKKLSSDVSLLRVCYEAGPTGFGLSRRLKKECIDCIVVAPSLVPQKAGLRVKTDRRDSRKLAHYLRSGDLTEVWVPDEQTEALRDLERTRDDAKNAERTARHQLSKFLLRNERVYRDGKEWTQKHMIWVRQQKFTDACRQCVLDDYVKAVEDATARVKQLMQHIRTFVEGHALQPLVRALMSFRGIDILSATVIAAELGDLTRFKTARQLMAFLGLVPSESSSGNSVKRGPLTKTGNAHVRRILIEAVQHYRHRPVLSAALRKRQEGISKEVRDISWEAQQRLCNRLTHFINSGKPRNKAIVALARELAGFIWSLGQVSHLMA

SEQ ID NO: 311942 - protein, 443 aa, unidentified
MSRKRRTHLRGKRGQAFADQIRGIPLDRILCVSIDVHKYFHVVMIHNALGEIVTPTFEIDIFQTGFEQLCRAIDEAIARTKAQVVLTGMEPTGHYFENLARHLRQRPQPVTLINSYAVRKNRDQQMMHHEKDDEIDTASIGDLLRRGEGTPFKPASGVYLQLQHLDRVRLSKIKIRTMLQNQVLGHLDRIFPGLVIIAKEAKARYTPLFATDFWKCQTLQHLIRVCPDPRQLAAMSPQDLIDAFHAHHYAMGPITAAKIIAYAQKVLLPDAELIAIRCELLAHDLALLEAVEGHIAQLEDRLRTLLAETPYQIWVKLKGLSDIQVASLAAAIGDPANYSYAAQVFRRSGLVSGRDDSGIRQRKGKGKRVVKVGDVYLRRALMNALATLILHQPVLQQYLNKLRKSKPAGVARVATARRATGILWATLRDQQAKTLILKKGAAM

SEQ ID NO: 311943 - protein, 320 aa, unidentified
MKKTKTQVVEFEQIVERGCGMDVHKETVVATVSGTGIKQETRTFNTFTSSLIELSEWLKSLGVTHAAMESTGVYWKPIFNILEEDFEILLVNARHIKNVPGHKTDKKDSKWIAKLLLSGLLKGSFIPPKEIRELRDLFRYKRKLTGHVSSEKNRLQKILEDTNIKLSSVVSDTFGVSATKIIDAMLEGERDVEKLVNLCHGRLEIKKEQLKEALVGNITAHHKFMLRTIKESIYNIEKIIKKVEKQIDKQTKDYRVEIDLLQSIPGVGKDTAQGIVAEIGVNMDVFPNEQHLASWAGMSPGNNESAGKKKVDALLTAIRI

SEQ ID NO: 311944 - protein, 316 aa, unidentified
MICGVDVSSKSLDARIGRDGAFASFTNDPKGIAQLAEFCQRHKVNLVAMEATGGYEKKPFALLWAAGIQVAVVNPRAVRNFAQGMGLFEKTDRIDAGVIGWYAQTKQCVAVSPASAQQQQLKAMVTRLRQLTELRAQQRNQRLLVTDKVVLKSFRKLLDLVQKQIRDLEVAIAGLIDADAVWHKLDQSFRSIKGVADRTVARLMAEMPEIGTLSNKRISKLAGLAPLACDSGQWKGKRSVRGGRRTIREILFVVAAGVSRHNADFRAFRERLAAAGKAKKVIRIALAHKLLVRLNAKARDVLQQLREATPAAVLLS

SEQ ID NO: 311945 - protein, 339 aa, unidentified
MNNSVIGLDIAKHIFHLFTQRTDGKMIKKKLKRSELLMHFANYPVSVIGIEACGSAHHWARELTKLGHEVILLNARYVKSFVVGNKNDFNDAAAIYDAVTRPNKRVVAIKTVAQQDIQLIHNIRKELVDKRTALVNQTRGLLSERGIIINKGITQVRQQLPLILEDAENGLTTLSRELFAEQYEKLKALDDEIKAQDQRINRLCNANELSKRFLAVPGVGPVTATIVAADIGDSGKGYESSRDYAASLGVVPRQHSSGDKQVYLGISKRGNRYIRTLLIHGARSVLKNCSKKTDKLSLWLQSLVARRGFNKAAVALANKNARILWAMANKNKDYDALVA

SEQ ID NO: 311946 - protein, 309 aa, unidentified
MDAHYVGIDVSKDRLDVHVRPSGEAFVVARDDKGLAALLERLRVIAPRLIAVEATGGYENIVAAAIGGAGLPLAVVNPSQVRHYAQALGKRAKTDPVDAEVIARFAEATRPEPRALPDEATQMLAELVTRRRQIITMMVAERQRATRLPKRLRKSCERVVRMLEKELAALDIDIDTTVRGSPAWRAKEDLLASVPGIGSITARTLIAELPELGHLDRRSLASLVGIAPFTRQSGQWRGKAFIGGGRRSVRAALFVATMAAVRHNPIIRAFRQRLLAAGKPKMVAMIACMRKLLTILNAVARDQKAWRAD

SEQ ID NO: 311947 - protein, 350 aa, unidentified
MMIIGCDLHTRYQQIAMLDTDTGELVGRRLEHESGEARAFYSALQGQVRVGIEATGHTHWFEAMLAEFGYELWMGDAAKIRASVVRKQKTDARDAEHLLNLLRQDRFPQIWRPSPAERDLRQLVWHRQKLVWMRGAVKNQLHALAMGEGVCRKKKLFTAKGRKELEDLALGPWASYRRQELLRMFDELAAATAQLDLAVEQAAKNQPLAVRLMTHPGVGPVTSLAFVLIIGPVERFERSKQVVSYLGLNPQEHSSGGKQRLGAISKQGNPMMRSLLVEAGHTAARFDPALKRMYQRLKFRRGASVAKVAVARKLAVRMYWMLRSTADYAQLVRMQGSPWATLVENSPSLG

SEQ ID NO: 311948 - protein, 419 aa, unidentified
MTQRQDTAAIKIIHPICCGLDVHKEKISACLMTVDEDGQEASEIREFATFTDELVNLREWLQQRDCPIVAMESTGVYWRPVHNVLEHHLEIILVNARHIKNVPGRKTDIADSRWLASLLKHGLLRGSFIPSKDIRQWRELTRQRRKVTESLSDYKKRVHKLFETANIKIASVVSDLFGKTGRRLIEQLCEESSGNFSEQTVADIACGRLRAKATELFRSLQGYFEEHHRFQLCSLMRIITILESEIGILSDRLHLLMETHEELLERVAAIPGVSVRSAQMILSEVGYRLDNFADAASFASWAGLCPGNNESAGKRRSGRTAVQKHPFKTIMVEVAWAAVKTKGCYFKDKYHRLKSRRGAKKAIVAIAHRLAKALFHIIKHGERYRELGEDYLKSRKRSGLSTLRKQAKVLGFELVPVTA

SEQ ID NO: 311949 - protein, 317 aa, unidentified
MIHLGIDIAKLKFDIALLNQGKFKTKVFANDASGINACLKWLGTHAAEPVHACLEATGSYGEALACALHDAGHTVSVLNPARTKAYAQSLGLRQKTDAVDAKMLAHFVQTQQPAVWTPPPPELRALQALLRRLDALIEMRTQEKNRLGVAEPTVSASITQHLDYLETQIDALKAQIDNHIDQHPGLKQQQDLLDSIPGIGAATSAWLIGELNLTRFDSARQAAAFVGLTPRKDTSGTSVRGKPRLCKLGNSLLRKLLYFPAVTAMTHNPLVRALCLRLKAKGKHNMAIIAAAMRKLIHIAFGVIKSGKPFDPTLADT

SEQ ID NO: 311950 - protein, 338 aa, unidentified
MDQIHERVAGLDVHRDSVAACARVPGQRRDVVTRKQQFSTTSRGLAALVAWLGEHAVSVVGMEATGVYWKPVYYALEERFEVWLCNAHHVKNVPGRKTDMSDAEWLADVVAHGMVRPSFVPPPLIRQLRDLTRYRKRQIDTRAAEVQRLEKVLQDAGVKLSSVASEVLSVSGRKMIEAMIAGQRDSAVLAQLAIGRMRNKLPALAEALHGHFGAHHAVVARQILDHIDFLDARILAVSEQVASRMPPFTAAVELLIEVPGLNQRSAEVVLAETGGDMSRFPSPAHLASWAGLCPGNYESAGKRKRVGTTRACLVDHFRVRSGLARSQMMMSAIWTVAR

SEQ ID NO: 311951 - protein, 323 aa, unidentified
MTTSPTLGIDIARLTFLAALRFDAQRCAKAQFDNTPAGFRQLDRWLKKHKAGTLRVALESTSTYAEALAHWLHQAGHIVFVLNPERIACYARSLGQRNKTDPADAYTIAAFIATHEPTRWQPPAPEQQALRSLTRTRHQLVAAKGQLQSQLGTADAVARPHLQAVLDQINRQLVAILKQISAHLRAHPTLNEQVRRLMTCKGIGLITAAIVLAELPPINAEAEVRALSAWAGLTPHRRQSGNTEGPARLSRKGNAYLRNALYMPALVAKRHNPLLQTFAARLKAAGKRPAAILGAVSHKLLRILIGLLRSNRDFDPNWAPQKS

SEQ ID NO: 311952 - protein, 458 aa, unidentified
MRPISNAVEEIDSDEEERILTCAAAIDVAKASGMVCVRRPHPSIEGRRTSRVWEVESTTNSILTLGGDLVAVGVERVVLESTSDYWRPFFYLLEACGLTVWLVNARDVKQVTGRPKTDKLDAVWLAKLNERGMLRPSFVPPREIRVLRDYTRLRTELVEERSRHKQRLEKLLEDALIKLSSVATDLLGKSARAMIEALIAGERDPKILADLAQGRLNAKRARLLEALNGRFDDHHADLAQLLLDQIDACSEKVDRLTTRIEQLVAELPEPSPPGDRAPRPTLATDVPVDHDPDARRLTTVERLDEVPGIAERAAQIIIAEVGLDMSQFPTPAHLVSWAKLSPQTIQSGPKVKVGHTGKGNRYLKGVLGEVATAAAKTDTFLGERYRRLVRRRGKQRALVAVARSILVIVWHLLADPDARYIDLGSDYYTNRLDPDRKTRDLVRQLHALGHTVTLTPAA

SEQ ID NO: 311953 - protein, 452 aa, unidentified
MKKKKSKRTKGQEEARPFEGLSKVNQNAAGVDLGATEIVACVSGGDEVQLVKAFGNYTVDLHAICEWFRKYQVETVAMESTGVYWIPLFEELERQGFECLLISSRSLRRVAGQKTDVEDAQWIQTLHSYGLLKGSFRPEGDLVGLRTLLRHRSQLLEHRAPHIQHIQKALLQMNIQLSQAVTDVMGMTGQKILRAIVVGERKSENLAALREPGCKHSEEEIAKALTGTWRAEHLYVMKQSLELYDFYTEKIEACDAEISRQYGMTRPEWVKGELPAVSDKKRHAHSKNAPRDAKEIREHLYRINGVDLSLVDGIGVSLAQTVTMEVGSNVGEKFPTEKHFCAWLGLAPKHDITGGKVLNNRTLKTKNRAGQAFRMAAQSVKQADCPFGALYRRLRSRLGPAQATVATAHAIARVVYKMLKYKVEYDPLSVNEYQKKYEEQQTCAEPVEASNI

SEQ ID NO: 311954 - protein, 374 aa, unidentified
MTSTKYIGMDVHKESISIAVRNDAGKIVMECVIETKASMILQFIDGLRGDLHVTFEEGTSAAWLYDLLKPHVTKLVVCDPRKNRSMREGNQSDKIDARRLAELLRLNHLNPVYHGEHGLRTLKELVRSYLTITKDVGRVMSRVKAMYRSWAIPCTGKQVYTSRHRAEWLGKIREPGVRRRAEFYYQQLDALRLLRQEVRRDLLAESKKHKAWERLCQIPSIGPIRSAELLGILQTPHRFRTKRQLWTYCGLGIETHSSADHRVLEGQLKRAKKQVEVRGLSRRRDQAWPVRGVLRGIVGQGHAVGNGAADPGEEDCHDRIDRMEERSELRRPTSETTNSLSVSERFRSIPGIFSGGGRQVLETLWFESESQPIS

SEQ ID NO: 311955 - protein, 357 aa, unidentified
MQTQGNDLNFNGEKIFVGIDTHKKNWKVALYSNDIALKTFTQDPEPGLLVNYLKRNYPNANFSCAYEAGFSGFWLQKQLATYGLECIVVNPADVPTTGKEKEFKTDPRDCRKIAKSLHSNLLTPIYVPSDRGLAFRSVVRLQNDLVKNQTRQKNKIKGLINFYGVKYPPEFITEKSHWSKSFCGWIADLQLNCEENTWVFQYYVQEYLKAKEGVKEVTKKVKEIAKTEALSKPVKLLTSIPGIGVLSAMKILTEIEDIHRFKNLDQLCGYIGLVPTTNSSGEKEKIGEMTNRGNKHLKTTIIESAWSSIHHDPSMSQKYFKLTKRMDSNKAIVRIAKSLVARILHVLIKEEEHKKIG

SEQ ID NO: 311956 - protein, 459 aa, unidentified
MPDDRCRLGSDDVVIGLDLASVEHQVVVLTADGQRLTRFKIPHSRVGLEELLRRTMPAALSRTGGSRVFAFEATGHVWEAVAYILRARGERYVVINPLTTFRVREARQLSREKTDLTDAEQIAELCRSGLVTRTQLEARPYLALRRAWGEYRRLREERARLKVLVAHQLYGLFPEFLRVWADLLQPGALAVLRTGLTPATMAALSLGEFVARVREHRAGRRVWRFKLAQVHRYAEQTIACPDGVDVLAREVQRAVARIDVLTAQMTTVATEVDALLADLEETPYLRTIPGLGWASVAGLLAHVGAITKYRHGRQLIKLAGTNPSRRDTGQTVGRGQTMSRRGRARAPRGHVPGDDLVPAAQSANPGALRSPHPAGRPAAVKDAGTRGMHEQAFALRLRRHESTGGVPTRSRLAANDVARRVTPGAPARPERGACRPLSWDALLGPARSLPPGTPRSLGH

SEQ ID NO: 311957 - protein, 360 aa, unidentified
MNYVGIDIHKRYSVASVQDEQGRRLGEARIEGNTATGFAQFLGSFKEPSRVVLEACWNWGKLYETLEGIEQVESIVLAHPHKTRLIAEAQIKTDSLDARALATLLRGNLIAQAHVPEKQTRERKNLLRQRLYWARLRTCVRNRVHALLDRQHELELPQCSDLFGKRGMHFLKELKLPDPDGTLLQEDLALLELLNMQIRAQEQRIKADNEANPLARRLQSLPGVGAILAAVAAAEIDDPARFKSASKLCAYAGLVPTTHASGGKVYHGRLLTSRNKWLQWAFIEAAWVAVGCSSYFGSIYKRHRARGKQANTAITIVARRMCRIAWSLLKEQRDFKPDYVIKRETFPGRSRVRLTVARSA

SEQ ID NO: 311958 - protein, 397 aa, unidentified
MYIVGIDIAKRKHEAAVIDGEGTVIIKPFSFTNNCSGYNRLLAMLTKAKLPLDEVSFAMEATGHYWLALFTRLQKEGFRVQVINPVQTNSIRSFYIRQAKTDPRDALLIAEVIRFGHFSESTLHPENIYELRELCRGRHAIVSMQADVKRKVVALLDQVFPEYETAFTNLFGDTSMAILQTCPTPKELSEMPLEELCHLIEVSSHKRFRMAKAQELQELARNSFGFAMAGDVFSTMIRLYAKHLVFLKQQVQEMDRKIAEIMDTLDTPITTITGIGPTLGAYILSEIGDISRFSSAAKLAAYAGIDPTMRQSGEYNGVRNRMSKRGSPYLRHAIWLAASSAVLHDPALKLYFQKKRDEGKPYMASVGHACRKMVSIIYAVMRDNKAYTPCIPNEISA

SEQ ID NO: 311959 - protein, 344 aa, unidentified
MQHYVGLDVSVKETSVCIVDKAGKVIREVKVATKPAEILAVLTEEALAIERIGLEAGPLSQWLYGALAEAGLPVICVETRHMKAALSAQINKSDRNDARGIAQMMRVGLYRPVHVKTLASQKRRMLLTSRQLLQAKALDIENDLRGTLRNFGLKVGMVGTVKFEARIRELVADHPDLAAIVEPLLIARRVLREQLGVLHRQLLEIVRQDEVCRRLMTTPGVGPVVALTFRATVDVPSRFKNSKAVGAALGLTPRRRQSGEIDRMGGISKSGDAMTREMLFEAALVLMTHSRKWSWLKAWGMKIARHRGMKRAIVAVARRLAVIMHRMWVDGTEFRWSRKEAAAA

SEQ ID NO: 311960 - protein, 281 aa, unidentified
MFPVGIDVSKNTLDLCMLYDGIKGRIKTRNIQNNRHSVENILRWLRLQHCSPEDVHVVMEATGVYHERLATELHDAGFRVSLANPHRSREFARGMGIMTKTDKVDAYMLACYAFLKKPHRWEPPAPEIRYLGALLRRRDVLLGDALREENRLEKYLSTDTPADIISSCRRMAQLLREEVSNIERQIKAHIKASPALRRDYTLLTSIKSVGPQLGMHMLVVLRSHNFVSAEQAAAFLGVVPIEKRSGTSVRRRPRMSKIGPSQLRAKLYMSALCGKIYNKRM

SEQ ID NO: 311961 - protein, 432 aa, unidentified
MKVTRGMQRKAAKAGRRAALVGADTLIAGIDLAKTHSVVVFMRASDKAPLGRLRIPTTAAGLVELEARGRELMRRMGLSRLVLGMEATGHYWKILARAAGELGLPYVIVQSFVVARSRELDDLTRNKNDQRDAILIGQLVAEHRFTEVQLERGAWAELRLLAEARDQRRVERGAALIEQRALLELVWPELLEQVSTLAGTHLQACLRLGLTPGEVAAMSLARFARLLQREHGERRFTTWMAKRLWAAARASRAYDETPAAMLRVQLAAQRIQAADQAVATLDARMTATFETTGLGWMRGQIRGIGDALLINLLALAGDPRRFDAAGCMVKLAGSNPTERSSGQVEAAGGIPRRGRRTLRVVACQAAVCLIQHNPDFEAFFRRLTQRERHRLVPKAAQVAVANKLMRIVWAMATSGQVYDSRLATQGRLTEAA

SEQ ID NO: 311962 - protein, 353 aa, unidentified
MFTVGVDPHKWLLVACSINELGQSVSTWSGSNDPVGWDSFRSWTTSLDGPVVVGIEGAYSYGQGLARATTTAGLTTFDINPRWTARERRSARRTDKSDGDDALAVARITLREHAALEALVPPSDGPREQLAILVRDRQELLQDIVRLRNQVHARLSGLDPAYKQTLGSLAGKHAAQAVIDFSPPVQGVCAGIILAFVHSLARRWLAAEADLADLTQSIEELGKDHFPALTAIRGVAALTAGTIVALTGRRTFRSEAQFAAYCGVSPLEASSAGKTRHRLSRTGNRELNAVLYRIALTQARCDDRAKSYIARRKADGLSFREAIRCLKRFIARAVYQQLKPYLAAPQAPRSSCA

SEQ ID NO: 311963 - protein, 320 aa, unidentified
MEKVLFDQVVKVGCGIDVHKDIIVATIRKSENKYETKEFTSFTSSLTALREWCKSESVTHVAMESTGVYWKPVFNILEAGDFEIILVNARHVRNVPGHKTDKQDSQWLSKLLVSGLLKASFIPPVEIRDLRDLVRYKKKVVAQASSEKNRIIKILEDANIKLSSVLTSVDGAVGTKIIDDLIAGKADINELMKHYHGKIKASKTEFRLALEGRLTKHHQFMLRVIQESIADKEKLIAKIETQIDELAKQYSVEIELLQTIPGVAYESAVSIISETGADMSQFFSEEHLSSWAGMSPGNNESGGKKKAQPPSTGTNTYKQS

SEQ ID NO: 311964 - protein, 421 aa, unidentified
MKTVHSEFAAYIGLDWADRKHDLCLQVGLDGARERSVLEHKPKAIHAWAEQLRKRFGGAKVAVCLELAKGPIVSALLEHDFFVVFLVQPAMLAKYRNAFTPSRAKDDPTDAEFALELMLRYPDRVQRLKPESANMRILRQLVETRRGLVDDRVRVTNRIVANLKAYFPQVLDLFREKDTGVFADFLERWPTLEAAKKARRNVLEGFFRDHNVRYQTTIDRRIDTLKQDEALTTDETVIRPARLLVELSLPQLRALCSAIERLEQEIADCCSKLADYKLFAGLPGAGANLAPRLLVAFGEHRERFPNAAAFQEYAGVAPVTERSGNKCWVHWRYSCSTFLRQTFIEWVGQTIPRSFWAKAFYDAYRARGGAHQAALRALAFKWIRILYRCWIERLPYDESKYLMALQKRQAPLLKHAASAST

SEQ ID NO: 311965 - protein, 397 aa, unidentified
MASGRVNRANRPNTWLLRPILRREDSSCQPGANGMDPALAAVESRTSTAVKEDVMQVVRIGLDLAKYVFEVHGVDNHGKVVVRKRLRRDAVAGFFANLPACLVGMEASNGAHYWARVLTELGHQVRLISPQFVTPYVKSNKNDQNDAEAICEAVGRPSMRFVPPKSTDQLAVQAVHRIRRRLVADRVRLVNQIRGLLSEHGIVIARDIAQLRRGLAVIVGSINDGLGEMLRALMRELQEELSELDTRIAAHDRRIREIFRTSEQCQRLGKIEGVGPVTATALIAAVGDRSCFKNGRQFAAWLGLVPKQRSSGGRARLFGISKRGDRYLRTLMIHGARAALSRATGKQDPRSLWLGKMRQRRHPNVVAVALANKNARIVWAMLTGDAAYEPALSVKAA

SEQ ID NO: 311966 - protein, 449 aa, unidentified
MSRPQVIDDEERERVHERVAAVDVAKDCGMVCTRIPHPSRPGARRSTVWTVKARKNAIGTLGRQLVSDGIEIVTLESTSDYWRIWFFVLEACGLAVQLVNAAQARNLPGRPKTDRLDAQWLARLTEMGLLRASFVPPKAIRDLRDYARARIRLIQERTRCWQRLEKLLEGALVKLSAVASKLTTISAQDMIKAMITGERDPRVLAGLARGRMKARQDDLAEALDGMFDDHHGELAGLLLDQIAFLDAKIAQLTSRATGLAAAMPAAWGINADGTTGPDAGTSPDAPVLNAVARLAEIPGISQDLARSIIAETGLDMTRFPTAAHLVSWAGLCPSARQSGARTRPGKKGQGNGYLRCSLGQAAIGAASTATFLGERYHRIARRRGKAKAQVAVARSILVIIWHLLAAPATRFTDLGHGYYQGRLDTDRKLKNHIRQIQALGFDITITKAA

SEQ ID NO: 311967 - protein, 352 aa, unidentified
MWLIPIITQELSPALTSSLNYFKGLDMYSIGLDVSKSSIAVHIPKSKLDIEIENSIKSLKSLYAKLKKIYKKEIDKLVFVFEPTGNYSSVLYRFCADKKVKVFIVNPKQSHNFAKAISQRNKSDKVDAQMLSKAIMIAREEEIIIPTIDSSVEEIREMMSYHRIKLKQRVQLSNHLEALSAKDNNFSLVKRLQKEIKELKKTEVEIIDDIYQMIAKNEILIKKYEAIKSIDGIGKIAAIVLIHLFIRYPNANQKQITSLVGLDPAIRESGTSIKGRSRISKAGGKMYRGSLFMAAMVATKHNQKLKLFYNRLKENGKHTTVAQIAVMRKLVIIAHSLFKSGESYDENKHLSY

SEQ ID NO: 311968 - protein, 350 aa, unidentified
MGKHSRDFSSVTTVGLDLAKHVFQVHAIDASGRVIFAGAIKRAKLLTFFQALPRCLVGMEACGSSHHWARELIELGHEARMMPPAYVKPYVRRQKNDAADAAAICEAVTRPSMRFVGVRTVENQAMLMHHRAREMLVAQRTQLINGLRGHLSEIGVIASQGYKAARELTDRIAACDAAILLCVCEALAPLVAQLRTLDEAIDKIDRALMKKAKTDATARRLMSIPGLGPITALAMAASVQDASSFEGPREFAAFLGLTPRQNSSGGKQKLGRISKMGDRNLRKLLVVGAHAVLHHRQPHTDALRTWAKKLMETKPFKLVAVALANKLARIVFAVLRSGGSYTPMAAVAAA

SEQ ID NO: 311969 - protein, 346 aa, unidentified
MLADELDYVIGVDPHRDTHALAVVDVRTGGVVFEATAVADGEGYACVLRLVDQLAPGRRVFAVEGTGSFGAGLTRFLIDHQERVLEVGRLRRERQSGKSDALDAIRAARSVLSQTRPARPRAGGEREALRALAAAREGAVTARRSGLCQVRGLLVSAPEPLRAKLRSLTRAQLLRRLAAVRPGRCQDQELRGTLLALRALARRVTALTVEERELAREIETLTRKLAPQLLDQPGVGPLAAAQVLISWSHCGRIRSEAAFARLAGCAPIPASSGQTIRYRLDRSGDRRLNRALHMILVTRRRAHAPTIAYINRRVQEGKSRREATRCLKRYLARSLYRLLENPPMPA

SEQ ID NO: 311970 - protein, 419 aa, unidentified
MKVEYGNVAEDAVWAGVDTHAATNWLSVVDARGSELFSGEFATDPEGYRKLCDEIRRLGSPVAAGVECTGAYGAGLVRAMAAYGIACCEVITPGRPRRGPGCDKDDAADALRAAKQALSGENLAVPKSQDGWVEEVRNMTVAREELVKQCTSLANLALATVRKGPDEIRARLERLGTAKMMGVLAGWDEAEADPICDAVMFSLAALGRVWAEARRSARLLEERIERTLKAGNPALASMYGCGPISAAMLAIAAGDNPERMGSEASFAALCGVSPIRASSGKVERHRLNRGGNRNANKALHIIAMHRMRTDPRTTEYVERRRAEGLSDREIRRCVKRYIAREAYRLIMHPYDVPIEGKGPEMRAERIASGVSQKDAAIALGVTASTLCDLELGHHQFRELALRYRQWIDDGFPLEAGIAS

SEQ ID NO: 311971 - protein, 463 aa, unidentified
MCTDNRPRRAQPILDQINPNVAGIDCGSAAHFVAVPPDRDPQPVRRVRTFTADLHALVDWLCVCRVTSVAMEATGVYWIPIYELLEARGFEVLLVNARHVKNVPGRKSDVSDSEWLRDLHSVGLLRGSFRPSDAVVALRTYVRHRQTLIETASTAIQRIQKALTQMNVQLALVVSDITGVTGLRIIRDIVAGQRDPQQLAQHRDGRCRATAAEIVAALTGHYRDDYLFVVQQQLAVFDLCQQQLTACDRAIAQQLDTLTGDRPAVAAALPPARQRRRITPKNNDLAFDARPTLFHLTGGVDLTQIDGIGPLTALKLVAEIGTDMRRWPTAKHFTSWLTLAPKNRITGERLVSSRTQPSANRAAGILRMVAMSLGRTSTALGAFYRRLAARIGKPQAITATARKLAVLIYRTLKGELVYDDPGADHYDAAQRARIVRRLHHRAAALGFELLNRTTGEVLTAGVS

SEQ ID NO: 311972 - protein, 430 aa, unidentified
MKKKSQLNQKIEAVTLRTLVVGIDIAKEKQWARFVDCRGVECGKAMYFRNDRTGFEAILARMRQISKENSFAEVIVGMEPTGHYWKALANYLMKQEGIHVVLVNPYHTKKAKELDDNSQTKSDKKDALTIARLVKDGRYSEVYLPHDVYADLRVLTTARNSVNRQKNALENTILAVMDEYFPEFTKVFKHPFKGKAAMQVLKSCPFLKYILQLGIAGVLTEIKKAVKKSVGMKRAQLLVDTAQASVGVDYGIDSARCKLRLLLESLELANRQLAQIEAEMAVALQKTGMAEYLLSIKGVGVVSLAVCLGELGDPLRFDDPRQLSRLAGYNLVEDSSGKNKSGTCISKRGRKGLRRVLYQMALTCVAVNPELKELYHYLKTRAVNPLKKMQALVVISKKLLTLIYTLAKKKQYYNPAKVFGEVRKNQLMAA

SEQ ID NO: 311973 - protein, 397 aa, unidentified
MNFIVGIDVAKRNHEAVIMDEEGTVVQKSFSFANSCIGYNKLLDFVRRVTRDRAAVSFGMESTGHYWLPLYTRLSKEGYRVHVINPIQSDALRGMYIRQAKTDSKDSFIIADVIRFGRFSETTVSQEKLQALRELCRNRFFMVDSVSDVKRKLTALIDQCFPEYEAMFSSLFVETSIAVLAKYPTPEKLSKANLAALTAVLQNASGGRFGQGKAVELREIAKNSFGVPDSCGCYASLISCYIKQIRFMKQQVDEVTAEILRLLEETNPTITSIPGIGPILGAVILSEIGDISRFKSADKLAAFAGIDPTVNQSGDFVGTRNHMSKRGSPYLRRALWMASTVAVMRDPMFRAYYEKKSAEGMRYMKIIGHVTKKMASVIFAVLRDNKPYTPCIPAGVS

SEQ ID NO: 311974 - protein, 419 aa, unidentified
MTDPPLQSWLRFIAIDIHKHYLMIGAIDAAKQVVLPPRRVELARWPKWAHANLLSTDAVVIEATTNAWAIYDLLAPLVGRAVVVHPAKVKLIAAARVKTDKIDVLSLAHLLRADLLPEVWVPPQHVRDLRALLSHRRRLVSLQTTAKNRLQSVLHRLNLRPPDGDAFAHKQRAWWAELDLSPTERLRVNQDVATLDHVVAQIAAVDAELRCLSTSELWAEQVPYLVQLPGIALLSAMTILGAVGDITRFATAKKLVGYAGLGAGVHDSGKTHRDKAITKQGRRELRYVMIEAARAAVQSHPYWKDEFAQLERRIGEAKAIVAIARKLLMAVWHVLLAKSADRRADAEQVAFKLMVWSWKLSDEQRGGLSSRQFIRAQLMRLGLGEELTHITRGGTRRPLATIEEVLALRPEVRGPPDTS

SEQ ID NO: 311975 - protein, 334 aa, unidentified
MKQVNQVGVDVDSEALVSMMQRGGQRLPQARFANTAAGHKKFIRWATKGARSARVCLEATGIYSLEFALALHHAKNVEVMVVNPRAIKDFVRACMQRAKTDAVDAGGILDYLERMPFSAWQPPAPEILELQAINRRIDQLHTELTREKNRCHAAQFAGASADAIAHDIEVNIRHLERRIARMQDSGLQLVRGVPALTAKLAHLVSAKGIGEASAMRLLAELLVLPDDLAAPQWVAHAGLDPRPYESGTSVHRPRRISKVGNRHLRAALYMPALVAIQHEPNVKAFYDKLVAAGKKPMQAVVAVMRKLLHAIWGMLKHDQDFDGEKFFRIAKENT

SEQ ID NO: 311976 - protein, 371 aa, unidentified
MKQQTKSSNITVGLDLGDRRHRFCALDERGEVVEQDSICNERDSLRKLAGRYHGALGVMEAGAHSPWISRFLEALGWRVVVSNPRKVRAIYQHERKSDQRDALMLARIGRMDLALLYPVRHGTAEAQQDLLRIKLRDSLVRARVAVINSVRFTLKSLGYTVRNPSSARFHKVVMEEVPESVREMITPSVQALAELTARIKMLELEINTLAQMKYPQSAQLQQIPGVGPITALYFVLKIEDPNRFAHVRDVGAYAGLCPRRDQSGESDPQLRISKRGDAYLRRLLVSAAHYILGPFGPQSALRAYGLMLAADGTARAKKRATVAVARKLAVLLLSLWKSQQPYQPFPGACLNGEQEDRRSGTIALHRMEATD

SEQ ID NO: 311977 - protein, 404 aa, unidentified
MRRTDHRAAHPRSAAHAHDTALFVALELSRSTWLIGSSRPGSDRISKHQVRAADTTALLVLLKRLKARAERSCSTTVRVISIHEAGLDGFWVHRFLEANGVESHVVDAASIAVNRRSRRAKTDRIDVEKLLDTLMEWARGGRRACSMVRPPSPAEEDERRLTREREALVIERTRHVNRIKGLLATQGVFGFEPMRKSHRKQLEQLRGWDGQTLPPRLKAELVRELNRLELVISQVAAVEDERDRALKARQHPAPSISAPEAATGAQPVATEHAGRLLLRLRSIGPEFASVLSSEAFYRNFGNRREVAGYAGLVPSPWKSGGIDVEQGISKAGNARLRKTMIQMAWLWLRHQPGSTLSRWFHERVGDRRGKIRRITIVAVARKLLIALWRYVTLGLVPEGAELKV

SEQ ID NO: 311978 - protein, 426 aa, unidentified
MKEKIDYLSTLFVGIDIASRIHVISALDFNQDFFIKMKPVQNSQEGAVLLENMIVDVLKENHQFKYVVIAMESTGFYGVHLANYLSASDLLAPFSVRVYCLNPKEVQNYKKSFNDIGKNDGIDSFVIADFARVGRISIQPWRGSQYLALQRLTRHRMHITECIAREKTYMLNNIFLKFSEYALLRDGEHPFSNKYSATAEAILTEFTTNEDIVNSSVEDLVAFINTKSKGRIADPEETAKIVQAAARNSYRLDKCLYEPLTISIASSFNCISSFEKELKAIDKAILQTVQGLNPDEYTVLNSIPGIGKVYSAGILAEIGSVKAFQNANALAKYCGIVWNDNDSGDFEAEDKRMSKAGNSYLRYYIIEATGSVIRHCPEYERFYHKKYAETRNHQHKRALALTSRKFIRLLYGLLDKSQLYSPEKSR

SEQ ID NO: 311979 - protein, 494 aa, unidentified
MQVEYERCAGIDLHKKTAVTTVMVTQPDGTVEQDTRTFSTMTSDLLALDDWLRAHRVQIVAMEATGIYWRPVFNILEEGHQVLLVNAQHMKAVPGRKTDVKDSQWIADLLRHGLLSASFIPPAPIRQLRDLTRYRKMLVQERAQEINRLQKVLETANIKLAAVATDVLGKSGRDMLNCVIAGERDAEALAELARGRLRAKLPDLRLALEGRVEPHHQFLLQQILAHTDFLEQSIDAVQQEIDKRLVPYQEAVTLIQSLPVQLQAGAATVIAEIGVDMSRFPSDAHLASWAGVCPGNCESAGKRKSGKTTDGNPYLRGVLCEMAWIISRMKDNYLSAFYHRMARRRGKKRAIIAVAHKLLIIIYHMLKDNKPYQDLGGDYFDQLDAARIERRAIQRLEQLGYNVTLTPLEPSDKTTRQPPDKTTKDPANKTAKQAPDKTTKDPANKTAKQAPSKTTKDPANKTAKQAPSKTTKDPANKPPDKTAKKKEVASLHNV

SEQ ID NO: 311980 - protein, 419 aa, unidentified
MAFKIFRKNCCGLDVHKTWIYACIGITDTNGRTEYKQARFSSFSKGLKELADWLAKYRCFEVCMESSGKYWIPVFNILEKAGLFVTLAHPKYTKPQKGNKTDRKDAKWICDLFMCDMIKPSFIPPADIRHLRDLVRYRFKLTCMITGEKNRAQNCLTVSNLKLDDVFSDVFGKSSRSITEQILAHPGETFDVAPFVDRRCKTPIGEIQAAIDGAVSPEQAVKLRQCLDHIDELEMHIEKVQQEILRLSDKYQAALDLVRTVPGFDKNPMTAIQILSEIGGDMSVFPTAKHLVSWAGCCPRNDQSAGKIKSTRISRAGSYFKPVLVQVASALTRSKDHPEITNRYRRIKARRGHKKAIIAVCRMLLTAIWHILSDLKPYTPDGFVEPRPAEKSKVLTTAQALSLLKQRGYVISDSAPVLN

SEQ ID NO: 311981 - protein, 340 aa, unidentified
MGEQYVGIDLHRRRSVIVRLTPQGEVLEIVRIDNDPVALSLELAKAGPDPEVVLEATYGWYWAADLLQACGARVHLAHPLGVKMFGYQRVKTDARDSRNLAELLRMGRLPEAWLAPSQVRELRELVRYRAKLVALRSGLKAQVHAVLAKQGVRVPMSDLFGVGGTRLLDQLRLGRAYGLRVASLRTLLVAYDQEIAMLGREISSALAGDVGYLAIQAIPGVGPVLAAVFVAEIGDVHRFAAAPQLCSWAGLTPRHRESDTSVRRGPITKQGPRLVRWAAVEATQRLPSGSKQAADFHRIADRRGTGIGRVAAARKLLTLVYYGLRDGQVRCLAPASRDAM

SEQ ID NO: 311982 - protein, 394 aa, unidentified
MAFKIFRKNCCGLDVHKTWIYACMGITDTNGRTEYKQARFSSFTKGLQKLADWLAKYDCNDVCMESTGKFWIPVFNILEKTCWVTLAYPKYTKPQKGNKTDHKDAKWICDLYMCDMVNPSFIPPPDIRQLRDLMRYRSKLTNIMTSEKNRALNCLTVSNLKLDDVFSDVFGKSSRSVIRYILEHPGETFQVAPFIDRRCKHPVEEIQAVIDGTISHQQAVKLRECLQHLDELEVHKTNVEKEILCLVQQYPYQLELLQTVPGFSGNIMTAIALISEIGADMSVFPSAKHLISWAGCCPRNDQSSKKVKSTRISRAGVYLKPLLVQVAIQPFTANADKLSAAGALEIRCQICDGRFLSMWVALFIFLCCPLPSRPKSLHVHNGRIVILSSVAWIF

SEQ ID NO: 311983 - protein, 338 aa, unidentified
MSLYCGIDLHSTNCQVVVLDQSLVTVAERRHRNDLEEILKFLEPHREELVGIAVESTRNWYWLVDGLMDAGHRLHLANTSAIQQYEGLKYTDDRHDARWLARLLALGILPEGYIYPRQERPWRDLLRRRAFLVRSRTSQLLAIHALFEQYTGRSVKGNEIKQWTATAIKEQIEDPRVALAVTAMRRVVDVMTAQIRLVEKEVVGYAKLRKEFEVLRTARGIGEAIALTIMCEVGDIRRFRKVGNFASYCRCVKTERLSNGKRKGAGNKRNGNPYLSWAFTEAAHFAIRYEPRAKSFYERKRLATNRIVAVRALANKMARGCYYVLRDQIPFEPQKAFG

SEQ ID NO: 311984 - protein, 424 aa, unidentified
MNFTQNDRIKQVTADTLIVGVDVGSQTHFCRAFDWRGVELSRRVFKFNNTGMGFLTFLRWTDELMNKTEMKKVIVGCEPTGCYWLTFQKFLQDHDIQLVTVNPFTVNRSMELDDNSPEKSDLKDPKTIALLVKDGRFSTSYLPSGVYAEIREASVCRDQIMKQHVRLSNQIQGWLQKFFPEYFECYADWASTSGLMLLKEAPLPQDILKIGAGGINQIWRDAKVRAAGIKRAQTLVEAAQNSVGLEAGEAARLEIWVLVNDYILKAEQLKRLDEYLEEKVKEVPNVEKLLAMKGVGPSTVIGFIAEVGDIGRFTDPKQIQKLAGLEIVKKSSGKKKGQPRISKRGRRKLRRTMYESARALINWNPAFQDVFLYYRNRQRNPLGGMQAKIAVACKAIRVFYVVLQTGCDFDEEKFRKDIIRPEVA

SEQ ID NO: 311985 - protein, 339 aa, unidentified
MDHYIGLDAHSKTCTFVAMDSSGKIVREGFFKTSESGLKSMVKSLEGDVAVVLEETNISHWIYNTIKPHAKKVIVCHAAHLPKKSGPKTDYRDALHLVKQLRAENLTPVHHDDDEGLMDLRSVVSSYQGIVDSIVQQKNRFKAILRSEGIEYNLTKLKSKRIEQSNKIKSIPKQTVPKRIIDHIEALETIKSSYAKDFHNNRYRNQHIRNLRTIPGIGPIRAHTIAAYISTGHRFENKHKLWAYSKLVRHQDVSDGFIYSKRTPQGRSELKNAFMGAALKIVISPKENALKAYYRNLVIEKHLDHKKARKALARKIAAIALVTLKKEIKYNDQLATIRH

SEQ ID NO: 311986 - protein, 415 aa, unidentified
MVISEDGAITERKENQMISVGIDVSKGKSTICIMKPYGEVIRSPYEVNHTINELSELAVLILHLDENVKVVMEVTGTYHLPILMYLKEKVILVSVVNPLLMKKYVDSCTMRKGKTDRIDSRRIASYGLDNWYHLVEYDAGNKRYQELKLLSRQYSHYMCMRIESVQSLTNILDATMPGITKVLAGWSFKTEKDKLSDFVEEFWHYDLITEKTEKQFVEKYVKWAKKKGYRNNQAKASEIFAMAKSGIPTVSSQSLATKLLVQEAVRVLREVDKTLGIILAQMQGIAMNLKEYPIVRAMHGVGDKLAPRLIGEIGDITRFHSGSALIAFAGIDAPPYQSGQFVGTNRRISKRGAPGLRKAGYEVMKCLKTNKPIDDSVYCYIVKKENEGKPKKVAKIAGLNKFLRIYYARVKEVYQ

SEQ ID NO: 311987 - protein, 406 aa, unidentified
MELTPIYKRVIGLDVHQAKISACAIAELPDRTLTVEQREFGGFKRDRRALADWARAFGPEVVVMESTGIYWKSPYAALEAVGITAWVVNARHVKTVPGRKTDVADAQWLATLARSGLLHASFIPPANIRHLRLIARQRQKLGGMLASEKNRLHKLLADTGIRLGVVVSDIHGQAGRAMVKALIEGKPMSEILDLTGRLRASRAELFEALQPEELSSSHRFVLTEIMAHIEELEERMVRFEHELLRGLTTWRPQLALLQTIPGIDLMGAAMLLVEISAEMDSFGSAEKLASWVGICPGNNESAGKRKSGKTRKGNAWVRRLLCEFAQAAARSRCALKDKFAALSIRKGHKKSIVALAHKMLRIVFSILKNNTPYHDKVVDYEALSVQRNAPRWIKMLVKHGFIPANA

SEQ ID NO: 311988 - protein, 480 aa, unidentified
MSPSFIAIGCDSSKGRIDVEVRNHHGTVLHTGIFDDTPNDHAAVRRLIDELRERYPEAFFLVGIESTGGMERNWLAFFRKEKRWTKCMHVFKLNASSVHAYRLSQLHRAPGDAAAASDIARFLLEKCSKRTPVTEPESGPLVFYRMIRALIGERICASQRLQTLLVAVHPDLVRFCRYGLPTWILLLLERYPTAALLAQAQISTVDAIPHIDTTRAGELIANAGQSVASLTDSATSAAIRLLVRRLRDTEKCIDEAQAELLTIITSDPQSQLAKAVALLDGMPGIATWSAACLACEIGDPSRFPHGKSIVAWAGLDPVTEASGDDHHSLGISHRGNAHVRAMLFPLAMSGIQYNPVLKAFYERLTTTNGKTKLAALVAVMAKILRIAHAILLSEKAFDPTHEANRQQLAQATQANRSPVPAAAPAPPQAPRLEAPISRREANKRKKAAAPSATVRDQSPKRMTGREPHSKHHAQPTHAKG

SEQ ID NO: 311989 - protein, 442 aa, unidentified
MKRRGYQKYMERKKKLTGKRIVGIDPASEKHHSAVLDEGGIQIGRSFSFPVSFEGYGIKLWNELNRMLGNYNPDNLVFAIECSCALWKSFSDYITEKGYTVLLVSPLTTYHSRPIMNHDFSKTDPKDALIIADNARNGSYSEYRIFTPDSNKLHRLSITYEKLVKDRQKAVGRTRALMQEVFPEYLLCIGVDTHGSLYLLERYFLPEHFQRIDVHKEEKNLWHISNGNHSTDTLMKLKTLSYKSIGSHVQEEEEALRLTLDAWIIQIRQIDLSMKKISSAMIDLSKKTEYFEILISIKGISDLTASRFIAECRNLDEYNHYKQIEKLAGANVRLMDSGRYEGTRRISKIGNKRLLKLLYQMATQTVKFIPEIRIKFMKRQLKKKCYRENIIACVPWLLKLIMALIKERRQYVFKEEATQEMKKLEPKYTDMSNKDKKQRKVA

SEQ ID NO: 311990 - protein, 361 aa, unidentified
MKCVQRNKLDFSGQNIYVGIDVHLKSWSVAILSEHSVLKRFSQSPEPELLHKYLVSNYPGANYFSVYEAGFCGFWIHESLTDLGITNIVVNPADVPTMSKEKLRKTDAVDCNKLARELRSGSLEGIYVPGTATLELRSLIRMRTLIVKDSTRAKNRIKSLLHFHGVKIPEEFIRCSSHCWSKRFLRWLHNLELSTEYGKKTLELHLEQFIRLRKMLLQETRAIREISRKAPFAKPIRLLSSVPGIGITTAATLMVEIDDIVRFNSAEHLASFIGLVPMCHSSGDNDSVSNMTIRRHFMLRWLLVESAWTAIRIDPAMTMAYTEYRKRMNPQKAIVKIARRLVNRVYFGLKYEKEYVSCIVK

SEQ ID NO: 311991 - protein, 425 aa, unidentified
MSYKIAGIDIHKRMVAVVVADVAGEGEYQFERHKFGSGGEQLRLLAEWLVANQIEEVVMESTAQYWKPVWGALERDWQPVSRARGAGAKSGSLLLAQAKSNRAPRGRKNDFADAERLLKRLVANELVLSFVPDTEQRLWRTVSRQKLQLTRARVRLQNQLEALLEQGHLKLSSLVSDLLGVSARRMLQALADGEIDAGRLAALAHCRLRATSEQLCDALGAATKLSPVYRRLLQMLLDELKLQERHMEQLDQELSVLLTAHHSAIQRLAEVPGLGVDSAQQILAEVGANAAAFPSAKNLASWVGVCPGEEQSAEVSKSARSPKGNRNLRRLLNQAAHAAVKTKGSVFEWVFGRLRTRLAYQEAIWAIAHRLCRLIWKILHQGVHYEEHGPAVSIKSKRNRTTRMIRELRKLGYRVEPVGAFATNM

SEQ ID NO: 311992 - protein, 340 aa, unidentified
MTIQSKRVVQEESKSFHAGIDVGAEELILLVRQNGTSLKSQKFTNTPADRARLVKKMVGMPGIIVCLEATGVYHFDLSIALHDAGVALMLVNPKSSHNFARVLMKNSKTDAVDADTLAQYAERMDFVPWTRPSDEQIGLRSFARRIDALTRQKAAAKNHFHALSASQETPKSVLRDVKLAITQLEKRIEHLGKDALLLIEQHTNLKRVFQLLIGIKGIAQTSAIALMGELLLLPPGLSHREWVKFAGLDPRAFDSGKSVHKQARLSKAGNRHIRSALYMPALSAKQHDPYVKAYFQHLVDNGKKPLQALCAVMRKLLHAIHGMLKHDMPFDNTRFYAIPT

SEQ ID NO: 311993 - protein, 336 aa, unidentified
MAIVKVFVGLDYHNESVQVCVMNLKGKILVNRRVPNDWQAVTQALGKGRRVAEAAIEACNGAAHLADELIQRAGWPVQLSHPGYVARLKQSPDKSDFSDAQLLADLARVGYIPKVWLAPHDVRELRRLVRFRQQLAAERRNTKLRIGALLREHRPPSPPGRPWTLAWRLWLDRLELPEQTRWIIQQHLERLAAVTVDINGVEYRLEKLVEQDRLVQFLLTRPGIGLITAVTLRAEIGRFDRFQSGKQLSRFCSLSPRNASSGNRQADAGLIRAGNPQLRAVIIQAAHRLKRYEPRWRALAERLRHRGKPGSVIAAAVANRWMRSLYHQVKHWSIAS

SEQ ID NO: 311994 - protein, 411 aa, unidentified
MRRVIGMDIHRTFAEVVFWEAGKLRPAGRVSMTRAGLEGFGRSLHKDDEVVIEATGNAMAVVRVLSPYVGRVIVANPLQVKAIAHAHVKTDKIDAGVLASLRAADFLPEIWLPDAETERLRRLVARRNQVVRHRTRIKNEVHAILHAHLIPSCPHAELFGRLGRIWLSRQDVPDDERAAIDRHLRELDRLGEDLAVLDREIAQAAVDDSAIKRLLTITGVNLIVAAGLVAAIGDVRRFPDPQRLVSYIGLNPRVRQSGLGLAQHGRISKRGRSHARAMLVEAAWAASKAPGPLRAFFLRIRARRGHQIAAVAVARKLAVLCWHLLTKNTDYQWARPALIANKLRSMELQAGQPARKGNKRGAAYAYNVKELRDREIDLARHAEQAYERFVSQWQRRGNPKQRTGAAKEERR

SEQ ID NO: 311995 - protein, 421 aa, unidentified
MQVLYERCAAVDVGKDVIAVAVRLPGDGPDGRQTIKRTFKTFYGVLREAARWLDSLGVTHVAMEATGIYSMPVYHALIEHGSFEQVLVCNAGHVKNVPGRKTDLADAEWLVHLLECGLLRGSFIPPADIKAARDVIRYRTRVVQSRTSELQRLGNVLQDAGIKIDSVASSIATKSGIAMIEALIDGERRPAVLADLALRRMRSKIGDLELALEGRFGDHHALMCRLHLDHIGHLDEMIGKLDQQIEAMMAPFRAERDLLTTIPGIGPLAAAAVISEIGAGPAGSFPAAAHLVSWAGLCPGNHESAGKRHSGKRRHGNPHLQAILVEAAWAAVRHQGYLKSLYHRHVMKWGGYRSPIAKKKAIIVVAHAMLVIIWHVLAGGAPYDELGTDYFTRRLDPEKETRRLIGKLEALGHQVTLQPAA

SEQ ID NO: 311996 - protein, 319 aa, unidentified
MASFLGIDISKETFNACFLSDGREASKVFPNSPKGFAQLQAWLKNRRADEFHACMEATGVYWENLAEWLYGAGHCVSVVNPARIKAFAQSELLRTKTDAVDAALIARFCKSQSPERWVPPPPEIRVLQALMRHYEHLKTTRAQQSVYAQSSDATPMVAKSTQSVIAALDEQIAAVEREIRQHFDDHPDLKRKRDLLTSIPGIGETTAGSLLAEIPHIDRFESAKAVAAYAGLSPRDRRSGTSIHGRPRMCKTGNSRIRKALYLPAVVACRFNPVLRLFAQRLAAAGKHKLLIIGAVMRKLLVLAYGILRSGAPFDANHA

SEQ ID NO: 311997 - protein, 431 aa, unidentified
MIDAVYEWRSSCRGGSSSAYRLCVLIAAPLRRPLHSRCFQSVMTYRRWYGRLPPAGRKKLIEVRQSILHCFSRHQYAKVVREPSLPTQGGMTMNCTVIGLDLAKNVFQLHGVDIETGEIFRRQLRRHQVSEYFANRQPCLIAMEACGSAHYWGRKFISMGHEVRLIAGQFVRPFVKSNKTDTADAHAIWEAAQRPDMKFVSLKTEEQQSVLALHRMREQLVKMRTMQINQLRGILYEFGADLPQGRRKGMAKIGEELAQLEDRLSTMVIETIRKQIHRIEELNKDIAEIEKRLQLWKADDDACQKIIEIPGVGILTATAAVATMGDAKAFKSGREFAAFLGLVPRQSGTGGRVKLLGISKRGDVYLRTLLIHGARAVIQNQKNHASWLDKLLLRKHRNVVAVALANKIARTIWALLAHHRIYEKNYSATAM

SEQ ID NO: 311998 - protein, 377 aa, unidentified
MSKLRFVGLDVHAETIAVAVAEMGGEVRSHGVIPNRLESIRKLVHKLGAVKDLRACYEAGPTGYVLNWQLTQLGVACEVIAPSLVPARVGDRVKTDRRDAEKLARCYRAGELTPVWVPDAAHEALRDLVRAREAAKKDQLKARHRLGKFLLRHGQRRPDGIRVWTKKHREWIKSHVRFEQPALEATLADYLEEVDHVGTRITKLDKAIDEAIQQAPPEIRAVVEALQALRGVAQTVAVSIVAEVGSLSRFPSPRELMGYSGLVPSEHSSGNRVQRGGITKTGNGHLRRGIGEAAWAYQHRPNVIGFLAQRQKSLAISEESKQIAWKAQQRLHKRYKALSARGKNKNQIVTAVGRELLGFIWAIGVGAEKQHKLVSAA

SEQ ID NO: 311999 - protein, 446 aa, unidentified
MTSANRSGERDLIGALPNTMNVLSAVPAGGASNQQQEGSGQSMADQEVIVIGGVDTHKGCHVAAVLDHNGGVLGSQSFPATASGYQSLLDWMRGHGRLLKVGVEGTGSYGAGLTAHFRSNEIEVLEVNRPNRQMRRRRGKNDTVDAIAAARAALSGQATAVPKSNDGPIGSLKAIRVAFVSLRETRTKLINQMHAIVVCAPAELRSELQKLNAEQLIARCSRFRRGELSEPLHGAKTALRALGRQCEALDEEVEELRSAINELTAKANPALLSAKGVGPDVASILLIVAGDNPERLRSEAAFAALCGVSPIEASSGKNVRHRLNRGGDRRANHAFWRIVMVRLSCDERTKAYVAKRTAEGKSIKEIMRCLKRHIAREVFRLLTKPVAVPLGAELRESRKAAKLSLQTVADQLNTWPIRVSEIERGVAYDSDFATRYQDWLRSESVA

SEQ ID NO: 312000 - protein, 359 aa, unidentified
METVYCGVDLHYGTSTFRFLKGNGETKQDIEIATDRREIEKLLNGYGECKVAYAFEAGGMARYFHRIIEGRKNTEKIHVVHPYKFKVITESKHKNDREDSLSLAKGLLKDYLPRPVYVKSDICCQIKTLLNLRRRMVGTRTRIILQAKSILRGLGIKGSQKSLTGKRGFDIVISQLNDEPFYRAIIESLSEECLAENTKIIKIEGQVKDLIGCNFKQEYEWLISIPGISFVTASTILSVIDDINRFDKAGQFSSYCGLIPSEHSSGENIVRGKITKEGVKELRSLLIQSAWSIVRWKRNNDERTTRFRKKYYRMSYKQKNTQKAVIAIARHLSRIVFGVLKNKTPYHGGITDKAKACVK

SEQ ID NO: 312001 - protein, 369 aa, unidentified
MGEDSTVFVGLDVAKDRHAVAVAEAGRGGEVRYLGEIGADTTSVRRLVARLAKRHGKLHFCYEAGPTGYGLYRMLTAMGHGCSVIAPSLMPRKPGDRIKTNRRDAVQLARLLRAGELTEVWVPDGAHEAMRDLLRLRDAAVNDVRRKRQGISSMMLRTGRVFEGKTSWTRKHRQWLQRQRFDYPAQDLVLQDMLVALQQAEARLEQVEDKVREFVPQWSLAPVVAALQALRGIRLVAAASIMAEVGDLGRFATARQFMGYLGLVPGEHSTGDKVRRQGITKAGNTRARRTLIESAWSYRHLPRTSPRQRRAQEGVSPAIKAIALKAQSRLCGRFRKLAAKGKPLTVANTAVARELAGFVWAIGRAALAV

SEQ ID NO: 312002 - protein, 351 aa, unidentified
MNISHYIGFDVHKKSISYCVKAADGKIVEEGKVRATHDSLRAWAGKRSEAWHGAMEATLFSGWIYDALKPFAAALQMGNPSMMKAIGAAKKKSDKLDARTIADLLRCNLLPACYVAPPEMRDLRRLLRYRNLVVGQAVQMKNRMSGMLLEVGAEYNKRRLHGKQYFNELLDQLEEVPESVKDLLRLSRGALETFAATQRQILDRLQKEPLLAKRVKLLRSISGVGEVTALTWALEICDPRRFPSIADAVSYCGLCAALASSADKTKRGPLSKQRNAHLQTVLIEASKLAPRWNRQLAEVHQRELQRGDRNQATLAVARKLVAYLLAVDKSGQRFEVRTTLPATPTEVAKVA

SEQ ID NO: 312003 - protein, 359 aa, unidentified
MQTKGNRISFKGQDIYVGIDTHLKSWKVTIMTENLLHKTFSQDPKPEILYNYLQRNFPEGNYYSVYEASFCGFEAHRTLNSLGIKNIVVNPADIPTTDKEKKQKEDMRDSRKLAKALRSGVLRGIHIPTKKTEELRSMVRYRRTLVKDISRMKSRIKSNLYFHGIEIPEVLLRSSKYWSNIFTQWIQGLEHSTSHGTFVLKELLDTMLLLRKKLLYVNREIREVSKSLEYKELYDLLIVIPGIGTITAMSLIAELENISRFKKLDNLCSYVGLVPTTNSSGEQEKTGRVTPRANKFLRKILIESSWIAVRNDPALSLAFNKLCERMKPNEAIIRIAKKLLNRIRFVMKNKTKYVPCVVS

SEQ ID NO: 312004 - protein, 392 aa, unidentified
MSQYFRFDASRSLTALEQDSTIVAVIEMSQTKWLVAALVPGVERQPLKKFDAQEEMLLKLLHRWHCEAGQAGRNIKRIVVAFEAGRDGFWLARWLRARDVEAYVIHPTSIAVSREHRRAKTDRLDTELLMRGFLGWLPGEKRHCSMVAIPTTEEEDARRPNRERQNLVTEQTRIINQIKAIFARFGLRTLRPTMRKLAEGLEDLRTAEGTPLPQNTLSELRRHLARLRFVRDQIHAVEQERLRKLAVAPAAETKSPDAMVRLIARVFGAGIETADMLVNEIFSRHWRDRKAVARYAGLTGSPDESGSRRRERGLARAGNVRVRCGMIQLAWRFVRFQKNSALAQWFAARTADGRASTRKTMIVALARKLLIALWRLVTRGEVPQGIVLRPAS

SEQ ID NO: 312005 - protein, 387 aa, unidentified
MVQVNDLSRSLAAFDPISTLVVVVEMSKASWLVSSVVPGVERQPLKKLEPDATALVRLIERWRNEAVRVGRPISRIALAYEAGRDGFWLARWLIARGIEAHVIHSASVAVSRERKRAKTDRLDAAMLMRVFLGWLRGERGHCGMVAIPTMEEEDARRPNRERESLVNERSRIINRMKSALARLGIRGFKPHLRKAPERLAGLRTAEGTGLPANIIEEFRRDMARLALVREQISSIEKTRAERLERAPDTGPHAMVRLLARVIGIGIETADMLVREILSRKLRDRRALARYAGLTGSPDESGLKSREKGLAKAGNARVRRGLIQLAWRFLMFQKDSALARWYRTRTEGPSGARKTTMIVALARKLLIALWRLVTTGEVPDGVELRTAA

SEQ ID NO: 312006 - protein, 412 aa, unidentified
MNTRVEKACGIDVHQAFLVATIVTSAGTKDTREFSTCLDGLMDLRTWILENGCQRVAIESTGIYHIPTYTTLEGKVETIVANPLQIKYIPGRKNDDIDSEWIAEVCLNGQIKPSYIPCREIRDIRELTRTHVKFTHASTALKNKVHKILQRAGLRISGVLSDIFGKSGIIILNGIMDGKSIEKIFSELKDKRIKNKKPEIKDAIKGELSQNDIFVIKECLETVKYLDDKIKEFDTRIFQSLTGRQKKLEILMSIPGIGFTIAAAAIAEIGDIKVFPKPKNLVSWSGLAPAVNESAGKSSNGHITKHGNKYLRTILVQAANSIAIGKPNKLRFFYQRIKAKKGHKKAIVALARKLASIIHHLLSNNEKYSEEEIKEKKAKLPKFVPVKELDMDEMIEILCGAGYIVKKSYSAG

SEQ ID NO: 312007 - protein, 368 aa, unidentified
MSKTGSKRMCVGVDLHKTQFTVCALDEETGAIELEGEFRTNANGYADFINRMHEIEGESGHVIELAVESTGNARFFKNKMEAEGFSVVVVNTNKFKVITMSTKKNDANDAATLAFYLLKEMLPESHLCDQTSEEIRRMLKTRSILVQAMVKMKNQIHGMMLGYGIETKSSQLQSKKKRQELYQDLADHNFSEFTASSLKVILDSLDDLQKQIKTIEEQLQKMVAENRNVELLQTMPGIGPIGAITIAAYTNDMGRFDGNFKRFASYLGIVPSVHDSNQTVRRGKITKHGPQELRTAFVQVAMGIIRQPQNTSEWKLMIDYYRMKKEKGPGRAIITLTRKIARIVFAMLNNQEEFNPALMIREKTKLTA

SEQ ID NO: 312008 - protein, 401 aa, unidentified
MKRLSGGIDVGNESHHITILDEEDHILYNQKVSHQLNEFIKTIKQFKKIEKKEKGEISFALEGKNGYSAPLDRILLNQGFTLYNVDNFKLKRFREAFAGEWKDDKRDALMLSKMLKLKEHINSQKEKVFIKIEKPSPVTESLKLLSRHQQTLIDEKVRLTNRLRKKLLEVCPEILKLAKLKNKKLIAILAKYPDFSKYKSITVKSLLKIKGIGEKQAPFLLKRLNYIAYMPGLTDIYKTIILSFAKRISELQKEVKDIDKSLDKIGNQSKEVKHLKTLPGVATKLASRFIGEIGDIHRFPSEKQLAIYCGIACVDNNSGKVTKAKAAYKANKICKQTLITMAGGSIRLSLQCRAYYLKKRAEGKSHNHALRCLARQLIKVIYKMLTEDRDYMVRKELKKVA

SEQ ID NO: 312009 - protein, 411 aa, unidentified
MPKIVYPICCGIDVHKSFVVACIATTGKNLVTTYSKPKRFSTFTNDLRRLAQWLSDNNCKDVCMESTGKYWIPVYNILETTCDVVLAHPKYLKAIKGKKTDKRDAKWIADVFKFDMIHGSFIPPPDIRQLRDLVRYRFKLTSYTTGEKNRAQNCLTVSNIKLDDVFSDVFGKAASAITERLLTSNEPFDVTPYLTKNIKASPEKIQAAVDGILCAQQAEKLRIIRSHMDSLELCKANLESEILGVATKYLPQTNLVVTVPGIQPFSAIAVIGEIGVDMSVFETSRHLCSWAGLAPQNDNSAGKKKTTRISRAGAYIKPLLVQCANAAIRSKGNPEIANRYNAIKKRRGHKKAIIAIARMLLTAIYNILKKNEPYNAELYRKANLPPIQREVTVEQAIFILQRQGYLVTAST

SEQ ID NO: 312010 - protein, 543 aa, unidentified
MLHLSLCLLLVLETGMNARQIGSPQTPNATTTTTAKTSQPRPRRQAARPDSQGTKANTTKAKANTTKAYQQRKVRAHAKAEEKRQAQCDKVQVLPVCNARAAGIDIGEKTHWVCVGFSTESNAELIREFATHSQGLRDLVAYLRAHQVDTVAMESTGVYWKPLFALLLKEGFRAILVPPQYTRQVQGRPKTDKRDCQWIYRLHSVGLLPAAFQPDETIGVLRSYLRERANNIRDASRHIQRMQKALEQMNLKLTGSIADITGLTGQKIIRAILQGTRDPYKLAALRHPKCKADAEQIARALDGTYRDEHLFALRQAYEAWRFYQKQLDKVDEEIARQLERLKRGSPLPPLEPKRRTCGRKANDLRFEAREALYYVVGIDLTELEGLSALSALTLLSEIGTDLTKFATVKHFCSWLGLCPHFKKTGGKVKSSRTRAGQSRAAKVLRLSASSLHSSTGALGGFLRRMKGRLGAPAAVTATAHKLARLVYYALTRGMTYVRQTQEEYEKQYREKQIQQLKKKARRLGFELQAKPAAEQVEGKTTSG

SEQ ID NO: 312011 - protein, 404 aa, unidentified
MYNIYLKEACMRFYACSKQFYAGVDLHARSQYLCIMDRNRNVLVHKELRNQDTDKFLSIIAPYKHDLVVACESTYAWYWLSDLCADHGIEFILGHALYMKAIHGGKTKNDRIDSHKIALLVQSGMFPLSYVYPREQRPLRDLLRRRLSFTRHRADLLRHLQLINTQNNFPAIGMISKSQLKRAELSGRFTNEAVSRMVTADMALVDGYERIIKDLEQHILSHVRLHNTKELALLQSIRGIGDIIALTILFESGDIRRFASVGQYASYARLVVCTRESGGKLYGSSGKKIGNPYLKYVYSEAAVYAVKFNAEIEKYHARLAVNKGKGKAYVIIAHKLARAVYHMLIHGTVFDMKRFIGNDYTSQAVEPGLLTDGRNELAKPAEPTRTAAQTAHTGRSRAAASHMT

SEQ ID NO: 312012 - protein, 456 aa, unidentified
MTNKRTAGDHPELGPVNVGAAAVDIGSRMHMAAVNPACTDVPVRSFGTFTQDLHELADWFKTCGVTSVAMESTGIYWIPVYEILEQRGFNVILVNARYAKNVPGRKTDVSDAAWLRELHSYGLLRGSFRPNAEIATLRAYLRQRERLVQYAAANIQHMQKALMEMNLQLNHVVTDITGATAMRIIRSIVAGERNPDVLATYRDARCHSSTETIRAALVGNNRDEHVFALTQSLELYDVYQAKILDCDRKLEVLIAALSNKAAKPVGRLSKPRIKTKQVNTPTFDVRAALYGVLGVDLTEIHGLGPSLALKLVGECGTDLRAWPSAKHFTSWLCLAPGNKISGGKMLSSRTRRSSSRAAALLRLAATTVGRSDTALGAFYRRLSSRAGKSKAVTATARKIAVLFYNTLRHGMSYRDPGADHYEQQYRSRVLANLRRRAKSLGFVLEPIPGNGNPAVS

SEQ ID NO: 312013 - protein, 310 aa, unidentified
MEHTTVVGIDVSKDRLDVHVLPSEEAWAVSRDAEGLAELCRRLHGLSGVVALEATGGYENIVAATLSSAGLPLVVVNPAQVRAFAKALGQRAKTDPIDARVIARFVEATKPMVRPLPDQATRMLADLLARRRQIVEMMASESQRLRRTDLARVRKSIERLVVAMKRELGDIDHDIDDTMRGSPVWREKENLLASVPGIGRIIARTMVADLPELGTLGRKQIGALAGLVPFVRQSGKWKGQARIGGGRPVVRTVLFLGAQVAKRHNPVLKAFYERLIAAGKSKMAATIAVAHKLLTILNAILRDKKPWQTA

SEQ ID NO: 312014 - protein, 360 aa, unidentified
MLVERTSVGLDVHARSVAAAAIDGVTGELKRARLTPSQDHIRSWLGELAGPVAVAYEAGPTGFGLYRSLTALGIRCVVAAPSKLQRPSGDRVKTDARDAVHLARLLRLGELTAVCVPSVDQEAARDLVRAREDCRGDLMRARHRLSKLLLRQGIVYCGGNAWTDAHDRWLRRQRFDSPATTTAFESDYDTILTVAARRDRLDNTIAELAADSEFTPVVRRLACLRGISTLTAFALAVEIGDWHRFTGNTIGSFIGLVPSEHSSGASRVHGSITKTGNTHARRLLVEAAWHHRASYRPGKTMHQRWELAPAAARARGDAGNRRLHRRWQVMTAHHKRHTVANTAIARELAGWCWSLAAMDD

SEQ ID NO: 312015 - protein, 394 aa, unidentified
MIYIGIDVASRKHDIVITDNQGVVFKKPFKILNNLDGYKKLLSEICLASEFFNDKNSRIGLESTGHYSRNILHYLILAGCDVMFINPLLTNMDRKASSVRKTKTDAIDAKAICMFLIRNQNNFKPYTLSSYHIDELKTLVRLRKSLKKQINKDMNLLHAYLIQAIPEYYNVFRKIDSKASLEVLVRYASLSELKKVRLNTLSELIRKTSRGHHGLLQAKALKSLPLTSIGIDSQALSFAIKQTLVRINMLNSQIKSIEMEVKLHVDKADTTLLSIPGISYTTGGIILAEIGDIHRFNSTDALLAFAGLDPSVYQSGNYEGNFKISKRGSSILRWAIYQSAQAIVKFDPVFKEYYLKKKAQGKKHRNVLGHVTKKLTRVIYSILKNNSTYIIQAH

SEQ ID NO: 312016 - protein, 355 aa, unidentified
MKRGYFIGMDVHCKSCNIAVVNSAGDVVHRAVCETAITALLEVLEAVPRPRSLVIEEGPLAGWLCRNLQSAMDEMVVSEPRRNQLITKEGDKDDPLDAGKLAQLHRGGFIKRVHQCQSLEQAVFKQQVAVYHQRVGQRVREGHRLASLFRRHGVMIRERAFVAEADRPALLARLPANAALRETITWLWESYDAAVDHEEKWRRRLVGLAQQVEVVRRFEALPGIAWIRGATLYAYLDTPWRFASKSALWKYLGIGLQRKHSGSGPERLAVPWQTNRLLKSTILGAALSAVAQGENPFADLYRRWIAAGLSAKLARRNVARSLAATLWGLWKNGNVYHPEWVGVVAAAPVAAKESR

SEQ ID NO: 312017 - protein, 362 aa, unidentified
MTSMPYPENGRQSTVGVDTHADVHVAVALDQVGIRLGERHIPTTEAGYDEIERWALELGPVDAFGVEGTGSYGAGLARLLRRRGHRVVEVNRPDRSTRRQRGKSDPIDAEIAARAVLAGIATATPKSGDGDAEMIRMLKLTRDSAVKAQTQAINQIRSILVTAPASLREDLAGLTTATMLNRCAALPELHDSAVAAPVAAAQFALRLLARRYLQLRGEASQIKTHLRRLTDRAAPALTALAGVGPDGAATFLTAAGDNPHRLHSEAAFAALCGASPIPASSGKTNRHRLNRGGNRQANAALHRAVVVRLRWHEPTQNYMARRRALGMTNREVMRCLKRYIARGVYHALVQPRQATNDLPDGA

SEQ ID NO: 312018 - protein, 356 aa, unidentified
MTIVAHSRPFVVGVDTHARNHVYAILAPATGELLDTGEFPTTKAGINRALAWAGRRIGGDAETLWVIEGAATYGAVLTGAVTAQGYEVAEAARTSAGDRRGLGKSDALDAHRIAVAVLPLREKQLRRPRLGDGLRQALRVLVSARETMTDERTRMVNTLTALLRANDLGIDARRSLTGIQITEVSRWRSREEDLALSVARAEAIRLAQHIIELDDALTANLAQIKELVEVSEAAPLLTEKGFGPVTAAICLTTWSHPGRVRSEAAFASLAGVNPIPASSGNTIRYRLNRGGDRRLNKALHMVSINRMTHDAQTRAYVEKRVAQGRTIKEIRRCLKRYLARRVYRTLNAQTQAPITT

SEQ ID NO: 312019 - protein, 371 aa, unidentified
MNKNIIFIGVDVDDKNFHGCGYKNGSMIGEFKCRPNVGHLVKKLEDLSEEGFEIRVCYEATYLGYTLCRKLRESGYHCDVIAPSLIPQQPGWQQKTDKIDSRKLAEYYANGQLTIVTVPDEKNERVRDLVRSRSFIMRQLKALKLHILSQCRRSGMSYKEGGEEGQKKHWTKNHREWLNGTYKKQGDANLVTNLNLLLEQEKRLSELIRSYDEQIERISKQEEYQKKVSALCCYRGIDTLSAMTVITEIGDIKRFAHPRKLAGYAGLDLREYSSGGKERRYGITKMGNRHIRTSVIEACQTASRYPQTSRRLKIQHATADKKHVEIADRCMRRLHKKSQKLLIREKTRNKVKVACAREMLCFIWESLKVAA

SEQ ID NO: 312020 - protein, 338 aa, unidentified
MTIVYAGIDLAKNVFAVHGLDEAGRPALVRPSVARAKLLDLIAGLPPCTVAMEACTGAHHWARLFAAHGHTVRLIAPKFVTPYRMSGPRGKTDAADAAAICEAVQRPHMRFVPLKSEQQQSQLMVHRARQGYVQARTACINRIRGFLAEFGHVLPLKADTVRRQAAGLLEELPGWANTVIGDLLSELHRLDERIAQYDRHVAQIAREDERARQLMQLPGIGATTATAVVAMIGNGHEFKCGRQFAAWLGLTPGQYSSGGKTRLGRITKAGDGYLRSLLILGARSVLALAKGRSDALSSWALAVQQRRGYWKAVVAVAAKNARLCWAVLRRGEDFKLPA

SEQ ID NO: 312021 - protein, 340 aa, unidentified
MTRIRIGLDIAKNVFQAHGVDDNGTVVLRKRLRRPDMLRFFASLPPCLIGIEACSASHHWARELIRLGHEVRLMPARYVKPYVQRGKSDALDAEAICEAVSRPTMRFATIKTAEQQAVLTLHRARELLVKQQTMLANLIRGCLGEFGIVAPLGIRRVSELIAVIKDDADTRILPEARIAMRTVADQLCDLQKRIKHIEQAIRSWHRSNEASRRLATIPGVGSITASAIVATVANATEFKSARHFAAFLGLTPKQCSTGGRQRLGRISKQGDVYIRRLLVLGGTSLVRYARGAGGSVWAKQLLARRPTRIVTVALANKAARVIWALLTRGEVYRAPQQQAA

SEQ ID NO: 312022 - protein, 405 aa, unidentified
MISVGIDVSKGKSTICILKPYGEILMSPQDYTHTQSDMKKLVDKLSKYEEELHITMEATGVYHLPVSQYLKSHGYTTYIINPLEMKRYRCQGIRNPKTDKIDALMIAQYGIDFWYRPCHESSIEDIRTELKLLGTQYCSFSKTRQDRCLALCNLLDRTNPGIYNLLDGFNRYSGKDKLCDFVHDFYHRDCIVKYSKNKFIERYQSWTKRKGYRFSDTEAGQLYQIAKESIPTLESTASTKLVVQEIANVLKEVNASLYDILSRMNELAKMLPEYDTVMTMKGVGASIGPRLIAEIGDPRRFHSAKALIAYAGIDAPPFQSGKFTGTERHMSKRGSRIMRKLGYEVMDSINKHQSLYADDPVCIYFLRKRAEGKHYGTAMFAAYNKFLRIYHSRVSSILNETETAV

SEQ ID NO: 312023 - protein, 322 aa, unidentified
MSSPVGLVAGVFVGIDVATDELVLAERPSGRSWSVPNDPAALAVLAAELQQQAPTRMVLEATGGYERAAVAALQRVGLPIVIANPRQIRQFARSLGRLAKTDRLDAAVLAHYAEAVQPPIRPAIDAATQELDGWVTRRRQLVQQIAAERLRLTSAHPSVRPGVERHIEWLEEELAAVEQAIEEQLAQSSTFASKAALLQSVPGIGPVSAAVLVAQVPELGQIDAKALAALIGVAPLNRDSGQQRGKRCTWGGRAHVRTALFLPTRTARLHNPVIRAFYQRLIKAGKLKMVALIACMRKLLTICNAILASQQPWNPEANPATS

SEQ ID NO: 312024 - protein, 311 aa, unidentified
MTDDTIGIDISKATLDIYRLSDGKMTSFSNCCVGFKALALFCKETAVIRIVYEATGAYHSGLERALGAHFPLVKVNPLQARRFAQARGVRAKTDAVDAKMLAVMGDAFALEPSKPISETQYILKELRAFRSGLITDRTRILSRQKTQTLPMTRRQSKARLTQTEKQIVEIDAEIARLIQSSEVMARSMKILRSIPGIGAVCAAAILIEMPEIGGMDRKQVASLTGVAPMTRQSGQWRGKSFIQGGRKVVRDALYMPALVAMRFNPDLKTKYQAMIKAGKPPKVAITALMRKLIELANALIKANRTWVNKTT

SEQ ID NO: 312025 - protein, 467 aa, unidentified
MRKHTTQKRGYKSKKKGFRTAKLPKHLEHINKMAAGIDIGSKSHFVAVPEGCAEVCVREFKSFTPDLIELADWLESCGIETVAMESTGVYWIPLYELLESRGFEVKLVDARHVKNVSGRKTDVIDCQWLQQLHTYGLLNGAFRPNQQVCALRAYSRQRGMLVERAASHIQHMQKALSQMNVQLHNVLSDLTGETGMRIIRAIIAGERDPKLLAIHRDKRCKNPLGIIEKSLTGCYHDEHVFALTQAMELYDTYKNKIAACDDIIEKHLLTFEGRKEVKEDELNDRAIKRKGKGRSKNAPLFNLKAHLIRITGVDLTKIPGIEATSAMKIISEVGLDLSRWKSSKQFASWLGLCPGNRVSGGKRLGGKSKRTANNAASTLRMAASTLHCSNSALGAFFRRLRSRLGAPKATTAAAHKIGVIIFEMLNNGIEYHEVGQDYYEKQYRDRMIKNLSFRAKTLGFELVAAAC

SEQ ID NO: 312026 - protein, 352 aa, unidentified
MNYVGIDWAYGRAAWCAMGQSGEIEGEGLIPADEDGLARLVLELGTEVKGCVEMMSGAVWVRDQLQLAGWQMEVAHARKVRDVAPLACKTDKVDARVLAELCRRDLVPALWVPSEEDRAIREILRRRTHLVKSRTSHRNRIFGLLTQFGLRISLKRLREPDASELLTRRGVPAVWRASIAAHLEEIDHLDRLVASIDREIGPIASADPRAKLLATIPGVGPLIGLTLASEIGEVSRFSSPSKLVGYAGLAPRISQSGERSAIGRLSKAGSRTLRWAAVEAANQAWRSSNPFHEHYLRIAARHGKNPAKSAVARKLLITSWHMLSRGQVFQPRRPSGAENTTAPASSLRFLAA

SEQ ID NO: 312027 - protein, 367 aa, unidentified
MEKSSTVFVGMDVHKESIDITLAEQGGEVRRLGQIGGDRGSLLKMVRRQQSKGRKSVFVYEAGPCGFWIYREITALGHACMVVSPSLIPRRAGDHVKTDRRDSERLASLARAGELEAIHVPDIQDEAIRDLVRGRDDAVIAQRRVRQQLKALLLRNDIRYVGRTSWTGAHRRWLSELKLPEPAQRIVFEEYVDAIVVATARIERLTRAIETEVAGWRFAPVVGALQAMRGIQFVHAVTLIAELGDLTRFYSARQLMGYLGLVPREDSTGEHRHQGSITKAGNSYARRALIEAAWAYRYPARVTRIIATRQAGIPKAVCDIAWRAQLRLSTKYRRLAARHLNHNKIVVALARELSGFVWAIGQSVKPR

SEQ ID NO: 312028 - protein, 318 aa, unidentified
MTSKRTKTNIGIDVSKQQLEVAVHESDYHCRCPNKPAAFAELIAELIALRPVRIVLEATGGLEIPVMTALHTAGLPVIVLNPRQVRDFAKALGQLAKTDRLDARVLAHFAAAIKPPLRPIKSADELELDALMGRRGQLVEILASEKNRLASAATTTVREEIEEHIDWLEERIATLEQQLKKFLKRSAHWQRRDVIYQSVPGIGSVVSLSLLAELPELGTLNRQQISKLVGVAPLNRDSGNQRASRHIAGGRARVRCMLYMAAFNAIHRNPVIKAFYERLRARGKLYKVAITACMRKLLTIINVMVRDNTTWKLNEVSP

SEQ ID NO: 312029 - protein, 345 aa, unidentified
MKDENPTGTNHANFMACDYNIEVVLLNEQDQVIYQRRLANHLPTILEPLALYQADITGVVVESTYNWYWLVDGLMEAGYRVHLANPAAMQQYSGLKYTNDPSDARWLAHLLRLGILPEGYIYPKAERAVRDLLRKRAHLVRQHTAQVLSVQNLMVRNTGVRFGAKRIDEFTPSELARMLLNAEQVLAVTSSLAVVHCLGQQIKTLEKAVQKRLKHTPAYAQLQTVDGIGPILAQTIVLETGDMGRFPTVGNYASYCRCVGSTKISNGKRKGQGNVKNGNPYLEWAYMEAAQFAIRFSPTVQRFYQRKQVKSHVMVARKAVAHKLARACYYIMRDLVSFDVHKAFG

SEQ ID NO: 312030 - protein, 311 aa, unidentified
MCSAVGIDSHKDDLVVAVHDGAQWRVKRTEAGLTRLTTRLDALGPDVVVLEPSGGYEQTVMDALHQQGIPVARVHPRQVRQYIQGIGVHAKSDRLDARMLALFGVETQPRLIPAPTETQQRVARLSAWRRTLRDDVVAKTHQRAERPDEVRASIDRVIAELERELAAVTATITDLVATAPEWARTREILRSCPGVGPGTVALLLAELPELGHRGAKEIAALVGVAPFTHQSGADAGHARIQGGRRHVRGDLWMPTLTAITHNPTIRALAERLRAKHKGFHCVTIACMHKLLTLLNAMVMKDELWHARETQP

SEQ ID NO: 312031 - protein, 354 aa, unidentified
MKRTTKYVALDVHQATTVASVREEGGRVIARTILPTEAGPIVEYVRGMRGAIHVAFEEGTQAQWLHELLVPLVDRVVVCDRRGQPRQGNKGDQIDADQLSELLRRGGLRAVYHGSVQRAALKELTRTYGNLVEDATRVMLRLKAVFRARGIPTPGKRVYHPTARAQWLAHLPDRGARFRAEALYAELEVLRELRPKAKAAMVAEARRDPAWALLQTIPFFGPVRVALLLATMQTPWRFRTKRNLWAYVGLAVVTRSSADYVLVGAQSVRRRRAPLTRGLNQNHNRVLKDVFKGAATAATTQPGPLQDWYQGLIARGMREELARVTLTRKLAAITLRLWKKGERYDPTQLTQQAR

SEQ ID NO: 312032 - protein, 348 aa, unidentified
MTVYIGVDFHARQQTISYLTTETGEIQHLVLLHQEPATVRAFYAQFVGQRVVVGFESSGYAAWFEELLEELGCEIWIGHALYIRQFAKRRQKNDRRDADLILDLLVKGDFPRIHRYSRRTREVLQQLRYRQRLVKMRTMAMNMLLFMASSRGVSLRTQLTNKRGQARLAQLQLPPPLESQRDELLRLLQDLDQKIKTVEAWLQRETKADAAVQRLQTHPGIGLLTSICVRYTLEQVERFTTTRQVSAFAGFDPMEDQSDERQRLGAISKQGSRWLRFYLVEAGQIAIRKDADLARVYKRLCGRGGHAKAKVAIGRRLLVRAFIMLRDEIDYDEFLRRGVAARSSRGSA

SEQ ID NO: 312033 - protein, 377 aa, unidentified
MTKEMTAEMIEEITAEMTEVKQEQTIILENRPWIGMDVDKENFAAAIYVDPRPGTPDLRAMPTKKFKRDAEGVAACVEWAEKTLSQKRLASPAPRVCMEATGRYSIDLAQEILRQRPEWEPAIANPRYVKKHGESMGQRCKSDKADARVCACYGAERQPRPYRPLTPAFQQLRELSRERQAIVEQRTALKNRTDDTAISKITRKVQEQLMRQYDKLVDKLDAAIIQIIKEIPELASDAKTVSQIPGVAEVVSSVTMSELGDLRQYRCSRSVAAAIGVNPKLVISGKHIGKTRMSKQGNSRVRAVIYCAAMACLKTKNDHCLKRFYNRLIENGKKHMEALGGLMRKIIVLMRALIISGKPFDPDYDLKKNGCVASSER

SEQ ID NO: 312034 - protein, 280 aa, unidentified
MQYSHMLGVDISKHTIDLALSQNKASAAMINKKLTNNLKGYKALLVWLIKEKVALEQVLICLENTGIYHRSLVAFLQRQQAFVWVETPVAIKWSQGIARGKNDKVDAQRIYLYAYRNQDKAKAYNAMDKSLQELADLLGARDRLIQARNSLLVPIKEMKQVGLEAAAEKLEQAYKSSILALEQGIKAIEARLLAIVESEQRLKQTYQIILPVRSVGLVTALYLMVYSYNFERFESAKKLASYCGLAPFEYSSGTSIRAKTKVHPMANKQLKTALHMNCVL

SEQ ID NO: 312035 - protein, 409 aa, unidentified
MPTTFDCPAGPVAGIDTHTDTHTVAVISDTGRHIATDTFPATNPGYVAISEFMATYGVTTVGVEGTSSYGAGLTRHLRTQKYSVVEVLRPTRAVRRRDGKSDPVDAVAAARQVLTGEALSIPKDTSGPVESLRGLQITRRQLVMTAAKLMTTIKSLLVTAPDEIRRRYSAMSPLVMVEALSRCRPSADLADPRNGVLLALKTFATTYRDLHKQGTQLEKHISILVEMINPHVTSIFGCGAVVAADLIVSVGDNPSRIHSEAALAHLCGVAPIPASSGRTHRHRLNRGGDRRANSALHRIALVRMHHDQRTRDYVAKRTKEGLSKKEILRCLKRAIVREVYRVLCLGQAVLPMGQVEVDELKARRIERKLSQAQVAEKPGCAPARISDIETGKRPLPELRLAYEELLKSA

SEQ ID NO: 312036 - protein, 343 aa, unidentified
MELYVGMDVSLKETSICVVNGHGEVMSEGTVTSNPEAIARFLADKACNAVRIGLESGPTSTWLWHALRAFGLPVICIDARHAKAALSMQINKSDRNDAVGIGRIMQAGWYREVQVKRLSCHAVRAVLNSRALLVKMKRDLENQIRGLLKNFGLVIGKAGGTTFAVQVKEYVVGTGLLHRAVSPLLEIREHVVVEIAAFDREALRLARNDVNIRRLMTIPGIGPISALSFAAAIDEPARFKRSRSVGAYIGLTPRRYASGEIDRTGHISKCGDTMLRSYLFEAAGVLLTRVARWCGLKAWGIRLAKRIGFNKARVAVARKLAVIMHRMWTDRTDFQWSKEEAAT

SEQ ID NO: 312037 - protein, 280 aa, unidentified
MQYIAFDSHKRYTYAVVEEKEKGRVMEKRIEHRRGEIGAFLSQCEVGSPVALETIGSWYWIVDEIEAAGMLPRLVNARKAKMMIASSKKTDRLDAKGLNTLQRTGTLPTVWIPSSELRDIRELYRTRMVLTQMVIRLKNRILSCFSKYGISFDETSDAFNIKGRASLEAALEILPTQTCFAVKELLRQLDLLQEAVKEFEARMLQVQSNDPEIKLLQTIPGVGAILSYVIAYETGDIHRFPSASCFASYAGTTPSVHASGGKVRYGHTASDVNHYPIGHS

SEQ ID NO: 312038 - protein, 335 aa, unidentified
MIYVGIDIAKLNHFASVLSSDGKVLVEPFKFTNDNDGFCMLLSVLDSFDKDGLIIGLESTAHYGNNLVEFLVSRHFHVSVLNPIQTSSMRKNRIRKTKTDKVDTAIIAQTLMSQPYRLFTQYDIDLLHLKNLGRFRQKLMKQRTRNKIMLTSYLDQAFPELQYFFNGIHHKSVYAVLKEAPSPEMITSMHMTHLAHLLESASHGRFRKDKAQELRVLAQKSVGSSDSSISIQITQTVEQIELLDSQIIDVESKMQNILLAMDSVILTIPGISYLEAGMILGEVGDVHRFASPHKLLAFAGLDPTIHQSGNFNASHTRMSKRGSRYLRFALVYNGT

SEQ ID NO: 312039 - protein, 449 aa, unidentified
MEQPQEVEDEEYERAWERVAAIDVAKASGVVCTRVPDEDRPGRRKMHVWTVTATMGAVTELGDHLRCEGIQVVTLESTSDYWRIWHVVLEAAGLTVQLVNARAVKNVPGRAKTDKKDAVWLAKLTERGMLRPSFVPPCDIRRLREYTRLRADLVHDRTRHWARLEKLLERALIKVSAVASSLATQSVRAMIEALIAGQRDPKALADLAVGKMRAKRKELTEALDGRFEDHHAELARMLLDQIDALTAQVAALDDRISELIAQIPAAQGVDADGTTGPGAGRGPDAAVLPAVARLDEITGCGITAAQVIIAEIGLDMTVFGTPGRLVSWAKRCPQTRQSGQKNTTGKAGKGNPWLNGVLGEIAASAARTDTFLGERYRRLARRRGKRKALAAIARSVLVIVFHLLADPAARFRDLGPDYYDSRISRERKISNHLRQLEALGLHVTIEEAA

SEQ ID NO: 312040 - protein, 418 aa, unidentified
MLSIKHFVCCGMDVHKKFLVATIALTDYRGVTSYVRKRFATFNSDLKALEKWLLSFHCTEVCLESTGKYWIPIFNILEDSCHVVVANPKYVRAIKGQKTDDKDSAWIADLFKFDIVPSSYIPCKEIRMLRELFRYRQKLIGHRSSEKNRLQNALTVSNIALASVHSDTFGKSATAIVDYILTCEVFDPEYCKSLLRKKAKDKADDVVTSIIGYELRRDQSVKIKVCRKHFDDINECVSTLEETISDLAKPYHKFIELATTIPGITEQSATFIIAEIGVDMAVFKSSKRLCSWAGLTPENNESAGKKKSVHVSRAGVYLKPLLVQCANAAIKSKIPYFRDKYDRIKKRRGHKRAIIAIARMVLTCIYHMFQKQEVFNPADTDYSAIPEEMYWKFQEQYDRNAIKRLEKRGYVITPPAMA

SEQ ID NO: 312041 - protein, 422 aa, unidentified
MRSVALDVHLDFCEVAIVEDGEVRSAGRIDTKPQQIELFASSLGPDDRVALEVTGNAWEIARLIEPHVAQVLVVSPSDTGIRQARAKTDRLDARTLARLLAAGSLDAVWMPDRETWVMRRRLSRRGQLVHARTRAKNEIHAVLMRQLVGRPPVSDLFGVKGREWLAGLELAFEERETVDGAMRQIEFLDAEIAEVERLIASDALSSAEIKRLMGVPGVNVIVAASFLAAIGDIHRFQNPRKLVGYLGLDPRVRQSGSGPATHGHISKQGSVRARHALVEACWSAVRQPGPLHAFYERIRARRGHSVAIVAAARKLACLFWCLLRREEDYAYAQPSLTKKKLRRLEITAGAPRYSANAAGIWSANAAVRQAERELARQAEVAYARTVRDWHAAQTANVGASVTPGRASKKPSKGKAARQTTSP

SEQ ID NO: 312042 - protein, 393 aa, unidentified
MDGAGRRLAKARLPEGVAGISRLHAMIGQALGDDVDAEDAAARVVVGIETDRGPWVQALVAAGYMVFPVNPLQASRYRERLSVSGAKSDAADAHMLADMVRTDSHQLRPIAGDSAQAEAVKVVTRMHQTLIWERTRATQRLRHVLLEYFPGALDAFADLDAGDTLELLAKAPDPQTAARLSLSQISAALKRARRRDIPAKAAAIQTVLRAPQLGRPAVVVAAYAASTRALVAVLGTLNEQVKTLQGEVEAHFGRHPDAEIIRSQPGLGPVLGARVLAEFGDDHNRYASAKARKNYAATSPITVASGKKKTVLARYVHNDRLIDALMGQAFAALLRSPGARAYYDKQRARGLGHNPALRQLANRLVGILHGCLKTGTPYNETTAWSHHPNQAAA

SEQ ID NO: 312043 - protein, 371 aa, unidentified
MGKSSKSLFIGLDVHKDSIAVAYAAEDRGTEVVSLGMIGTRQYDIDKLIRKLEAKGATLLFAYEAGPCGYWLYRYLTRRGLSCAVVAPSLIPRKPGDRVKTDRRDAVTLARLLRSGDLSSIYVPTVDDEAIRDLSRAREDAVRDLKRHKVRLKAFLLRQDIRYEGRANWNAAHLRWLARVVCPTPAQQIVFQEYVHAVSEQTDRLGRLATELQTAVTTWRLYPVVAAVQALRGLNLTGAVTLIAEVGDLTRFDTPRKLMSYLGLTPSEYSSGEHRHQGGITKAGNGHARRALVEGAWAYRYPAKVSRHLQLRLENVPAEVRAIAWKAQLRLCKRYRLLSARGKHVNQVVVAIAREMAAFAWAIARTVPIAA

SEQ ID NO: 312044 - protein, 340 aa, unidentified
MTPIRIGLDIAKNVFQAHGVDDKGTVVIRKRLRRPDILPFFASLPPCLIGIEACSASHHWARELIRLGHDVRLMPARYVKPYVQRGKSDALDAAAICEAVGRPTMRFATIKTAEQQAVLTLNRAREILVKQETMLANLIRGCLGEFGIVAPLGIRRVSELIAVINDDADTRILPEARIAMRAVADQLCDLQKRIKQIEQAIRAWHRSNEASRRLATIPGVGSITASAIVATVANATEFKSARHFAAFLGLTPKQCSTGGRQRLGRISKQGDVYIRRLLVLGGTSLIRYARGAGGSVWAKQLLARRPTRIVTVALANKAARVIWALLTRGEVYRAPQLQAA

SEQ ID NO: 312045 - protein, 429 aa, unidentified
MRLQDFIYVGIDLHKLTHTAMIIDSCGKELGTITFDNVPSDFSRLERKVKKCIQKIKLSQGVDTEAFYCLENAYGYGRALAVWLIDKGYIVKDVNPALSNRQAKHRAMYRKSDEDDARAIAMAGIHEFVKLPDACPLDEYWSIQQLVHRRDTIMNQRVRLVNQLHEQLHRAFPYYKEFFQDISRPTALHFFEMYPSRKYLTGVSADDIREELLPVSHNKCSTKVCQNINDIVSADASKLCEYQDSRDIVTRGIISDIQHSDKMLAEIDSELERLYKELGLTLATMPGMKIIMSMKLIAEIGDIRRFKSSEKLAQYAGIAPMPYGSAGKNRDYATKQGNRRLQATIYYLAVQQIQISPSGKPRNPYFRNYYEEKLLEGKNSKQALICISRKLVKVIYSMLKNKTAYVMPEALESKEDKVLDSCDVTKEAS

SEQ ID NO: 312046 - protein, 428 aa, unidentified
MKYNTQNAKIASITEKTLIVGIDVGSETHFVRAFDWRNYEFTKKPFEFSNSEAGFQTFKAWMEDLLEKNGKSVVIPGMEPTGHYWFALGKFLQDNGMRPVHVNPHHVKKSKELDDNNPNKNDRKDPKTIASLVNEGRFSYPYIPTGVYAEIRSLSNMRFQAQEELTRAKNRIARWFSIYFPEYKDVYRDLKAVSGRMVLETAPLPEDICKLGVEGVNRIWRDAKLRGAGMKRAKTLVSAAEHSVGSKEAPEAARIELKNLLKDMDVYASRVEELLGVIEEKLKEIPYIDKLMAIKGVGLVTVSGFIAEVGDIRRFDDPKQLQKLAGYAIVSNESGKHKGESRISYRGRKRLRYVLYEAALSLIGRNPEFKAIHEYYRTRKENPLKKMQSVVAIACKVIRIFYVILTKGVDYNPEKMMGDIRRPQIQAA

SEQ ID NO: 312047 - protein, 391 aa, unidentified
MIYVGIDVAKDKHDCIIKNSVGEVFFKTFTIKNNIDGFNDLYQKIESVMENVSKVKVGLEATGHYSYNLLGYLIDKGLPTFVINPLHTNLYRKSLSLRQTKTDKVDASTIASMLMSDVNLKSYSDTSYHNEELKSLTRYRFDKVKERAKLKTSISRLVCILFPELEKLVPTLHMNSVYSLLYEFPGAKQVANAHLTKLSNLLAEASKGHYDKDVAITFREAARASIGSNMPAKSLELKHTIKLIRELDSEIDEIESEIKTIMDTISSPILSIPGISYRMGAMIIAEIGDFERFDSADKILAYAGLSPSTYQSGQLDNCHPRMEKRGSRYLRYALFNATIYVCHWDPTFNAYLAKKRAEGKHYYVAVSHATKKLVRLIYHLEKSHQQYNKAV

SEQ ID NO: 312048 - protein, 375 aa, unidentified
MKGTRFVGLDVHAATIAVAVAEPTGEVRGMGTIPNEPEAIHKLMRRLGPAEQLRVCYEAGPCGYTLYWQLTRAGISCVVVAPTLIPVKPGDRVKTDRRDAEKLARSFRSGDLTPVWVPDAAHEALRDLVRAREAAKKDQLRARHRLQKFLLRHGQRPPAGTTAWTEKYRRWLGTVHFDAAAQEATRADYIAEVEHARERIVRLERALDEAVEATPAAMRAVIDALQALRGVAKLTAVTIVAEVGRLSRFDRPRQLMGYSGAVASECSSGPRVRRGAITKTGNAHLRRIVVEAAWSYRHRPGIGPTLRQRQAGQSAEVTAIAWKAQQRLHGRYRRLMARGKAKQQVVTAVARELLGFIWAIGVAVEGKQPPDSRAA

SEQ ID NO: 312049 - protein, 392 aa, unidentified
MFYLGIDIGKRNHVATMLDDGKKAVFRAFSFSNSTEGGEALLAQIVKHAPDATQVSIGLEATGHYWLALYSFLTDRGYMIHVINPIQTDGWRKGIEIRKRKTDKIDSELIAELIHYGDFSSTQLADESIQSLRTLTRFRSYLVDSIADLKRKVICVLDQVFPEYETLFSDVFGTTARELLLKYSSPAELEQLSVEKLTQVLEQLSRKKCSTAKAEKVLKAAKHSFGVTHCRDTFIFQLRALLNQMNFIEQQVVDTEAEIGVLMEQLQSPITTIPGIGPVLGAIILGEIGDIHRFESPSKLVAYAGIDASVSQSGDFEGTQMHMSKRGSPYLRRALFMAARIAVNTDAELGAFFEKKHAEGKHYSACIGAVSRKLCYIIHAILSQNRPFSPKP

SEQ ID NO: 312050 - protein, 376 aa, unidentified
MGDYSEAFVGLDTSKLRNAVAIADGGRGGEVRFFGEIENTPAATAKLVRKLAGKYKRLTFCYEAGPTGYGLHRQIKDLGFECVVVAPSLIPKRPGDKVKTNRRDALSLAKLLRADELTAVWVPDGHHEAMRDLTRARETAMLDLRTKRQHVSAFLLRLGRPYPESKKTWTKAHVSWIASQKLDHPQQRLVLEEMMLAIRQAQERLARLEQAVAAAVPEWSLAPVVTALMAMRGMDMVSATTLLAEIGDLSRFRTPTELMAYLGLVPSENSTGDTVKRGPITKAGNRRARRMLVECSWSYQHPPRVGQAKQPKVDAAPPAVREIAWKAQCRLYRRYRALIRNGKLKTVAIVAIARELAGFIWAVARAVTTAGVAATA

SEQ ID NO: 312051 - protein, 343 aa, unidentified
MDYFAGLDVSVKDTSVCIVDEAGKIIREVKVASEPDALLAVLNNLAYHFKRIGLEAGPLSQWLFSALAEADLPVICVETRHMRAVLKAQINKTDRNDARGIAQMMRVGLYRPVHVKTLRSQKLRMLLTHRKLLQAKAIAVENDLRATLRNFGLKVGTVGAVKFEARVKELVDNFPDLVELVEPLLVVRRVLREQISILHRRVLAAVRNDEVCRRLMTVPGVGPLVALTYRATVDVPARFRKSKSVGAVFGLTPARDQSGESDRPGAISRCGDEMMRTTLYEAAQVMLLRSAKWSWLKAWAMKIARHRGMKKAIVALARRLAVIMHRIWIDDTEFRWTREAAAT

SEQ ID NO: 312052 - protein, 415 aa, unidentified
MKKVYDKCCGVDVHKKVIVACFLNGKEKELKTFGTTTRELLEMADWLTAGGCEMVAMESTASYWKPLYNVLESSGLNAMVVNAHHMKAVPGRKTDVKDAEWIADLLRHGLLQASYIPSKDQRELRELVRYRKSLVEDRTRELNRLQKMLEGANIKLSGTVSNINGMSARNLLDFIIGGGTLTAEKYDELFMAGKISPMLKAPKEQIIDDLNGMLTVIQRRMLKELISHLDELNQHIRNLDNDIDGTMKPDEKEAAKAIQEIPGIGETSSQVIISVIGTNMERFPSDKHIASWAGLCPGNNESAGKRKSGRTRKGNAMLRTTLINCAHAAVKRKDSFFAAQFARIQVHRGKKRAYVAVAHSMLIAIYAVLKSGDVYRDLGFDYYNQFNRERKIAAYLKKLKALGWDQSAAITPAPV

SEQ ID NO: 312053 - protein, 322 aa, unidentified
MAMLSFGGIDVSKDRLDITVLPDEQCSSVSNDAAGWAELIEQLRGSSITAIGVEASGGYERGVVRALLAAGMSVRQINPFKLRQFAKASGVLAKNDRLDARMIASFVAIMPTRPAQRQTPMIEQLAAMLTVRRQLSDHKVATENASRLLEGAMLQRLSRRRVAGLTADIDLLDQRLVEIVTADPALAHRFWLLTSMPGVGAVLACTLIALLPELGQMSRKQVAALVGLAPYDFDSGKLKGRRCIWGGRARVRHVLYMAALSASNWNPALKAFHDRLAATGKKPKVVIVAVMRKMITTLNAMLRDGTAWVDRYSGRRSASTAR

SEQ ID NO: 312054 - protein, 424 aa, unidentified
MSRSIGLDVHRDFCQVAIVDGGRARSAGKIKTAPAELELFAQSLAPEDRVVLEATGNALAIARILEPHVAQVLLAHAKDVRAISHAKVKTDKLDAKVLADLLAADLIPAVWIGDEQTRMMRRLVSRRRGLVKRRTQIKNEATAVLHRNLKGRPPVTDTFGVKGRAWLSGQELPIDERLTLDGCLRQLDFHRDELAAVDRIIAEHALKDADVHRLMTIPGIDVVTASTLMAVIGDVRRFPTSRHLVGYLGLHPTVRQSGNQPGRYGRVSKEGSAAARHVLVEAAWSAAKSPGPLRAFAERTAARRGRHVATVAVARKLAVLAWNLLTRGEDYAFARPALVARKIRALELAAGAPRRKPGPKPNPVWKTAAQDAAERRLAEQAEHAYRRLVADWQSSGPKVGAGATPGRASNRPSKGKAARQVTSP

SEQ ID NO: 312055 - protein, 340 aa, unidentified
MNIVFLGIDLAKNVFQLCGLNQAGKPVYSKRIGRKELLQTVANIPACLIGVEASTGAFYWQREFEKLGHNVKVISPQYVKPFVRGQKNDGNDAQAIAVALMQPTMQFVPPKSPEQQDIQALHRARQRIVNHRTATVCQIRGLLLDRGITIGAAVSRVRRAVPLILEDAENGLSARMRRTIAELYDLFDDLGRRINFFDKEIETVFRQSEACQRIAKVKGIGPKTATAVVAAIGKGTEFKNGRHFAAWLGLVPRQHSSGDRQVLMNMTKKGDKHLRTLFIHGARAVVRVATNNNDGYLNQWVNQLKERRGFNKTTVAVANKNARIIWSMLRNDTEYQAVGS

SEQ ID NO: 312056 - protein, 410 aa, unidentified
MSSMMVGIDVSLRSHHVQFMDENGTSLSSFSVSNDRLGAETLVKRIENCVQKRKSTKMSIGMEATSNLGWHLAHYLRNAFADQNQVTTQVYMINARKLARFKKGYDNLPKNDRIDAWVIADHLRFGRLPHEMKDIVQFDALQRLTRTRFHIMHSITRDKTFFLNQVFLKFPSLRQDNPFSASFGATSLAVIQELEPEQIASMSIEDLIDFLQDKGKNRFHNAEEIATYLKKIARASFRLDKAMADPVNLSLSSTLSIIKHMEGEVKKLDKEISKIVNTIPQTLSSVKGIGPVFTAGIIAEIGDVSRFKHHNALAKYAGLVWDQSQSGEFEAEETRRMRTGNKYLRYYLIQAANCVRKHDSEYKAFYAKKYNEVPKHKHKRALVLTARKLVRLVFTLLKTKQLYIPPERRG

SEQ ID NO: 312057 - protein, 423 aa, unidentified
MNIVYPICCGVDVHKQFFVATLIISEGIEAKYKKRRFSTFNNEILKFKAWLLENNCRDVCMESTGKYWIPVSNLLEDSINVTIANPKWIQIVKGNKDDDKDSKWIGDMFRIGLVPGSFIPCKDIRILREFTRYRFKLVSCKSSEKNRYQNVFTVCNVALDAVVSDMFGKSASAITDYIVNSDTFDPQYCVSLLQRSLKKKADKVLESIDGFSMTAAQKARAKMVKEHYDYLLLHIQKIDAVIEELVKPYESAINTICTNPGIRRHSAITVISEIGTDMSQFGSSKRLCCWAGLTPRNNKSAGKKKSVRIMRAGAYLKPALVEIAHAAVKDKNNPYYAIKYERILKRRGKKRAIIAIARMILTAIYHMLSTGEVWNPVDLDQIDMPPELREKEVQKSLRRAAKLLVAHGLIAPDLIQFAEQSSA

SEQ ID NO: 312058 - protein, 323 aa, unidentified
MTKIQHFSGIDISKMNFEIRIDESKSKKFSYTEEGMQAYCSLLPSNTHCIMEATGTYHCRLAYFLYEHGIKVSVVNPLSVKRFSQALMLRTKTDKADTKLLIEYGKQFNPELWSPKEDCYIELQQLINLQDQLTKQETATKNQLESISHSVVQSDFAKGKIAEQLKKIQFDLKEIKEEMERLILLHEKDNYQRLQSIPGIGKQTAIVLLAITQGMKKFDSSKQVSSYFGLAPRIYESGTSVKGKSKICKMGMSMIRKLLYLCSLSAKKYNNACRELYQRLLAKGKMKKVALIAVANKLIKQIFSIIKNKTSYQQHFLSKNPNL

SEQ ID NO: 312059 - protein, 340 aa, unidentified
MDVLYQSCAGIDVHQANIVVCILHGPLTSTRPKREMATFDTTTKGLRACHYFLSQFHVEAVGMESTGVYWRPVWHALCDDFELILAQPAHMKAIPGQKTDKKDAHWIAKLTRIGLLPRSFVPDETIQELRELTRQRKHYVESRNRETNRIHKILQSGGIKLTTYIEDIMGLSGRNLLQLLVDGMPITPRIVHQSVYTSLKKKMPQLLEALDGYFSDHHRFMLKQSLEIYDFYQKQIELLEERMNVYLSQYENHVEILDSIPGIDVITASVIISEVGVDMSQFPTSGHLASWAGLCPGNNESAGKKRSTKIRHGNSYLKKCLCQAAFTARNQKGSPLANRF

SEQ ID NO: 312060 - protein, 356 aa, unidentified
MLYLGIDQHARQLTVSLRNESGDVVLARQVSTEPDRVRAFFDQLTRDRLRDGESFAAVLEVCGFNDWLIRMLHDYRCAKVVLIQPDDRKKRKTDRRDAAALSELLWANRDRLLHGKPVRGLRQIELTSATDQENRRLTTLRKEAGAGRARLINKVRWVLRRHNLQWGLPTKTFPTAKAVAWLKGLALPEVDRLEMDHLLADLEQADRRLKDLEQAIARRSAGSPTVAVLASMPGVGRGFTALSLACRVGRVERFPRAHSLANYWGLTPGCRNSGENDQRLGRITKAGSATARWLLAQLVHKVLRRDARLREWFKRVKRRRGPTVARVAVMRKLATVIWHMLSKGKTYAECREPAVA

SEQ ID NO: 312061 - protein, 445 aa, unidentified
MLRIIYKRVAGLDVHKKTVVATRMRVTEEDRVEWETKTFGTMTANLLGLHDWLCEWQLTHVSMESTGDYWKPVFNILEDTFEVWLVNAQHVKHVSGRKTDVKDSEWLAELMLHGLLKPSFIPPPSQRALRELTRYRTRVVQERVRVVNRVQKLLEGANIKLSSVVTDVMGVSARAMLAEIVAGQTDAELMANLARGRMRSKIPELEKALTGIVQPHHRFVLAQQLEHIDFLDEKVEAISLKIEQQLESMSWPDKPAEPDAGEDTREKTPAADESELPLTWNSAVALLDTIPGVNRRTAEVILAEMGLDMSRFPTANHLASWAGLAPGNHQSGGKRYSGRTTKGNKPLSSAMVQAAWPATRKKGTFLKARYHRLAARRGKKRAIVAVAHSMLVSAWHMLTYQQPYQELGGDYFDERKKESKVSYMVRRLEKLTGGSVSIELQPAAA

SEQ ID NO: 312062 - protein, 364 aa, unidentified
MVQERHPAEAERLITIGIDPHKGSHTAAALDCRQRVIGRIRVPATLAGYRELRQWAADWTERRWAVENVGGLGRSLAQWLLGDSEMVVDVPPKLSARIRVLSQGHGRKTDDADAVSTALAAGGPAELHAATTEGHATTLRLLSDHRDDLVARRTQVLNRLHALLADLVPGTVPPHLSTGTAAVLLRRVRPPAGPQRTRRSLASDLVREARRLDTEIAAMESRIAEAVTQSKTTLTELFGLGSILAAKILGRVGDVRRFSSGARFASYCGVAPIEASSGDVVRHRLSRAGDRQLNFALYIMARCQARQHPEGRAYFLGKRAAGHSEKEALRCLKRRLADIVYRQLVRDARAALLSAPSAAPAPRA

SEQ ID NO: 312063 - protein, 343 aa, unidentified
MTFVGCDLHTRQQQVAVLDTTTGEIHEHRLPHDGTVVEDFYTALPRPVTVGIESTGYAIWFHTLMQRLGHTVLVGDSAKIRAMVVRKTKTDRRDALHILDLLCHDRFPTIWVPDPATRDLRTLLMHRIRLVRIQTMLKNGLHAIALNQGLARGSKLLRKAGLAQLQALALPPYTTQRRDQSLALLGALRAHLDQLDDAIAAAALAHPDAPRLMTHPGVGSLTALAAVVVLGTVSRFPDSKHVVSYVGLAPALDASADKYRLGKITKQGSTLLRFVLGQAAAHAARLDPDLKRTYFTLVHRRGRSKAKVAVARKLLVRLFIMLRDQIDYDEFRRRGRAPVVAPA

SEQ ID NO: 312064 - protein, 379 aa, unidentified
MPSMPRRGASHHRATNTGDDIDQDRAGVGEVILGVDTHKDIHVAVVISGVGVLLGSSDFPTTATGYRELLRWARAHGAVQRAGVEGTASYGAALARMLHCEGIVVIEVNQPDKAHRRRRGKTDALDAEAAARAVLSGRATAIAKAGDGPVEITRMLKLAKTSAVKSRTQAINQLKAVLVGADPALRESMAGLSTPRLVKACAHLDDDEPAVSDVARTARYTLRLLARRIVSLTEEIDDLDARLTATISEHTPELIQRNGVGPDTAAALLIAAGDNPDRLHSEASFAALCGVSPVEASSGKTQRRRLNRGGNRQANAALHRITLSRLRWNQATRDYVERRVREGKTRREAIRCLKRYIARELYPLITRPTDHPTAPITAT

SEQ ID NO: 312065 - protein, 362 aa, unidentified
MEYFTGLDVSVDETAICVVGDDGKVAFETAVETDPAAIAEALRPYADRMRRVGHEAGSLSPWLHTELLAEGVPAVCLETRHVRAALSAQRNKTDANDALGIAHIMRTGWFRQAHVKTDACYRIRLLLVQRRNLKRKFLDLENAIRHSLKVFGIRLGKVGRGAMEKVVRESVAGDAMTAGLMDCMLRARAALWAEYLTLHKLVVQIAMRDELCRRFMAIPGVGPVTALSFSSAIDDPQRFRRSRNVAAYFGLTSKRWQSGTSIDVHGRISKAGDPDVRRALYEAASAMLTRFKGRDVIKTWGLKLAKTKCHAKARVAVARKLAIVMHAMWRDGTFYIGDPDTSAQDNDASNAAKLRRLSRANS

SEQ ID NO: 312066 - protein, 387 aa, unidentified
MLATLRNDFTAEKVVLAVALELSNGSWKMGLSDGRRARPTVITVSDEQPHARLMAAVKVIQEILMKWLLPTDTKVVVMYEAGQDGFWICRALNAMGYTGLVIDAASVPVGRQARRAKTDRLDAIMLVNCLRGWLRGEQDCLRVLHIPDELAEAERQTLRDRGVLQKEIGQHHDRMRKLLRTVGCWDEMDRGFAQRLEVGEVRCYDGSVLPVELKARLLRECERLALVEEQFKALTRTQVSQLSEAAQEKVASFTKLKAIGDIGAIRITTELFWRRFDNQKQVGSCVGLVPQPYDSGTMRIDQGISKQGNRRVRSLLIEMAWMWLRYQPESKLSIWFAEKTNSQAPNKRGRRVAIVAVARRLAIALWRYIEHGVVPEGAQFKEAKSSS

SEQ ID NO: 312067 - protein, 382 aa, unidentified
MQASTIGTPTAGHCGTIFVAIELSQKTWLVTLHSPDRERMSRHKLDGGDHAELLALIERIRARVAEKLGSVPRVVSCYEAGYDGFWLHRLLEAARITNFVFDAASIAVEQRARRAKTDRIDGELLLRTLMAHLRGEPRVVRIVRVPSVEAEDARRASRERDRLVKEQTAHTNRIKGLLRLLGMAVGNPRRRDWLAWLERQRDWQGQPPPPHLLAEAKREHARLILVRDQLMALEEAQAAQTLPVPAPVAERRDLLLRLKALGPAFTATLVSELFYKDFRNRREVASYCGLTPSPWKSGGIDREQGISKAGNRRARHKAIELAWLWLRHQRDSALSRWFRARTANAGKRAKRIAIVALARKLIVALWRYLSSGLIPEQATMKA

SEQ ID NO: 312068 - protein, 313 aa, unidentified
MLFIGIDVAKAQLEFACRPSGETGTVRNDDGGIRELVARCRALTPALIVLEATGGYEAAVVAALVTAGLPVVVANPRQIRDFAKATGQLAKTDALDAQVLALFAERVRPALRLLPDDAVQALDALLTRRRQLVDMLTAERNRLLLARPPVRRDLQQHIRYLERRLREADDDLHTAVKASPVWRVKDDLLQSVPGVGRVVSLTLLAELPELGRLSHKEIAALVGVAPLNHDSGTLRGKRLVYGGRAPVRTVLYMAALVASKCNPVIRAFYQHLRAAGKPAKVALTACMRKLLTILNAIARSGIPWSPPHTLART

SEQ ID NO: 312069 - protein, 430 aa, unidentified
MKSNTQNAKIEAITEKTLVLGIDVGSETHYARAFDYRGIEYSKKPFKFSNTEAGFVTFKEWILDIKERHEKDKVVLGMEPTGHYWFNLGKFLQDNEMKPVLVNPHHVKKSKELDDNNPTKNDRKDPKVIAGLVREGRYMIPYLPDGVYADLRTASNIRFQLQAELTRIQNRISRWFNIYFPEYKTVYGKPDAKSGILILKAAPLPEDILTLGIDGVNQIWRDAKLRAVGKARAKTLIEAAEHSVGSKEGAVAARMEIRMLLEDYESRSIRLQEVMTLIEGLVKQIPMAEKLLEIKGVGIRTVSGFLAEVGDISRFSNPKELQKLAGLALVENSSGKHKGETTISRRGRKRLRYLLFEVAMSLVAKNPEFRELHNYYTTRKLNPLKKMQSLMAVAAKLIRDFYAMLTKGVAYDPQKLVSDIRRPAAYLQVA

SEQ ID NO: 312070 - protein, 315 aa, unidentified
MVSYLGIDVSSLSLDAAVRPQGARLHVSNDPAGFEALLDGLCGLSIKRVLLEATGGYERNILRFLQDAGYKVIRVNPRRARAFAESIGVKAKTDAIDAEVLAHYAEVIPDQPTLRISPERALLRELLQQRDRLVQQRDDDRRRLKQAQFSAVSDFLKANLQHFKSQIKLIEQAISQQTEALKDERVTQLVQVKGIGLVTAGKLITLLPELGRVESKEIASLVGVAPFNHDSGKSVGKRSISGGRFEARRSLYMSCLVAIKYNPALKARYEALRGRGKVAKVALVACMRVLIVRLNAMLRTGKPWLDLVLPQPMRT

SEQ ID NO: 312071 - protein, 422 aa, unidentified
MTEKHSIPVDAVLVAIDIAKARNDVLIELPDRSRRRRLTVLNTRDEHDRFIALLQEIGRPVIAGFEATGNYHRAIAWRLLEAGVDARLISSMALARTREAIHNGWDKNDPKDAQVILHMLRNGMSQRYYDPLAQGISDLQELSKTHEVTSKAKTEIIHRIMTHYLPLYFPEIERFRNNTRSDWFFAFLEAFPTPASITAYSKEDFIAAAWTVVGRKVSKTRLISDIYETARKTIALPIPLDSRAIVMFRMVIAETRSLIRQRDAIEYEAEALLKGHVDYELLKQIPGIGPIIALTILAEAGDLRRFKHHRQFLKFCGLDLATHQSGMFRGHTKLSKFGNARLRRSLWMAAQVAIRQRENGFRDKYERYIAKDRHNADLKRKAFTAITAKMARVVHAVIKSGDQFRPFIEGRRRVEEPLSVEP

SEQ ID NO: 312072 - protein, 420 aa, unidentified
MKVVYQTCCGVDVHKSFLVAIIIKTTSGVQPSYQKKRFSTFNNSILQFKKWLLENACRDVCMESTGKYWVPVFNLLEDEINITIANPKWVKAVKGNKDDTKDSKWIGDLFRLGLVPGSYIPCKPIRILREFTRYRYKLTSCRTSEKNRYQNALTVCNVALDSVVSDIFGKSATSVIDYLIEQPDNSINHEEIASRLLRSLKRKSDSVIESIEGYQMTDSQKYRMCLIRAHLDYITSTINDIDTMLNSLIAPYENAVQLLCTIPGVDRNSAITVISEIGTDMTPFSNSKRLCCWAGLTPGNNESAGKKKSVRITRAGVYLKPALVQVAHAAVKSDKSPYYKQKYERIMKRRGKKRAIIAIARMILTAIYQMLSTGEAWNPTDLFKIDMPEPMKEKQKEKAIKQAMKLLIREGKISESQLAS

SEQ ID NO: 312073 - protein, 341 aa, unidentified
MDETKSTEASVTGGVETHKDLHVAAVVDERDCVLGTRSFPTTRQGYRQMLAWMRTFGQLRRIGVESSGSYGAGLLRYMQAAHIEVMEVTAPDRHDRRRRGKNDDLDAQNAAHAAFAGQGTVTPRSRDGMVESLRVLRVCRKTAVNARRIALQLIQTTIIAAPDGLRDQLRHMTRMQLIRSLAALRPDLSTYRDLGAAYRIGLKSLARRYLELHDEIVDLDVMISGIVQELAPDLIARNSIGHNGAAQLLLTAGDNPERLKSEASFAALCGVSPVPASSGKIIRHRLNRGGDRAANSALHIIAIGRLRTDEKTKAHVARRVAEGHSKLEAIRVLKRYIAREV

SEQ ID NO: 312074 - protein, 347 aa, unidentified
MNFYTNTHPYYCGIDLHARLLYVCIIDDKGEVLVHKKIQDSPEQLLALLSPYLGNIVLGVECMHCWYWISDLCRQHDIDFILGHALYMKAIHGGKTKNDKVDSFKIAKLIRGGNFPLAYNYPNELRATRDLLRRRTKLVRFGADLKAHVSNTVSQYNYPAHSLNLRYPKSRAQMANVFDDISVQRNIDIDLNIVGHIETELRQVEWFIEKQAKQHNAKDYYLLKSIAGVGQILALTILYEIGNISRFDSVQKFASYSRLVKCKAESAGKTYGTQGNKIGNAHLKWAFSEMAVLYLRGNDKAKAYLNKLQKRMSKAKALSALAHKLGRCVYFMLKNQKVFDESRFLTG

SEQ ID NO: 312075 - protein, 338 aa, unidentified
MVYGAIDLHMRVSQIRIIDDAGVVQREQRVPTTRDRLTQAFGSHGPMRILLETGTESEWVAQALEAAGHEVIVADPNYAPMYGEMTRRIKTDRRDVAALAEANRRGWYRAAHRTSAGQRETKQILRSRRYLVQMRSGAVSLVRSLLRQSGYRLGTGSSETVPARVAKLAPTGALAETLTPLCRQIAALTTELQALDARLHTRTASDAIVARLRSVPGVGLIVATTFRAFVDQHERFAQGQQVSAAIGLVPREDSSAERRHRGHITKAGPRELRSLLIQAAWVHWRHGGSGTLRTWVDGVAARRGKRIAVVALARRLSRIMFAIWRDDAAFDSKKLAMA

SEQ ID NO: 312076 - protein, 313 aa, unidentified
MQQTFVGIDISKNSLDVHVLPEETNYSFSNEPQKVKALIRKLKKLKPSLIVMEATGGYEISLAVQLSEAKLNCAVVNPRQVRDYARAIGKLAKTDAVDAYVIARFAQDVKPEAREQLTIKELQLKELVMRRQQLIDMRSAEKNRLARAYTAQVQEELRQHIAELTSRIKAIDEQLHNEIKNDPNWNQKLEIISSVPGIGAHTAHSLLMCLPELGTLNRKQIAALVGVAPMNRDSGLMRGKRTITGGRAVVRKMLHMPTLSAVTRWNKRLQTFYYHLRDQGKKHRVALTACMRKLIIMLNAMLKNNQPYRENYC

SEQ ID NO: 312077 - protein, 408 aa, unidentified
MNAVGIDISKGKSMVAALRPMGEVAFLPREFLHTGVGLEQMAYAIIALGEDTRVIMESTGRYHEPVAAALHEYGIYVCVLNPLLIKQSGGGSIRKVKTDKADAMKIAKYGLDNWADLREYTPMDTVRQQLKLCSRQYDLYMKTVVSLQNNLISLTDKTFPGMNELFSSPERADGHQKWVDFAMTFWHCDCICRVSEKAFTERYRKWCKRKGYHFSAEKASDLYASSCGHFTTLPKNENTKLLIVTAAQQLLAGKATLAALRAEMTRLASQLPEYETVRAMYGVGEITAAQLMAEIGDVRRFPRRSSIVGFAGVDPGVDESGKHSAKSVPTTKRGSPHLRKTLYQIVCTYLKKSPADEPVYQFLDKKRAEGKPYFVYMTAAQNKFLRIYYARVKECLEAFDAQQDISQG

SEQ ID NO: 312078 - protein, 355 aa, unidentified
MNEIKYIGMDVHQTSTSIVVLSASGRALTSAVVETQGQALVAFIQGQRGTLHLTFEEGTYAAWLYDLLSPHVSRVVVCDPRHNALLKAGSKNDPIDARKLAELLRVNALRPVYHGQNSLRTLKELSRSYTTLVQDSTRVMNRIKALYRSRGIRCAGRKVYLPRHRTSWIDQLKEAGLHKRAELLYQHLDLLSLLRREAKCALLAESRKHSVSGILRPVPGLGPVRIAVLLATLQTPFRFRNKRLFWAYVGLGLVTRISAEFTLVNGQLQRSGKAPTIRGLNPNHQRELKEIFKSAASAAVQRPGPWQQFYERRVAAGGKPEMVRLTVARKLAAVTLHLWKKGERYDVKHLKSTAV

SEQ ID NO: 312079 - protein, 338 aa, unidentified
MKLYGGIDLHSNNSVFSIKDEAGVVIARRKLYNDLTQIFLFLEPFKKQLTGLVVESTFNWYWLVDALLEADFQVHLANTTAIQQYSGLKYADDKTDADWLAEMLRLGVLPEGYIYPKEQRTARDLMRKRMQLVQQATLNLLSIQGLYMRHLSYKMSNNKIKQLTPDVIMTHFSSANTAQATICNLTVMKCLKEQIKLLEKIVLAQVQLKPDFQELITIDGIGNILALTIMLETGDIKRFNKVGNYASYCRCVSGARYSNGKKKGKTNSKNGNKYLSWAFVEAANFAIRYNKTVKSYYQRKLAKTNQTVAIKTVAHKLARACFYVLRDKVPFDAEKAFC

SEQ ID NO: 312080 - protein, 346 aa, unidentified
MNYIGLDCHVSTLAFKAVNQEGKVIKAQEIATSAHNFIQFVKQVPKPRMVIIEEGFLAAWLLEICTLNGEKLIISDPKRNHWIGSSGKKEDSIDAEKLAHLARGGYLKEIHHPLGQRRRFRELMTAYHDTIRSVTRIKNKIKARFLQNGIACPGETVYLPQYRDRWRQRLPQEPALLIIVDSLWQQLDQTQSAVEAILSEAKIQAKPFPEIKLLDGIPGIGFIHAATISAILESPHRFANKRKVWMYAGLGIDKSSSGGKVYAKKLSKEYNRLLKYTAKQAAQAAIKTESVFQQAYLEMTLSKGIAPHRAILTIARDILATAWAMWKKGEKYNPEIDIRGKTEVKA

SEQ ID NO: 312081 - protein, 314 aa, unidentified
MNDYVGIDISKARLDVHHGQTEQTGCYANDEDGIRQLLQALASAPPRLIVLEATGGLERALVAALLGASLAVAVVNPRQVRDFAKASGRWAKTDRIDAQVLAHFAHAIEPVQRPLPDEAAQAFADQLTRRRQLVEMLAMEKTRLKQAPNKLVRKDIKQHIAWLENKLRASDEGLRRAVEESPIWQAQRDLLGEVKGVGEVTVLTLIGALPELGRLDRKQIAALVGVAPFNRDSGTLRGKRTVWGGRAVVRQALYMAVLSAVRFNPVLKAFYTRLRGNGKAAKVALVACMRKLLTILNAMVRDGRRWSPPPTVGA

SEQ ID NO: 312082 - protein, 372 aa, unidentified
MGHHTEAFVGIDTSKLRNAVAIADSGRGGEVRYLGEFPATEAAIRKLVAKLAAKCCHLTFCYEAGPTGYGLYRLLKSLGHDCLVVAPSLVPKKAGDRVKTNRRDAVSLAKLLRADELTAVWVPDERHEAMRDLSRARQAVKKDLQGKRQQISSLMLRLGRIYPGKTTWGPAHMRWLMAQKIEHREQRIAFEELLEGIRQEGERLERLENAIREVVPEWSLSEVVAALQAVRGIDLIAAVGVLAEIGDLSRFQNPRELMGYLGLVPSESSTGDKVKRGGITKAGNGRARRILVEAAWSYRYPPRVSRDKQPKVEAAPRRVREIAWKAQTRLCGRFRSLERKGKRRTVIATAIARELSAFIWAINRELMPHRPA

SEQ ID NO: 312083 - protein, 418 aa, unidentified
MKPWNELTHFAALDWADDHHDLVVVDAKGQIALELTFPHTAEGWQQAQAALAAWPGLPVAIETSAGPAVDQLLQRGFVVYPVMPKAAARYRERKRPSGSKDDRHDAWSLADALRTDGQQWRALSPLDPLTAELRALCRDEMALIEQRTALVNQLLAALKEYYPAALQAFEDWTAPYTWAFVLAFPTPEALAQAGQRKWEKFLHTHKLWRPQTAPDRLETFAGAMTFKGAPAITAAKSLLVRSLARLLQTLEQQLVAYRARIEDLFARHPDHDLFGSLPGAGSKLAPRLLAELAGSNWAEVNQVQARAGTAPVNYQSGKIQRARIRRACTLPLRATLHLWADLSRRYSSWAAAYYQAHRDKGQSHACALRCLAHRWLEIVAAMCRTHTPYDVEHHLREIQKHGSYVLRLLPAQAATRTL

SEQ ID NO: 312084 - protein, 311 aa, unidentified
MTYVGIDVSKKTLDCCVLDADNEVYLKVQNSQGGYDELMSLLVLYDDVHVCLEATGSYWQSLVEFLAANDVRVSVENPAKIHYFAKASMLRMKSDKRDALLIADYCKVMTPRLYSPVAAAVAELKLLVGMYQRLKKQKISERVKLLEAPALVKPLINSNIEHFNNQLLETKEMLKAFFRSNADLAHKHEILQTIPGIGFSSGAVLLSILASGYTFESANQFVAYLGLNPRKMESGTALKGKERISKIGKPEYRAALYMPAVVAYSKNLYPDIVTRLQSNGKTPKVIIVALMRKLAIYAYTVYKTNSAYVAK

SEQ ID NO: 312085 - protein, 360 aa, unidentified
MVTMTSVGLDVHARSTRATSIDMVTGEVSRARLGGEAVEVVAFLAGLPGPVRACYEAGPTGFGLARAARAAGIELEVIAPSKTPRKPGERIKTDRRDADHLVRQLIAGALTPIRVPSADEEAARDVLRDREQVRADLMRARHRLSKFLLRNGRVWPAEKTAWTLQHRAWLARQPFTGDLQLVVTDLIAVVDGLSDRRTRLDHALEQIARREAYWPVVSRLRAFRGVDTITALGLQLEIGDWTRFRRPKDVGAYLGLVPGLDQSGESSSSGAITKTGSRYARRLLVEAAWHNHQFPRVGRPLHRRQDGIAEPIRQISWACQRRLHHISQRFAERGVNGNKANVARARELACFLWAAAVWEP

SEQ ID NO: 312086 - protein, 348 aa, unidentified
MRNQPLGAVVYGIDLGKTRFDVVGCDVAGRPIQRVKLSRYTLLAFFAAAPKALIGMEACPGAQWMARKLSELGHAVRIIPAQFVKPFVKSNKNDARDAEAIAEAVTRPTMRFVEIKSCKQIDLQALHRVRDRIVGNRTQLICQMRAFCLEYGIAIRPGTGAFKLDIARIITDENNDLTPAIRALLKELWEELRSVDIRHAVVSRQVEALAAKDDTARRLMTIPGIGPIGATALIAAVGDARQFRKARDLAAWLGLVPRQNSTGGKTTLLGISKRGNPYIRRLLIHGARSCMIHLDRSRDRMGAWLNALDGRMHRNKAIVALANKIARIAWVLLRRPQTLYERIAPAYA

SEQ ID NO: 312087 - protein, 420 aa, unidentified
MIRYVGVDLHKHFIEVCVTDRKGKVLQRHRVECLRDELTAFARKILKKTDQVALEATTNTWSVVDLLRPHVKRVVVGNPVKTKAIAEAKIKTDKVDAETLAQLLRCDYLPEVWQPDAETQRRRDFMTHRTALSSRRSRHANRVQAMLSRLMLRPPAKYLWSNKGVAWLESLDLSPHDRLLIDIHLRQWRQAGEEFELVDRALVEIAREDPDVRLLMTMPGVSHVVAVGVLAALGPVERSKSGDHAASYLRLVPSTRQSGCKTRHGRITKAGNPQTRGLLTQSCQHVARHEGPLGAFYRKLARRKPHQVAIMALARKVVTVAFLMLKNREPYRYARPMLMAQKFTKLQRKYRPEERGKPRPAYRCAADGLPAVYDEVDLPETTGPGDLPEGERKMLLDKDVMKYVEELYAPRVKRSDEPVL

SEQ ID NO: 312088 - protein, 502 aa, unidentified
MVVPNEEPKKPTKPKKPAKPKKPAKPRKSRESSLPVPVPASAAGLHVINPDAAGIDIHSDMHMVCVPADRDANPVRQFGANTADLQEIVAWLKKCRIKTVALESTGVYWIPLFELLESEGFEVYLVEPGQLSRCGARPKTDVLDAQWIQRLHSYGLLRASFRPPDSVLALRAYWRQRQMQVRYAASHVQHMQKAMEQINVKLAEVVSNITGVTGMLIIAAILEGERDPVKLAQLRDERCQHSEEEIALALQGTWRPEHLFELRQAYELYQFHHRQITECDQQVEAELANFPNRAGEKTHTVKPRKRGRKSNDVGFEATGPLFQALGVDLTLIEGIDVGTALVILAEIGVDVSRFPTEKHFASWLRLCPPQDESNKTNRRRGHRKATNRVTIALRMCAQSLGQDNDAVGPVLPPHPQSDRRTRSSQGDRAQVGVFGLPDAQVRPRVRDAVDGRVRGQGEGQHLEVAEAEGGGAGLPTQSAAHAVGESIEAVAIARQACGHAQR

SEQ ID NO: 312089 - protein, 385 aa, unidentified
MRQVTEGQSTRDGPAAFVAMELSKSAWLLAAQGSPSGKTSSHRLEAGDVAGLLALLRRLQAREQQACGGGEVRIVLGYEAGYDGFWLQRRLAAEGIGCWVMDPGSLQVNRKARRAKTDRLDAAMLLRALIAWWRGDRAACHMVRVPSAEREDARRTHRERQRLIVERVQHVNRIKGLLATQGIYDFQPLRRDRWARLVELRSGDGHELPSRLRREVEREFKRLELVLEQIEAVEAERDATVTEPAAGDVDAAKVSLLAGLGGIGVELATVLVREALYRPFANRKEVAAYAGLTPSPYASGDRHREQGISKAGNPLLRKSMIELAWLWLRYQPDSALARWFAQRVGTAQGRIRKITAVALARKLLVALWKYVTTGLLPEGARMKVA

SEQ ID NO: 312090 - protein, 420 aa, unidentified
MKAYNVDDFAALIGVDWADKKHDICEHPKNTEQYHYTVIKHKPEALHKWAMDLKQRYPNQKIAVVCELKKGPLIYALAKYDHLVLFTVNPSAVANYRKAFSPSGAKNDPTDAFIQTEIIKLHMDKLSVIEPESSSMRALAQLVEYRRSLVQDSVDLSNKITATLKNYYPQALEWFKEKDTFIFCDFISKWPSLAAVKKARKQTLVDFFNRHNSHYETVNNARLLSIKSALPLTEDEGVIAPNQLLIEVLITQFKVLLKGIEQLDKTIKQLYKKQNDKAIFDSLPGAGPQLAPRLLVAFGHNRERYTDASQMQKYAGIAPVIESSGKKTWTHWRYSCPTFLRQTFVEWAGFSIRYSFWAKAYYEQQKSKGKPHNSIIRSLAFKWIRIIFRCWKTNTPYDESKYLEALKRRGSPLLKFAITS

SEQ ID NO: 312091 - protein, 406 aa, unidentified
MAILIGVDPHKASHTAVAIDDKERPLGELRVRSSADQVQRLLSWAAKWPKRTWAVEGAGGLGYLLAQQLVSAGETVLDVQPKLGSRVRLLATGNVNKNDPNDARSVAIAAPRSKDLRPVAAEDHAAVLKLWSKRRRDLGSLRTQAVCRLHSVLCDLVPGGHPRKEITAAQAAGILASLEPSGAVAQARYELAQDFLADVRRIDAQMAEAKKRLEVAVKASGTTVTEVFGVGPYVAATVIGYVVDVGRFADRDRFASYNGTAPIEVSSGGHKVFRLSRRGNRRLNHAIHMAAVTQVSHRHSEGRAYYDRKVKEGKTTKEALRCLKRRISDAIFAHLVADAKRRAQAAKAGPGGQKGNGSVSSVAGSHPERQLFGQATPRPVPTLRRTATSRGRNTQEPVGKKSRKAS

SEQ ID NO: 312092 - protein, 416 aa, unidentified
MDEFDLFVGIDWGSEAHQVCVLDSSRKVLLECSIAHSGEALRGLTEKLTALAGGSRGRLAVGIEVPRGPVVETLLEKDISVFAINPKQLDRFRDRHTVAGAKDDRRDALVLADSLRTDMSAFRRVRPGDAHLVQLRELSRTHDELKAERIALGNRLREQIHRYFPQILELDGVYDSPWIWALLERAPTPELARRLSLAKIASILRQHRVHRLTPEQVREILGAEALHVAPGVVEACRRSVALLLPRLRLVHQQKIEVEREIATLLDEISAPTTEGKAEHRDARLLQSLPGLGKLVCATMLSEAWEALQNRDYTQLRGLCGVAPVTRRSGKLLTVAMRTSCNKRLRTAVHYWSGNAVLNDPFWKARYAAIRAAGHAHARALRNIGDRLLAVLVAILKSGVPYDPSRRAAPRLGPSPA

SEQ ID NO: 312093 - protein, 414 aa, unidentified
MKSYLFVGIDTHKDSHTAAVLNGYFEVVATISFDNERSGFTGFERRLKELSLGKSLLFGLEDSQGLGSFLASYLTGKGYETLEINPVTTDRGRKHTVSRDKSDGRDAIVIAKTLIRERTCLHPVRIDRNSVAIREMIGYRQMLVGESTRIKNRLHMVLFNQYKGVLGCFKDPFRKCALAFFKEYPDPSSLEEADPDSLSEFLKTNSNGMFSKKKAKAILSSIDNDIADSLTDTRAHIITAHIERLNCIGKEFKKIQYVLETLVKASSYHSLTSIPGIDIITAAKIISSVADISRFSSASKLARFCGIAPSERSTGRKIRYEKSKYGNKSLRSAIYFVALSHISRTRNGMDKNPISRAYYLKKISEGKTKKEALTCLTRRLVDIIFAVMRDRSIYNFSESEFRKKHDAKLNSVAA

SEQ ID NO: 312094 - protein, 424 aa, unidentified
MPSNLRYLGLDVHAETIAVAVAEPGGEVRPMGIIPHRPDAVAKLIRKLASREQLRVCYEAGPCGYVLYWQLTKLGVHCDVVAPTLVPTKPGDRVKTDRRDAAKLARCYRAGDLTPVWVPDAAHEALRDLVRAREAAKGDQLRARHRLGKFLLRRGIRPPAGAKPWTQAHRRWLDSLHLELPALEATLADYLHEVDHAAARLDRLEQALDAAIAAAPETLRSVIAALQCLRGIRQITAATIVSEVGPLSRFTHPRQLMGYSGTVPSEHSSGASVHRGAITKTGNAHLRRVLVEAAWAYRFSPKCAKGLRQRQRGQPEAITALAWKAQQRLCSRYRRLLARGKPTPHVHRRRPRARRLHLGDRRRGRTSAGHGGVTSRRIGGRGVRERRILGHPMRSGPGRTRAASARGSSRRIMIMPAPLGAIRE

SEQ ID NO: 312095 - protein, 373 aa, unidentified
MINDNKLSFDGQDIYVGIDTGKKSWTVTILTEQIEHKTFTQPPDPDLLVKYLHKHFPSGHYKCAYEAGYFGFWIHESLTRQGLDCIVVHPSDIPTRDKERCNRNDTVDSRKIARNLREGSLIPLHIPHRELQEDRCLVRLRMTMTKKQTRCKNQIKGLLSYYGIKIPEEISSSHWSNRFIIWLEGLTEEGDDESTRGKEDKENRFRHRSGKQALRMLLSELKYYRTNIAQMTREIRHLSEQEYYKESVGYLKTIPGISTLSAMVILTELGDIRRFKDIDHLASYVGLIPQEDSSGGEDNHGGVTRRRNTNLRHLIIESSWVAVRKDPALLMSLIQLSKRMPKNKAIIRIARKLLSRIYYVLKNRKNYVIGVVS

SEQ ID NO: 312096 - protein, 402 aa, unidentified
MTDVPTRFFGLDIHKEYFVAVAVNREREIVFGPQRVSNYQLDDWARRVLTPQDAIVLEMTTNTYLFHDTLLPLVHSVIAVHPPNVPLVTNVHVKTDKKAAETLAQLHAAGMLTGVWIPPHEVRDLRSLISRREKLVHLSTMAKNRLHALEHRKHLVLPDNPFSPDQRTWWENLELSTTEKLLVHSDLDTLEFAQKQVEQIEECVKQKSIQDERIPLLIQLPGVAVLTATTILAAIGDIARFPTAKKLVGYAGLGTRVHDSGMTHSSGRITKAGRKDLRRAMVNAANHAVLDNSHWKAEMERLEPHLGRSKAIVTIARRLLVAVWHVLTKQVADCFADPQNVARSFLSHAYQVRVRNLPKGQSAPAFTREQLDRLGLGKDLQKISFGSKLIKLPPSKLLIEKK

SEQ ID NO: 312097 - protein, 340 aa, unidentified
MQPHFVGLDVHKQVIAYCVKTADGEIVREGTIPATRASLDEWVKTIPGPWHGGMEATMFSHWIYHHLAPYAEKLEMGHPARMKAISAGKKKSDKIDARTIGDLLRCNLFPQCFIISPELGALRQQLRFRRLLVEEQVMFKNKTAGLLMGAGVEYERRRLHGKRYFKELVRDSEWISGELRPLLEFNRQQMDSLKGMDRQLMGMLERHPLLMARIEALQAIDGVGPVTALTWALEIARPERFPSIKQAMSYCGLTSALRESAGQQKRGPLSKQRNRHLQSALIEAAKLAPQFNEKLKEVHRKASEKKVHQNRATLAVARKLVAYLLAADRAFFASQPSARA

SEQ ID NO: 312098 - protein, 346 aa, unidentified
MLHAGLDLSRKRLDVCLLSEHGELVEEFAAPPDADGLRGLVRHVERHGAPVRAVIESMTGARFVHDTLEQLGWEVLIADAQKVKGLAPLACKTDKIDARVLAVLSERDLVPAIWLPDPRIRSEREQARFRLHLVKHKSMLKHRIHSTMLSFGHPCPVTDLFGVEGRHLLDRSVIPDPWRQTVDASLELIDYLERQIAAINRDLKASGAEHPYVPLLLTAPGIGWVLAFTIASEIGEITRFPTAKKLCGYTGLCPRVHQSGESDRRGPLTKQGPKYLRWAMLETTMHALRHPAYAERYQRNKKRLGRQRGARVAQIDIARKLTEAIWHMLTRNQPFAPAGAAFRLAA

SEQ ID NO: 312099 - protein, 341 aa, unidentified
MKYSVISIDLAKNVFQICAFNENREIVFNKKVKRANLINALRQFPPSLVVMEACYSSNPWGRRIMKLGHKVKCIPAFAVKPFLVGNKNDANDAIAIAEASFRPTIRFVEIKTLEQQDIQSLQRIRERMIKIRTGDINQLRGLMAEYGEVVATTAGALQKAVPDILEDATNELSFVARKFIQRLSRNIEQTSQQIKEIDAEINALISIKEEYSLLRSVPGVGPIVAATVMASVHDVNIFKNGRQFAAWIGLTPSQYASGETNRLGKITKRGNHSLRKMLIHGARTVLNWCEKKQDNLSKWLQSIKQRMHGCKSVVAFANKLARIIWAVLAHKVPFNTSKACA

SEQ ID NO: 312100 - protein, 324 aa, unidentified
MIDGILGIDVCKNTLDVSISSYTKVRTKSFTNSPDGWRHLLDWLIAQKIQRVHACLESTGRYSLGIACALYEADHVVSIINPAQIRDFVRTKLGRNKTDGVDASHIREYCELFKPSPWAPPSEAHRRLGELQTIRSGIIAGLTEWKNRKNSGIVDAEAQALADATISHFTSQLGAVDKAIALTIDNDCDLQSKRDLLLSISGVGETLAGVVLAELPGPDVLRSSAEVVAYAGLNPRQHQSGTSIDRATRISKIGNAVLRAALYMPALSAMRYNSAIVALVTRLKSRGRLKPKQIVVAAMRKLLVLCFGVLKTGRPFDAAKAMGG

SEQ ID NO: 312101 - protein, 347 aa, unidentified
MKFDAALDVSVAKSSLCVIASDDGSIVLETTVETEPEAIAAVLAPYTNRLRRVGHEAGALSPWLHRELQALGLPMVLVETRHAHGVLKAQRNKTDKNDARGLAQIVRSGWYKAVHVKSEPSHRLKYLLAGRRLLKRKLLDIENEIRQSLKAFGIKLGPRAQRSSFADRVREAVAHDLLLSEVSETLLRAWSSLIVEYNRLHTLLLQAVGHDELCRRFMAIPGVGPVTAATFKSAVDEPRRFRKSRTVGAHFGLTSRRIQSGDTIDFDGHISKCGDPAVRTALYEAASAMLVRSKVWCSIRAWGLKIAQRRGHKRAVVAVARKLATVMHAMWMDGTEFSFSAESSPTS

SEQ ID NO: 312102 - protein, 498 aa, unidentified
MNNFAAMNFENNLRPGNNGSGRKARGRTRFACPNPTRIKPRTPADPGAFIKKSERTTPQEGHRIRTTNDKGRGPCANKPMNDTISWESIIYYAGFDWAKDHHDVVVVNPQGKIIKDLTFEHSAEGWAKWKELVAAYPHLAVAIETSQGAAIEQLLTSGVVVYPVNPKSAERYRDRKAPSGNKTDFLDAWSLADALRVDGHGWRALKPLDPLIQELRLLCRDEVDLIAKRTELVNQLQAALHEYYPAALQAFEDWTATPSWSFVQQFPTPELLRQAGRRRWEKFLHVHRLYRPEVNEKRLEIFAKAHEFCGPVAVTRAKSRLALALIKLLHALETQLDDYRKEIRRLFNEHPDHELFGSLPGAGEKLAPRLLSELGSDRSLFISAQSLQCYVGTAPVSFESGQVRQVYVRFMCNKSFRHAVHLWADLSRKSCSWAQVYYQQLRAKGKSHASSLRCLGQRWLKILWKMWQTKTCYDPDFHMANQLKHGSWVLAVKPAKSV

SEQ ID NO: 312103 - protein, 334 aa, unidentified
MSPSRTLFIGMDVHKDTIAVAYVAQDHGAEVTSIGPIGTRQCDSAQRIRKMQSKATHLICVYEAGPCGSWRYRYLRKKAYDCWVGAPSLMPKKAGDRVKTDRRDALQLARLARSGDLTVVYVPQVQDEAMRALTRAREDAISDCKDAKFRLKAFVLRHDIRSTGRANWGPAHLRWLSEVVCPTPTPQIVFQEYVRTVQEHTERLQRLEQELHEHVQAWRLYPVVEALQAWRGVPCTVAVTLVAAMGDLTRCDTPRALMKFLGLVPSEYSSGEQRRQGTITKAGNTHARRVLVEGAWASRSPAKVSRHLQLRLETQSKIIQDISGKAQVRLCQRY

SEQ ID NO: 312104 - protein, 523 aa, unidentified
MARAPKSKKRSAPAPQTIHKARGVISPRVQRVGPEHFGIVCVDCAKARSKWMLTDFYGRILVPPTEVEHTQACFASMIERLRTALEQAGIRDQIVVIERTGRYHRPVQRAFAKAGFEVRIIHPLTTKQHRQPANPGNKTDDTDLAAMQRGAVNGFGLLEPPADPLSIRLQLLARHRRDLVEKSVALRSQIHEHLYAIMPGYSKCFEDIYDARIPLWIARQFGSATAILQAGLPGLIVQLRRAEIRVHLPTLEKILAWARSAPAAEDESHIHLTILIELDDDRLSKVRGVRAIEAELAGLLVQTPYVLLMGIPGINVVSAAEFAGEMGPIERYATARAITGRAGLFPSRYQSDHVDYPDGQLVRCANRNLRRAIMMIADNLVKCNDHFRVLATGWRLHGRDARAVRVQVAGRFSRIAYQMVAGRKAYRHPCCQQRDYILNKLLIFHTDNEIGYDQLMRNLDAAVAQLPRSEYREEAVPLADELDRVLKKRGKGPRPLSEILPVVLAKLGVKPVRSPKSGEAILT

SEQ ID NO: 312105 - protein, 641 aa, unidentified
MITIPVILERCAGIDVGKRGLAVAVAVGPADKEAEIKTRSYGTTVPALQELHAWLREEGCTSVAMESTGSYWIPVKNILEQDFQIVLVCARKHRPKKGDKTDFRDAMDLAVYHRHGLLTGSYLPERGIVELRDLTRRRKKLLGHLRAEKNRIQKVLETANVKIGSVVSDVFGVSGQEILQTLLDNKPVTAAELADKAKCRLRQRIPELTEALEAHHLNDHHRWLIDQSIEHCKLLDQQVEALELRIDQHLEPYHRQYELLTTIPGVKETTAANILAEIGPNMDQFPSADHLCSWAGICPGNNRSAGKSKSCRIKKANKFLLTALVEGAWAAGRKQGSVFQRKFHRWVNKLGKKKANIAMGRSLLRVAWTMLKNDQPYVEPDVASTKTRERERQVRNHAHQLRQLGADEKTIQALVENMLEAPPALTGTSPAQEPAPDTAATARQASSKNAPPKMQGGHSPRRPPARGVLGFRIRTADIRKHSIIKEPPGKPSTATTPETALKRPRQQPRARKKTDPAPSEGNSRGNERGARAWRHARFLIHHGIENRQGGDVNRCNLLILVQKNRSAFCDQCFWRRCFGWRRAWHHGVDVSGVTVVARRLFPHIKVFFCLTSPAGRFMLEFLRFQTQSSEHRRRQKYLGAH

SEQ ID NO: 312106 - protein, 428 aa, unidentified
MAVSVHTDPSNEHTDHALPYQWFVGIDWGSQTHQVCVLDRERHRVGERSVEHEGIALAECAAWLTTLAAGDVHRVAVAIEIPRGAIVELLVERGFHVFAINPKQLDRFRDRHTVAGAKDDRRDAFVLADSLRTDRPSFRQVHVEEPHLLMLRELSRTEEALLTEFRRATNQLREQLHRFYAPLLQLCPAADEPWLWDLLELAPMPRHAAGLTKAQVAGVLKTHRIRRVSAIDVLKVLQAPALPVAPGTAEAASAHCALLLPCIRVLAAQLQRCARQVETLLHTLGTVEAPTTHPSDVASIRSLPGVGRKITTWLLAEAAQPLAERDYQMLRTQGGVAPVTKQSGKRRQVVMRRGCNPRLRNALYHMAHCVAQRDAYFASLYTVLKTKGQSHGRALRSLGDRLLRMLVAMLREHTLYDSSRGQKALMER

SEQ ID NO: 312107 - protein, 419 aa, unidentified
MKAEELPTHFAGFDWAKAHHDILVIDSLGNIVIEFQFEHAAEGWKSCQEKLAAFPRLAVAIEAGHANAIERLMLMGHRVYAVHPRSSKSYRARKRPSGVKTDRVDCLALAEALRFEGQSWTPVAPPEPLVLRLRLLCRDEVALIEQRTALVNQLIQALYEYYPAALEAFDDWTSPAAWAFVEKFPTPEVLVKAGKRKWQNFLHARRLYRPETYEKRLDAFTHAQEFCGSEAVTTAKSTMALALVKLLQTLEKQLLEFRHKIIACFHQHPDHAILVSLPGAGEKLAPRLLAELFSLPGGATAAPRLQVQAGMAPVSYQSGQVSVVYLRRQCNKFLQHTVHLWADLTRHYSDWARIYYEAHRKKGQSHACAVRCLAMRWLKILSAMMRSHTSYDAALHSRNQLRHGSWVLELVPKATDKPA

SEQ ID NO: 312108 - protein, 366 aa, unidentified
MRPSITPIGVPVGVDVHKRRCKVVEFNHGEIKVRKSIANTREEWVELLTELPPEAEIGLEVSTAGYYAMSVLEEAGWRERAHWVHTAGIDSNRRQKNDRLDAERLARKLAAHHLDPLPEAWFPPPEIRALRLRVRQRCWLALLRTQTKNHMQSLLQMHGLLLPGSDPFGAEGKAWLEQQKLPAPLSESIPQIQQVLKLLGKEVEISEKNLAAMEKQFPQLALLRSIPGIGPLLAAVIWSEIGDIERFASAKALANNTGLVASFYDSGDVQVSGPITRQGSRWLRWALVTAANVAIQHRNPFADRYHRLRRKKKPNVAKAAVAHSLARCVYGVLKHGCPYREDRWGRKVGALEQEARGSQRSTKTVP

SEQ ID NO: 312109 - protein, 316 aa, unidentified
MSQAEVFVGIDVAKARLDVALHPSGETWTVPNSEAGIATLVAHLQQQPVAHIVLEATGGLELPLLGALGAAALPAVAVNPRQVRDFAKALGRLAKTDRLDAQVLALFAERVRPALRPLPDQATQALSALVARRRQLVEMLTAEKNRRGQAPPTIQADIATHIAWLEGRLERLDKELGQHLKQSPLWRAQDDLLQSVPGVGPVLSRTLLADLPEIGTLDRKQIAALVGVAPLNRDSGTLRGARTCGGGRAAVRAVLYMATVAATRCNPVIRAFYHRLCQAGKAKKVALTACMRKLLTILNAMLKHRTPWHAERLQRA

SEQ ID NO: 312110 - protein, 477 aa, unidentified
MLDLRRAVGTEVVHRLGANKPAYKLDPEFLEHPRLSPRVVIGPGARFLEFLFTGLHADDATQEKVMELLHRRCCGLDVHKETVVACLRLVSNGKVTTEVRTFQTTTADLLRLSEWLAANDCTHVAMEATGGYWKPVWHILDDGEFELVLANAAHVKNVPGRKTDVNDATWLAELLAHGLIRASFVPDTQTQEMRNLLRTRKQLVREQSSHVLRVQKTLEDANIKLDSVLSDLMGKSGRAMIEALIVGETNPAKLASLADRRVKASPEELREALRGRVTKHHRFLLRLHLNQIDALDAAMATLDAQVAANLGPFRTAVDLIMSVPGIKNLGAQAIVSEIGIEMSRFPSDAHLISWAGICPRNDESAGKRRSNRLRKGAPWLKTTLVQCAWAAVKKKNSYLQAQFYRIKARRGPNKAIMAVAASILTAIYHMLKDGTMYQDLGRDHFDRRSTDQQKKSLVKRLADLGYAVEIKPLVASA

SEQ ID NO: 312111 - protein, 341 aa, unidentified
MQAITTIGLDIAKSVFQVDGVDADGQVVVRRQLKRRYVLAFFEKLAPCLIGIEACASSHHWSRQLRALGHTVRLMPPSYVKPYVKRQKNDATDAEAICEAVGRANMRFVPTKTPEQQSGLVLHRTRHLFIRQQTSVINAIRAHCAEFGIVAPVGRRGVEELLNVIANEKRVPEIARACLSALGDQLRRIKEQILEFDRMIRAWHRSCETSRRLDEIPGVGPALATALVASIAEPRTFRSGRDFSAWIGLVPKQSSSGGKPRLGSISKQGDRYLRGLFTAGALAVIRYAKIHRIGHRPWLTALLARRPTKVAAIALANKIARIAWAMMARGERYREPITLAA

SEQ ID NO: 312112 - protein, 344 aa, unidentified
MSAYVGLDVHKESTFATVLSQDGRVVVQRRVANELLPSFLGDFNIERIGLEASTYVAPLYRDLVRRGFSVEVSHPKKTRYIAEARIKSDRVDSRAIAELVRLDALPKSYMPPPEVAALREKVRRRAFLVRERAKLMAKVRGVLAYEGVKPPEGSSLFTLKGLEWLRGLGLEPVDCYLRVMTVLNVEIRRLSLELKHLAGEDEDVQLLMTIPGIGYYTALLVKAEVGDVNRFKSGDHLCSYAGIVPSTYSSGSAARHGGITREGSRWLRWAMVEAAMTHIKYDTSITRSYHRVAEKRGKQVAIVAAARRLLFACYTVLKEKRPFRPFLHGQAFRFREPRESAVRL

SEQ ID NO: 312113 - protein, 442 aa, unidentified
MSRFVGGELQARFMARVRGVDPAACLVVPVDVGKWSAMALVADHHGEIVVAPFEFRLDELGVRQLLSVIEAQVADCQAVVCRVGVEAAGHYHRTVVARLRAAGVEVVELNPAQVKEARAQQLLRRLKSDERDLGAMAELMIRGAGRLPQVRDDALASQVAWVAHRRRKVAAHVALSNQIQGHLDLVFPGLGACFDGILTTKVGRVLVRDLADPDRMRRLGVEGLVGFVGRRGVQLRRPKAEQLLEAARVALRLPPAERKPIAALLAADVALLDALDREIDRAAATLAEVLASTPAGVLTSLPGIGIVRASAYGAAIGDPDRFPNAAAAYRASGLVPTEYSSAGRSRGGQHISREGSVELRAAIIELGRGLANHDADFAAYRQRLRSAGKRPMVAAVAVGHRAHRLAFAMLRSQQPYDSNRWASAVADGPVMAKTGGRPTRTT

SEQ ID NO: 312114 - protein, 397 aa, unidentified
MVNIGVDLHKTQFTICVRRRGGDKFEKYPTTEGGYKSFLKKAAIWQKKGEAVRVGVESTGNTRYFKSRMEDAGIGVVVVNTLKFKVVNESVNKTDKHDASTIVEFLEKDMLPQSKLCSRESEQLRRLLKVRTTLVRAKVVVKNQIHALFTSEGLEDVKSAFLQSKRGRQLILDALKQCKNGLVAQPLIATINRLDEDVKAIEDQLEELTTGDRMVELLMTIPGCGKINAWTIRAYTDDIKRFSSAKKYASFAGLAPWVQNTNETIHHGRITKRGPKELRTAMVQIVMGIRRMKEYTRVWRIMKQYEKMKKVKGSGRSIIATARKMATIIWHMLTSDVAFDHEEMIDPNIAKELEKICSKAGIEKRAMLGKQKTPVPEIGIKKVKIAGVAREKIREVG

SEQ ID NO: 312115 - protein, 340 aa, unidentified
MEHLAIDLGGRKSQVCLRSHEGQILIEAKVLNEEIRTWLAGERPRRVIVETCTEAFAVADLALSCGNEVRVVPARLVRMLGVGARGKKTDQLDARALSEASCRIDLPSVHVPSAWSRRVKSMCGMRDALVQSRTMMVNCVRAWSRGELKSVLRATHKTLGMRLRNQAVRLGEQLPASVERLLISIAQLTEQIDAATKELAGLAEESEICRRLMTVPGVGPITSLRFVSAIDEIGRFANAHQLESYLGITPGEDSSSERRRITSITKAGPSAVRWTLVQASWAALRCVPTHPMCVWARQVMLRRGKRIGIIALARKVAGILYAIWRDGSVYDPARNVSQLM

SEQ ID NO: 312116 - protein, 334 aa, unidentified
MQNVTLIGIDLGKHSFHVHCQDKSGKAILRKKFTRAKLFEFLGQCASATVVMEACAGAHFMAHRVADLGHEAKLISPQFVRPFVKSNKNDFVDAEAICEAASRPSMRFVQPRTEAQQAMRALHRVRESLVRDKVKTTNQMHAFLLEFGISMPTGMAVIKRLSKVLADNNLPPYLSQLLLRLHAHYLYLVEQITGIEAELAQSLSCDETGQHLMTIPSIGPITASVLSAQLGDGKQYACSRDFAASTGLVPRQYSTGGKNTLLGISKRGNKNLRRLLVQCARVFIQHIDGQSGRLADWVRAQLARKHSCVVACALANKLARIAWAITTRQTVFAQ

SEQ ID NO: 312117 - protein, 409 aa, unidentified
MKVLYPRCAGLDVHKETVVACVRIALVRGDARHEVRTFGTTTGELLRLSDWLAEQGCTHVAMEATGVYWKPVWQLLEGSFDLVLANAAHIRNVPGRKTDVNDATWIADLLAHGLVQASFVPPAAIQELRTLTRTRKQLVRERTQHVQRLGKTLETANVKLASVLSDIVGVSGRAMLQALIAGESDPERLAALGHGRLQSSRAERVEALRGRVTRHHRFLLALHLEQVEALERAIASVEAEIEQALAPFRHHVERLLTIPGVKDRVAQVILAEIGTDMARFPTAGHLISWAGLCPRNDESAGKRRSTRVRPGTPWLKITLVQAAWAAVRKQDTYLRAQFLRLKSRRGPKKAILAVAASMLTAAYHILRDDVDYRDLGPDHLDRRDRARRSHYLVRRLRDLGYEVTLREAA

SEQ ID NO: 312118 - protein, 375 aa, unidentified
MREKVRFLGLDVHAETIAVAIAEPEGEVRSLGTIPNREDSLRKMIKKLGPTDKLRVCYEAGPTGYVIYWQLAELGVKCEVIAPTLVPVKSGDRVKTDRRDAEKLARCYRAGDLTAVWVPDEGSEALRDLVRAREAAKQDQLRARHRLSKFLLRSGQRPPSGVRSWTRAYLIWVAQLRFTQMAQEATRLDYLHEVEHMRERVERLELAITEAVKLASPALQQVINDLQALRGIADISAVTIAAELGQVSRFDSARQLMGYCGAVPSESSSGKRTRRGSITKTGNAHLRRIVVEAAWSYHRPPGIWYGLRKRQESISEEAKEIAWKAQHRLHKRYLRLAAAGKDKRKITTAVARELLGFIWAIGTRAETEVRQRIAA

SEQ ID NO: 312119 - protein, 355 aa, unidentified
MNDSKYIGLDVHQATISATVLDAEGKLVMEAILETKAETVLQLIHGLRGSLHVTFEEGTSAAWLYTLIKPHVTRVLVCDPRKNALLKVGNKSDRIDAHKLADLLRSNLLRPVFHDDTGLRTLREMARSYLTITKDVTRVMRRLKAIYRSWAIPCGGQQVYSPRHRAEWLGKISEASVRRRAELYYQQLDALVYLHRQAKKELLAEGRKHKATKLLRQIPSIGPIRSVLLVALLQTPHRFRTKRQLWTYSGLALETRNSGEYRFQDGQLKRSKKVFAIRGLNKNHNHDLKNIFKGAAIRAAAVEGPFQKFFEALVAKGMKPAMARLTLARKIAAITLIVWKKGVRFDAEHLKQQAA

SEQ ID NO: 312120 - protein, 320 aa, unidentified
MDSSGVSSDRTFVGIDIAKATFDVARLPQSQHHAFAYDAEGIERTVALLQSWGTCLVVLEATGGLERRLAAELVAAAIPVAIVNPRQVRDFARGLGLLAKTDAIDAGVLARFAQVVQPVPSSKTSEKQAELQELVTRRQQLVGLRVMESNRQTTVMGQAARRSIMKVLRTLDREIDAVDAAISRLIESSDDWKRKAEIIDSVPGCSKITSHRILGNLPELGNLNRAEIASLAGLAPFNHDSGKFQGKRAIWGGRAAARCALYMAALTARRCNAQIRRFAQRLEAKGKTFKVVITACMRKLLVILNALVKHNVLWESQEIT

SEQ ID NO: 312121 - protein, 315 aa, unidentified
MTHTPRFVGIDVSKAQLDIALRPEGRFAVPNDETGRAHVIERLQALPVVLIVLEATGGLELPLIGALVAARLPVVVANPRQVRDFAKATGKLAKTDSLDAQILAHFADVIRPVPRPLPDAQTHALAALLARRRQLIEMLTAEKNRLGSAPHSLHKRLKVHITWLKREVTQTERALATAIRESPVWRENDDRLRTVPGVGPGLARTLIVGLPELGTLNRKQIAALVGVAPLNHDSGTLRGKRTVWGGRAHVRAALYMAALVASRCNPVIRSFYQRLCEAGKAKKVALTACMRKLLTILNAMVKHRTRWGTQETVCP

SEQ ID NO: 312122 - protein, 356 aa, unidentified
MNNRKYIGMDVHQASISIAVSDAAGKVLMECIIETKAATVLEFIQGLRGSLWVTFEEGTSAAWLYDLLKPHVTKVVVCDPRKNALLKAGNKNDRVDARKLGELLRAELLTPVYHGESGVRTLRELSRGYLAVSKDLTRVMNRLKAIYRSWAIPCAGQQVYSPRHRAAWLEKLREAGVRRRAEQTYQQLDFLMEIRKETRKELLAESRKHPARKLLEQIPRLGPIRVALLIALLQTPHRFRTKRQLWNYCGLGLRTRSSGEYRYTGGQLQHARKPPALRGLNVNHNHDLKNLFKSAATQAGACKDDPLGEFYQNLLAKGMQPPMARLTLARKIAAIALKIWKKGERFDPAKLKQQAA

SEQ ID NO: 312123 - protein, 344 aa, unidentified
MNIETLGIDVGKNVFHAVGLNAIGEVVLRRQFTRSALMRFMGKLAHCKVGMEACGGSQHLGRRFERFGHTVRLMAAQFVKPYVKSNKSDFNDAEAIAEAVMRPTMRFVTLKTVEQQDLQALHRARSLLMGQRTALINQLRAFLLERGMTVPKGVAALRRRLPEVLEDADNELSDRLRALIDQIWQQISGLEARIATLNAEIEVIAATDTACQHLLSIPGIGVLTATAMVATIGDGKQFHCGREMAAFLGLVPRQHSTSGKPRLLGISKRGNTYLRMLLIHGARAVLRGGDKRSDRLGPWLRELKARRPSNVTAVALANKLARIAWAVLAHGEDYRPRLSLLEVA

SEQ ID NO: 312124 - protein, 370 aa, unidentified
MSVRRILAKTIDTDLEYEAIGIDLAKNCVSVALLTTDGEVVCIDRLDYSELEKSAQVLCPTTFAMEPCTEMNYLVQKLEAWGHRCLVIGGKNVQNYVENHYSGQKTDLNDAQALAFLAQDTQLRTIKAKDMEQQKYASLTTLREQYIKQYRQTIVSLKGICQAWGLNISKGISGKARLKDLIENHAAFPEELKESLVDMVTHAQTAQKALNKITKTLEELAKSDKVCQLIQTIPGLGSICSCRLRATVGDIKRFKSPKDFPAYYGLVPRSIATGHNERKGKITHRGDRTMRSLMVQAAGSLVNMATKGKLKSKQLTKWILKKQKEKMPWGKLVCAVAAKLLRIVRAVLISNKPYNSKIAGVAKCSLPKGS

SEQ ID NO: 312125 - protein, 342 aa, unidentified
MDVKTLGIDLGKNVFHVVGLDERGVIALKRRVTRTQLGVLVGNLPRCVVGMEACPGSHYMARCLGEHGHTVRLLPPQYVRPYVKTNKNDFRDAEAIAEAVGRGTMRSVPPKTIAQLDLQALHRVRDRLVGQRTALVNQIRAFLLEQGRPMRPGRLALRGELRRLLAADAPGISPNLARLLAQLSREWQQLEERIDCVTGEIAAVATTDPACQRLMAIPGVGPISATAVVAAVGNGRAFSKGRDFAAWLGLVPRQHSTGGKPRLLGVSKCGNTYLRRLVVLGAQSVLRSKVRDRQRFGPWLQRLQLRVHRNVAVVALANKLARIAWSVLANATPYRPLMDEAA

SEQ ID NO: 312126 - protein, 394 aa, unidentified
MHYVGIDWADEGHQVAVVNDSGKWVSELAVPQTGRGFASLHKQLTALAPVVVNIERPDGLLVDWLVQQGYRVYVTAPRAAASHRSRSGKDDRTDARLLANLLRVGSEDCRPLVRHSPLVQQLMQELRALEQLQRQQVRLTNQLRQVLLQYYPAMLHLFSSLNTKIALRFLQACPNPQTAAGLSRLELAALLKQQGYTRMSQLDRLYQKLQVAMPTTEVWQGYGQHVLALVSLLQTLQGQLAQLRQQVQHTFASHPEAAWWQALPGAGDLTVCRLLALIGDNRQAFTSCEALQALAGTVPVTRRSGKSLSVRFRWGCTKALRRAVMDFARNSLAKSGWANSYYQSQLERGHAEQRALRALANRWVRIIWTLWQRRQPYDEARHVANRSRNGRTAA

SEQ ID NO: 312127 - protein, 458 aa, unidentified
MTLLAELSQTLPVRYYLGLDVGYREHVAVAISLQTFVRGDDRWQRARCLHFASTRAGLRQLQQYLDRFSLDPTAFLGLCEPTGGYYGATVGQYLLDAGYRLLLVDNGTTRHMREKIFGALPKTDDVDARVMARMGYLHEVVGEEYSLRPLCLPAAEDAEVLALCRTSWKLNVMVCRLRNQFGQLAAVIFPELKEFFTSSVTTVVPVRLLAAYPCPAELAAAPAADVAAVLRRAGGYRHAGRVDELQALAADSSGLLPDPGRAWRLEWLSGMLGHCFAAQASLDTRLQDLVSRRDDYRLLAPIPYAGVATLGVIVAVTRDADRFHNYRQYVAYTGYFAGLEKSQTIDRTRMSKRGNRDLKRALFQIVAPLVWFDQGNNPYKALYERKKAEGRPWYEAMPFACAALARHIYHCLKFKEPYDVSKAFQGSAPRAASDEVLKDLQADLEASFEVMDAHLSSD

SEQ ID NO: 312128 - protein, 338 aa, unidentified
MKPIMIGLDLAKSVFQVHGVDEAGRVVVRRQLRRGQVEGFFAKLAPAVIGMEACGGAHHWARRLQGLGHEVRLMPAAYVKPYVKRNKTDGRDAEAICEAMQRPTMRFVAVKRVEQQGVAALHRTRALLVRQRTMAANALRAAFAEFGVVAAPGIRGVRELIAQLPAAALPADAGQALLVLARHWEALGADIQALETRIVQAVRADEAARRLMAIPGLGPISASAILAAVPDARLFRSGRGFAAWLGLTPRQNNSGGKRRAGGISKQGERYIRSLLILGASAHLRQERSRGVKDPWLRGLLARRPVKVAAVARAAKTARVVWALLAKGERYRAPAQLAA

SEQ ID NO: 312129 - protein, 335 aa, unidentified
MGTVAVFVGLDYHDEAVQVCVLDPQGRPLANRSCANDCGVIAALVAQHGERVQAALESCAGAADLAEELVSRAGWSVDLAHPGFVARMKQNPDKTDYQDAHLLADLERVGYLPRVWLAPEPVRELRQLVRYRQQLAGRRRNAKLRIRAVLREQRCPAPAELNPWTRGWCRWLVERALLSVQARWVVERHLRELGRLADDLREVEERLRQVTADDPEVARLLGQRGIGPVTAWTLRAEIGRFDRFRTGKQLARFCGLSPRNASSGQRQADAGLIRAANPQLRAVLIEAAHRLGRLDRRWRAFAQRLRTAGKPGSVVAAAVANRWVRWLFHQMRPAA

SEQ ID NO: 312130 - protein, 345 aa, unidentified
MIIGCDFHPSWQQVAWVDNESGECGERKLVHAAGEAKMFYQQLGAPALIGMEATGNSQWFLELVEDLGHSIWVGDAAQIRASYVRKQKADKRDAAHILKLLVEGRFPRLWTPDREQRDLRQLVLHRHKLVEIRSRVKNELQHLSMNKGMQKRATLWSQAGQKMLRELPLKPWASCRREDLLGLLEMLNQQIGKLDQAVQKAAEEHAQARLLMTQPGVGPNTALAYVLTIGDVTRFRRGKQVASYLGLIPREESSGGRQKLGAISKQGNRLLRSLLVEAAQIAVRFDPGFRKQYLHRCHQKPKGVAKVAAARRLAVRLYWMLRTETAYPEIVRIESSPRVPLVGAS

SEQ ID NO: 312131 - protein, 374 aa, unidentified
MKEFSKYVGLDTHKETIAVAVSDALGGKPRYFGEIANTPEAVRKMVKNLCPDGEVIKFCYEAGPCGYVLYRQITDLGHVCSVVAPALIPTKPGDRIKTDRRDSEKLSSLDRAEELTPVWVPDIEQEAMRDLTRAREDMKEFERMAKQRLNAFLLRHGCIYDSKKSRWTQAHFRWLEAKKFDNAVQQIVFQEYIEAVKQAQAREAGLVTEMEKALKYWVLAPVVEALMSLRGIKLIAAMTIMAELGDITRFDSPSQLMKFLGLVPSESSSGPSRRQGGITKAGNGHVRRVLIEAGWCYRFPARKTAHLQRYAEKCSNEVQDIAWKAQKRLCGRYVHLLSNGKIKVQVCTAIARELVGFIWAIACETMGKVIVSTR

SEQ ID NO: 312132 - protein, 339 aa, unidentified
MNITRMGIDLAKNVFQLHGVNEHEKVVVRKQLKRAELLEYFVNKPPMLIGIEACGGSHYWARMLSNLGHTVKAMAPQHVKAYVKSQKNDKRDAEAICEAVSRPTMRFVAIKSEEQQDMQAIHRIRDRLVKSRTALANEVRGLLAEYGIVIAHSGVPATRRGLLQALEDADNGLTTKMREILFDLHEELDAIEIRIQRYLQKINQHCAQDERVLRIMEIEGLGPISASAIVTAVGDAKQFNSGRDMAAWIGLVPKQHSSGGKEKLGGISKRGDKYLRTLLIHGARSAMRCCDTKTDKRSIWINALIARRNKNIATVAMANKNARIIWSILTRDEGYRAAA

SEQ ID NO: 312133 - protein, 341 aa, unidentified
MNNSTTICIDLAKEVFQVAVFNKAGKAKLNKEVSAKKMCLIIAQYPDAAIFMEACGSAHHWARRFTSSGHKVGLIPSHIAAKYRVSNKSDKNDVLSIYEASKNQQLHCVQIRTLEQQDIATLHKFREGYKKERNQLANRLRGFGREYGVNFALGISKLLKQVPIALEDAENEMTVVARRVVFRLLEQLRHVILLMKEVTDEIEAIAKQIDACQRLVQLPGIAWLGASMMYAKFGSAECFRRGRDASASIGLVPAHSGSGGKVTIGRITKRGDTYLRTLIINGARSLVIHVKEKTDSLSCWVRQLLSTKGFNKTIVAVANKLVRMATAMLKSGLEYRQPVAQ

SEQ ID NO: 312134 - protein, 366 aa, unidentified
MQKLSTRRVMGNKILKGHQLTIGIDLGDRWSFYCVLNELGEVLQEEKLPTTPDAMKRTFEKLPASRIVLETGTHSPWISRLLAELGHEVIVAHAQKVQLITKSSRKDDRHDARTLARLARIDPQLLGPVRHRSAQAQMHLTVIRARAELVSARTALINAARGLAKSYGERLPKRGSEQVGRELATALSTALRQVLEPLLREVESLNERIREYDQRIEQIAKQAYPEVALFKQVKGVGTQIALTYRLTIDDPHRFAKSRDVGCFLGLRPGRRNSGQSEPQKSISKEGDRYLRTMLVQGAHYILGPFGEDSDLRRWGLKLAERGGKNAKKRAVVAVARKLAVLLHRLWVGGEVYEPLRNTNRAMGAAA

SEQ ID NO: 312135 - protein, 342 aa, unidentified
MEITTIGIDLSKNVFQIHGVDHRGKTALKKQLKREQMLPYFANFPSCLIGIEACGSAHYWARKLTALGHTVKLIAPQFVKPYVKTNKNDAADAEAICEAVSRPNMRFVPIKNGEQQAILAQHRARQGFVKARTAQANQIRGLLAEYGIVIPKGIVHIGKRLPEILEDGENELPGIFRQLIDRLGSNLKELDRQVKELEVQIQTWHRNSVDSKKLAQIPGIGPISASALVASIGDAKNFKDGRQLAAWLGLVPRQHSTGGKPTLLGISKRGDCYLRTLLIHGARSVVRVVEQQANHANQWLAGIMRRRNKNVAAVALANKNARIIWALLTQNREYSAAYRLAV

SEQ ID NO: 312136 - protein, 343 aa, unidentified
MVGELYVGLDVHKLTTVATILDAEGKRVDQTRFSSADSELVSYLRRFPAPQHVVLEACNVWPHIYDAARSTGADVTLAHPYKVRVISEASLKSDRVDSEALAQLLRLGSVPMAYAPDPAIRDLRQLVRDRVFYMRQEKDIKNHLYSVLLRQGIAYEDGIFGLKRKREELRGLHLPEIDRGLDVLTHLDESCVELDRAVHEAFLASKEAQLLETIPGIGELTAMALVAELCPIDRFPNIEKLCSYAGLVPTNHQSGESSYQGHLKKDSNQLVKWLLIQASWVHRREDTKSDVSKLAKRVSRRRGKQKGHAAGAHKLLKIVYAVLKRGTPYTPDRPSPGSATAES

SEQ ID NO: 312137 - protein, 338 aa, unidentified
MKLYAGVDLHSNNNYLGIMDKKEKKVYKKKLPNDLSEVLKALNPYRKDLEGVVVESTFNWYWLVDGLMENGYRVHLANPSAIKQYEGLKHSDDARDAFHLAHLLKLGILPEGYIYPKEERPVRDLLRKRLQLVHHKTAHILSFKNLVSRNLGFQMPSNDIKKLSEEDVEGMFKEEHLVMAGQANIATMHFLKERITEIEKAVLKRAKLKEEYHNLLTVPGIGKILALTIMLETGEITRFPEVGNYVSYCRCVGSTRISNGKSKGEGNRKNGNKYLSWAYVEAANYAIRLYPYVRRYYQKKTAKTNNIVAIKAISHKLARASYYVVKDQEVFNPKKAFG

SEQ ID NO: 312138 - protein, 353 aa, unidentified
MTVYVAVDFHAREQTISYCDLADGEIHRRKLRHQHDDVRGFYQQFTGEVMVGLEASGYSAWFEQMLAELGHTVWLGNPAEIRRKAPRRQKNDRRDADLMLDLMLKEDFPRVYQFSEESRTVLRQLRYRHKLVKVRTIAKNSLQAIGINAGLPLKRKLLTQQGLEQLQGLPLSPVLSQQRDEWLQLIALMNRQIATVEEALQQRAQDDAEVTLLQTHPGIGLLTALALRYTLLPVARFSTTRRVTAYVGLDCMEEQSSERRRMGSISKAGSKLLRFLLNEAGQTAARCDPELQRFYQRLLHRRDKPKAKVAVARKLLVRSFIMLRDQIDYAEFSRRGVAARVARETHSPKMTDL

SEQ ID NO: 312139 - protein, 346 aa, unidentified
MIYIGLDVHAKQSYFCVMDQAGQCLAHRSMPTTSEAFKDLIKRYRTMGEVKTALEAANISWWIANVLTEAGADVHLVNVYQLKLIAHSKKKTDRHDSKILADLLRCDALPPRVYVPTEETFRLRRLLSLRKSFVRLKAQAIVRAKSFMRQQGETVGGRDFCSIGSWNRIAEENPELDFYLSPLQKLYQCGEEQVRNLEGQTQEIITDEDPTLQLLETIPGIGLYTGRIILAAVGDIGRFSRSDRLVSYAGFNPSERSSGEVEQRGAISKQGRSELREALVQGAWAVLRSSRPETALLKKFFYRIMHKRCSQVAITALARKLLVIAYQVMKSGKPFDTSLYLEKKAA

SEQ ID NO: 312140 - protein, 409 aa, unidentified
MATMIAGIDVHKRLLVVAVADARGEKLKFVGRRFGTGAGDLQQLAAWLSQQQVEAVVMESTAQYWKPVWLALEPQFQLHLAQAFSNRAPKGRKTDFRDSQRLVRRFIAGELILSFVPEPAQRQMRTLTRRRVQLSRDRVRLQSQLECLLEEARVKLSSVLSDLLGASGLRILRALAAGEKDPHALAELGDARLQCSREQLADAVSIPLDSTHQQLLGLYLEQFALLDTHLETLSVLAAETMRDSQQAIGRLAEIPGIQVIAAQQIVAEVGPQAASFPTAEQFSSWVGTCPGHEESAGENHNARCPKGNRYMRRVLCQAAQAAVKTKNSRFQILFYRLVGRLGYAKAIWAVARHLSVVVWKILHEAVRYVEMGQATTPQAAKRRAQRMVRKLRQLGYTVQISALSPEVTM

SEQ ID NO: 312141 - protein, 398 aa, unidentified
MFVGWDWASTTHDVTVIDHAGRIVDRWAPEHTETGLDQTLARLASHGPPEQLPVAIERPSGLVVDRLLAAGHPVIPIHPNAFHATRPRWGAAGAKSDPGDSYKLADYLRTDGHRLRRLRPLDAATRQLQALARVRDDHVAAKTAASNQLGALLEAHWPGAKQVFSRLGSQIALAFLNAYPTPESAARLGEARLAAFCRRHSYRGGRSPAELLQRLRAAPTAPVGLAPEVLNELVGAQVRLLRTLLGTIADLDRALGAGLLGHAKTELLAPLPRIGEVNLAQVVAEVGPILDRAGDVEHASAECGATPVTRASGKTKAVAFRWAANTKARQALTTFASNSRHSSPWAAALYADARRRGKHHPHAVRILARAWLRVIWACWHTNTVYDPAKHGAEKRLAA

SEQ ID NO: 312142 - protein, 317 aa, unidentified
MSDETCWVGIDVCKASLDVFISVGEHSVQVANDEQGIGQLLALLQRACPKLIALEATGALERVVVGELLAAQLPVAVLNPRQVRRFAEATGHLAKTDRIDARVLAHFAAAIEPPVRKLPDAEAQAFADLLARRRQLVGMLGMENNRLKQARNGAVRKDIKAHIAWLNKRLSATETGLREAVQASPAWQAKADLLGTVKGVGEVTTLTLIASLPELGSLDRKQIAALVGVAPLNRDSGTQRGRRCVWGGRALVRQVLYMATLSGVRHNPVLKAFYTRLRQAGKKPKVALVACMRKLLTILNAMLRDQTPWNESHAQTA

SEQ ID NO: 312143 - protein, 346 aa, unidentified
MEHYAGIDVSLELSSVCVVDAQGKIVKEAKVASEPEAVVAFFEALGFAVKRIGLEAGPLSQWLHAGLKEAGFETVLLETRHVKAALSAMTVKTDRKDARGLAQLLRMGWFQQVHAKSMASQEVRALLVGRKQLLGRLIDVELSIRGILRGFGLKVGAVTRKGFEARIRELVTGQATLERVAGAMLLARAALKMEYEKLHKAVLAIVRDDAVCRRLMTVPSVGPLVAITYKSAMDDPSRIAKSKAAGALFGLTPKKYQSGEKDVTGGITRTGDEMVRTALYEAANVLLSRIARFSKLKCWGMDVAKRRGSKRAKVALARKLAVILHRMWVDGTTYRWAAAEPIAAQA

SEQ ID NO: 312144 - protein, 344 aa, unidentified
MYFIGVDHHKQVSVMTVLDEDGTELKRGRVPNLRKYVELFLEGFQPFTAVLETGYSSYVMADLLRELGGEVKMANPLQVKAIAHARIKTDKRDSRTLAQLLRADLIPEVYQRGEWNRRAQRVIRMRAYWVKKQTEIRNKIWVLLAQQKEEIRMEVERREGKLFSLKGQEFVEQLALEGPDKLILDDLLQGHREVQAHVKMTDGLVTALYGELEEAARIDTIPGFATTLSVLVAVEIADIKRFARPADLHSYAGVIPSTYSSGNRTTHGPITKQGSVWLRWAVVEAVFPATRKDLALGALYKRLTRRKGPNVAKIVVARRLLTIIYRMLTERRDYIPGMMKTSAA

SEQ ID NO: 312145 - protein, 317 aa, unidentified
MKKWTFSNNKAGFELLDLSFRQLNQDCLIALEDTGHYAFNLLNFLHEQGYKVYTYTPLLIKEFAKSLSLRKTKTDKKDAHGIALKLLSDPNREQFQHDNRQIELKILARHIHRLKKKQSDWKVQYTRCLDIIFPELDKIVGKHSEYTYQLLTCYPNPQKRLEAGFDKLIEIKRLTASKIQDILSVAPRSIGTTSPAREFEIIEIIKHYKRLIDKAKKCVNDLMAEFNSVITTVTGIENRLGAVILAEIRNIHAFDNPAQLQAFAGLDSSIYQSGQIDLAGRMIKRGSPHLRWALIQAAKACARFSPAFKAYLKTKLE

SEQ ID NO: 312146 - protein, 487 aa, unidentified
MAKRRMSTFERLRVGQMNRSQRRELGRRVAASDPGLAIVHANAGGIDVGNESHFVAVPPDRDTNPVREFGCWTAALNEMAEWLKSCRIDTVAMQATGVYWIALYDVLEQHGIRVVLVNAQHTKNVPGRKTDVQECQWLMKLHTYGLVRDSFRLQQDMEYVRTIWRVRDRHVKEAGREVQHMQKALTKMNVQLANVISDVSGVSGQAIITAVLKGERDPYKLADLADYRVKASREEVARSLEGNWRADVLFELQQAVDSYHFAHRQMQQCDEKLTLYLVSLPTRMLEIPVPSKGAPETPATPAQKRKKAKKPRDNEPRMDMKGELQRICGVDLTSIDGINVMTAFTVLSEVGTDMTRFKDEDHFSSWMGLAPSKDISSGKIVGRGKKKVKNRVAVVLRTAATTLLESDTHLGARYRHLRRQLPTHKAAVKAMARYLAVLIYRLLTKGEAWVDRGAKRFEQRRMERELGSLQTKAKAKGFTLVPLVQAP

SEQ ID NO: 312147 - protein, 416 aa, unidentified
MKKHNNSGKKSELTSKRAKSRGPVQRDTNEMLAELVGKLKEKLDRKKVAARSAGEEHPGGELRPNLDRLTVGVDLGDQGSHYCILGLEGETLAEGQLRTTQEDLATFFQGLNAARVVVEVGTHSAWVQEVISGCGHEVLVANPRLMDGSKRRKRKNDRIDAHKLARLGRVDPESLHPIQHRSREVRQDLVMLRARDALVAARTELINTSRGLVKSMGTRLPKCSSRSFAQKGEETVPVEIREALLPLVRLAAALSADIKEYDKKIETLGREKYGHTALLRQVKGVGPITALAYVLTLENAQRFVKSRDVGPYLGLVPKQEDSGESQPQLGISKAGDTMVRKLLVGSAQYILGPFGPDTDLRRYGLRLCERGGKNAKKRAAVAVARKLAVLLHRLWVSGEVYEPLHYAMSAPIAAAA

SEQ ID NO: 312148 - protein, 394 aa, unidentified
MPKLFVGVDVAKDTSSAQGIDRDGKGLFSLTFAMDSEGFMQLWKAITAHSKDLSEVLAAVESTACYHINLYSFLTAKGVSTVVINPLLIASFAKLSLRKTKTDKKDAMTIAQFLLVHRDTISQLSLSQDMQDFRDIARERESVGNMLNAHKVEIKRLLQSTFPELERIANLWTRVMLEFIAVFPSARLVKLARPKDIRKVLQRKGVGTRLTYTAEDLIQAAKQSVATISPAKELILQGKVRTLQHLQERCEELTKILTEYCKASMLEDFEIITSIDGINKGTATTFLAEIGCINNYASYKKLIAFAGIDPTVYQSGKFEGASRISKRGNRHLRRVIWTMTTCVIQHNEIFKAYFVKKRSEGQAFKKAVLATAHKLIRVIFAMLIQRTMFKEVCA

SEQ ID NO: 312149 - protein, 367 aa, unidentified
MKKVSTAAAKQSSNFSQQKLTIGLDLGDRSSWYCVLDEAGGVLLEQKLSTTPKAMKEVFGAMPRSRVALETGTHSPWVSRALSELGHEVIVAHARNVRLIGESRRKDDRLDAQTLARLARIDPQLLCPVKHRSARAQADLTVIRARAGLVRARTALVNTARGLAKSYGERLRGCNVRNMNPEKADGLSPELQTALQPLLAGIELLSEQIREYNERIERLAQESYPQVQLLKQVKGVGTLIALTFVLTLEDAHRFRKSRDVGCYLGLQPGRRNSGQREPQMHISKEGDPYLRTLLVQGAQHILGPFGADSDLRRWGLKLAERGGRNGKKRAIIATARKLAVLLHRLWVSGEVYEPLHNSSRVAVPAAA

SEQ ID NO: 312150 - protein, 316 aa, unidentified
MPDKRETVVNVGIDVGKTELDVVIHERGLHFSTANDAAGVRYIIGRLSRYAVERIVVEATGRREYDFVLAAAEKGLPVVISQPIRVRRYAGAAGILAKTDKIDARVLAEYAAVMRPEARPLALGNIRRIKDMTARRRQLIEISTMEKNRLDVMPAFLAGDIRRHIRHIQSQIDKLDRQIAALVEEIDEWREKRDILLSVPGIGTQVVNTLLADLPELGMLSNKQIAALVGVAPFNRDSGAFRGKRRIRGGRSSVRTVLFMAMLTSIQHNTLIRNTYRRLLANGKHKKVALTACMRKMITILNSMLRDNTMWNENHA

SEQ ID NO: 312151 - protein, 349 aa, unidentified
MTIVGCDLHTRKQQVAVLHTDTGEVVEQELVHAGDAVERFYRTLPRPVTVGIESTGYALWFHELMQHLGHTLLVGEAAKIRAMVVRKTKTDRRDAQHLLDLLKHDRFPAVWIPDPATRDLRALVTHRMRLVRMRTMVKNGLHAIAMNRRLTLGPSLWSQRGLAQLQGLALAPHTTQRRDESLQLLTWLTARIAALDDRVAAAAQADPGARLLLTHPGVGPLTALTTVLVLGPVSRFPDSKHVVSYTGLAPAVHASADTCRLGQITKQGSPLLRFVLGQAGVIAAHAEVDLTRHYRTLLRRRGRPKAIVAIARKLLVRLYIMLRDQIDYEEFRRRGRTPRRQEVPPPALA

SEQ ID NO: 312152 - protein, 335 aa, unidentified
MEHVAIDLGGSQSQVCIRSSDGKVLVERRCPTRDLPEYLAKRPPSRVIVETCSEAFFIADAALTVGHQVRVVPATLVRALGVGQRGVKTDRRDAQVLSETSCRIDLPSVHIPSPVSRERKTRCGMRDSLLHSRTMLINSVRGWLRSTLRRPKSGTPNTFPQRVRALCGAELPSYVEPQLLMIDLLSQQIAKLDRELAAQAKADPLCRRLMTVPGVGWVTALRFSATVDEVGRFPDAHRVESYLGLVPGERSSSERQQRTGITKAGSPSLRATLVQAAWAAWRARRKDAMQCWADQVAQRRGKRVAVVALARKLAGILFAIWRDGTEYQAEAAMND

SEQ ID NO: 312153 - protein, 338 aa, unidentified
MAIVFVGIDLAKNVFAVHGVDESGKAVLVRPAVPRARLHELIASLPPCTVAMEACTGAHHWARLFAARGHSVRLIAPKFVTPYRMSGARGKTDAADAAAICEALQRPNMHFVPLKSEQQQSQLMVHRARQGFVQARTACINRIRGLLAEFGHVLPLKAETVRRQAAGLLEDLPGWANTVIGDLLSELHRLDERIGAYDQHIAQIAREDARARQLMQLNGIGTTTATAVVAMIGNGHEFRCGRQFAAWLGLTPGQYSSGGKTRLGRITKAGDSYLRSLLILGARSVLALAKSRSDTLSSWALALQRRRGYWKAVVAIAAKNARLAWAVLHRGEAFKMPA

SEQ ID NO: 312154 - protein, 349 aa, unidentified
MTIVAESYRFVVGVDTHAATNTLAVLDAGSGHELATATFPTSPPGVRRALAWIGRHTQGATLLVVEGIGSYGAGVTTAAARAGYLVVEPFPTPAGLRRGQGKSDRLDATRIAGSVRGTDTTRLRQPRCDEPIRQALRVLLDSRDTTTTIRTRHINQLTALLRSIDLGIDARHPLTASQIRVIAAWRTPANADPAGVIRTEATRLARHIVAAEQELADNLNQLRTQIAAHPARFLLGLKGVGPVTAAAIIVAWSHPGRVRSDAAFASLAGVAPIPASSGNTIRYRLNRGGDRRLNRAITTIVRVRLAHDPRTRAYRDTHIAQGKTPREIERVLKRYIARDIYRQLTAHMI

SEQ ID NO: 312155 - protein, 312 aa, unidentified
MTKQVVVGIDVGKEKLDVGRNGQKRVRVWDNDEAGRAELCEGVVAQEAKLAVVEASGGYEAAVVSELVERGQAVAVVNPTRVRAFARAEGILAKTDKIDAGVIARFGATMQPAPQARRDHNQLELNQWITRRRQLVLMVTAEKNRVQTALGDIQADIARHIAWMQTQIEALEQRINQAIAANPTWRETARRIETVPGVGAITASTLVADLPELGQLNRQKIAALVGVAPFNHDSGKRRGKRRIFGGRASVRSVLYMATLSAIRHNPVIKSFYDRLLAKGKVKKVALTACMRKLLVILNAMVKSGQDWSPTVS

SEQ ID NO: 312156 - protein, 344 aa, unidentified
MTIVETRAITGGVDTHLDTHVAAALDSIGGVLGVESFLATPDGYAQLFEWMSGFGPVTRVGVEGTGAYGAGLARFLRRADVEVIEVDRPNRQARRAQGKSDPADAVEAARAALSGRAHGLGKSADGAAEAMRVLLVAKRSARETRIKALNQIRHLSFTAPDELRERFRAIPRSSLASHGAALRPRLGDPVLHATKVSMSTLGRRVLALEDDDARMDALLAELVTATAPSLLELYGVGIDTAAILLVTAGDNPERIRSESAWAHLCGVAPVPASSGKVTRYRLNRGGNRQANHALWRIVLTRMSGHAHTRNYVARRLDEGRSKPEIIRVLKRYVAREVYRHLPRG

SEQ ID NO: 312157 - protein, 350 aa, unidentified
MVVVGADVHKHTHTFVAVDEVGRKLGEKTVKALTSGHAEAVMWARERFGAQVVWAIEDCRHLSARLERDLLTAGQQVVRVPPKLMAQARASARTRGKSDPIDALAVARGFLREPDLPVASHDKVSRELKLLVDRREVLVAQRTAMINRLRWRVHELDPERAPGPASLDRGKHRHLLGAWLATVPGLVAELARDELADIARLTEAINALAKRIGSRVRTVAPALLAMPGCAELTAAKLVGETAGVTRFKSEAAFARHAGVAPVPVWSGNTAGRVRMTRSGNRQLNAALHRIAITQIRLEGLGQTYYRHRLAAGDSNPEALRCLKRRLARIIFGHLHTDHQHRTQPCQTAAA

SEQ ID NO: 312158 - protein, 355 aa, unidentified
MKYYTTTTEFNCGIDLHARQMYVCLMDRDGKKLVHTNIKNNDFDYFLKLVAPYKHDLTVCAECMFGWYWLADACQAAGLPFVLAHALYLKAIHGGKNKNDRIDSEKIAHLLRSNLIPPAYVYPAAKRPLRALLRQRLYFVWRRGELLARIQSHQLAHNRIPQKQTRSNREPWEQRLLAAEDHPLRQLALEHDLAMIKHFDHLIAQLEEELQRQAKKSAAREYALLQTVPGIGENLGMTILCEIGDINRFPTVKNFLSYSRLVKGTVASAGKIKGLRGAKLGNPYLRWAFGEAAVIAKRDHAVIGPLAQRLEARMHGNKFKANTVVAIKLARAVYFMLKGKTVFDPDRLVAALSRN

SEQ ID NO: 312159 - protein, 423 aa, unidentified
MDVLYERVAGLDVHKDTVVSCVRMVAEGKTKRECRTFTTTTEQLVELRAWLSECRCTQVAMEATGVYWMPVFRLLGEGDFELIVANAAHIKNVPGRKSDMNDATWIADLLACGLIRASFVPGEEIQELRSLTRTRKQLVREQTRHGQRIEKTLAEANIKLGSVISDIMGASGRRMIEAMIAGVRQPKQLAELAGKQVKATPKELYDALHGRLTDHHRFLLKLHLQQWDGLDATIRNIDLEIDQRIAGMDRKAGAGKVPFRTLIELVSTVPGISAVSAPAILSEIGCDMSRFPTAGHLISWSGLCPGQNESAGKRKPSRLRKGAPWLKTMLVQCAWAAKRKKDSYYRAQFFRLQSRRGPQKAICAVAASILTAVYHILKGGTEHHDLGAGYFDRRPTEVKANRLVARLKKLGFIVQLQPTAEVA

SEQ ID NO: 312160 - protein, 369 aa, unidentified
MVEHTLFLGLDVHKKTISVATVEGTAGAEVRFYGTIENTPDALRKLGKKLSQGGRQLYACYEAGPCGYNVQRHLTRLGHRCDVVAPSLIPRKAGERVKTDRRDAMMLAQTLRAGQLTEVWVPDQAHEAMRDLVRLRSQAMRDLRKTRQHLLSFLLRHERISPYGHWTKMHRRWLGELRFAHPAQHLALEEMLQRIQRAEELCDRLKQAIGELVPQWSLAPVVQALQALRGVSLITAAVLVAEIGNFQRFDSPRQLMAYLGLNPSEHSSGATVRRGAITKTGNGLARTSLVEAAWTYRFPARVTQIIRNRMKELPEPIRAVAWKAQVRLSARYRSLIARGKSAPTAIVAVARELVGFIWAIARMVEPKFA

SEQ ID NO: 312161 - protein, 429 aa, unidentified
MDVEDRIRVEAFRQLKKEIRGSEEHLIVGIDVGKDKHNAFFGTANGKTLLKRLVFENNIEGFNKLLTFLQAVKVKHGLNKEVFALEPTANYHKPLGEYLINSGLNVALVSGKAVKNNREMLDGRWDKNDTKDPANIADLISQGKFMYYDYPVLPLRDLRNLLSLKRRLKKQEHGIKVRIRNHLLAQYFPELDRHYGKCESLGLSIVRWSLAPCVIASLGYDEFAQLVAPGRRITTGQRERLEEIWQEAAKSIGCQVGVALEFEAKMMVEGLKRLRDAIGITDAKIREVCLHFPEYSYLQTIPGFGPDVSSKVLGAIGNPFRFDTEKQILKMAGWDLSAKRSGKKSETVTPVISKKGKADLRYALYQAAFVASSKNRYFVTYYTNKLRGREREKGIKTKMRVKLAAKLLVIAWSLMKKEEPFNPDYLNID

SEQ ID NO: 312162 - protein, 361 aa, unidentified
MLYSTSIGLDVHARSISAAAFVFETGEVVQRTFGYDPGAVAAWAASLPQPAGCLYESGPTGFDLQRRLVALGLPCHVGAVSKMVRPSGDRVKTDRRDALFLSRLLAVGEFVECAPPTPAMEAARDLSRAREDAREALMRARHQLSKFLLRKGHVWPKGRSTWTRAHREWLRSIELDDPCERLVLEEYVAQVRECEERRDRLDSAIAERSGADDLAGVTSRLRALRGVSTVTAFGIAVEIGDFSRFASPRALMSYVGLVPSESSSGETTSRGGITKTGNSHVRRLLVEAAWHHARPLSPASETDVASSAGLPAEAAGIAARANRRLHRRYLDLRAKGKGANVTNVAVARELVGFCWALALCG

SEQ ID NO: 312163 - protein, 425 aa, unidentified
MNYKQNEKINQVKESTLVVGIDIGSTTQYARAFDWRGIELGKVFPFSNSREGFESFKAWMQHLQDKYKKLDAIVGIEPTGHYWFDLGAYLEDEGILLVMVNPYAVKQTKELDDNSQSKNDRKDPKVIAKLVTEGRYSAPYTPDGVYADLRIMVANRKRLIREMTQIKNRFARWFAIYFPEYTDVFGDYEAQSSMPLLKNVCTPEAIVELGAKKINQIWRDAKLRAVGMKRATTLCETAKRSIGLKKGSSAAQYEMKLLLEDYEYKKAQLDAVMEEIEKLCRKIPESEQMLAIKGIGVITVAGFLAEVGDVRRFESPGQIQKLAGLSLRENSSGKHKGQTTISKRGRSKLRAVLFNAAIPLIAKNPEFKSLHVYYPTRATNPLKKKQSVIAISCKLIRVFYAILANGVTYDAQKMLSDIHRQPQAA

SEQ ID NO: 312164 - protein, 412 aa, unidentified
MRRVIGIDTHRTFGEVVFWEQGRLRRAGRVDMTRTALEGFGKSLLASDEVVIEATGNCMAVSRVLSPFVKRVVIANPLQVKAIAHAHVKTDKIDAGTLANLYAAGYLPEVWMPDAVTERNRRLNARRYQLVRHRTRVKNEVHAILYAHLIPKCPHADLFGRLGRAWLARQPLPDDERAAIERHIRELDRLNDDLEVLDREIAEGALDDGAINRLLTITGVNLTVAAGLIAAIGNIARFKSPQKLVSYFGLNPRVRQSGLGPAHHGRISKVGRSHARAMLVEAAWAAAKTPGPLHAFFVRIRAKRGHQVAAVAVARKLAVLVWHMLTKETDYLWARPSLVAHKMRGMELQAGKPQKKGNSRGPAYAYNVKELRNREMRVAEQAQKSYEHFIEAWRPRPPKGQARERLNPARKE

SEQ ID NO: 312165 - protein, 484 aa, unidentified
MVRELAILSLVKHPLSRSEESRTATAPLSGLPILVWEACVMKQKKPIKRKPMRLPKHLVHLNAYAAGIDIGSKSHFVAVPEGVDTETVREFSTFTDDLERLADWLISCGISTVAMESTGVYWIPVFEILESRGLEVRLVNARHVKNVPGRKTDVLDCQWLQQLHTYGLLRGAFRPADQVCALRAYVRQRATLVRVSASHTQHMQKALTQMNLQLHNVVTDITGVTGMRIIKAILAGERNPKVLAAFRDKRCKNDVETIARSLRGNFRPEHLFSLQQAVDLHEFYQTKISECDRQILEQLKLFDAAESDKNPPDGKPPASLEEALLRMSGVDLASIDGIDTTTALKIIAEIGVDMSRWKTDKHFASWLGLCPGAKISGGKVISSATKRIANRAALALRMAAFSLIRSKSALGAYIRRQRSRLGASKAITATAHKLARLVYSMLKNGTSYADLGQDYYEERYRSRVVQNLKRKAQQLGFELVTIQG

SEQ ID NO: 312166 - protein, 387 aa, unidentified
MSQTVAALIPAAVDYERTLVLAIEVSNKSWVLAAQVPGLPHTKAKRTINPEAEALLAAIAGYRARAAAMGRSIERVIAVYEAGWSGFWLARWLMRHGVEVYVVQPSSVPVDRRMRRAKSDGIDSELLLRTLLAWLRGEPRVCSMVPVPDEADEDARRCVRERTELISERVGLTNRIGAVLATLGVNDYNPLLRNRGHRLAELRTGLGEPLPANAHAKIKRLLARLELVLTQIAELERERDAVVETEASDKASKMIQQLTALRGIGVQSATVLVREAFVRRFANGKALGSYAGLASSPYSSGGIDREQGIGKAGNRRVRTVMVELAWLWTRYQPGAAQVCWFRERVGSTGRRVRKIMVVALARKLLIALWRFVIDGVVPEGAVLKPAA

SEQ ID NO: 312167 - protein, 406 aa, unidentified
MRVVYKHCCGLDVHKKNVTACVLTPKGKEIRTFGTMTDDLMQMADWIKSHRCTHVAMESTGVLWKPVYNILELEELQVMVVNAQHIKGVPGRKTDVKDAEWIANLLRHGLLQGSFIPNREQRELRELVRYRRSLIEERSREVSRIQKVLEGANIKLSSVATDTLGVSGRAMIEAMIQGIEDPKELSELAKRRLKTKKDDLQRALQGLIGPHQKLMLDAQLKHIDFLDEQISKLDEEVKLRMLPFEKDLERLDTIPGVGRRNAEQILAEIGTDVKNQFPSAAHLCSWAGMAPGNNESAGKRKSGRTRKGNKKLRHALVEAARAAARTKNTYLSAQYHRIAARRGANRAAVAVGHTILTIAYHLLTREQDYVEPGADFYDQRRKDIVIKQAIKRLESLGVKVSIEQTA

SEQ ID NO: 312168 - protein, 348 aa, unidentified
MEITTVGIDVAKSVFQVHGVDRHGKVMLRRQLRRAQVTLFFGNLKPCLIGMEACASSHFWARKLEALGHTVRLMAPQFVKAYRKNDKNDGNDAEAICEAVQRPSMRFVPVKSPQQQAELAVHRIRRRLMGERTALINQLRGLLAEFGVVLAQGANQVRSKLPELLENAAESLPPLAVELFRDLYEELRALESRIAEHDRRIERLYRGNVVARKLGEVEGIGALTATAFTATVAHAAQFKNGRQCAAWLGLTPRQDSTGGKNKLLGITKRGDVYLRTLLVHGARSIMRHSASKDDAKSRWVEQLRRRRGDNVAACALAAKHARILWALMVKEQRSGPAQQSVHADARQP

SEQ ID NO: 312169 - protein, 351 aa, unidentified
MNVTKYIGMDVHRAMTVSAVLSATGKVVAEAIIETKGSVILDFIQSQRGTLWVTFEEGTQAAWLYDLIQPHVAKVVVCDPRKISTQGNKADRPDAKRLAELLRTNALTAVYHGERSTRALKELARSYSAIVGDSTRIKNRLKAVFRARGIDNSGAGIYTTEERECWTSKLEAGAVRLRVQRLWRELDTLDVLRAEAEKDMVVEARKHPSTRILQTVPGIGPVRAALILAFALTPHRFRSKRQFWGYSGLAVVSRITAEYELVKGRIRRTKKRPALRGLNPNCNRVLKDVFKGAAGTAANGPWRAYFESKVASGNKPELVLLTIARKIAAITLALWKKGERYDETKLTMHAV

SEQ ID NO: 312170 - protein, 419 aa, unidentified
MADETVSWFAGVDWGSERHQVCLLDAAGQVVGERAFRHGGAGLAALCDWLVSVAGEPERVAVAIEVPHGPVVDALLDRGFAVHAINPKQLERLRDRVSLAGAKDDRRDARVAAGGLRTDPHLFRPVEAGDPAVIALREWSRLAEELQHERVRLGNRIRQQLWRYYPQLLAVSDDVTAEWVLDLWTLAPTPAKAARLRETTLARLLQEHRIRRLDAERALGILRQPAIAVAEGVTEAAVLHLRSLVARLRLANREFYQAERKLDELCTNLRDKTSTPKSGGPCDAAVLSSLPGIGPVTLAILLTEAAGPIKRRDYAALRTLSGVAPGTKRSGKSCLVTMRYAAQIRLRNAVFHWARVAVLNDPTCGRRYAALRARGHSYGRALRGVADRLLGVACVLLQRQALFDPAHDKRAASQPRATS

SEQ ID NO: 312171 - protein, 438 aa, unidentified
MLPTLNPHAGGIDAGSTQFFVAVPDGPVTSFESHTADLYRLRDHLQAHGVTTVAMEATGVYWLCLFEILEAAGIEVCLVNGAHVKHLPGRKSDVQDCQWLQELHAHGLLRKSFVPPENIRALRSYTRLRDDHIRTAAMYVQLMQKALDQLNVKLHTVISQLHGASGLAVVRAILQGERDPAKLASLCDARILKSKRQAVERSLHGRWKAEHLFALKQALAGWEFCEAQVKECDAQIAGHLATLTGDLPPPDRSDPPAKSGRHHVPDVPRLHAHLLALSGGNDATQLPGFTTTNWLKLLGEVGTDLQRWPNEKAFCAWLSLSPGKHQSGTKQRRSRHRPKTTAGQIFRLAAQSVAKSSHLALGGFYRRLKARTSPAIAIVATARKLAVLFYRAMRHGLAYVERGLDAYEQSYRQRQRRYLQKCAAELGLCLAPLPAQTE

SEQ ID NO: 312172 - protein, 368 aa, unidentified
MSSVASPEGLIHLGMDTSKNTIVVATLLPGEESPVTDRIFNEEEAIRRLVGRFPDRSVLRAWYEAGPGGYELYRLLASMGVACQVVAPSLIPKGGSDRVKTDKRDSRRLARLGRAGELTPVRVPSPAEEAVRDLARARDAVLADRKRARQRLTAVLMRHGRIWRGASYWTAAHRSWIAAQRFGEPALASAIGHYRAALEVREAELAALEAELLPWAAREPLAGPVARLGCYRGIGELGGLTLAAEVVDWRRFPAARAFMSYTGLVPAEYSSGEKTRRGHITKAGSEPVRTALTEAACAYRHAPAIGAGLRRRQAGAAPETLARSWKAQRRLHARYVHLVHAGGKAAPEAVVAVARELAGFVWAEMTAG

SEQ ID NO: 312173 - protein, 355 aa, unidentified
MEEISVIGIDLAKSVFQLEALSSDGAVVWKRRLRRAAFMRFMEKQAPRCLVGFEACGGAHYWGRFLGDLGFQVKMMAPKAVKAYREGPHKNDGRDAHAAAEAASRAQVRAVRVKSKAAQAVQALVRVRLLQIKQMVQTGNQLRGILTEFGIVMPRGHHRLQQAIIALGEDPRYQRLPPELREAIVGLREQLAEQVERVRLATAALAQATRADPACELLRSVPGLGPINAAGLSVALEAPQSHRNARAFAASLRLVPRQWQSADKQQLRGIAKQGASDIRRNLVLAGQSLLTMIERRQEPPQDRLLIWAQRLIRRKQRNVAAVAVAAKLARIAWAVLAKGEAYQTRQFTAREPAAA

SEQ ID NO: 312174 - protein, 352 aa, unidentified
MVIVIGADVHKATHTFVAVDEVGRKLGEKTVKATTAGHGVVSRWARAQFGDELRWGIEDCRHLSARLERDLLAAGQEVVRVPPKLMAQARSSARERGKSDPIDALAVARAVLREPDLPAAVHDETTRELRLLVDRREDLIGERTRQINRLRWHLHELDPEFNVPVKSLRTRKQRHRVQAWLADRSGLVAEIARDVLSDIEAGSVKIDQFEKRITSLVEDRHPHLLAIPGCGPLAAAKIVGETANVNRFRSEACFAMNAGVAPLPVWSGNTRGRVRMSRTGNRQLNTAIHRIAVTQIRLDGLGRAYYRKRLDHGDSTVEALRCLKRRLCRVVFNSLRADQHCAYNPASLPLAA

SEQ ID NO: 312175 - protein, 357 aa, unidentified
MLSSNLKYIGLDVHKEAISIAVLNGAGKLVMESIVETKSSTLLDFLHGLRGELHVTLEEGTWAAWLYDVLKPHVREIVVCNPRRNALLKEGSKSDKIDARKLAELLRAGLLRAVYHGENELRTLRELARSYLTVSKDLKRVKNRLKALYRSWGISCVGKQVYTPRHREQWLSKIAQVGLRRRAELLYQQLDGLQVLQHTVRAELLAESRKHKAVKILRQVPLVGPLRAALLLALMQTPHRFRSKRQLWTYSGLAVVTHDSAQHRYVDGQLQRSKKPQQIRGLNQNHNHAMKDIFKSTALSASCCAGPLQDFYARLLAKGMKPDMARLTLARKIAAITLTLWKKGGSFDAEHLKSQAA

SEQ ID NO: 312176 - protein, 346 aa, unidentified
MKVLIGVDPHKASIALAAIDEAVGELLERASFPQNSAGLRSLERWAKRFPERRWAVENAGGLGRHLAGRLAAAGEFVVDVPPKLSARVRVLSSGNARKNDGLDALATALAASRNECLAAVDPEAASEVLRLLSERREDLVAERTRALNRLHGLLRDLLPGGVAGTLSAHRAARILRGIRPQGAPARLRRRLASEVLRDVRMLDRKMADLNESIEAEVEASGTTLTEIFGVGPILAAKIIGTVGNVARFPTKAHFASYSGTAPVEASSGDVVRHRLSLAGNRSLNNVLHMIAVCQARSDARGGAYYCKKLAEGKSRKEALRCLKRRISDAVFRSLMADSQAPSRSAA

SEQ ID NO: 312177 - protein, 346 aa, unidentified
MEKLIRIGVDTSKSVFQLHGVNAAEQAVLKKKLRRKDLVTFLARLEPTVIGLEACGGSHYWARELAALGHTVKLIAPQLVKPYVKRGKNDAADAAAVCEAMSRPEMRFVPAKSPDQQAALMLAGVRDRLIRNRTQLSNAIRGYAAEFGLIAARGLEKIEPLLARAAADETLPALAREVFASQGREYARLQAQLKEIEAKLMAWHRGNECSRHLAEIPGVGPIGATMLVMKTPDPKAFRSGRYFAAWIGLTAKDHSTGGKQRLGAITRAGDPALRSVLVVGAMAVVRQALSGKGHPSPWLSELLKRKPRKLAAVAVANKMARIAWKLMLTGEHYDARRIASAMPTAA

SEQ ID NO: 312178 - protein, 411 aa, unidentified
MRIVYQRCCALDVHKNSITACVLVWDGQEAVEERKKDFGTYKKELERLRFWLIACKVTLVAMESAGVYWKPVWHVLERQRQFKLKLVNAQHFHGVDGQKSDQIDAAWLGELLQCGLLKGSFVPPQWQRELRDLTRLRVSLLQDQNRIQNRLDKVLEDANLKLGSVASDTLGASGRKIVQAVIAGDKDPAWMADYAKGTLRAKRKQLEQALHGFVTDHHRTLLAMLLRQFDALESDIEYLEAEIRRRLAPHQDVVNRLAEIPGFGEVSGWTVIAELGLDMNVFRTPERAASWSGLCPGNRKSAGKRGHGRTRKGNRWIRRGLTQTALAVSHSKESYLRSFYWRIASKRGAKKARIATAHKQLKIAFLIIRDGVRYKDLGSNYFDRRNAERTKRRLVERLEGLGLKVTLEPAA

SEQ ID NO: 312179 - protein, 396 aa, unidentified
MMKHILSFDIAKGKSVYCFIDELRNTIIDATLIEHNKNEFDNLFKLVKNYPNLIVIMESTSVYHLPVENYFRSKGIDTIVINPKLVKQFKDTLNKSKTDKLDCFKIARCYLGTIDNFYYKNDEYFIYNPLARQYWSLIEGQTRLKNRYKQLIEIVFPEFSLIFNNLYDDLALNFIHDFPHPVLFANRRIDYLMNYLKEKNATTQAFRFKNKVLKMKELASNSLCFVSFDSLQVQNLVQIIEMIQYHKSEINKIKNQLINEMKYKKLFKIINSIPGFGEFYTALFLAEVGDITRFDNKYQFISFIGIDSVTSQSGISAYHGPISKTGCKFGRTILFNVVTTLIQISAHSDKTNPIYLFFRKKQSEGKRHYKCIIACETKLCKTIYKLCSSDCLYKNK

SEQ ID NO: 312180 - protein, 405 aa, unidentified
MMAVMIGVDPHKGSHTAVAINAGEAPLGRVRVLACPDQAGRLLAWAQGWPERTWAVEGATGLGRLLAQQLVAAGERVLDIQPKLAARVRVLEAGNTSKNDPNDALSVAVAALRSRACREVAAEDHAAVLRMRSRRHQDLGQARNRLACRLHAVLCDLVPGGLPKEITANQAERLLERAKPSGAVGRARRELAAELLADLRHLDAQLAESKKKLAAVVRASGTSVTGLFGVGPVVAAITAGDAGPVTRFPSRDHFAAWNGTAPVEVSSGGKKIYRLSRRGNRRVNSAIHIAAVTQIRYRHSPARAYYDKKIAEGKTPKEALRCLKRRISDAIYARLVADARKAAAALEDPGGQPGNDSDSSVAGSHPERRLFGQATPGPKHSLRPAVQARPAAAAAPPTRKLRQAT

SEQ ID NO: 312181 - protein, 421 aa, unidentified
MLNENLIERGKYVNREILVVGVDIGKYTHVAVGTSLEGGFTKSFSIRNNRRSYENFERIMEDWKERFNCKYIVIGFESTGHYWKPLVYYLKDRGYMLLEVSPSNTKKSKEMMDNSPLKSDPKDARVIADLIKQGKILTPVFPEGRILNLRGFIHTRENFIKERTSILNRLEKIMDVAFPERKEIIKKVGNKTSLFLLKEAPFPADILKKELRWLSKSMWKKSRGRYNELNAKRLYNLAKETVGLKQGMEGFLYELNALLVRLKEINKKIEEVESIIESYLEDTEEARYLLSIKGVGPNIAAAIISESGGLSKYRRAESVIKIAGLNLYERSSGKSKGEKHITKRGRSLMRQKLYFAALQQTHPGMPLYSYYRRLVEENGLEETKAIIATARKLLRIMFALVRDKNEYKWNYREIELQKEVA

SEQ ID NO: 312182 - protein, 413 aa, unidentified
MKTCGLDVHKDMIFCAIYDGKDSEVKKYDTFTPDLEEMCDHIKSQGVETVAMESTGIYINAIRTVLRQRGMRAVVVNPYLIKQMPGRKSDVKDSVWIATLMYNGMLNDSFIPDGVLAQLRVYTRDYRRSVQRRDCTLTLIDQLLVGMGIRLSSCLSKITTKSFRRVAEAVAEGETRPEELEKKVHGCLRRKKDGTLRKALTGCCEAKDTWRLSRKMEELRLYEGQIEDALKHMEELADANYREEVALLCTIPGVSRISAICVIAEIGTDMSQFGSSARLSGWAGLRPRNDESAGKYKSTAITKGDKHLKAMLVQCAWGAVRAKNSRFAAVFSRLSSRKSTKKAIIAVARKLLSTIHAMLKNREKYCPQKTGRTMTASQFEKLLKLRAKQYNKLRLQASQAGVSAEKLTEISQS

SEQ ID NO: 312183 - protein, 355 aa, unidentified
MDSEKYIGLDVHQATIVVAVMDSTGKLVMESILETEAATILQFFAGLRGTLSVTFEEGTWSVWLYDLLNPHVDKLVVCNPRKNALLKDGNKSDRIDARKLAELLRGNQLKPVYHGETGVRMLRELSRSYLTIVKDLSRVMNRLKAVYRSWAIPCAGRDVYYTRNRAQWLAKIREEGVRRRAERLYEQLDMLRHLRQAARRELLAEARKHAITAKLRQVPYLGPIRSALAVALIQTPHRFRTKRQLWAYSGLALETRISAEYRLVEGQVRRSKKLLSIRGLNKDHNHDLKGLFKGAATMASVRPGPFQDFYQAALAKGIKPTMARLTLARKIAAITLTLWKKGENFDAEKLKSQAA

SEQ ID NO: 312184 - protein, 364 aa, unidentified
MTDNITWVGFDDAAKKINVAVFVGNDANPFEEFVAENDPKGHTRLVRKLKTLPGNVRCVYEAGVNGYHLYRVLSKARISCDIAAPSLTPRRAGNRVKTDRRDAKMLAKLYRSGELTSITIPGPDQESLRDLVRAREDEMEDQQRCRHRLSRFLLRRGIKYGAGKAWSKAHEKWLKDVRLDDSNAQAVLDDYRTALLETTARMKGLEEKIREAAKAPQYQKLIDCLMGLRGVKELTAMTILAEAIDLKRFTHPRGLMAAIGLVPSEHSTGERECRGGITKTGNSHLRRVLVESAWNYRHKPVPGKYMKKRRTGLPQEVKEIVQRAEKRLHKRYWHLVNKGKGSRTAAVAVARELAGFIWSIGQAA

SEQ ID NO: 312185 - protein, 418 aa, unidentified
MEDWPGGFTCLVKITFYGGAALFKLFVGIDVSKDSFSATGIDAKGAVSFSLSAAMDKGGFSELMKAISSNCKDLSAVMAAMESTGCYHINLFSFLSDKGVNAVVINPLLISNFAKLSLRKTKTDKKDSLTIAKFILVHKDSIEQFSISQDTKDFRDIARERESISHLIASTKNEIKRILQSIFPELESVCNVFTTTTLLFLKEFPSARFIRASKVKVIAEALERCGRGRRVSISADEIIKAAKNSIASNSLSKELILPQKISTLLHLMEQLDKLSGILSELCESIAIKEMEIITSIDGIGDATGAAFLAEVGDIKNFSSHKSLIAYAGVDPTVFQSGKFQGASRISKRGNRHLRRIIYLMTIGVIRCNAFFKSYFLKRKQDGLPFRKAVMATAHKLIRVIFAMLSHNVKFHVKEVNSL

SEQ ID NO: 312186 - protein, 338 aa, unidentified
MGLYCGIDLHAKSSYLAIIDEQRKRVFNRNVTNNRETILSLLAPYRTELVGIVVESTFNWYWLVDTLMEEGHTVHLANPCAIKQYKGLKYIDDKHDAFWLAELLSLGILKEGYIYPRQERPVRDLLRKRCHLMKLRTSLLVSLHNTMANVCGMKIPSHHVKGRQDRVSGHFSGNESLALGAQVSKTSIDMLTDQIKTIESHVEKHCRIEPSYAGLITLPGIGKILGLTIMLETGPISRFPEVGNYVSYCRKAESIWTSSERVKGKGNTKNGNRYLAWAYSEAAEHARRFDTASRNFYNRKLKERNSPVAHNALANKLARAAYYIMRDHVPYEEEKLFG

SEQ ID NO: 312187 - protein, 443 aa, unidentified
MELSKSQKRLIEKRKAISGKTIVAIDPASKRHQVAIISPDAIPLMRSFKIFNTGQGFNRLLQKLAGIKKAFPSVEFLFAIEPSSHYWIPLLFFFKKRGYQFVLVPGLFVKRTREIEDHTSRQDDPKDAHIIGELVLHGKYCEERMPQDVYAELRNFSNDWLELSGEKAALRMKIRMLLDKYFPEFLKLFSDFLGASGRFLLCKCPFPKDVLKEDIRLLKEQVYKISRCRIDDERIDELLESAETSIGIDEGILGARFRLRHLLEKYELCELHQKEIAFEIEAYLNCIDYTPFLLSLPGVGLISVMLLLGQTGDLRNYNTVADLISFAGLDLIYADSGNRVGRRHISKRGRKQLRLILFQMTLAFIQHHNVARRKYLKQRIAGKKPTQAIVSSISFFVRVMFSVVKQERDYLKLDASDPVYQEVKQLEKQLEEQSKRNTQKKAA

SEQ ID NO: 312188 - protein, 344 aa, unidentified
MDHFAGLDVSVKETSICIVDDAGKIVREVKVASEPEALLAVLKNPAYHFKRIGLEAGPLSQWLFSALADAGLPVICVETRHMQAVLKAQINKTDRNDARGIAQMMRAGLYRPVHVKTIRSQKLRMLLTHRKLLQSKAIAIENDLRGTLRNFGLKVGMVGKVKFEARIKELVENLPDLAALVEPMLIVRRTLREQIVILHRRLLAIVRDDEVCRRLMTTPGVGPVVALTYRATVDVPARFRKSKAVGAVFGLTCAKYQSGEVDRNGRISRCGDEMMRVMLYEAAQSMLHSKKWSWLKAWAMQIARRRGMKKAIVALARRLAVIMHRIWVDGTEFRWTRERATAAA

SEQ ID NO: 312189 - protein, 661 aa, unidentified
MKRKRTYQAVRVQQVRVEELLPLLVAGCIVALDVAKMKMLVALATVAGEVVKLFRFEHPTETAEFLRIVRAVREGVGPGMVKAAMEPTGTYGDAVRHQLVAAGVSVWMVSPKRTHDSQELFDSVPSLHDPKSAVLIAKLHSMGLSTEWKPAPAMRSRLRALVELRQHEQRREEMCHGRMEAMLARHWPEVGRWLDVREQRSALRLLVSYPSPALVNAAPDGARALLREASRGRLSAEAIEGVIADTRTTVGVPMVPEEECLVRTLATQVLEAAQCADVHERAMQGLAKDDEVFSRLAPWMGTYTAAVIVTMCNPRQYMTARQLEKACGLNLREKSSGEHTGRLSITKRGPGVVRHVLYMFTLRMLQESAVVRAWYRGRRGYTEESKQRAVVAVMRKLVRAAFHVANGNEFDASKLFDVRRLDLRAPNTEASASVSKEMTTAALTEMSTPASNNAVTTVPKNASASVAKRVIARTTPRPTARGRKRAATSTKTTSNASAPKEESALKAAGSPASKDVSASASTAATAAAQTAASTAASMAASTAAASTAAASTAAASTAAASTAAASTAAASTAAASTASTDTGTSASRAAITAAPKEESTSAAKRSRSPRASISTVRISIASALKEVSTSASKGANAHAAPRPMASRTKPAQPREGTQASK

SEQ ID NO: 312190 - protein, 396 aa, unidentified
MNRIWAGIDAGKGHHHCFVIDGEGTKLLSRRVANDEPDLLLLITDVLALGDEVIWAIDLADGGAALVIALLLNHDQEVLYIPGRTVNRATAGYRGEGKTDARDAHVIADQARMRRDLQPIRPGDEAIIELRLFTGRRADLVCDRTRAVNRLRGLLTGIFPAFERALDLGNHGPLVLLTGYQTPAAIRRLGASRLEQWLRNRKVRWCGALARTAMEAAERQHTSVAGEKTVAVIVATLAREVIVLNEKISEIDRQIEASFRAHKQAAIVASMPGIGNLLGAEILAAIGGDMDLFGSPDRLATYAGLAPAPRDSGKVSGNRHRPKRYHRRLQRALFLAAMSSITCCSESRRYYDRKRAEGKRHSQAVLALARRRVNVLWALLRDQRRYELTPPSAIAG

SEQ ID NO: 312191 - protein, 342 aa, unidentified
MKEVTIIGIDLAKNVFQLHGATNDGTVVFRKKLSRGQFREFMSDHSPCLVAMEACSTSHYWAREITKAGHNVRLIPPIYVKPFVKRQKNDATDAEAIVEAMLRPNMRFVEVKTTETQARTMLFRTREQLVGQRTEAINALRGHLAEFGLVVPNGIANLPRLAAAVEASDTELPELARDLSRLYLERIAQLSTLIEELTLRIKKINAASKTARIMRTMPGVGPICAMAIDAFAPPMEMFENGRDFAAWLGLTPRQHSTGGKQRHGRTSKMGQRDIRRLLIIGAMSRIASAQRYRRKADPWLQDKLDRKPRMVAAIALANKMARQIWAMLTKQECYKAPVAVSV

SEQ ID NO: 312192 - protein, 426 aa, unidentified
MPYRIAGIDVHKRMLAVVVADVEVEGEYQFERRKVGTSPSELRALADWLFESEVEEAVMESTAQYWRPVWEALEQYWTPRRRMRAGATPMSGTLHLAQAQSNRGAGGRKKDFPDAERLVKRLVAQELTLSFVPNAEQRLWRTVMRRKYQLTRNRCRLQNRLECLLEEAHIKLSSLVSDLLGVSARRMLQALAGGETNPAMLAALADQRLRATPEQLCDALGACRTLHPVYRRLLEMALAELGIIDDQISQLDQEMANLLTEHHDAVQRLAEVPGLGADSAQQIIAEVGPAAATFPSPKHLASWMGACPGNEESAGVNYNHRCPKGNRQMRRLLNQAANAAAKAKSTIFGVLYRRLVPRLGHAQAIGAIAHRLCRLIWKILHEGVRYEERGPALTQASKQARARKMIRELRSLGYHVERLVETTSPA

SEQ ID NO: 312193 - protein, 426 aa, unidentified
MLNSQINKIQAITSDTLIVGVDIAKNIQWAQFINFRGIKVSKHICFENNYSGFNSIMEKIEEIKSKNNFLSVIVGMEPTGHYWKTFATFLHNNGIKAVQVNPYHTKKAKELDDNSQTKSDKKDALVIAKLIKDGRYSAIYFPEGEYADLRNLSNTRLEVSRLLNICKNRIHACVDEYFPEFETVFKSFIKGKVALHILKRIPFPTDILELTLEDIISVIREAAKKSVGKTKAEELIRAAKVSIGVKVGLEGARIRLNNLLEEYELYHNQLEKIEKEMAQELEKTGYKDILTSIPGIGIISAASFIGEIGDPKRFSNPQQIIRLAGYNLVEDSSGKHKSKTMISKRGRKILRTILYKISLIVVCKNQEIKLLYKYLITRKENPLKKKQALIVISGKMVKIMYSLIKKEEVYDKEKVLGIYRKQQIVA

SEQ ID NO: 312194 - protein, 338 aa, unidentified
MNEKGVSISGKGFSYENTKDGLFSLIEKLKSLSLTPENLLCGLEATGPFWVNIYFFLKQHRFNVVLLNPYQTHQYHKALRHKATTDRISAFVIADLLRSGRYLSSIVPEEKIESLKELTKMYFKLSDEKKSLKNQICALLSVVFPEYGKTFLANVLSIAARQILKKYPTARDIAGCSVKKIEKIVRSIKGNNISRDDIQLLIETAKDSIYSGFAHQTKCLSMKILIEQLEVTLSSLAKVKQAINEILSPSSSGSFPGENLLSINGVGKNTIAFFLSVVGEKAQYFPSCKHLIGYIGFYPQIFESGQTKKENIISIQGPPYIRQALYLAAVSCIKHNPE

SEQ ID NO: 312195 - protein, 421 aa, unidentified
MLRVIAGIDIHKKVLMAVVATVVEREMEGGIEQQIEYEGRRFGSGTREREHLVAWLRERQAGEVVMESTAQYWKPVWMDLEPHFPKLHLAQAQSNKAPKGRKNDFADARRLTRRMAAGELILSFVPGAEQRTWRAMTRGKQQLVRERVRLQSQTEALLEEMRIKLSSVVSDLFGVSGRRILGALAEGETDPGKLADLGDDRLKCGREELVDALTGHGEPIQVEILKLSLERLRLLDRQIEAFDQMAAGALKKHANAVARLAQVPGFGVDSAQQVIAEVGFDAKTFPGAGELCSWVGTIPGSDISAERNHSSQSPKGNQFLRRIFTQAAQAAVKTKGCHFQNLFRRLIIKLGYNGAIWAIANRLCRLAWKILHDGVGYVEQASEPTPQAKKRRVQRLTQALRKLGYQIAITPIAPKAEGAQG

SEQ ID NO: 312196 - protein, 342 aa, unidentified
MNYRYAGVDLHKRSFTVCWISDKGRKKTTEYKTDAVGYALFKKKLNKECEVAVESSGNTGYFYDQISGLVKTVKVINTHKFKVISESVNKTDKRDAETISEFLKKDMIPEIRMKNKDERAIQNLINTRDKLVKCRSTLKNQLHGILNSEGIVTERETFGSRKQLEEVKLVKGISETNRFVVGNIVDTIHALNEQIKKLDEEIEKHGQKMDGFKNLISITGIGTLSASILLNTIGNIMNFASEKKLFAYFGIVPRGYDSGGKQKRGHITKFGNKIARTTLVQITLIAMKFSPHIKEFYKRIKLKRGAGKAIIATARKMLGIIYKTLKNNWEFENFKNFELKKI

SEQ ID NO: 312197 - protein, 358 aa, unidentified
MDRELYIGVDVSKKTLDLAYYDGETIDWKNAHIKVSNDDAGFKKIDSWVAKVGKDFDTFLFCMEYTGLYNQNFRLWLESKEYIYGMVEPRKMHHFEPDLDDDQRSLDRIKTDELDSFRIAIYCEQNHKKILRNPSKLPSPVYFKLKRLLVERKQNTKQSTLYKQQLHDICAYDTDLSVERKKLLLTNMQENQKAIDKEIDSYMNEDASISKNYDLLTSIPGIGRIIALKTIVLTENFTAISNPRKYACYIGIAPFKKESGTSVRKRTAVSKKGFSEAKSDLSIAALSAITYNPAIRGYWIRKKKEKCGGIVLNAIKFKLVLRMFAVIKRGTPYVETDAYKNREYSKSELKLFPDQNYH

SEQ ID NO: 312198 - protein, 344 aa, unidentified
MGEVSTIGLDIAKAVFQVHGVDGSGAVVIRKRISRVKVLEFFADLPACLIGIEACPSAHHWGRELAGLGHTVKLMPPSYVKAYLKRSKNDANDAEAICEAVTRPSMRFVPIKTKQQQTALMLHRTRQLLVRQRTMLSNALRGHLAELGIVSAKGRNGTAELLKIIADGADNRVAASARGILNVLAGQYSALGAEIGSIDKGILTLHRSCEASRRLAEIPGIGPIVATALVAEIGDWKAFASGRNLAAWIGLVPKQHTTGGKDRLGSITKQGNRYLRWLLVVGAMAVVRYAKKHGTKNRPWLGQLMERRPTKVAAVALANKIARVAWAIMVHGDRYKEPKLLMAA

SEQ ID NO: 312199 - protein, 391 aa, unidentified
MVCVGIDVAKDKHDCCILDSDGTIRADCITIPNNMDGFKQLLQTIRDCTKKSDKIKVGLEATGHYSYNILGFLLDNGLPTYVINPLHTNLYRKSLSLRKTKTDRVDARTIATMLLSDVDLKSYTDTAYHNEELKSLTRYRFDKVRERAKLKQSVSRLVTILFPELEKLVPSLHIASVYALLSEYPGAKQISEIHLTKLTNLLATASKGRYGKDKAIQIRDAARTSIGSVMPAKFLELKHTIKLIRELTSEIDEIEVSIQKIMDELNPPILSIPGVGIQSAAMILAEIGDFSNFESPDKILAYAGCSPSTYQSGKLTNCYAHMEKRGSRYLRYALYNVTKYVCHWNPVFAEYLAKKRAEGKHYNVALSHATKKLVRLIYALQKSGKAYLVAA

SEQ ID NO: 312200 - protein, 445 aa, unidentified
MSEPPVAPAPAVVPAPAIAPATCGPGDRFARLTHFGGFDWGGAEHQFVAVDPHGRIVLSLRFANDAQGWALFREKIAAFPCLGVAIETCCGPAVERLVDAGPAVYPMNPKAAERYRDRKAPSGAKDDALDAWSFADALRTDGHGWRPLLAQDPLTTELRLLCRDEIKLIEQRTALVNQLRAALCEYYPAALAAFDDWTAEGPWRFVIAFPDPPALAKAGRRKWERFLHAHKLYRPQTADRRLAAFADALKFASPNPAVTRAKSLLAVTVARQLCLLESQLEEYRRRVVQSFADHPDHDCFGSLPGAGAKLAPRLLAELGANRAVFATAEALQNYAGTSPVTRQSGRSRLVVLRRACNKTLRATVHLWADLSRRTCVWAETYYQQKRAGGMNHTAALRCLGQRWVKILWKMWQTGTPYDEALHTRNQTAHGSWVIRLLPPPAPAKT

SEQ ID NO: 312201 - protein, 313 aa, unidentified
MNQKEPERFVGIDISKQELVVAVRPTTELQTFTNTEEGLATLVRFLQELSASSIVLEATGGFARAAVNAMALAALPVVVVNPRQIRDFARSVGLLAKTDAIDARIIARFAEAVRPEFRPLKDLETQKLGDLNNRRCQIVEMITAEKNRLGMAPVWSQKDIRAYIAWLEKRLKKVNDDIDNLIKQSPIWRQKEKILTSVLGVGPVVTTTLLCGLPELGTLSARKLSALVGVAPFNRDSGQHRGRRACWGGRAHVRAALYMAALTASRCNPVIRAFYLRLRNAGKPAKVALVACMRKILVILNAMLKNNTCWQQA

SEQ ID NO: 312202 - protein, 481 aa, unidentified
MDSTTSVQPPRTKAAKAKRKSRGNRKGMCLEDRPLLEPNAAGIDVGAREIFVAVPPDRDENPVQVFLTFTEDLQQLAAWLVKCRVTTAAMESTGVYWIPLYEMLEQYGIKPCLVDARHMKNVPGRRTDWHECQWIQYLHSVGLLRSAFRPEDDVCAVRALTRHRNDLVQLASQHIQHMHKSLTQMNLQLHHVISDLTGLTGMSIVEAMVAGERDAAVLARLRDPPIKASEETIRKSLVGNWRAEHLFTLKQSRDLYRTYQQQIVACEEEIEKLLQQFESRVDPNEKPLPPDRKRQPRSRKKRKKDGDREPGFDLRTESYKLFGVDLTQIPGLETLPLPLFSEVGRDMRQWPSAGHFASWLLLCPDNDISGGRVLWKGMRKGNNRAGQMFRLAANSLHHNNTPLGAYLRRMKAKLGPAGGITATARKIAIIFYTMVKNQVEYDATLWAQRDTQREKRFEDKVKRQAQQLGYQLVPIEEKPAA

SEQ ID NO: 312203 - protein, 338 aa, unidentified
MLHVGLDLHKKYSTVVVMDDGGNVQLEETLYHDDRPRLIEFFSKLAGKAVVTVEATRDWYWLYELLEELGVTVKLAHARKVRLIAESWLKSDKVDPKSLAQLERTGFLPEAYISPREIRDNREYLRYRLTLVRLRTGLKNKVHALVDKLGIKHPFADLFCPAGRRFLSQLTLRPAYQEELTNYLALIEDIERRIVAATKEIKRQLKPDHRAELLMTLPAVGHLTAYLLLNEIGDVKRFPTPGKLCAYGGIVPIVRQSADHRWQGHITKEGNRYIRWALTEVACLAPSKDYALGSFYRRLKARRGNLKARVAVARKLLVAVWYVLTYEEPYKTTPFPTV

SEQ ID NO: 312204 - protein, 363 aa, unidentified
MSDGICFAGLDVHARKTAAAAIQLGSGEVWKAQLAGSPSAAIEWLQTLPGQVRAVYEAGPTGFGLARAARAAGLEVMVCARGAIPRQPGARIKTDVRDALKLARLHAAGQLRAVTVPSVPLEALRDLVRAREDLRGDLMAARHRISKLLLRRGLIYDGPGHPWESPRHAAWLSAIDVGDPLARVVLGEYLACHDGLLARRARLDALISEQADDPRWAALVGRLRCMRGVDTLTAVGLIAEIGDFAAFAHAKQLASFLGLVPTESSSGEKRKQGSITKAGNAHVRRLLIEAAWHHRAAYRNPGPTLRARWAKVDPALKARGHAGNRRLHQQWCRFNERKKHHVVANVAVARELAGWCWSLATLN

SEQ ID NO: 312205 - protein, 458 aa, unidentified
MARNRSTDKIIRGMALVHPNAAAIDIGATTHMAAVSADRTPEPVRSFGTFTADLHRLVDWFTECGVETVVMESTGVYWIPIFELLDTSGFAVFLVNARDAKHVPGRKTDVSDAQWLQRLHSYGLLSASFRPKGRIAELRSYVRQRERLLEYAASHIQHMQKALTEMNLQIHHVVADITGATGMRIIRSILAGERDPAVLAAMRDSRCRADAGTIEKALGGNYRAEHLFALEQALALYDTYQEKASACDARIEAVLKELSIGRDRCTTPLPPPGRRMPNTANALDFDVRAALFELLGKDVTRINGLGPYLTLKLIAECGDDLSTWPSAKHFTSWLCLAPRNKISGGKVLSSRTRRSGNKATSLLRLAAISVGRTDTALGAFYRQLSARIGKAKAVTATARKIAVLFYNAVRYGIEYVDPGASTYETRYRERVIDNLHRRAKAFGFALQPLEPTPDNAVS

SEQ ID NO: 312206 - protein, 466 aa, unidentified
MTPRRTKTFRMPPQPAEPLRVQHPRAAGIDGHAAQHWVAVPPEAAPPPPADHPPNLPSHVRRFGACTADLEALADWLTACGVTTVAMESTGVSWIPLFALLERRGFQVFLVDPRQTRQVSGRPKTDVLDCQWIQRLHSYGLLAASFRPEDQVVVLRGYRRQRHRLLRHAGQHVQHLQKALEQMNVKRAEVVSDVTGVTGLAIIRAILRGERDPLELAELRHDKCHHTESEIARALYGNWRDEHLFALRQALELYEAYQAKLRDCDDCIERHLRTFADRSGGRKLDQKARRRRRPRHEPAFDVRAALFRFRGVDLTVIEGVDRTTALTILGEIGCDVSKRPTVKHFVSWLGLCPQHQGSAGQIKSRHTRRGVNPAARALRLAAQGCHHAKNALGAFYRRIQARCGGPKAVVATARKIAERVYRLLKYGEAYVRQEMAAAEEAYRARVLKGLARKATELGYPLVPATP

SEQ ID NO: 312207 - protein, 486 aa, unidentified
MAKRKMSTFERLQRGELNRKKRKQLEQQIANQDASLQIVHPDTAGIDVGNDSHFVSVGPARDAQWVREFGSWTEDLRRMVEWLQSCGIKTVVMQSTGYYWIALQEALEKAEMKVWVVNARGTKNLPGRKSDVQECEWLRRLHSYGLLRNSYQPPEQIRSLRTVWRRRETVVKEAGRAVQGMHKVLTTMNVRLGNVISDLSGTTGMTIVRAIVKGERDPRKLAQMRDRRIKASEQEMVLSLEGNWQEDALFELQQVVDGYEFWQKQLEACDQKLKQYLEALPERAREEEKPADKEAEAKEDPRARRRRRIKANKKQKNQPAFDLGAAQRRTLGVDLCRIDGIGEMTVQSILSEIGPDLSAWPSEKHFTAWLNLAPRRDISGGKLIRHVVVPGKQRVANALRMAAQSLKDSDSYLGARYRFLKVRLEGARATKAMARYLACLIYRMMTKGQTWVDRGTEFFEAKRRQRDIQALHRKAAALGAKVVFQA

SEQ ID NO: 312208 - protein, 324 aa, unidentified
MRDNITYVGLDVHKNSIDVALADGDKMGEVRHYGTIGGDLGSLEKVIRKLVSRGRELRFVYEAGPCGYEIYRQLSHQGFDCIVVAPSLIPKKTGSRIKNDRRDSEMLARLHRAGELTAVYVPHLEDEAMRDLCRAREDAKGAERKAKQQLGAFLLRSGFHYSGKTNWSLAHWRWLSDIKMPHRVQQIVLQEYINAVRVCTERVERLAEQIRIYVPAWRLAPVVEAIQALRGVSLIVATTVIAEIGDIGRFDNPRQLMAYLGLVPSEHSSGVTIKRGALTKTGNGHARRVLVEAAWAYRLPARVSRRLLERNQGVPENGFAANQL

SEQ ID NO: 312209 - protein, 331 aa, unidentified
MRKPVLVGIDVSAQTFVVAEEVPGRTVHDAEYANTTAGHRKLCRHLTKTGRPVRVCLEASGIYHLDLAIALDGTRNVEVMVANPRATRDFARAHMQRTKTDQTDARSLLEFVRRMPFVAWLAPSPEILALRAIARRITALTVTSTQERNRRHAVDHCRELPQLLDQELEAHLAFLQDSIKRLTEEAVKIIHHDPWLWTAFRHLVSVRGIAQASAVAILAELAPLPPDMSAREWVAHAGIDPRHFESGTSVNKPTRISRTGNRRLRAALYMPALVAIRHEPNVKAFYEKLLAKGKKPMQAILAVMRKLLHAIWGMLHHDRDFQGEKFYNFSS

SEQ ID NO: 312210 - protein, 341 aa, unidentified
MAVAGMDTHKDTLAVAVVDGQGRELDRIELENSSVGHHRLVGWLGRFELERVGIEGSGSYGRAAALALRDAGLQVAEVPPQLTAQARRRQRSPAKTDGIDALLIARIALRDHELPSIRPDGDIEDLRVLVRYRRELRAERNRIANRLHADLGQLHPGYQRRIGRLTTPQNLDRARRLLAGDDRVRARTARQRVTRLRQLNRQIAEVTAEVQERAACFHSGLTTIAGVAGLSAAELLAEIGDVGRYRTKAQFAMANGTAPLPASSGRTQRHRLNRGGNRQLNRVIHFIALTQISRYPEGRAYYDQKKAEGKTTQEAMRCLKRRISDRIFQTLRHQQPRAHLT

SEQ ID NO: 312211 - protein, 322 aa, unidentified
MRYIGIDVSKATFVVAYSSDKGGEIRTFNNTTAGIRQFIGTLPKDGSIHCVMEATGNYSALLLYMLNVAGITVSMENPLKVKNFAKAMLSTIKTDKSDARLITLYGEKMNPRPFKVQGEAILRLRQKRTVIRQLTKQITAMSNLRGSLACLPVPDKGATHTVEETIKFLEKKRDRLQSELTDLVEVEFSRQLALLTTIKGIGITLATALIITTGGFTYFQNAKQVSRYLGICPTYEQSGTSVNIKGHINRNGDAYTRGLLYIAAWPASRFNAQCKETYTRLRQNGKSGKLAMIAVANKLVRQAFAVVAHDKEYVDGFVSNRP

SEQ ID NO: 312212 - protein, 422 aa, unidentified
MGAKQQDPYTAYIGIDWADSKHDVCIQPAGANAREFDVIAHRVEAIDQWVHDLRKRFGGLIAVALELSKGPIVTALQKYDFIVIYPIHPSTLAKYRETFKPSRAKDDPTDAEFAVDLLMRHPERFKPLQPQSSDMRALATLVEQRRQLVDEKTRVTNRLRAALKQYYPQTLDWFDHVDTGMFCDFLTRWPTLTQVKRARAATLGKFFGEYNMRRPAVLKRRLVSIKASVPLTTDDGIIVPYRLQALVLVRQLRLMLESIKEFDEEIESIASKHPDYALFRPLPGAGPSLAPRLLVAFGEQRDRYGSAEDLQKYSGVAPVTERSGKKHWVHWRWQCPTFLRQTFVEWAGQTINKSYWAGLYYYQQREKGCSYQAAVRSLAFKWIRILYRCWQTGNVYDEAKYLKALERRGSPLLARPMMKENT

SEQ ID NO: 312213 - protein, 416 aa, unidentified
MSRTVDIVHPVCCGIDVHKSFLVACIATTDERNHTTHQTRRFSTFKGDLNRLADWLLSNNCKDVCMESTGKYWIPVFNVLEKTCNVCLTHPKYVKAIKGKKTDKRDAKWIAELFKCDLVRSSFIPPPLTRNLRELCRYHAKLTYMNSSEKNRAQNCLTVCNFKLDDVFSDVFGASATRVLNKLIELGHSDFDVEPLLHKRCKATPEQIKAAIDGELSPAQAQKLSIIRLHMAHLESLQNTLESSITQLAIPYQSEIDLLMTVPGIGSQFTAIRILAEIGVDMSVFETAKQLCSWAGLSPQNNESANKKKTTRIARAGAFLKPLLVQCTLAAVRSKKYTWLKDKYQALKKRRGHKKAVIAIARKLLSAIWNILAKNEPYNHELYQKSDQPPTNRVLTPEQAFALLRKHGYQIAEPVA

SEQ ID NO: 312214 - protein, 438 aa, unidentified
MSNKVIFNLDELFISVGIDVGADFSWMSIALPNQQFVGKPYKILHNSIDSLTTAVSKIKEAEELYSLESRIFLESTGIYHYPLFCYLRDKGFNCSVINPIITKNSTNINIRKVHNDRFDSKKAALVGLKPDLKVSLMPSDLALNCRNLCREYYDLMDNRSAYVNKLQGELRMAFPQYLGIFSKVTINTSLTLLETYTSPSAFLKADKQEIIDIIKSTARFGLTYAQNKYNAIIQAATDANQFGYIIDSNIKRIRLYISFIRKYDEEINSILESLHELVDANEDADFVKQIHLIETFKGAGFLSSVSIMGEIGDFSAFSKPKQLFAYFGLDPAVKQSGKFEGTKVQMSKRGSAIARRVIHTLTLQSISISRNREAKNPVLREYYLKKCDSKPKLVAMGAVSHKVCNMIFAILRDNKSFEIITPQEHIKQYNTSKCDMAA

SEQ ID NO: 312215 - protein, 406 aa, unidentified
MGNHSEAFVAFDTSKLRNAVAIAEAGRAGEVRFFGEIENTEAATAKLVKKLAAKYQHLTFCYEAGPTGYEVYRQIKSLGHECIVVAPSLIPKKPGDRVKTNRRDALSLAKLLRAGELTAVWVPDRGHEAMRDLTRARETTMMDLRSKRQQISAFLLRQGLHYSEGKKTWTKTHMNWLASQKLEYAEQRLVFEEMMLAMRQAQERLERLAQAIRVAVPDWSLAEVVTALMAMRGIDLISAATFLAEIGDPSRFQHPSELMGYLGLVPSENSTGDKIKRGPITKAGNRRAGGPGEAGEGRGRPARGSRDRLEGAVSPARALPGAGQKGQAEDRCRHRGRARARGLHLGRQSRDHHRPRCGQVRRDFRGSEWHVGTVSQGACAGAWSGEHESRAAAGAQPRQGEFPAIL

SEQ ID NO: 312216 - protein, 321 aa, unidentified
MRIEASLTDYRRLLAWAKRWPQRKWAVENANGLGRHLAQWLIARGESVVDVPAAATSRVRELSRGGRRKNDQIDAAAAATVACLQGDGRDVEPEDHTTALALLDERRVNLAQARVRTVNQLHALLRDLLPGGAPTQLSADLAAKLLRSVRPAGDVETVRKDIAWDLVAEIRKLDKQLTDNAARMQSLVEASGSALMDTPGIGPVMAARLIGRTRQAHRFPTSAAFANYAGAAPVEIASADKARHRLSRSGDRQLNSVLHTIAVVQIRMPNSPGHAYYQRKLSEGKTAKEAKRCLKRRLADHVWRVMIADERKAKSLPAHGT

SEQ ID NO: 312217 - protein, 363 aa, unidentified
MVESTRVTVGLDVHARSIRLAAVRADELLEERTLAYDEQAVERRLRRWPGVRCCYEAGPTGFGLYRHLVERGIECAVVAPGLVPRRPGDRVKTDPRDARKLARLLAGGLLEPIHVPSPELEAVRDLVRAREDARLDRMRDRQRLSKFCLRHGRLLPTSAWTVIRRKWLGEQRFEHAAEQITFDTYLHAVDLVDRRIEMLERAIRETAEQGPWSELVARLRCLRGIDTLTALALVAEIGDFKRFRTAEEFMAFVGLVPSEHSSGERRRQGSITKVGNSHVRRLLVESAWHARRRPKVGYELARRQRGQDALVVERSWRCQQRLFQRWQRMTARGKPHQKIVVACARELAGFVWAIATDQPLRTL

SEQ ID NO: 312218 - protein, 369 aa, unidentified
MPHVTSIGLDVHARSVAAAAFNPFTGEVVHRDFGTDAAEIAEWALGFEEPRACYESGPTGFHMARELRALGLDCAVAAVSKMQRPAADARRKNDRRDAEFIARMLATHNIVEVPLPDAAVEAARDLDRALDDATVEYRRARQRLNMFLIRLGHVWDERNADGTRKGSWTRAHWRWISGIGLEGPQRDALEYYVTAARCAESDRRQLERRVVALAGADRWRPAVEALSCIKGIDTLTAFRLAAEAGSFTRFRTAPAFASWCGLVPSERSSGETERRGGITKTGNRLARTALVESAWHYLTCTPRPKAPAPGADVPAAIRARADDCTARLCRRREALAAAGKSSCKANAAVARELACWVWEIGRRAEGTLG

SEQ ID NO: 312219 - protein, 344 aa, unidentified
MSKVTIGLDIAKSVFHLVFMNQSGRVLRKKKLRRHQMLSYFSQLEPCIVVMEACGSCHYWCRELTKAGHEVKAIAPQYVVAYRKGNKHDYNDAEAIAEASQREGMRFVPFKSQDQQDIQLMHRIRERMIAQQTALSNQIRGLLSEYGIVYVRGVATLVKELPFTLEEADNGLSMLARRQFQGLLNDLRELREHIKEMDKELKAFSQSQPVCERLMSMTGVGPLIATALYAGIGQGQAFNSGRHLAAWLGVVPKQHTTGDNPRLLGISKRGNTYLRTQIINGARAALRHIGDKTDKVSEWCRACLARMSFNKACVALANKMVRMAWAMLHYQQDYQPGLINKAAA

SEQ ID NO: 312220 - protein, 339 aa, unidentified
MRIVGGLDVHRAQITFDYVDLRTGEEVRGQIRPATREEVRSFLAGLGTKNAAFALETTTGWRFIVEELRRAGMEAHLAEPADTRAARGRKRRAKTDRADARLLRDLLVADEVPESWIPPDHLADLRTTVRLRKALISERTAWRQRMHAQLFHHGLPVPPSLRTAAGRQALESADLPEAARQVLLVGMEMMDRLDAELDTIDAQLIPLARRLVGAQVLTRQWGIGPILAVTILAELGDTRRFSSSRQAVRFAGLDISVEDSDGKRPPGHLTRQGPPALRWALYEAATSAWRVASPDHGYYLATKERLGTKRARISVARRILRRVHHELAAAGDEAFADAA

SEQ ID NO: 312221 - protein, 290 aa, unidentified
MAEVVTIGLDIAKSVFQVHGIDAAGAVVLRRQVRRAHLLLFFAKQPKCLIGIEACASAHYWGRELSKLGHQVRLMPPSYVKPYVKRQKNDAADAEAICEAVTRPTMRFVAIKSPEQQSVMVLHRVRMMLMRQRTQLSNAIRAHMAEFGLVAPIGREGLQNLIKLVETSDARVPEEASACLQLLATQLKLLNSQILATDRRIRTSARATETGRRLMGIPGVGPLLASALVATVPDPKAFKSGRNLAAWVGLVPKQNSSGGKERMGGITKQGVTVHIPPPFRRRASRGSWAA

SEQ ID NO: 312222 - protein, 392 aa, unidentified
MTTPATCNVPESTTAGTLFVAFELSEKTWKLGFTTGHGQKPRERTVTARHQERVLEEIAHAKRRLGLPDTAPVVSGYEAGREGFWLHRFVQGHGITNQVVDSSAIAVNRRRRRAKSDGLDVRKLLSMLMRYAQGERQVWQVVKVPSVEAEDQRHLHRDLETLKQERASTTNRIKGLLSSQGIRVTSLRNLPEQLEALRLWDGSPIPPGLRRRVLRVYAHHTFLSEQIAAVEAERRAQLQASTDANIDKVRQLMQLKGIGINGAWLVVMEFFGWRAFKNRREVGGVAGFTPTPYQSGESAREQGITKSGNRHVRWMTTELAWSWRRFQPDSALSVWFRERFGGGGKRLRRIGIVAVARKLLIALWRFLETGVFPVGAELKGQAGHDGLCTSAD

SEQ ID NO: 312223 - protein, 388 aa, unidentified
MTCIDVRAIDQTAIRGQNAIICGSLELSTTRWVVTMLLPGSEKMSRFNVSASDGGEELLRLLGRLRAKVEQQSGSLPGVVMIHEAGLDGFWVHRLLEAHGIESHVVDAGSVPVPRKRRRGKTDMIDGEALLRTLLAWRRGEPRVCSMVVPPSVEEEENRRLVRERETLVSERTQHGNRIKGLLKSQGITGYDPLRAKRRERLERLKTGQGQPLPERLKSQILRELDRLEVVMEQIAQIEADRDALLNALAATPNHPVAGLLRLRSLGHAFTSVLWFEGLYRPFANRRQLASLAGLAPTPWISGKIDREQGISKAGNRRLRTTMIELAWLWLRYQPGSALSCWFRDRVGDKRGRVRRLAIVALARKLLIALWRFATQGIIPEGAVLKAA

SEQ ID NO: 312224 - protein, 326 aa, unidentified
MKIIGIDVSKAKLHSSLLTDPQHNKTKDKASDNSLSGFRNLLEWTCRNAKCEPTELHFVMEATGVYHEALAEFLFEAGCKVSVINPFKAKRFAESHGFRSKNDRHDGLVLALYGHERQLPAWSPPPPEARHLKALLARLTALETDIRRELNRQEKAEIGKVPEVVITSLDNSLTFLNEQKTRLRKEIDDHLDRYPKLKEERDLLQSIPGVGDKLAIQFLALFNSKKFSSAPEVASFLGLIPVEHESGTSVFKRPKLSKAGDGRFRGVLYMPAIVATKYNPDVRALYQRLLKAGKTKMSAIGAAMRKLVHIAFGVIKNRTPYQPQNA

SEQ ID NO: 312225 - protein, 429 aa, unidentified
MNSTQNKKIEQVKETTMIVGIDVGSEKHYFRAFNWRGIELTRKPVAFSNSMEGFNSFYNTIVELMQKSELEEALVGIEPTGHYWFDLGQFMGEKDIKFVMVNPHHVHKTKELDDNSPSKNDRKDPRVIAGLVRDGRYFYSYMPTGVYAELRNASNRRFVLVEEQTRAKNRLQKWIAVYFPEYKGIYTHIDAKGGMLVLKKAPTPEEIVRLGVEGIIKIWKDAKLRGNGHKKAMLILAAAMRSIGLKAGLTEARMEIQDLIEDYELQTKRLERVNDLIKGLCQQVRYADKLLEIKGIGITTVAGFIAEVGDITRFDSTKELQKLAGLELVADSSGKHNGKTKISKRGRKRLRYLLFEAAISVVGKNEEFKEIHRYYTTREKNPLKKMQSLIAVACKLIRVFHAILTKGIRYDASKMLKDIRHPGEQLKAA

SEQ ID NO: 312226 - protein, 411 aa, unidentified
MDKIYDKCCGIDVHKKLIVACFRCGRKQEVREFGATTRELLELADWLKEGGCEMVAMESTASYWKPLFNILESSDLKAMVVNARHMKAVPGRKTDMKDAEWIADLLQHGLLQPSFIPDKDQRELRELVGYRKSLVGERTRELNRLQKMLEGANIKLSGTVSDINGKSARSILEYLLTGQSIDGAKYDEMYEKKVIAHNLKATKEQIIDDLNGVMSPLQRRMMKELLAHLDELNAHIKNLDDEIDNFMKPEEKQASQAIQDVTGIGNTSAQAIISVIGTDMERFPTDKHISSWAGLCPGDNESAKKRKSGKTRKGNALLRTTLITCAHAAVKNKQSYFYAQFMRSSAHRGPKRAYVAVAHSMLIAIYHILKDGVIFKDLGADYYNQFNKERKINAYLKKLKALGWESPVVAA

SEQ ID NO: 312227 - protein, 451 aa, unidentified
MGKAKPQVIDDQEHERVNDRVAAVDVAKDAGMVCTRMPHPSRPGSRQSAVWTVKARMTAIGALGRQLKRDGIEIVTLESTSDYWRIWFFVLEAAGLAVQLVNASQARNLPGRPKTDKLDAMWLARLTEMGLLRASFVPPKAIRDLRDYTRMRTRLTQERTRCWQRLEKLLEGALVKVPSVASKLTTVSAQDMIKAMIAGQRDPGKLAALARGRMKARHGELVEALDGMFDDHHGELAGLLLDQITALDGKITQLGAWIQRAVAAIPAAWGVDADGTTGPDAGTGPDAAALPAVRRLAEIPGVSPDLACSIIAEIGLDMTRFPDAAHLVSWAGLCPRASQSGPRTRAGKKNQGDTWLRGHLGQAATNAARTATFLGERHGRIARRRGKAKAQVAVARSILVIIWNLLSDPAARYADLGAGYYQTRTDTDRKIRNHIRQIQALGFDVTITKAV

SEQ ID NO: 312228 - protein, 344 aa, unidentified
MGEVSTIGLDIAKSVFQVHGVDVAGAVVIRKRISRAKVLEYFGELPPCLVGIEACPSAHHWGRELQKLGHVIRLIPPSYVKAYLKRSKNDANDAAAICEAVTRPSMRFVPIKTKEQQTALMLHRTRQLLVRQRTMLSNALRGHLAELGIVSAKGRSGTAELLRIIRDGEDSRVAPAVRGILDVLARQYGAIGTEIASIDKSIMALHRACEASRRLAEIPGIGPVGATALVAEIGDWNSFSSGRSLAAWIGLVPKQHSTGGKDRLGSITKQGNRYLRWLLVVGAMAVIRYARKHGTERRPWLGRLMERRPTKVAAVALANKIARMAWAIMVRGERYKEPKLSLAA

SEQ ID NO: 312229 - protein, 340 aa, unidentified
MSLVLQLILPYPDSCLGTSPHQQGWDTKMEKLSYGGIDVSKDCLDVVVLPEGWFFSVSNDTAGWAELVARLRPLAVCAIGLEPSGGYERGIIRALLAAGLSVRRINPNKLRQFARARGVLAKNDRLDARLIAEYVAIMPTRVVQRNDAVERLAEIVTMRRQLCDEHVAVENQAVHLEDAMLRRLSKRRLIRLEADIRLLDKRLAEMVATNAAFAQLYELLTSMPGVGPVLAFSLIALLPELGKMSRKQIAALVGLAPYDFDSGKLRGHRSIYGGRMPIRNVLYMAALSASRHNPALKAFSNRLADANKKSKVIIVAVMRKMITTLNAMLRDNAAWQPQSA

SEQ ID NO: 312230 - protein, 355 aa, unidentified
MNDAKYIGLDVHQATISAAVLDSTGKLLMESILETKAATILQFVDGLRGSVHVTFEEGTCAAWLHDLLKPHVANVLVCDPRKNALLKSGNKNDRIDARKLADLLRSGLLSPVYHGENGVRTLKELARSYLALNRDVTRVMNRLKAIYRSWAIPCAGQRVYAPRYRSEWLGKISEVAVRRRAEIYYQQLDALRSLRQQVRRDLLAEGGKQGATKLLRQIPSIGSIRAALLIALIQTPHRFRTKRQLWAYSGLALKTSASGEYRFVEGQLKRSKKFLAIRGLNVNHNPDLKNIFKGAAIRAAAVPGPFQQFYAALVDRGMKPTMARLTLARKIAAITLIVWKKGVRFDAEYLKPQAA

SEQ ID NO: 312231 - protein, 347 aa, unidentified
MRFYTQQHPHYCGIDLHARTMYLCILNQAGAIVLHRNMKADPDSFLTAIAPYRDQIAVAVECIFTWYWLADLCAREKITFVLGHALYMKAIHGGKAKNDKIDAQKIAGLLRGGMIPEAYVYPEQMRSTRDLLRRRMHMMHQRAQLLAHVQNTNHQYNLPDIGKKISYRGNREGVAERFADASARSNVAFDLKRIGFYDGLLNEIELEIVRHAKQHDPNSVYLLDTVPGVGKILSLVLLYEIHDIGRFPSVQDFASYCRLVKPRKESAGKVYGSSGGKIGNAHLKWAFSEAAVGFLRHNPEGQTYLARLEKKHGKGKALSILAHKLARAVYYILRRKEAFDMKRFLHR

SEQ ID NO: 312232 - protein, 322 aa, unidentified
MSQTVAALIPAAVDYERTLVLAIEVSNKSWVLAAQVPGLPHTKAKRTINPEAEALLAAIAGYRARAAAMGRSIERVIAVYEAGWSGFWLARWLMRHGVEVYVVQPSSVPVDRRMRRAKSDGIDSELLLRTLLAWLRGEPRVCSMVPVPDEADEDARRCVRERTELISERVGLTNRIGAVLATLGVNDYNPLLRNRGHRLAELRTGLGEPLPANAHAKIKRLLARLELVLTQIAELERERDAVVETEASDKASKMIQQLTALRGIGVQSATVLVREAFVRRFANGKALGSYAGLASSPYSSGGIDREQGIGKAGNRRVRTVMV

SEQ ID NO: 312233 - protein, 425 aa, unidentified
MNYKQNEKINQVKESTLVVGIDIGSTTQYARAFDWRGIELGKVFPFSNSREGFESFKAWMQHLRDKYKKLDAIVGIEPTGHYWFDLGAYLEDEGILLVMVNPYAVKQTKELDDNSQSKNDRKDPKVIAKLVTEGRYSAPYTPDGVYADLRIMVANRKRLIREMTQIKNRFARWFAIYFPEYTDVFGDYEAQSSMLLLKKVCTPEAIVELGAEKINQIWRDAKLRAVGMKRATTLCETAKRSIGLKKGSSAARYEMKLLLEDYEYKKAQLDAVMEEIEKLCRKIPESEQMLAIKGIGVITVAGFLAEVGDVRRFESPRQIQKLAGLSLRENSSGKHKGQTTISKRGRSKLRAVLFNAAIPLIAKNPEFKSLHEYYTTRANNPLKKKQSVIAISCKLIRVFYAILAKGVTYDAQKLISDIHRQPQVA

SEQ ID NO: 312234 - protein, 402 aa, unidentified
MAGMTAGIDWASEAHEVCISKEGEAIERFSVAHDERGIAGLTRRLTKIGVARVAIERPDGILVERLLAAGLEVLAIHPNQVKAARARFAVAHGKSDRFDAYVLAELARTDAHRFRALVPNTEETKVLKTLTRAREDLVGVRVELANQLRAQLQAFWPGALLFDALDSLISLAFLKRYPSPADAKSLGQGRMAAFLARESYSGRTEAAELVARMRSAPQGTAGPAEQQARRAVVLGLVGALGPIVAEIAALDAQIREHLAAHPDAAIFAPLFRDRRTAICPATLIAELGDCRGRYPTEAAMAADAGMSPVALESGKLRVATFRRACDKRLRFAVATLADTTRHWHPWAKEVYRRARARGQDHPHAIRTLGRAWIRVLWRCWQDGVPYDATLHGNSHRLQPAGG

SEQ ID NO: 312235 - protein, 472 aa, unidentified
MWAGRCWVLGRVSEPDEMFDRPLESLNWEARVSVRASPNLCMKPFAQNDAPGRQASKMEVHMAASAVQPVRFMGLDMHKHYAMVGAVNKEQEVLLRPRKFTWPDFDRWSKQHIGPGDVIVIEASGNAWHVYDQLTARGATVYVANPLLVKWIGSAPVKTDPHDTLKLAKLLAAGMLPTVWVPPAPVRALRTLIGQRQRWIKQRTQARNRLQGLLQDHNLLPPEGDLFAPEQRPWWLALDLAAAERLLVAQDLLALDQLAPLADQVETAIEMQSTSEPWVSEIPFLIQQTGIGLLTAMTLLAAIGDISRFEHPNQLVGYAGLGARVHASGETHNTGGITKQGRRELRTAMVEAAWSAVTHNAFWKAKFARYDRRLGNGKAIVAIARQMLVSVWYLWHNRTVDRHTDALAIAHKLWTWAESGGKAMRHGLSCSHFVRFQLDQLGIGQELTELHYGSHVYRLPPAGSVASLPAAA

SEQ ID NO: 312236 - protein, 318 aa, unidentified
MDPQISFNQVVSRGCGIDVHQKVVVATIGGEGLKKATREFGTFTRSLTELKDWLLENGVTHVAMESTGIYWKPVYHVLEPTSLKVWIVNARHIKYVPGHKTDKQDSAWICKLLLAGLLKPSYIPAKEQRELRDLTRFRTKMIQHVASEKNRIVRILEDCNIKLSSVLSTTQGVVATKLIDKLCEVGTITMSDIEEVYHKRLEASKEDLYEACQGLIDKHHIYLLGLIRQDIASTEAVIKNLNARIKEVLSGYDNVLENLKAIPGLSTKTVEDLVAEIGLDMSVFPTEKHLASWAGMCPGNNESAGKKKVEEPPTGTNR

SEQ ID NO: 312237 - protein, 371 aa, unidentified
MIRSWTDSRRDWKPVAASVVGPRMSLVLRSFLPHPNSCLGTSPYQQGRDTKMAQRSFCGIDVAKDRLDVMVLPEELCWSVANDAAGWAELVAKLRGLRIAASGIEASGGYERGVVRALLAAGMSVRQINPFKLRQFAKACGVLAKNDRLDARMIALFVATLPTRSAQRYAPVERLAELVTARRQLSDDKVAAENASRLFEDAALRRLYGGRIARLAADIALLDKRLAEILAGDAMLARRYALLVSMPGVGPVLAVTLLALLPELGQMNRKQVAALVGVAPYDFDSGRLRGMRCIWGGRAPVRRVLYMAALIGCRCNPQLRAFHDRLAAAGKKVKVVLVAVMRKIITILNAMLRDNVPWVDHSIGRHILPAA

SEQ ID NO: 312238 - protein, 355 aa, unidentified
MTDNHQKIIIGVDTHKDFHHVAVISALGESLTDRKFDATPDGYAALIAWVTGQGDVLRAGVEGTGSYGAGLTARLRSAGIEVIDVLAPDKQERRLRGKTDQIDAYSAARAVLSKRATTVPKIRNGEVEAMRILRTSRRLVVKQRTEIMNQLHSLLVSAPETLRAKFAGLKAKDLAKACARLRELAGDDVVTAATKDAAKSLGRRHVELSLEADRFEESIRALVTAYAPELLAVYGVGPDVAATLLTVAGENVDRIGTESALAHLAGTAPIPASSGKTNRHRLNRGGNRQGNAAFHRIVLVRMKRHPETRAYVEKTLARGKTKRDTMRLLKRYLAREIFPILIAVQERHATTQIAA

SEQ ID NO: 312239 - protein, 392 aa, unidentified
MIYVGIDVASTKHDCFIMSDKDANSNLLITINNDIEGFTKLKETIYDFISVNDDEVRIGLESTGHYSHNILHYLAREGFDTMLINPLLTNMERKSSSVRKTKTDKIDAKSICTFLMRNQEFKPYTIKSYHSSALKSLSRSRFALVKQLSKQKQRLHMLVTITFPEYLKVFSTLHGKASLEILHKYSLPGTIANTRIDGLTNTIVNASKGRHGRDTALLIKSLAAQSTGEQNQVHAIEIKLCIEMIRFLEQQIQVYNVEIKKIVDEYCPIILSITGISYITGAIIIGEIGEISLFSSPDKLLAFAGLDPGVYQSGNYNANNISVSKRGSSYLRWAIHTSASIIIHHDNTFSQYYAKKRMEGKHHLVALGHVSKKLVRVIFSILKYNNSFVPQN

SEQ ID NO: 312240 - protein, 347 aa, unidentified
MILVGCDLHTRKQQVAVLDTETGEVVEQELAHAGDAVEQFYAALPPPVTVGIESTGYSLWFHTLLQRLDHTLLVGEAAKIRAMVVRKTKTDRRDARHLLDLLQHERFPTVWIPDPAARDLRVLIKHRLRLVRIRTMIKNGLHAIALNQRLALGPSLWSQRGLAQLRTLVLLPHTSRRRDDSLELLDWLTHRIDALDLQVAAAARANADVERLMTHPGVGPLTALATVLVLGPVRRFPGSKHVVSYIGLAPTVNASADKYRLGHISKQGSAVLRWLLGQAAPLAARADGDLKRSYFAVLRRRGRPTAKVALARRLLVRLYVMLRDQIDYDEFRARGQARRRAAASSPV

SEQ ID NO: 312241 - protein, 353 aa, unidentified
MTDEKQRVVAGVDAHTDEHHVAVLDAQGRLLGTAAFPTTADGYARLVGWVRGHGTIDRIGVESTGAFAAALVRKLLASGITVVEVNRPHPHARQRLGKSDPIDAELAARAVLSGTATAVAKDTRGIVEAIRQLTVTRSGALKARTAALQQLDDLIITAPQQLRSELRRGRTLRARAALCLKLRPNTNTLHEPAQAAKLALRSLARRIRALDREIDELDRQLEPLVQTAAPRTISLFGVGTQGASQLLVTAGQNIGRFRSEAAFAKICGAAPIQASSGRTTRHRLDFGGDRQANRALHLIAVCRLRHCDRTRAYATKRSSDGLNRREILRCLKRYIARETYHALRADLEALNPT

SEQ ID NO: 312242 - protein, 318 aa, unidentified
MSDSVFVGIDVSSQTLEVASTAATKTWQVSNDGCGIEHLVDQLSALGPALVVLEATGGYEFEAACALQAAGLAVAVVNPRTARDFARAMGALAKTDALDARMLALFARTLHQRPDRERFVKPLADAEMQRLQALVLRRRQLVQMVVCERQRIRMSHAAARPSIERVIEFLKRELGESDAEVAAHVQRHHAELAAALSSVPGIGAASVAVLLAELPELGQLDRRRIAALVGVAPLNRDSGQMRGQRAIWGGRSEVRRTLYMATLVAVRHCSAFRVFYERLLANGKRKKVALVAAMRKLVGVLNAIAKQRSRWVPMLHDT

SEQ ID NO: 312243 - protein, 415 aa, unidentified
MALVRWVGRAIGLDVHRDFCVVAICEDGQVRSAGRVPSTPEGLATLAQSLLSTDRVALEVTGSCWEVSRILEPYVQRVVVVSPDGTGISSARAKTDRLDARALALLLWRGELEAVWMPDERCRVLRRRLARRQQLVWSRTRAKNEIHAVLQRRLQGKPPCSDLFGVKGRLWLTGLELPLEELESVDAGIRQIEFLDAEIAAVERLIAGQALSWPEIRRLMTVPGVNLICAASFIAAVGEPSRFLTSRKLVAYLGLDPKVRQSGEGPARSGRISKRGSASARWALVEAAWSVVLQPGPLHAFYERTKARRGHGKAIVATARKLAVLFWCMLTRGEDYAHQQPSLTKKKLRRLQITAGAPKYAKTAAGIWSTNEAIRQAERELAQQAEASYRRMVTDQQAGAPARTKVGAGVTPERA

SEQ ID NO: 312244 - protein, 316 aa, unidentified
MENPQPFVGIDVSSQRLDVDTLPVSQPFSEPNHEDGIASLMKRLKPLNPQIVLLEATGGYEIAVAYALYEAGLPVVITNPKNVRHFAKALGRLAKTDKLDAQVLALYAQRVHPPVQPLRGQEQLELANLMARRRQLQGMIVMEENRRRTCTPKVRANIDLSLAHLRRLLKDLDRDIQDSIHRTPLWHEKAEILQSFTGVGPKVSASLIADMPELGRLPGNKASALAGLAPMNQDSGKHRGKRMIKGGRPAVRRALYMAALVASRYNPVIKEFYQRLRLAGKPPKVALTACMRKLLVILNAMLKNRTYWNPQLPLAA

SEQ ID NO: 312245 - protein, 346 aa, unidentified
MLYAGLDLSRQRLDVRILDEDGHTVEVMAVRPDADALHTLAAHVLRHGQEVTAVIESMTGARFVHDQLELRGWDVAIGDAVKVKGLAPLAAKTDKIDAWVLAELGRRDLVPEIWLPTPDVRAERERARFRLHLVRHRTALKNRIHATLMAFGHPVPVADLFGVAGRQLLARMDVPEPWNSSLATSLTMVDELDERIDACARDLRTLGADHPAIPLLVTVPGVGWILAYTIASEIGDIHRFASPKKLVGYTGLCPIVRQSGERDVRGPLAKNGPKYLRWALVEAATHAARDARYKERYERTKHRLGRQRGAKVARVELARRLAETIWHILTKDEPFAPAGPAMRLVA

SEQ ID NO: 312246 - protein, 363 aa, unidentified
MVEFTTVTVGLDVHARSIRLAAVRADELLEERTLPYDEEAVERALRRWPIVRCCYEAGPTGFGLYRHLVERGFECAVVAPGLVPQRPGDRVKTDPRDARKLARLLAGGLLEPIHVPSPELEAARDLVRAREDARLDRMRDRHRLSKFCLRHGRLLPTSSWTVTRRKWLSEQRFEHAAEQLTFDTYLHAVDLVDARIEQLERAIRATAEQGSWRDLVARLRCLRGVDTLTALALIAEIGDFARFKSAQELMAFVGLVPSEHSSGEHRRQGSITKVGNAHVRRLLVEAAWHARRRPKVGYELARRQRGQDAAVIERAWRCQQRLYQRWQRMAGRGKPQQKIVVACARELAGFVWAIATDQPLRSA

SEQ ID NO: 312247 - protein, 378 aa, unidentified
MMTTTRLHESTAGATVLLMAFELGQRAWKIGFTVGVGQRPRVRAIAGGAVGLLGDEIARAKRRFGLSPDAPVISCYEAGRDAFWLHRYLCAQGITNHVVDSASIEVNRRARRAKTDQLDLGGLLNLLARYVQGDRRCWRIVRVPTLAEEDGRQFSRTLETLTQDRTRLISRLKALLATQGLRLEVGPTFHDALTAARLWDGSPIPAGLQDRLAHDWTQLQQLEGQLRTLRAAARRPALTSAPGRLVAQLQTLRAIGPITAHVLTSELFAWRQIRNGRELGALVGLVPAPYQSGETYREQGITRAGNTHVRRVMVQLAWGWLYHQPTSALARWYQQRFAAGGPRHRRIGIVALARKLLIALWRYVDQGVMVEGAQLKVG

SEQ ID NO: 312248 - protein, 481 aa, unidentified
MSKPTQHSKKPGEKKTAAGQGKRSRKRKGMCLEDRPILEPNAAGIDIGAREIFVAVPPDRDADPVRVFSTFTEDLEEMAKWLVSCGVTTAAMESTGVYWIPAYDVLEQHGVKPCLVDAHGMKNVPGRRTDWHECQWIQFLHSVGLLRAAFRPDGEVCTVRSLMRHRSDLVQMTNQHIQHIHKALTQMNVQIHHVIDDITGVTGLAIVDAIVDGQRNPLELAKLRDPRIKASEETIVKSLQGTWRPEHLFTLKQSRQMYRHYQDQIAACDEEIEKLLVAFQPRVDPAEKPLPPDRKKRKRGRQKKNAKTKQGFDLRTESYKIFGVDLTQIPGLMAMVLTLFSEVGRDMSRWKTAGQFVSWLALCPDNDITGGRVAWRGMRRVHNRAGELFRMAAYSLHHDKSPLGDYLRRMKSKLGPTGATTATAHKIAIIFYTMVKKQVEYDATLWAERDTQREKRFEAKLKRQAQQLGYKLVPIEEKPAA

SEQ ID NO: 312249 - protein, 464 aa, unidentified
MKTPKFKSRFHQPRTNDTSDLRPINPNAAGIDIGSESHWVSVPKDRTSESVRRFGCYTADLYALADWLAECRVETVAMESTGVYWIALFQILETRGFEVKLVNAHHVKTLPGRKTDILDCQWLQQLHSYGLLSGSFRPEDQICVLRSYIRHRDSLIKSACVHIQRMQKALTQMNVQLHKVVSDITGTTGMAIIRGIIAGERDPQILAAKKHYRAKRSEAEIAAALNGDYRSEHVFALQQELQLYDVYQTQIAACDRQIQECLAQFSDKVNLDESPLPQPKHPRHKPQGNEPAFDLRTHLYRISGVDFTAIDGLGVLTVQTIISEVGLDPSRFPTVKHFTSWLGLCPSNRITGGKVKSSKTRLVVNPATNAFRMAAQTAGKSNSALGAFYRRLRSRLGTPKAITATAHKLARIFYRLWTSGGNYQDPGMDYYEQRYQQRVINNLQKKALAFGFELVPQPEANTVS

SEQ ID NO: 312250 - protein, 470 aa, unidentified
MTKYHLGGDVSKGYCDFVLCNQHKEVIEEVFQLDDTATGHQKLNTFLIHFLQTHEDAQIYAGLESTGGFENNWYRLLRTLAETLPVRVARLNPALVEADSRAGARRMKTDPISARVIAEYLISHPEKVRYNQPWYPQLRRHWNFIQLNLKQKTQLSNHLQALLYTSMPELVSYCREGIPHWLLVVLTEYASYDQLNEAGVAKLAGIRYVSREKAENLLHKIRPELGDSGPVSADIIATLARQMLSLKKDIQDQKKLLAQHYQTYGECPEEIELLCSFPGIAVWSAVGLMLNIGSVALFPTVKNLASQFGVHPVYKQSGDGSWGEHMSKQGRAEGRAVLYMVARSAIQCNPIIKQTYETFQNKGMTKTAALGVCMHKILRIVYGMLKNGTCFDARIDQRNKQKAKHAQPRPKQDKRRRWQRFDPKAPVSQRQYKKRQEQTRSQDEELVKCGIQRLAPTTQLLKKVIKDKPS

SEQ ID NO: 312251 - protein, 347 aa, unidentified
MAHFVGLDVSVKETAVCVVDDAGKVVSEQKVATEPDEIVTLVTSIGGDYARVGIEAGPLSQWLVNGLAEAGLPVICVETRHMKSLLKAQQVNKTDRHDARGIAQMMRVGLFKPVHVKTLAAQEQRMLLTSRRLLQRKMLDVACELRGTLRNFGLKVGTVSSRGYDARIRDLVEHYPRLAAIIEPLLTVRRVMREEFARLHKLLLHVARHDAVCRRLMTAPGVGPVVALTYRAAIDQPQRFVHSRAVGASAGLTPKRYQSGEIDYDGGISKCGDLMLRTMLYEAAQSLLMHSRRWSWLKAWGIRVAQRRGIRRAIVAVARRLAVILHRMWIDGTDFRWSNQPTPAAVA

SEQ ID NO: 312252 - protein, 398 aa, unidentified
MTESSDYESVQVFIGVDVGKDTHHAVAINRSGKRLFDKALPNDENKLRSLISDLKQHGQILLVVDQPATIGALPVAVARSEGVLVGYLPGLAMRRIADLHAGEAKTDARDAAIIAEAARTLPHALRTLKLADEQIAELSMLCGFNDDLAAQTTQASNRIRGLLTQIHPALERVLGPRLEHPAVLDLLQRYPSPEKLASLGEKKLAAQLCKLAPRLGKRLAADIAQALAEQTVVVPGTNAAAVVLPRLALQLITLRKQRDEVALEVEQRVLAHPLYPVLTSMPGAGVRTAARLLTEVACRAFASAAHLAAYAGLAPVTRRSGSSIRGEHPSRRGNKALKRALFLSAFAALRDPLSRAYYTRKMSQGKRHNQALIALARRRCDVLFAMMRDGTFYPPQGS

SEQ ID NO: 312253 - protein, 317 aa, unidentified
MSQHTIVTAGVDVSKYKLDVAISDRSSVVCFEYSLSGLERLTKFLQKQNPQLVCLEATGGYERSLVHHLQTQGFPVSVVNPRQIRDFARGLNQLAKTDAIDARIIARFAERCEPRITQPVPESRRKLVALVSRRRQVQEMLVQEQNRLGTIADKEIQKLIRRMVREYQKQRREIDRRIAALIKQDPQLDTHARRLQSVPGIGPATAGVLLAELPELGTLNRQQIARLVGVAPTNRDSGTLRGKRTTGGGRVQLRTALYMPTLVATQHNHRIRTFYQHLLDSGKPKMVALIAAMRKLLIILNTMTRNGQSWNTTPNNA

SEQ ID NO: 312254 - protein, 328 aa, unidentified
MAKEKFDVSFLRLSSKSNVVTPVHHVVRNTESGIKAFLKGLPSDSVLVAEHTGVYGERLLKMCTEMNVKIAYVGGHVIHTYKSGPDRGKTDEQDCNVLREFGERFTDKLVYTTFPEEDIYELRQLSRQRTMLVEERKRITTADKTEDCRPYRSEAVKRSMQHIVDLLDEEIKDMERAMLTVIRKHDKISSSYDIITSVNGVGLVTAVELIVKTRNFTTITTAKQYSAYAGTAPYEKSSGKINQGAHVSKWGNRRSKTLLYICAECARMHNKEMKLYYERRTIIDKKAHHYVLNAIANKLLRLIFSLINKNEKYNPCYIQRDPRSLNIN

SEQ ID NO: 312255 - protein, 342 aa, unidentified
MTVMIGIDPHKASHTAVAIDNTECVLDELRVRACSKQTDQLQSWAAPFPDRVWAIESARGLGYLLAQQLVAAGETVVDVPAVMSTRTRLLGSGRAQKNDPNDARSVAIAALRNDQLCKVGLDDHARVLKLLAKRHRDLGRLKSKASCRLHALLMELEPGGMTKEMTVNRANGILDRIEPASQMVEHRLAVARETVADIEHYETQMKASMKRLRTAVAASGTSLTEIRGVGVVVAAMIIGHVGDVARFKSPAHFASYNGTAPIEASSGENKRHRLNQRGNRQLNWALHVVAISQLRYPCQGREYYDRKRAEGNNTKEAIRALKRQLSNVIYRALVADARRLGE

SEQ ID NO: 312256 - protein, 331 aa, unidentified
MPRIALAGIDVGSRELVISMESPAGRITPLRFPNTPAGHKHLCARLTRGGRPARACMEATGVYGFELALALHQAKGVQVMVANPAAVRDFSRAFLKRSKTDAVDAATILEFLRRMPFLPWHPPDPEVLDLQALARRIAAIKITHTQETNRLHASDHYADLTPAIAEDIETHLDHLKLSIRHLTQEAVRVIRSHSGLSQKFDRLVSVRGIAEISAVRILAELATLPEEMTSRQWVAHAGLDPRQFESGTSIRKPGRISKKGNRHLRAALYMPALVAIQKEPHIQAFYEKLLHRGKKPMQAIVAVMRKLLHAIHGMLHTNTNFNGEKFYALNT

SEQ ID NO: 312257 - protein, 344 aa, unidentified
MLHAGLDLSRKKLDVYLLDEEGNHVDQLICPPDGGALKTFARGVDELHGGPIHAVIESMTGARFVHDTLEGCGWDVEIADAQKVKGLAPLACKTDRIDSKVLATLSHRDLVPSIWLPDPRVRQERELARFRLHLVKHKSMLKNRIHSSLISFGKPCPVTDLFGVEGRRLLEQMEIPEPWRGDITASVELIDHLERQIDQTNKRLRAGHANHPYIPLLMSAPGIGWVLAFTIAGEIGEIERFASAEKLTGYTGLCPRVNQSGDKDRRGPITKAGPTYLRWAMLEATMHALKHPAYSERYQRNKRRLGKQRGAKVAQIDIARRLSHAIWHMLSRNEEFAPRGAVFV

SEQ ID NO: 312258 - protein, 480 aa, unidentified
MNIKARRTKKQVNVENQAINLLSKEELNKKIEVVEKELRSYTWRELETNGKFVKNDKLSFITDDMLIAGCDIGSETHYIRVIDVRGRELSSGAFEFGNTSEGFANARAWVLALAAKNDKKQIVLGLEPTGHYWFALAVWMISNGVSVVQVNPYAIKQSKEIEDNSQLKDDRKDPKLIVNLVKDGNYGMPYLPEKVYTDMRRLSMFRDQLNEDRIRNINRLHREVKIYFPEYMDAFGKIDGAFTLEVLKVSAIPTDITVLGAEGMKNIWHNAKLRGRSYSRANEIVSYAEKSVGLTDGTDVGREAVKWYAEQILRLDEQLSEIESALHEKCREIPYAENILAINGVGENILAGILAEMGDISRFDDVKEIQKLSGMGLVACSSGKHKGQTKISHRGRKRLRYWLFQAAKSAVSHADEFKQLHEYYTTRINNPLKKMQSLVVIACKILRVIYTILKTGTTYDPQKLLKDIKHPTASQAPMAA

SEQ ID NO: 312259 - protein, 367 aa, unidentified
MDAPCSGAECAKMEVLLAPQQGTPMSEITVIGLDLAKHVFQVHGADPDGRPVLRKRLRRGQVLEFFASLSPCLIGMEACAGSHYWGRELQALGHEVRLIPPQYVKPYVKTNKNDAIDAEAISEALTRPTMRFTAVKSAEQQSVLMLHRTRELLVRQRTMLVNALRGHCGEFGIVAAQGLSRAGDLIKRIEDPADTALPDLARQALQCLTSQIRAIQEQIALIEKKLLAWHSSCGASRRLAEIPGVGLMTATAVVASVGNATQFRSARQFAAWLGLVPQQHSSGGKERLGHISKRGDGYIRRLLVHGARAHLSWSRRKKQIRSAWLTGLLARRPTNVVLLAMANKTARIAWAMLSRGERYQEMIAAAA

SEQ ID NO: 312260 - protein, 355 aa, unidentified
MNSVRYIGLDVHRDTISTAVLNESGRLIQQSILATRAAAILDFIGGMRGTLHVTFEEGTHSSWLYDLLSRRVTRLVVCNPRKNALMKSGNKSDAIDARKLAELLRADMLSPVYHGEKSAMEVQHLARSYALLTEDTTRVMARIKAVFRGQAIACAGKKLYGKKHRDEYLAELGTGALRRRAEFLYQELEAVQQLRRQAKRDMIVECRKYPETKLLCSVPFLGPVRAAVLIGRVQTPHRFRTKRQFWAYCGLALEMRDSGEYRMVDGQVERRKRPAQIRGLNWNHNHELKNLFKAAATSASACEGVFREFYLGLLKKNMQPEMARLTLARKIAAIALNIWKKGEAFDAEHLKLQAA

SEQ ID NO: 312261 - protein, 321 aa, unidentified
MSKYIGVDISKNDFYACFGETAEPILFQNNLKGIKVFEKFLIKNNFQKEETVIGVESTGIYHLPMSFNISQAGFSVNVINPLIVKKQNQTSLRKVKNDKKDAGLIRYCATQNAGYKFIDDAETLTLKSLVRQRDSLATIKNTLSRKQESVEYKEKNLRISISKSNKRLIKSVDAEIKRLEKDLESFRKKEQKLLRTIPGVGPITAVSFLSEVGDVSRFPFSQKLIAYIGLDSRVHKSGTSINGKGYITKRGNKILRTRLYNACSVAVLRPNIFQDFFKKKRSEGKAYKVALVATMHKMANVIYAVWKNNTPFEDRRRLTGI

SEQ ID NO: 312262 - protein, 312 aa, unidentified
MKSYKGFIGIDIGKFNFFVATYGRKSVREYENTPSGIDQFMNDFRKELPEALCVLEPTGGYELKLLIALCERHYTVHRAHTRYVKDFIRSLGNGAKTDNLDACHLSLYGYERSETLSKFSLPSAGASKLYELVQRRRDLKQMLVAEKNRFQSPRTESIRDRIKAHIGFLEDEMAIITTNIEELISEDELLKKKRKILQGIKGIGKIISFELLISLPELGQLSRREIASLVGVAPISKDSGKRKGYRRTGYGREGIKPLLYMAAMAARNSKSDLRVYYENLISRGKCKMVALTALMRKIIVIANARLKEVVTT

SEQ ID NO: 312263 - protein, 395 aa, unidentified
MRPVQAAEDFTGDEAFEAANDFALCFGIEIDGVDGPRSERPCRRVAGGATPIRSRSHVSRTVGIDLAKQVFQVHGVDDAGRPVLKKRLRRAELRAFFAGLSPCLIGMEACASAHYWARELAAVGHEVRLMPPSYVKPYVKRQKNDAADAEAICEAVTRPTMRFVPVKSEDQQAVLMLHRTRDLLIRQRTALSNALRAHLAELGIVERQGVAGLDALMASVEGETEIPPLARKALALLIKELRSMKEQIKAVETEILAWHRGNEASRRLETIPGVGPIIASALAATIADPSVFKSGRQLAAWIGLVPRQNSSGGKERLGRITKQGEPYLRRLLVIGASAVIRFCKTDGSALGGWITALRARRPAMVATVGMANKMARIAWAVLSRGKEFEMRPAMA

SEQ ID NO: 312264 - protein, 346 aa, unidentified
MLYAGLDLSRKRLDFHLLDGEGATVEVGAAPPDADGLLGLTQRLDRHREPIRAAIESMNGARFVHDRLELQGWQVEIADAQKVKGLAPLACKTDRIDAWVLAELTRRDLVPAIWLPDPTVRAERERARWRLHLVRHRSSLKQRVHAVLLTHGKPCPVSDLFGVRGRQLLARLGLPEPWQATIEASLRLIDELEREISDCARELRRLGADHRYVPLLCTVPGIGWVLAYTIAAEIGDIGRFPSPRKLAGYTGLCPRVYQSGERDLRGPLAKQGPKYLRWALVEAATHACTAPVYRDRYRQTKARIGKPRGAKVAQIDLARRLTEAIWHMLTRNQPFAPKGATDPLAA

SEQ ID NO: 312265 - protein, 422 aa, unidentified
MLEQTQDEQEIIARVAALDIGKAELVCCVRVPDPKGGSRRVQEVKTYSTMTRSLQTMADRLMDLGVTRVVMEATSDYWRPPFYLLEAHGFQVWLVNARDVKNLPGRPKTDRLDAVWLCKVAERQMLRPSFVPPVPIRRLRDLTRYRIALVSDRNTEKNRVEKLLEDAQIKLSVVASDIFGVSGREMMAALIAGERNPQVLAQMARSRMRVKIPQLQEAFVGYFTDHHRFLLTKMLARIDQASADIADLDTQIEAQIAPFAGAVARLDEIPGVGATAAAVIIAEVGVDMTRFPTPAHLSSWARFAPGVKESAGRKKGTGSTGHGDRYLARILGEAAVSAAKTDTFLGERYRRIARRRGKKKAIVAVGRSILVIVWHLLSDPETRYHDLGSGYYDSRINPERKKRNHIRELEALGYKVTLAPAA

SEQ ID NO: 312266 - protein, 393 aa, unidentified
MSQVIMFGCDLHDRNMLLRYAVGRNEPQQLSYDNDAGGRRRMIARLKSLAEKHGAERIVFVYEASGLGHGLSDQLHEEGIECYVLSPTHLPKTAKGARLKTDAKDAQMLLEQVRGFVLAGNKLPAVWTPPQRLRDDRELVRARVDVADELTRVKLKITTLFKAREIKIASPTKCRWTKAFIAWIRDQVIPTLDLTVATKLKLLLDRFEMYLKEQAELDKALKLLSREPRYKVPCAELLKIPGVGRLTAMTFLTEMGDLNRFDNRRQVAAYLGLCPSSNESGQKNDRKGRITRQGPARLRKMLCQAAWVSVNLSERAAADYYRIKQNQKNRTKKALVAMMRKLGIKLWHTALAAGVSSELVGRDRPGKASARALQRDGSPPSLSPSHQPLGCAG

SEQ ID NO: 312267 - protein, 352 aa, unidentified
MSNQELFPNVTIGLDLGDKVSRVCEIDAGGKIVKTAAVATTPGAMERYFGDRPRCRVVLEASTHSPWLSRQLKELGHEVVVSNPSEVYAKRPRKRRNDRTDAEFLARQGRADVELLHPIQHRSAEAQQDLALLRARDQLVGARTKLVSHVRGAVKSLGGRINKCSAEAFAKQAAAQVPEALRPSLTPLLEVIADLTRRLREMDKQVERMIEAHPEVVRLQQPGGVGPLTALAYVLAVEDPARFKHSRQVGAYFGLVPKLDDSSDSSPQLHITKAGDALVRKYLVSAARYILGPFGTDCDLRRYGEAIAARGGKNARKRAAIAVARKLAVMLHRLWVSEADYDPDWMQRRRAA

SEQ ID NO: 312268 - protein, 373 aa, unidentified
MRDDSEAYVGLDTSKLKISVAVAEAGRGGEVRFLGEIDSAPEAVERLVRKLEKRHRRLSFAYEAGPTGYGLQRQVAALGHDCAVVAPSLIPKRPGERVKTNRRDALALAKLHRAGELTPVWVPDPGHEAMRELVRAREAAMEDLRAKRQHLQSFLLRHGRVFTGRGAWTKAHTRWMCELAFEHPAQHLVLAEYRRAIADAEERLERLARQVAELVPSWSMAPVVAAYQAMRGVAFLSAVTFVAEIGDVRRFDSPRRLMAYLGLVPSESSTGEKVRRGGITKAGNGRARRVLIEGAWTYRFRARMSRLLEERQAGLPKAVREIAWKAQVRLCGRYRKLMARGKRQGVVTTAIAREMAAFLWAIGREVEPQQLAG

SEQ ID NO: 312269 - protein, 319 aa, unidentified
MAQNGLVVAGIDIAKDKVDVCIRAVSQLQTFPSTAEGRRQLISWLRKHKVTKAVMEASGGYEREWAKALRVKDIEVRIVDPKRVRHFAKSAGRLAKNDVIDADTIAWFAEIFGETPGQAHDAARETLQQMVNARLGLMDMRTMVSNKGEHDVPEPVRKSHAQLLKSIAVEIANLEAAIAAMVKATPHFAARAEIIESVPGLAGTTSAGLIAMMPELGEASNEAVSALLGVAPYDDDSGKRQGGRQINGGRRKARNLFYMACMGAATRHNPALKAFYQRLIAKGKLTKVALVACMRKLIVILNIMLARGEKWDASRYAVS

SEQ ID NO: 312270 - protein, 417 aa, unidentified
MNQGTDGWSRDTAFVGFDWASDHHDIVVVDGHGQIVEDFRIEDTANGWGSLIKKLSKYPDPAVAIETSSGATVERLLEAGYAVYPVNPKAAKRYRERKAPSGSKTDRCDAWSLADALRLDGHTWRPLQSDDPLTVELRLLCRDEIALIEQRTALVCQLRAALAEYYPVALEGFEDWTLPAAWAFIEAFPTPAALAQAGKRRWEKFLHTHKLYRRETYQKRLTLFAQAQSFCGSEAATRAKSMLALALAGQLRVLQKHLDKFRQQIEKLFAKHPDHDLFGSLPGAGSKLGPRLLAELGDDRERFDSPEALQCHAGTAPVSYQSGQLKKVRFRRACHKVLRHTVHLWANLSRAQCPWANAYYEKKREEGQSHACALRCLGQRWLKILWKMWQTGSTYDAELHQRNQLKHGSWVIALMPT

SEQ ID NO: 312271 - protein, 341 aa, unidentified
MPIVTIGIDLAKNVFAIHGVDDAGKAMPIKPHVPRDQLVALIAQLPACLIGMEACSGAHHWARVFQQHGHTVKLMAPNLVAPYRMSGKRGKNDAADAAAICEAVTRPSMRFVPLKDEHQQATLCLHRTRQGFVEERTATYNRLRGLLSEFGVVLPQSPEKLRRYITEHLDTLPGWAKHSISDLLDHAGNIEDRLIEYDRAIAGIAREDARSKRLMQLRGIGPTTASALLASIGAGHDFRNGRQVAAWIGLTPGQYSSGGKARLGSITKAGDAYLRGLLVNGARAVIASLGEKQDRFSRWVRTLVERRGYWRAAIAIAAKNARLAWASLKYGDDFKLEPVAD

SEQ ID NO: 312272 - protein, 341 aa, unidentified
MAMTIVFVGIDLAKNVFALHGVDEAGKAALVRPVVRRDQLLEAVAKLPPCTIGMEACSGAHHWARQFERFGHRCRLMAPKFVAPYRMSGKRGKNDAADAAAICEAVQRPSMRFVPVKSELAQSRLAIHAVRQGWVEARTACINRLRGLLSEFGIVLPLKAQTVRTQAAAHLDGLPGWMKTAGMDLLDELRHLDERISQYDSHIKLMAQAEDRSERLMQIPGIGPTTASALVASVGNGHDFHNGRQLSAWLGLVPGQYSSGGKQRLGRITKAGDSYLRTLLILGGRAVLAAAANKQDRLSRWATNLAERRGYWKAVVAIAAKNARMAWAMLAKGEDFKPVST

SEQ ID NO: 312273 - protein, 335 aa, unidentified
MMDTTTGELVERRLEHGTGEAERFYAALAAPARVGIEATLATQWFEKMLTRYGHELWFGDAAEIRAAMVRKQKTDTRDARHILNLLMEDRFPRIWVPSAVERDVRHLVRHRHKLVRFRTSVMNQLQALAMGQGLCLGKKLWSTVGRQKLESLQLDPWANRRRRELLELLDQLDPAIEELDRAVIREAENRSAAVCLMQQAGVGPVTALAFVLTVGPVSRFANSKKLVSYLGLNPSEESSGGRQRLGAISKQGNTLLRSLLVEAAQTAARLDPELRRDYQRLKFRRGHSGVAKVAIARKLAVRLYWKLREAAQPNTAARMQGSPVTPVVGESLSSY

SEQ ID NO: 312274 - protein, 427 aa, unidentified
MQNTERIKRITPSTIIVGIDVAKDIHWARITDYRGIDLIKPVRVHNSIDGFESLLSTIEKQRQKHGCDKVMVGMEPSGHYWRALGWYLKLHESQPELLGINPYHTKQATELDDNAQTKSDPKDALTIAHLIRDGRYFDTYLPEGEYAELRQLNAERQRLMKQISRANNVLIAQLDEFFPEYATVWGNVTCATSLELLKTYAFPSDVMATPREKLLEDIKRASNGTEGVKLMEKMIKAASRSVGVKEGQRVVRLRILSLIDEFTYFQQKKEAVEAELEAVMDTLQLGKVLQSMLGIGPIISSAFLGEIGDISRFSNWRQVRSLAGLNLVEKSSGKHKGKTKVSKRGRPYLRHMLYLAGENGCRSNPEMRKYYRYMRDRKDNPLNGHQAFVATGLKIMRILFHMAKTGESYDPSKALGTVRLEQIASLG

SEQ ID NO: 312275 - protein, 348 aa, unidentified
MRFYKQPHAFYAGIDLHARSMFTHILDHSGATVFERDLPASPDAFLNAVAPFRAGLVVGVECMFAWYWLADLCEDEAIAFTLGHALYMKAIHGGKSKNDRIDAAKIAGLLRGGMFPMAYVYPRAKRATRDLMRRRCFFVNQRSQLIAHVVNTNSQYNHPPLTARLCYPRNRTEDFADRFADPATQLSIRADLKLIDNFDAQIDDIERVVLKTAKIDDPVSLAFLRTIPGIGKILSLVMLYEIDRAERFPEVGNFLSYARLVRCEHESAGKKKGTGGKKIGNAHLKWAFSEAACLMLRAMPEAKKWLARQERKRGKKKALSVLEAKIGRTVYHLLRKQQAFDAKRFFAN

SEQ ID NO: 312276 - protein, 400 aa, unidentified
MRTVFGIDVSKATSEVAILVNGERVHGYSIPNDVIGFSRLFHDLTQVVNPEIIFEATGVYSRRLEAFLKNNNYAYTRLNPLEAKKQLDSLRHRKTDKIDAETLAQTQFVLNRKPSYVQEEIFEHLRDLSRFYQNLTEDIVRAKNRLHKGLQDTFPEIEKLLFIPSGAQYWNLIITFPSASLVLEKSRIELQNIVRQSTAKQISENRVIGLTDKLLDLAEQSYPAVATDSPMLETVRYYAQELLRLNVQRQSVLEHMVEQSQTLPEYDVLLSIPGIAETTAVSIIGELGDIRRFRSSNQINAFIGIDLRHYQSGDYLAQEHITKRGNPYARKTLFKAIHNIVSASRTKPSHIADFYAKRKRQSPNAPTKPYTIASMHRLIRCLYYLITHNKTYDYALTQNQ

SEQ ID NO: 312277 - protein, 350 aa, unidentified
MTMVGGFDVHRKQITFDYVDDDGLVHWGQIRPATRKTLRHWLREHCPTGDAEFALEGCTGWRYVSEELAAAGVGMHLGDPAEIAALRGRKKRAKTDRADARLLRTLLLEGRFPESWIPPAHVVEIRTLGRLYCTLMDERRAWQQRIHAQLFHQGCPPITALLSVAGRDALVGVELSAAGRQYVDTALRRIDELTVEIEPLRAQLVRFARRQTGCQALQRQYGIGWLCAAIIWAEIGDARRFSSSDQLVRFAGLDVTVYSSDAKRSPGHLSRQGSPELRWAAFEAAKCATRRSSPDYGYYHKLAAKHDGHNGKNPTLAVERKILRRCYHTLRELGDAALALPVPESEEVAA

SEQ ID NO: 312278 - protein, 422 aa, unidentified
MQKRRYRAINVKQVNWEKVAELAAGQPTVLGVDVAKDEFFAALMKTDRSVIATIKWVHPQQTPEMTEHLLQNVDVQNLEVVMEPSGTYGDALRGYLTRLGLAVYRVSPKRVHDAAEVYDGVPSLHDAKSAYLIARVHLDGASAPWEELSVSRRDHHALTAELDLYQGQHQANLNRLEAYLNRHWPEVVRILDLGGVSLHTLIGEYGDPGQVSAHREQAGQLLRRTGRGLLRAEKVQQVLDSSETTLGLPCTEGERHLLQVLGQELLRTHQALKALEHQISEVVEDDLVLRRMASVVGKTTSLVLETTQGTPLDYSNPHSYLKGLGLNLKERSSGKHAGKLKITKRGPGKARKYLYFAALRWSHQDPVITAWYQNKIKRDGGLKGKAIIAVMRKLALSLWYVARGEAFDSRKLFNARALGFTA

SEQ ID NO: 312279 - protein, 381 aa, unidentified
MKSQDSNYVGIDCGKKSLEVIRINSEGSYERQQFSTTEIGISKLINWLNPNDVVGLVFLACKEPLAKLRCSLAISLFMNRSIGSQSFRIAKSILNKGIQVIVLNPGDLATIYQSLKKTDKEDSLKIARLIQRFPIEELPVVPVPTDEEEDNRRLCSEQENWTRQLTQGKNRLHSLFTQAGLTEITKKHLRTKSSRETSVALLPSRYHKEAERILQVLDLVEQNLKLIEEEIKEALRKNQTYTQTIMSMPGIGMITSLAILSYMGDCKRFSSAKQAAYYVGLVPRVDISGDSAYYGRIVNRGCHSIRRVIVQAAWSLVRCQHGGKLKEFYERLYSKKGAKKSIIAVSRKMIEVLYSMIRTGTLFDSMPEEVLHRKLAQYGLM

SEQ ID NO: 312280 - protein, 360 aa, unidentified
MQTQRTELNFEGQNFYVGIDVHLKTWTVSITSEQLMLKTFTQPAQPEKLLNYLVRNYPGGTYHSVYEAGFSGFWTHYKLKEMGINNIVINPADVPTTQKEHLLKDDPTDSRKLARSLRSGVLKAIYVPEPLTMEDRSLVRARATLVKDMGRYKSRIKSQLNLYGITYPEEFEKAGTHWSKRFIKWLNETDFFQSDPGTLSLRIIVQEAEQQRKLILDATRAIRKMSQDEKYASNMKLLTKIPGIGLITAITFLTEIENIERFTNSDHFAGFIGLIPNRHSSGAKESKGEMTFRGHENLKKMLIESSWVAARCDPALTLSYHKYTRRMESNKAIVKIARKLLNRIFYVLTFKKEYVPCVVK

SEQ ID NO: 312281 - protein, 407 aa, unidentified
MRVVGLDVSRTFGEIAYLEEGQVRSGGRVMLQHEPLQRFAQGLQPSDAVVLEATGNTAAIVTALKPHVAKVVIANPVQVRLIAEARVKTDKIDAAILAQLYASGFLPQVWMPDDRTQALRRQVARRSQIVRHRTRLKNEIHSVLAAHLIPQCPAADLFGRKGRVWLSEQPLPMDERLAVEQRLRELDRLEEDLEAIDRLLCEAVLLDDQLKRLLTITGVNCIVAIGLLAAIGDISRFAAPEKLVSYFGLNPRVRQSGLQPAQHGHISKVGRAHARAMLVEAAWSAANAPGPLRAFFLRIRGRRGQQIAAVATARKLAVIAWHVLAGQEDFAWSRPALTAKKRRELELRAGMPAKKGHRGPAAEYSLKEVRATERAAAQVAEQAYVRFVANWRPKKPSPSRTEEASRR

SEQ ID NO: 312282 - protein, 317 aa, unidentified
MSEKVLVAGIDVSKERLEVWVLGAELGVCVGRDADGLRVLVEWLGEAGVTIVGLEATGGYERAVIDALEAAELFRVRLLNPLRVRRFAEAAGRRAKNDGIDAKLIARFAATFEEDRAPREPELRRIGDHLTLRRHLVDAMIALEGELEHLAAPGLRRMLKELMRLIERRRDALDKQIAALIAAVPALAEKAARLRSVPGVGPVLAATLVALVPELGRVGRREIASLVGLAPFDNDSGKSRGERHIAGGRKTVRNVLWMAAGVAKRHNPVIRAFAERLAAKKPPRVVRTACMRKLLVILNAIMRDGSQWRPKELARAA

SEQ ID NO: 312283 - protein, 421 aa, unidentified
MGIDKAKVRTSKQARRHNMKHVNAFDISMGKSYMVVYNGLKKCKLEKEIEHNRPEFVELKVLINDLIDGYGEQPHIVFEATGVYSRPLERFMKENNYRYCLLNPLEAKLQCDSLRMHKTDRSDAHQLALTHFTNERRIETESADVYRQLKRLSRLYSELDDELSVARSRMHKVTQETFPELEKIFTTKSELFLNVVQLYPHPDLVLNQSKTVIKNRILANTNKRLSVKKAEEKAVELLAAAKQSYPAASSTDVLCDQVILYAKRFQELLLQKNHCIYKMESLAEGLEEYDILLSIPAIGANTAVRIIAEIGDIRRFDNNRQLNAYAGIDIRRYQSGKFIARDKINKRGNKHLRKIVYIVVQNMIKQRRLGGNHIVEYYDKLKKQPYNKCHKVTSIACVNKLLKTIFFLVTHNQNYDYRLAP

SEQ ID NO: 312284 - protein, 410 aa, unidentified
MVKENFIYVGIDLHKETHTAVMIDCYNQKLGEITFPNRPADFPKLVTKVKKCNTDAKEVVYGLENAYGYGRPLAVWLIDKGYFVKDVNTAISHRQAKHRGAMYRKSDSDDAEAIALATLNMLDKLPDACPNDAYWSLGQLVHRRDNIMKQRTRLVNQLHEQLCIAYPSYKSFFNDISRPTALYFWEHYPSRKYLRGKSVEDLRKELVPVSHNRCSTKNCEKILDAAASDKVKNNAYQDARDMVTLSIVSDLQHYDSQLAEVDKMLEQMYKMLGCTLTTIPGVNVITAVKILAEIGDIKRFSNANKLAQFAGIAPLHLSSSGKGKDVATKQGNRRLQATIYFLAIQMVQVSSKGTPRNSVVRAYYEKRKAEGKTSQQALICISRRLISIIYGMLKHGTEYRMPVVESAGEK

SEQ ID NO: 312285 - protein, 426 aa, unidentified
MKSTTQNAKIAAITEKTLIIGLDDGSETHFARAFDWRGYEFSRKPLEFSNTGEGFETFRAWIDELKEKHGMDKVMPGMEPTGHYWFNLGKFLQDHGMTPVHVNPHHVKKSKELDDNTPSKNDRKDPKVIAGLVKDGRYFRPYIPDGIYAEIRALSGLQVLAQSEITRLKNRIARWFSIYFPNYKDVYGNIGAVSGLMVLEAAPLPADIVKLGVDGVNRIWREAKLRGVGLKRAKTLVTAAEHSIGSRDAQEAARIELRILLADYKMQTAQEAELMALIEDKIRKVPYVDKLLEIRGVGLKTVTGFVAEVGDITRFDDPRQLQKLAGYAIVKNESGKHKGESHISYRGRKRLRYVLYEAAVSVVSHSAEFRSIYQYYTTREKNPLKKMQSMIAVACKLVRVFYLILKTGATYDAGKLMDDIRRPVAA

SEQ ID NO: 312286 - protein, 314 aa, unidentified
MKALRTHVAGVDVHKEMLAITVMIGKGDEDPSVEHFECSTMTDDLRAMGVVLKSRGVTAVAMESTGVYWKPVYNVWEPMGLNPIIGNATHMKNVPGRKTDQKDAEWIAQLHRFGLIRASFVPDGIYQRLRLLSRQRTNLTDDLGRIKNRVQKVLEDGNIKWSSIVSDTFGVSGIKILDLIAEGVTNAQTLASQVTTKIKRKDEAQKALTNCLTTEHCFVIKLLMRQFRDIQALILEIDNELTEMTVPYAHLIEELRKVPGIEKVLAVGILAEATADMGSFADERKFAAWAGVASGNNESAGKKKDLNADTATRT

SEQ ID NO: 312287 - protein, 338 aa, unidentified
MKIKTLGVDLAKNLFHLHGVDAHGKVLVRKRLNRNKLLEFMANLPPCLIGMEACGGAHYWAREFRELGHEVKLMPPQYVKPYVKTNKTDYNDAEAICEAVGRPSMRFVGIKEVAQQDVQGLHRIRSGFMQARTRVVNQTRGLLAEYGIVVGRQVGQLRRRLPEILEDGENGLTAFGRELFAGLYQELVHLDERIRTCDEQMDRVFKGNEVCQRLAEVEGIGPITATALVASVGDPSVFRKGRQMSAWLGLVPRQHSTGGKAVLLGISKRGDRYLRTLLIHGARSVVSRAQGKSDVRSRWITRLRQRVGMNKACVALANKNARIAWALLARGERYQVAL

SEQ ID NO: 312288 - protein, 427 aa, unidentified
MFTAAFASLTKMNFNKLLSGNITKYQKEGFIMISVGIDVSKGKSTVCIMKPCGEILESPFDIGHTADELDSLISLIKSFDEETRVVMEDTGHYHLPVATYLSSHNIFVCCVNALRMKKFCSQSIRRAKTDKIDSIKIASFGITYWNELVKAYPSNVIYDELKFLARQYYQVTGMLVKSKVNFSNLLDQVMPKINDVLSNQGENHKLTEFVSRYIHFQNILDMGEMKFTSDYCKWAKKKGYRLNERKAAEILALAQNGIPTLPNSQSVKIAVSEAVKLIHSIEESRNTILAQMQDLCNTLPEYSVVKEMDCIGDTLAPRIIAEIGDVRRFKNKHSLIAYAGIDAPPYQSGAFHASERHISKRGNSYLRKTGYEIMQSLIKHKPADNAVYNFIQKKRSEGKCGKEAMIAGLNKFLRVYYGKVMEFYSEH

SEQ ID NO: 312289 - protein, 377 aa, unidentified
MKRVKFVGLDVHAETIAVAVAEQDGELRSLGVLPNREEAVRKLVRRLGPVEELRFCYEAGPTGYALYWQLSKLGAPCVVVAPTLVPVKAGDRVKTDRRDALKLARNHRAGELTAVWVPDAEHEALRDLVRAREAAKKDQLRARHRLSKFLLRHGRRPPLEIKPWTVKYLDWVKRDVHFQPQAQEATLLDYLHEVEHAAARIARLDAAIGEAVKVAPPKMRAVIAALQALRGIAEISAVTVVAELGEVTRFRKARQLMAYGGIVASENSSGARTQRGGITKTGNAHLRRVVVEAAWAYRHRPSVGFTLRKRQEPLSEKIKELAWKAQHRLHARYAKLLARGKNKGVVVTAVGRELLGFLWAIAVQAEAEHQELLQRVA

SEQ ID NO: 312290 - protein, 340 aa, unidentified
MEHYVGLDVSLEETAICVLDRTGKVIWRGRCSSDPDAIARTVRDRAPFVVRIGLETGQLSTWLVHSLRRLDLPVVCLDARHAKAALSLQVNKTDDNDAHGLAQIVRTGWYREVAVKSMDSQAVRVLLMARAQLISQRQATANQIRGLLKTFGLRVGQAGGSRFAVRVRELVADHPVLVAIIEPLLTVWQTVREQVVELDRQVRMRVREDAAARRLMTAPGVGAVVALAYTAVIDDPARFAKSASVGAYLGLTPRRYQSGEVDCAGHISKCGDGLLRSYLFEAANVVLSRITRPSGLKTWGQALAQRIGARKAKVAVARKLAVVLHRMWRDNTEFRWEPAR

SEQ ID NO: 312291 - protein, 387 aa, unidentified
MTAEGARVYDKALPNDETTLRAVFDRIAGYGPILMVVDQPNTIGALPVTVARACGHDVGYLPGLSMRRVADLYPGSAKTDARDAFIIADTARTMPHTLRRVDTGDETLAELEVLVGFDDDLAGEATRISNRIRGLLTSIHPALERVLGPRVTHPAVLEILSRHGGPQGLRKAGRRKLTTIATKHAPRMGAHLVDDIVTALDTQTVTVPGTTAADTVLPKLADTLKETLLQRKSVADQIEEMLDAHPLSVVLTSMPGIGVRTAARILLEVGDGSAFATAGHLAAYAGIAPVTHRSGTSIRGEHPARFGNRNSNAPSSSPHSPHCTTPPAAPTTTANAPKERNTTPPSSAWHDDAATSSTPCSETANSTANHHQQPLDKNHRDTPLCWR

SEQ ID NO: 312292 - protein, 331 aa, unidentified
MEQRKTIIGIDVSKKTLDIFIKTLDVYLQISNNAEGFKKLLALLKTSKLKLEDCFFVLEYTGGYEYRLVQFCQSKQISYVRISGLAIKRSMGLVRGKNDKIDARRIADYGDEKQSKLEAETASLDGIVRLKRLLSQRDVFVSDRKAHQNRYQEIQYMMDLPEKDSMLKRYKKIADELQKLIDKTEDEIRKLIKANDAFQFNFDLITSIKGIGEVNGWTMIAYTENFTSFDNARQFGAYIGVVPYPYTSGTSIKGKSRTSKMANQHIKALLDMAAKAAINHDRETNLYYERRIAAGKHHMGVMNEIKFKLVRIMFAVVGKQQTYVDKYKNIA

SEQ ID NO: 312293 - protein, 327 aa, unidentified
MQGKVESTNSATAVYAGIDVSKDWLDVHLHPGGQSWRVENSQVGLRRLRRHLDEQGLRPERVVLEATGKYHRLAFRTLSAWGHGVVVVNPLRARLFAQACGVLAKTDRIDARLLAVMGHSLAPQPNQPAPLQLEQLQELVNAHSAARTEAIALGNRLEQSTIPFLKTELRRRHTSLKGHGKRLEAAIEQLIKADPGLAARYTILLSIPGIGATTAAALLAGLSELGRCSAKAATLLAGLAPIADDSGRRQGQRHIRGGRMLVRNALYMAALSAARYNPDLKAVYQRLCNAGKPPKVALTALMRKLVVLANTLLTQNRPWEPDQPKTA

SEQ ID NO: 312294 - protein, 506 aa, unidentified
MNAITDFAATIGLDWADQKHDLWLRPADGAKSEHLRVEQTPEALHEWVAKLGERFGRRRVAIGIETSRGPVISALLAYDFIVFFPINPKALKDYRAAFAVSGAKDDRTDAMLLEEFVRLHRDKLRALEPDTPLTRKLGGLTENRRRLVDERTRQVNQMHSVSKTYYPLAETLLGGHMTTPMAADFLARWPDLAALQKADPKTLRAFFYKHNSRGAEKMEKRLAAAAKARPLTEDEAIIAPARHLATALAAVLKALHHAIAAVDKDIAQTFDQHPDAALFRSLPGAGPALAPRLLVAFGTKRDRFASAAAVAQFYGIAPVVKQSGNTETIHMRSRCPKFGRQTFHENAGCAFKKEPWAKCYYDNQKGKPDGKHHKACRAVAYKLIRIYYACWKHNSPYDGQRHLQALEKHGSPLHAQLQTLSPKKVNNSQKIIDGITQNSPSETQSRPQLAWPGDVDTTGAEPSLSCHFLTRLEANSPLSAGGFSRFCFMGKRHETTHRPWLTIERV

SEQ ID NO: 312295 - protein, 427 aa, unidentified
MEEKTRFKAAHWASYSHFVGFDWAKDHHEIVVIDRDGHIVLDLQIGHHAEGWHRLREKLVRLAGPDLSAVAVAIETNCGPAVEKLLELGCSVYPLNPKSAQRYRDRKAPSGNKTDHLDAWSFADALRTDGHGWRQLKPDDPMVQELRLLCRDEVQLIGQRTALVNQLQQALVEFYPAALEAFDDWTIPACWEFVIRFPTPSALEKAGKQAWQKFLHTHQLYRPETYKKRLESFARATEFCGSQAVTNAKSMLAVSLAKQLRVLEPQLKAYRARIEELFQQHPDHDLFGSLPGVGEKLAPRLLSECGQDRQRFQDHQALQCYAGTAPVSFQSGQIHRVTFRRACNKNLRTAVHLWADLSRKKCAWAQIYYQQKRQEGKSHACALRCLGQRWLKILWKMWQTRTCYDEQMHTRNQLKHGSWVLALTPAK

SEQ ID NO: 312296 - protein, 409 aa, unidentified
MSVTPMDASARVCAGVDWAKDDHAVCIIDVDGEVLDRFMVDHTAAGLKRLIARLLKAGVVEVGIERGDGPVVEALLAAELVVLVIAPNQLKNLRSRYGSAGNKDDRHDAYVLADVIRTDRRRLTPLTRSTPATIALRSTVRARRDLVEHRVAAANQLRAHLQIVFPGIVGLFAAIDSQVSLAFLERFTTQGKADWLSPDRLAAWLSKVGYSGRVAPEVLHQRLLTAPRGTTHSDAEAHATVTLAFVAVLHGLNTQIAALAEVIAEQLEVHPDAHIVTSLPRAGTLRAARLLAEIGDARGRFPTPASLACLAGAAPSTRQSGRSRIVTFRWGADKNLRDAVCDFAGDSWRANAWADARYRELRAAGKSHPHSERILARSWAHIIWRCWQDHTPYDPARHGAHQRLTKKAA

SEQ ID NO: 312297 - protein, 378 aa, unidentified
MINRKYVGFDVHLATISFCILDGTGKILWESVLRNTAETIRDFLGGIRGEVHLTFEQGTQAAWLYDLVKPLVSSVLVCNPRYNRVVLCGDKSDRIDARKLAEQLRLGALKPVYQTEYSLRPLKQLVLGYEALIKDSVRTMTRIRSLFSGRGISCQGGGLYKPDKHEFWLEKIKEPGLRFRLKILFSQLDSLMPLREEGKKQLLLESRKYPAVKLLKRIPCLGPVRSAQIVAVVATPNRFRTKRQFWPYCGLAVVNRTTADYEIVNGRVQKKIRKASTRGLNRDYSRILKRVYKSAALQGTTHKLLGPIYRGLLQKGLNPDMARLTLARRLSSTSLAIWKKEAKFDPDRFIVITTDSKHRKEEKKEKKLSLNKGKGTAQ

SEQ ID NO: 312298 - protein, 416 aa, unidentified
MSFVLPEARVFTGIDWAAAAHAVCVMNAAGKIVAEFTIEHSAEGIAGLIRRLARFGDPGDLPIAIERPDGRLVDLLLEAGHPVVPVKPNAIKAWRDGEVLSGAKSDAGDAAVIAEYLRLRSHRLAPATPYSGETKALRAVVRTRDDLVDLRVAATNQLAALLDTHWPGAKAIFADVESPISLEFLTRYPTPVSARHLGEKRIAAFMAKHSYCGRRTAAQLLERLRAAPAGTADEALTDALRDAVLALVAVLRALNASVKDLGRSVTAHLGEHPDGPIFTSLPRSGQINAAQVLAEWGDARQAYEHPDAIAALAGVTPVTKQSGKHRAVHFRWACNKRFRRAITIFADNSRHASPWAAKIYNNARATGKDHPHAVRILARAWIRVIWRCWIESTPYDPSRHGAAAALATQQTGQSAP

SEQ ID NO: 312299 - protein, 341 aa, unidentified
MEKISALGIDLGKSVFHVHGVDAAGRTVIERRFTRQALRVWLLKLQPCLIGMETCSGAHHWGRWLQQQGHEVRLMNPRFVKAYVKTNKNDARDAEGICEAVTRPSMRFVSIKAVAQQELLMLHRVRSRLVADRTALANQVRGFLLEFGIAVNQGIRVLRRRLPAVLEDAQNELGEGGRMMLAELREELVALDSRVAELDERVERQAQSEESCRRLQAIPGIGPLTASALVSSIGDPHQFSGGRHLAAWLGLVPRQDGTGGQIRLLGISKRGDRYLRTLLIHGARAALRTAGRRQDPAARWGLRVEERRGRNVAIVALANKMARIVWAVWANQQPYAAARCA

SEQ ID NO: 312300 - protein, 369 aa, unidentified
MKKQRSSSTIYMKKTKLYKEERMNYVGVDYHKRYSVATVMDQNGVILATKTLDNRIDAFRAFLKPFGKAKAAVEATRGWAIAVEILEQLLDEVVLAHPGGVKTMAQHKFKTDKIDSRILAKLLQIDWLPEAYLRDRVNREQQLILRTRCFFVRLRTRVKNRIHELIDRQAEPIREHARTFSDLFGKKGLTWLKNLSLNEPYQTLLSRLLTTHESLDEQVKGSDDLVAELFKTDPDCPLVASVPGFGPFFSVLTKVEIGDIKRFPNSSRLCSYAGLVPSTESSGGKTWHGSTIKQSNHWLRWAFIEAVIPAIVADDGLRAYYEQYRRIKGTKIAKVITGRRLCGIVYRILSQKTPYYEQTPQGRGYLRAG

SEQ ID NO: 312301 - protein, 353 aa, unidentified
MNNVKYVGMDVHKSITVIVVLNELGQFESRSQIKTKGENICDFFRGISGKVEVVFEEGTHSAWLYKLLKPLVASVTVCDPRHNKLIEDGNKSDDEDAETLAQLLRLGAVKAVYKGDDQQRQIKEICRAYDNLIEDSTRVQNRLKAIYRGRGISCSGHDLYRADQRSDWLAKLGEEAARFRAESLLEQLESISQLRKQAKQRLLAQARTHADYRILIKLPGFGPVRVAQLIAEVGTPHRFRTKRQFWPYCGYAVVTRSSADYQFVEGKIVKQRKKVSTCGLNRNHNPQLKQVFKGAALTALRHEAIKAYYQRLIDHGRRPELARVSIARKLASIALTVWQRREEFDVKKAFAQD

SEQ ID NO: 312302 - protein, 345 aa, unidentified
MDIFFVVGVVVSKNKLDYCLMSNDKVLKQGTIVNETSAIRMTLTLFLREFKLSNEQILICAEHSGQYNYPLIYSCECDRYKLWLENPNQIKIYCSGLQQGKNYRLSSKQIAIYGSRNSDKIKLSRQPVSEVEHLKQLHNELEMLEVDSAKLHSQLIDQKNYMSEEVFNINATRLINLLRGLEDAIATIKSEIKCIFAVNGFLSEQLELLTSIENVDTELALKMIVETDAFTRFENCRQFCSHAGIAPLNKDLKINEHSTHTINPKSDKGIKTILNQAALSIVKMNDSELKNYYIRKVKEGKDEKIVLNAIRVKLVARMFAVIKNNQRYLPYIRKEGSTTPLIETL

SEQ ID NO: 312303 - protein, 396 aa, unidentified
MWAGVDAGKSDHYCVVIDADGKRLLSRRVANDEAALLELINAITALADGSELTWAIDLNAGGAALLIALLIGAEQRLLYIPGRTVHHASGGYRGEGKTDAKDAAVIADQARMRRDLQPLRPEDDIAVELRILTSRRTDLVTDRTRAINRLRAQLLEYFPALERAFDYSASKAALILLSGYQTPDGLRHAGAARLAAWLRKRKARNADAVAAAAIEAAKSQHTVVPGQQLAAAMVARLAEEVMTLDTEIGDTDAMIEERFRRHRHAEIILSMPGFGVILGAEFLAATGGDIAAFGNTDRLAAVAGLAPVPRDSGRISGNLKRPRRYNRRLLRACYLASHIAIRTDTASRIYYDRKRAEGKRHTQAVLALARRRLNVMWAMLRDHKPYQPTAPNAAAA

SEQ ID NO: 312304 - protein, 534 aa, unidentified
MRTRKKVRGKKGRLSLKKARNSLQARLDRVGAEHFGILAVDSSKARFQVLLGNFCGTVLMEPLEVDNSGPALDRLVETVRLEMERHGLKDLVAGIERTGRFHHPIRTVLRRHWTVKMVHPFATKQLREPADPGNKTDATDLVAILRAILMGYGTDEQELSESGAAWRLVSREREALVRHRARVRVRIQDRVEALLPGYAALFTDLWKMPAALVLAQDYGSAAALREAGPDALLGHLRQAGLSMRRDTLGRILAWAATAAPADPAAPVLQRLLADERRLHAALESQIRAYERDLARFLADAPFVLLLSIPGIHVVSAASYGAELGPIEHYPDAHKITGRAGLYPSRYQSDETDRADGPLVRHRNARLRDALMEIAHNLVRCNPYFKGWASLRRSAGWAEKKLRVAVASTFARISYSMLAGRQLFDHPAVRGRDAILPKLTAFILDHGVPPDAARDLLRRAAQQIPPEARPAEADALRPELTRRRQRNSIWTRGTGPQLLGEILPELLTWLGLPVAPEPERNTSPPTQEKSKRTPH

SEQ ID NO: 312305 - protein, 375 aa, unidentified
MKEKVRFLGLDVHAETIAVAVAEPEGEVRSLGTIPNRAESIRKLIKKLGPAAKLRACYEAGPTGYVVYWQLAELGVECEVVAPTLVPVKAGDRVKTDRRDAEKLARCYRSGDLTAVWVPDEGSEALRDLVRAREAAKQDQTRARHRLSKFLLRSGQRPPTGVRPWTRPYLIWVAQLRFTQIAQEFTRQDYLHEVEHMRERVARLEQAIMEAVKLATPALQQVINDLQALRGIADISAVTIASELGQVSRFESARQLMGYCGVVPSEDSSGKRTRRGGITKTGNAHLRRIVVEAAWSYRRPPGIWYGLRRRQETISEEAKEIAWKAQHRLHKRYIRLGAAGKDQRKIVTAVARELLGFIWAIGTRAETGVRPQVAA

SEQ ID NO: 312306 - protein, 339 aa, unidentified
MDLTTMSIDVAKNVFQLCGANDRGRIVMRKRVQRGNLLTTVAQFFGSRIVMEACGSANYWAREFTQLGHEVKLISPQFVKPFVKGNKNDYRDAEAIMEAAHRPHMRFVVPKTVEQQDAQSVLRIREAYVTMRTKIVNQLRGLLAEYGHVVPRGIASLRKALPRLFDRNSENGLSVMMKELLEMQYESLLSLDKKLMVLEERLKSVAKKDERCQRLMEIEGIGVISAVALVSLVGNGAGFKNGRHFAAFVGLVPRQHSSGNTQKLLGISKRGNEYMRRMLTHGARAVVIRSAGKVDRRSAWIQRLITERGMNRATVALANKNARIAMALLLSGERYRKTA

SEQ ID NO: 312307 - protein, 339 aa, unidentified
MMIIGCDYHPSFQQIAFVDTGTGECGERKLSHKLEAENFYRGLHGQQVRIGMEATGHARWFERLLAELHHELWIGDPGEIRSKRVRKQKTDRQDAELLLQLLVENRFPRIWVPSAENRDLRQLLWHRHRLVQMRTRVKNQLQAIALNEGLRRQKGLWSKLGRAQLEALQLAPWSARRRQDLLELLDRLNPRIDELSASIQQAAEQRPEAQRLMSHPGVGPITALAFVLILGVPDRFRCGKQVGSYLGLIPCEQSSGGRQRLGHISKQGNSLLRFLLIESAHAVVRYEPDWRRRFLHLAMRRGRAIAKVAMARKLAVRLYWMWRRGWDYQQISKFGAHVE

SEQ ID NO: 312308 - protein, 457 aa, unidentified
MSRKGKRTKGIEEAHPFAGMSRVNANAAGVDIGATEIVACVEGDENMQIVKGFGNYTVDLQAIGKWLQEHNVKTVAMESTGVYWIPLFEELERQGFECLLISSRSLRRVPGRKSDIQDSQWIQTLHSYGLLESSFRPQGDLVALRTLLRHRGQLVDHRSPHVQHIQKALLQMNIQLSQAVSDITGQTGQAILRAIAAGERDPQKLAALRDRNCKNSEEEIAKALTGRWQEEYLFILEQSLELFDYYTRQIEGCDAEVERMYALTRPEWEGGELQPPSQSKRNSHSKNAPKNQKEIRQHLKRLAGVDISAVEGIGVSGAQTVIIECGTDLIQFPKEGNFSSWLGLAPKHEISGGKVLKNRTLKTKNRAGQAFRMAAQSVKRSDCVFGMMYRRFRSRMDNRQATVATAHAIARVVYRMLKYKVEYESIDVTEYEKQYEEQQIKYMKKKAAKLGYQLVPA

SEQ ID NO: 312309 - protein, 465 aa, unidentified
MVCFNPSTKLTRVRPAELIVARWKQLSTQFVSYFAPLVDLSEDEERLLREVGTGMQVVHERCCGLDVHKKTVVACILITLANGEVQRHIRTFSTMTAGLLALSDWLESLTVTVIAMESTGIYWRPVFNLLEDGRTVILVNAQHMKAIPGRKTDIKDSEWLADLLRHGLLKASFIPPAPIRELRDLTRYRKSLVQERAREVNRVQKVLETANIKLSSVATDVLGKSGRDMLSALIEGTTDVEILAELARGKLRKQLPQLQQALDGRVQAHHRLLLKHLLAHIIFLEETLEQLQQEIEQHLCPFEETMTLLMSIPGIAALAAAAILAEIGDDMTRFPSAKHLASWAGVCPGNKQSGGKRLSGKTTQGNATLRAMLAEVVWVLSHMKDNYLSAQYHRLARRLGKKKAVVAVSHSLLVIIYHVLSTKQPYSDLGADYFEQRDSARLTQRSVRQLEALGYTVTLVPKEVA

SEQ ID NO: 312310 - protein, 389 aa, unidentified
MESPLPQPDDLSKSLTCLEQDSTIIAVIEMSKSSWLVAGIVPGIERHPLKKLNANEGELLRLLERWRVEATKAGRTIKRIAVAYEAGRDGFWLARWLRTRAIEAYIIHPTSVAVSREHRRAKTDRLDTGLLKRVFLGWLRGEPDHCQMAAIPTLAEEDAKRPNREREQLVRERTRLVNRMKSCLVRLGIRNFKPTLRKAAERLAMLRTPEGTPLPPNTLLELRRDMARMRFVMEQIKELEEERMRRLEQAPQEKSNAMVRLLARVLGMGIETADMLVHEILARELRDRRAVARYAGLTGAPDESGSRRREKGLAKAGNARVRRGLIQLAWRLLIFQKDSALVQWYRTRIEAGGGKRKTMIVALARKLLIALWRLVTTGEVPAGFVLRAA

SEQ ID NO: 312311 - protein, 366 aa, unidentified
MLYLGIDQRARQITISLRDESGDVLQARQVSTQPEKVKAFFQQLTHERLHDGESFVAVLEVCGFNDWLIRMLQDYRCHKVILIQPEDRKKCKTDRRDAAALSELLWVNRDRLLQGKPVRGLRQVDIASSTDQEDRRLTTLRKEAGQARTRLVNQARHLLRRHNLQWQMPTKRFPTKAGIAWLKQLALPAIDRLEMNHLLTGVEQVQQRVKDLEQVIAQRCGVSDEAGLLASMPGVSYFTATSLACRVGRVERFPRARSLANYWGLTPGCRNSGENTQRLGNITKAGSGMARWLLAQVTHKVLRKDARLREWFKRIKRRRGSTIARVAVMRKLATIIWHMLSKRKTYAECRAVADAGAKEGEKQEGV

SEQ ID NO: 312312 - protein, 416 aa, unidentified
MADKDKVASIDIHKKVLMVVVGSREGEAIGPQSELERRRFGTMTSELGRLSAWLRERGVKGAVMESTAGYWKPVWMELEPYMCLHLAQAFSNRAPKGRKNDFRDAERLRRRFLAGELILSFVPDPEQRAWRTLTRMKTRLARHRARLYSQVEDMLEEMRIKLCWVLSDLFGASGLGILQALAKGETDPKKLAALGDDRLKCTDEQLLDALTGNRQATHREMLGLYLDQLQWVDPQRTKLRGLIAEALKPYPEVVARLAEVPGFGPDSAQQVMAEVGVRASSFPSAGDLASWVGTCPGENESAEENPSRRSPKGNRYMGRVLAEAAPGAVKAKGSHFQAVFRRKVPRLEYNGAIGAVAHRRCRLVWKILQEGVRYVEPGAYRDPKARKQRAQSLARALRKLGYHVEITPVEPATAPA

SEQ ID NO: 312313 - protein, 350 aa, unidentified
MLIIGVDFHSRFQQIAMVDTESGELVERRIDHSNGEAQKFYVELQKPVRVGMEATGYAQWFERMLAQLGHELWIGDAAEIRAAMVRKQKTDDRDAQHILDLMLANRFPRIWVPSPGERDVRQLLRHRHKMVCLRTSVRNQLQALAMGQGIYRKRKMWTATGRTELEGLRLDPWASRRRQELLQILDRLDPCLAELDRAVAKEAEQRPAARCLMEQPGVGPVTGLMFVLTIGPVERFRRSKQVVSYLGLNPRESSSGGRQRLGAISKQGNSMARFLLVEAAQTASLYDEELRRDYRRLKFRRGTAVAKVAIARKLAVRLYWKLRKHSSLIPPARMQGSPEHPVVGASLSGN

SEQ ID NO: 312314 - protein, 354 aa, unidentified
MPCLPAEVILGVDTHRDTHAVVLIDLLGRLVATETFPTTRPGIRALIAWAQQRGTVRRAGVEGTGSYGAGLTRALRLEGVDVIEVTHTARVGGRHRGKNDTRDAEAAARNVLSGQATAIPKSRDGIVESIRVLRNTRASAVKARTQAILHLKNLVLTAPDELREALRDLSTKQLLARCARMHRSDRLDALHATRHALRTLARRHRALDDEIHELDVLLADLTAKAAPRLLREPGIGPEIAARLLLVAGDNPTRLRNDAALAALCGASPIEASSGKTTRHRLNRGGDRQGNSALWLIANNRMIHHPKTRDYVTRRTTEGKSTKEIRRCLMRHIARGIYPLLIADLHDAQSQLLLT

SEQ ID NO: 312315 - protein, 342 aa, unidentified
MKDTMIGVDLAKNVFQVHGALRTGEVQFRKKLTRKQFPVFMAQQEPCTVILEACCGAHYWARQMEALGHEVKLIAPQYARPFVKRQKNDAADAEAIVIAARQPEMRFVAPKTVEQQSRAAVFRGRERLVHQRTADVNALRALLHEHGHVFPIGTRHLDRMRALVEDEASDLPALIREECQDMLVQIAEKTAHITERTTKLKTLAARSDRARRLQTMPGVGPLTAVAVEAFGPDMAAFKTGRDFAAWLGLVPRQHSSGGKERLGRMTKAGQADIRRLLIVGAMSRLNWLGQRTIAEGSWLSRMLARKPRMLVAIALANKMARQIWAMLTKSEDYKDPALAGAA

SEQ ID NO: 312316 - protein, 417 aa, unidentified
MNTENYAALVALDWGETEHAFATQVDESPVETGTMPATAECLHGWLEEIQKRVVGRPVALAIEGGKSAVIHALTAHPWLVVYPVHPATSDRFRKAFVPSGAKDDVPDALVLLTILTQHRDQLRPLKLDSPETRKVAALVAARRRAVDQRTKLACELGSTLKSYYPQALDLCGREPATSLALDFLSRWPELKSLKAARPATLRTFYAAHNSRHPTVLADRLALIAHARALTEDRAVIEPAILQVKMLVDILRPLQRNIELIEEHIAEAFDAHPEAALFQGLPGAGPATAPRLLVAFGTDRSRYPDACSLQKYAGIAPVKQKSGHSLWIHWRWNAPKFLRQTFVEWAGQSVPKCAWAKAYYRQQRAAGKHHQATLRALAFKWIRILWRCWQDRVPYSEARYLASLKRQKSPLAARLAAT

SEQ ID NO: 312317 - protein, 470 aa, unidentified
MQLRLGIDIACRAAHQASLADDRGEFIWTGRRFHTSPEELERLWAMLPDQTEPAAVTVIMEPTRNAWVPLAAWFRRHGATVVLVPPEQAADLRAYYHKHTKTDRLDSRLLARLPLLHPDGLHPEHGLGPGDVLRRTTKLRATLVKRRTTTLSRLDALLELLGPGWLAAFRGDLANKTPLRFLAAGYACPYTLKRLGVARVGRFLYRHSRGVWGEEKAAELLAAAEQTLALWAGELDYGELADDIAVEARVALQLTHEIHELDERIKLVLDRRDPAGIMTSAPGVGQILGAQILGRLGDPGRFRSLAGVRSFSGLVPSQDASGVTGKHGRPTKAGDAVLREALFLAADHARRLDPTLAARYQRLMVQAGKHHNSALCHIATVLLTRMVACWRRGEPYVICDTDGRPITPEEGRRIIAERYQVPSELRDKLRTTSPARGPHNGRAGEARSRRALRHRPSITTLPAAAELDSD

SEQ ID NO: 312318 - protein, 418 aa, unidentified
MFETGDALLFVGDDWAEDHHDVELMDAAGRRLVKARLPEGVAGIARLHALIGAQLGDEAEDAEDAAGQVKIGIETDRGPWVQALIAAGYTVFAVNPLQAARYRERLGVSGAKSDAADAHMLADMVRTDSHQLRPVAGDTAEAEAVKVVTRMHKTLIWERTRAGQRLRHALREYFPAALAAFEDLDAADTLELLAKAPDPASAARLSAAQISAALKRARRRDIAAKTATIQAVLRGDHLGQPAVVTAAYAASVRALVAVLGTLNEQVKILQGQVEAHFGRHPDAELFLSQPGLGPILGARVLAEFGDDHDRYTSAKARKNYAGTSPITRASGKKKVVAARFVHNDRLIDALMTQAFASLRNSPGARAYYDQQRARGASYNAALRQLANRLVGILHGCLKTGAPYNEATAWSHHLTAAAA

SEQ ID NO: 312319 - protein, 371 aa, unidentified
MKENTIFVGLDVHKESIDVALADAGRDGNVRFYGTIGGDLESLHKVVRKLQSTGSTLRFVYEAGPCGYDIYRSLTKQGLDCIVVAPSKIPKKSGDRIKNDRRDALNLARLHRSGELTAVYVPLVEDEAMRDLTRGREDAVKALRVARQVLLAFILRHGYRYSGLSYWSKAHWNWIADIKMPHRGQQIVLQEYVHAVKEQLDRTQRLTQQIQELVPQWYLAPLVKALQALRGVSLIVAATTVAEIGDLTRFDSAKQIMAYLGLVPSEHSSGDTTKRGSITKTGNGHVRRVLVEAAHTYCHPARESRALLARLDGLPPEIRSIAWKAQLRLCGRFKKLMARGKNRNTVITAIARELAAFMWAIARTFLPAQEV

SEQ ID NO: 312320 - protein, 340 aa, unidentified
MPCYVGLDTSLRHTSVCIIDKAGRVVKEGQVETTPKALVEFLRGDRRRYAAVGMETGALSAWLCRGLKRAGLPVASIDARHAHGALKTQPNKTDRADARGIAQLMRTGSFKAVHLKSLESSTARGLLTSRRLLIAKLRDLQNGVRGLLLAFGLKLPHGQVFGFEKRVLGFVRNHKEAATVVRSLMTVCSAVVKEIAALNACLAQLAAEDPVCRLLTSAPGIGPLTALMFRSAIDQPERFSKSRTVGPMLGLTPRTHQSGEIERRGRISKCGDAEVQAALYMAAWTLMRSNSRRSWLKDWGEELAARRGRKRAGVAIARRLAVVLHRMWVTNTPFRWERPA

SEQ ID NO: 312321 - protein, 386 aa, unidentified
MARKRTLSTLDTSIAYAVGLDLAKTDVALAAFDSDHKEPYLIDRIPYDKLYELLADMAPTLVAMEPCSGAHQIAEQIQELGHEVMMISGRHVQAWVKDHCNGQKTDLNDAFAILNLAYDRWLTPIRGKTREECRLLALQASYRQLKGQRTKTMVHVKATLHAWGFPIRAGSFNQKALHELIDANREAFGDEVVETLHLMINRVHDLDHDIATVLKLLTEATQRDPRASLLRSIPGFGVLTTSRWCAVVGDIARFDTPKQTMAFIGLVPNNRITGHHTETSSGREARGQGKMSKRGDKMLRSLCILGAGALCLMVRNDRLPDCPFVASIKERLASPRPWFKVLVYVAAKLVRIATALLKYGETFSFEKAGISKAVLKQWELEQAKAA

SEQ ID NO: 312322 - protein, 337 aa, unidentified
MVEITTIGLDLAKNIFQIHCIDVTGQVVRRQLRRSEVIKFFAALSPCLVGMEACATAHHWAREIAKLGHCVKLMPAAYVKPYVKRGKTDAADAEAICEAVTRPTMRFVAVKTIEQQSVLMLHKVRDLLVRQRTMLINALRGHLAEFGIMAAKGPSGVKAVIKAYHEIKETLPEAADYALGALVDQLDCLGNELEQTEGRILAWHRQSDVSRRLATIPGIGPITASAIAAAVPDASLFRSGRQFAAWLGLTPRAHSSGGKERQRGISKQGDGYIRRLLVVGATAVIRFARPENPGRQWASALLARKPARVVSVALANKTARIAWALLVRNESYRSRVA

SEQ ID NO: 312323 - protein, 347 aa, unidentified
MDQYVGLDVSQDETHICVVDRDGNKIWEGNCSSTPEGIGEAVKRHAPEAVKIGLESGHLSTWHWHGLTDMGLPAICIDAYHAHGVLRLQMNKTDKNDAHGIAQIMRCNWYKEVTIKSFENHESRALFRTRSNLVSMRTDVVNQIRGMLKTFGILIKGIAGVSFESRIQEIIDEGTAIAPPLQIQLEMLRMIKLKIDELDELVLDHAYACQKCRILMSIPGVGPMTAANFVLAVYDADRFKQSKSVGAYFGLTPRRRQSGEMDYNGRISKRGDRVIRHQLYEAANSILTRVKKPSALQAWGLRIAKRSGMKKARIAVARKLAVIMHQMLQTGELFCFNPATGERALYA

SEQ ID NO: 312324 - protein, 414 aa, unidentified
MPTTTKRVEAIAIVHPNAAGLDIGAREIYACVPPDRAGETIKVFGTCTSDLEQLADWFITHRVDTVAMESTGVYWIPVFELLEARGLKLSLVNGRHVKHVPGRKSDGQDCQWLQKLHALGLLTGSFRPDGEMCALRAYLRHRADLVQHRAAHVQHMQKALQQMNLLLPQVVADITGETGMASVRAIIAGERDSVKLAQFRNVRCKSSEETIAKALTGTWKEEHLFALTQAVALYDFYTEQVAACDVQIERHYGVMKPRWEPTAADTPSHAPAQRRKKRKNEPAFDVRASIIRLTGVDLAAVDGLGPNLAQRILSEIGTDMSKWATEKQFTAWLGLAPRNDISGDKVLRSRTLPSRNRAGQAFRQAATAVARSASAFGAYYRRKRAQAGPLFAQVAAAHKIARTVYHLLKYRGGL

SEQ ID NO: 312325 - protein, 443 aa, unidentified
MSFDRLKRTQRRKRLPGHKLKPSRATLFVQNSKPHLSMKPTYFLGIDAAKHKMRATLSNRSEHVLFEKDLSVEATGLRQLLAAIKRQVKDPEQLLVLIEATGLLHLNWSAALTKAGYAVAVINPLIARRLYTLQNSIRDNKSDPIDARGLCTIGLLHGEKLLVHYRFSLRPEQFTLQRAQSVRKALRSALTNLKKTYQSLMDLSFPELGRLLQLDGVGIRQLLIQAPTPAAIAGKRLSTLENNWMVRPKAAALKALAADSMADPDLAAASGPALVALLEAVAAMEARLHALDQQIAELACTSVDPQTKALIETIPGFGPVNAAKTLAWLPTEILHSGSNRKVAARLQAFMGNDPRLRQSGQWKGHTKMSKRGVEMLRTAFFQSAFSAAHNDPDLRAYYQCKRAQGKTHEVALSHLMRILTRRLVAVLRSGKPYQSHYNLKNAA

SEQ ID NO: 312326 - protein, 412 aa, unidentified
MTETQKRYVGLDTHQQYVMVGAVNAAQEVVLPPRKVSLSELEAWAKKHLRPPDEVVLEATTNAWYFYDLLEPLVARVVVGHPPHIKLIAAAVVKTDKKDTMTLAKLLSVNMIPPVWVPPQEVRELRALISHRQRLIGQQTRTKNRLRSLLQRLHIGPTGGELFSQTNRAWWLKLDLSSSEKLRMRQDLLMLDHLSPLIQEVEAEIERLSIAEPWGEQVPYLLQLPGIGLLTAMTILSAIGDIRRFPSAKKLVGYAGLGAKIHASGQTHRTGGITKRGRKELRAILVEAAWIAIRYNQRWREQFEALAGRIGRQKAIVAIARKLLVVIWHVLSAKVADRNADSEQVARFFIRWGRQLRVKTTQGLKASEFARKQLDRLGLGQELERVPYGTVTYCLPPAAQAQPPAEPTTVQV

SEQ ID NO: 312327 - protein, 304 aa, unidentified
MSEQTFVGIDVSKARLDVAILPSGEIFAVDQTPRGLSNLLSRLSEVQPALLVLEATGGLEQAAMLALHAAGVPVSVLNPRQVRHFARALRQHAKTDLVDAVLLATFARTLQPQAQVPGNAAQRSLEALLVRRRQVVDLLTMEQNRLHSSHDPYVQQDLKDVIAYLEGRRDTLDQALQDTIQADPAFRATSDMLTSAPGVGPVLAFTLLAQRPELGTLRRQRIASLAGVAPLNCDSGTTRGHRCIWGGRAEVRQVLYMAAVSAVRWNPTLKTVFERLIYKNKPKNVALVACMRKLLSILNAMVRD

SEQ ID NO: 312328 - protein, 327 aa, unidentified
MQGWAREAGHSTTNVAGVDVSKRELVVVVSGHAALRRYTNDAAGRRRLCRDLAKIVGTGTLRVGLEASGGYERKTVSALRKAGFEVIVFQPIQVRAYARYLGQRAKTDPIDAHIIALATAAYEGEIGHSDERLSSMAEHLTFIEQTEEDIVRLKTRLDGFTDTALKTRLAAEIKRLTTRRNAEIRSLRKTLRQHLDLATRLDLVTSIEGIGERTALTLIIRMPELGSLTREEAASLAGLAPFDDQSGKTDRIRHIKGGRAKVRRSLYAAALPAAFKWNTALVDLYHRLTARGATHKKALIACARKLLIFANAVLARGTPWIKSEATA

SEQ ID NO: 312329 - protein, 346 aa, unidentified
MRFYQQQHEFYCGVDLHARSMHVCIVDHAGQTKVHKNIDATPDRFLPLIRPYREGLVVAAECMFAWYWLADLCAVEGIPFVLGHALYMKAIHGGKAKNDKIDSQKIALLVKGGMLPVAYAYPKAMRATRDLLRRRTKLVRTRAEALAHIQNTVSQYNLPPLAKKLTFAANREGVAERFADESVRQMVASDLALIGHIDEQLKGLELYLARHAKVDDPQAYHLLQTIPGVGKVLALILLYEMHAAGRFGDQRHFVSYCRLVRPCHESAGKKSAGKGHKIGNAHLRWAFGEAACLMLREVPAAQTYVARLEKQHGKAKAISILAARIARTAWLMLKRKEAFDATQFLN

SEQ ID NO: 312330 - protein, 316 aa, unidentified
MEKEKVYVGIDVAKASMDIAVHSTGQRWSFLNDDTGIAQAVTCLRELAPELVVMEATGGIELPLTAALVVAEVPVVIVNPRQVRDFAKATGRLAKTDALDARVMAHFATVVRPTPRPLPDVQAQEFSAILARRRQVVEMLTAEKNRLGTARKAVRERIRTHITWLEQELANLNQDMRRSVQESPVWREKDNLLRSAPGVGPILSATLLTELPELGTLNRRQIDALVGVAPLNRDSGTFRGKRTVWGGRATVRATLYMAALVATRYNPVIRTFYKRLCAAGKAKKVAITACMRKLLIILNAMLKHRAPWGLVRMRQA

SEQ ID NO: 312331 - protein, 367 aa, unidentified
MTNKKWKLMQEQINKLDFRGQNIYVGIDVHKASWTVTIELKHITHKTFSQDPCAHTLGEYLRGNFPGGNYLSAYEAGFCGFSTHRLLEKEGISNIVVNPSDIPTTNKEKRQKEDKRDSRKIARSLKDGSLIGVHIPMEETEELRSLLKSRADLVKEISRYKNRIKSLLFQYGINIPENFIYGSMHFSNAYINWLKGIRFRTSIGDIALGSFVSTTVLLRQELLKLDREIRAVYRSPKYKTLVDLLISIPGIGGYTAIVFIAFIEDMTRFCTLDELCSYVGLIPSTNSSSDKEKVGKITMRSNKVLRGLIIESAWIAARRDPALMMAYQTMCGRMKPSKAIIRIAKKLLSRMRHVWINNEKYEYAVVA

SEQ ID NO: 312332 - protein, 347 aa, unidentified
MNFYTQQHKHYCGIDLHAKAMYVCILDQGGTKLVHKNLPTTPEAFLRTVTPYREDLVVAVECIFTWYWLADLCAREGIAFVLGHALYMKAIHGGKAKNDKIDAHKIAVLLRGGMVPQAYVYPAEMRATRDLLRRRCHLVRKRAELLAHIQNTNSQYNLPEIGKKLAYRANREGVEDHFPEPSVRKTIEVDVSLIDHYDQLLGEVELYITRSAKAHDVQTFSRLQSVPGIGQILALVLLYEIQDIARFPRVQDFVSYCRLVKCAKESGGKRLGTSGKKIGNVHLRWAFAEAAVLFLRQNQPGKEYFTKLERKHGKAKALTVLAHKLARAVYYMLSREQAFDLKRFVAA

SEQ ID NO: 312333 - protein, 369 aa, unidentified
MDQHTDVFVGIDVAKSRNAIAIADSERGGEVRYFGEVDAAPDAMRRAVQRITAKHGRAHFCYEAGPTGYGLFRLITGMGHSCDVVAPSLIPRRPGDRVKTNRRDAVGLAKLLRAGELTPVWVPDEGHEAMRDLVRARSAAVQAQRVHRQQVSAFMLKHGRIYPRKKSWSMRYLRWLQEQRFEHPAHQIALQELVDAVRISKERIDRIEAAIVEFLPSWSLAPVVRALQALRGVDLIVAVTFATEVGDVRRFDSPGQLMGYLGLVPSERSTGDTIRRGGITKAGNSRVRHMLVESAWTYRHPPRVGAKKLYLLEQTTPKVREIAWKAQSRLTGRYRALSANGKKTTVVCTAVARELAGFMWAVAREVQTA

SEQ ID NO: 312334 - protein, 422 aa, unidentified
MLEQAQDEEQIIARVAGLDIGKASLVCCARVPDEAKPGQRLQEVRTYPTMTRSLTGLAERLAALGVTRVVMEATSDYWKPVFYLLEAHGFEVWLVNARDVKHLPGRPKTDKLDAVWLCKVAERQMIRPSFVPPAPIRMLRDLTRYRVDLIAEAGAERQRAEKLLEDAQIKLSVVVSDLFGTSGRAMMAALIGGQRDPHTLAELARSSLRRKIPDLREALTGHFTDHHAFLLGKMIARIEQVEADIREVDARIEAHLAPFAPAAARLREIPGIGSAAAATIIAEIGVDMTRFPTPAHLAGWAKFAPGVKESAGRRKGNGSTGHGNRYLARVLGQIAVSAARTDTFLGERYRRIARRRGAKRAIVAVGRSILTIIWHLLSDPTAGFRDLGADFYLSRTDTERRKRNHIRQLEALGYRVTLDLAA

SEQ ID NO: 312335 - protein, 372 aa, unidentified
MDPKGITWVGLDTHQNSNKVAAFFPERPEPVEWQEATTVEAVRRLARKLRREAPGEVRCCYEAGPTGYALQRQLRAEGIACTVVAPSLTPVKPGVRIKTDRRDARKLAELFRAGLLTEVHPPSESDEALRDLCRCRDDVRVDLLRARHRLSKFLLRRHCLYRETQHHWGTRHLAWLEQLRFDDPISQATFDSYFLAIQQLDERLRQLDARLAEFGAQEPYRDPVAWLRCFRGIDTVTAVCLVAELHDFRRFHSARQLMSYVGLVPSEHSSGERERRGSITKAGNGHVRRLLVEAAWHQRHRPAISAPLRQRREGQPARVLAIADRAQERLAARYRRMTLHGKVHPKTIVAMARELTGYLWAVLHPAAVATRN

SEQ ID NO: 312336 - protein, 335 aa, unidentified
MKKNTIFGLDLAKHIFHLVSLDGKRKKLRRGQMLPYFAQLPQSVIAMEACASSNYWARELISLGHEVKLIPPQHVKGYLRGQKNDYNDALAIAEAAEHGRVRAVPVKTVEQQDKQTLLRSKRRVSVERTRLVNHVRGILTEYGITIPKSVPAFRRHLCEIIDEESHLLSSTLMRLIDRYYQQFLALDEEFKWHDKQINEQVKLDKDCQRLQELPGFGPIVSYAFKSWLGSGKQFKRGRDASAALGVVPKQHTSGDKQRLSGITKKGDAYLRSLIIHGARSVLRRVEKKDDPLSQWINRLIVTRGKNKAIVALANKMIRIAWVIVARQEKYHPKAA

SEQ ID NO: 312337 - protein, 350 aa, unidentified
MQVTTVGLDLAKNVLQVHAVDAAGAVVVRKKLRRAQALAFFTELPPCLVGMEACASAHHWARELMKLGHSVKLMPPSYVKPYIRRGKNDAIDAEAICEAVSRPGMRFVPVKSKEQQAVLMLHRTRALLVRQRTMTVNALRAHLAEFGIVTAKGIGQVPELVARAFGESHATPEIPAIARSAMAPLVAQISELAKQIHQIEKELLAWHKTNQASQRLATIPGVGLVTATALAATVADPLHFKSGRQFAAWLGLTPRQNSSGGKDRLGSISKMGDRYLRTLLIIGATGVIRYARTSASVRGAWISSLLAKKPARLVSVALANKTARIAWALLARGEVYRLPQAAGHELTAVA

SEQ ID NO: 312338 - protein, 297 aa, unidentified
MSEVITIGVDLAKSVFQVHGVDVSGTAVIRRQLKRSQVLGFFRKLPPCLVGMEACASSHYWAREITQVGHEVRMMPARYVKPYVKRNKNDAADAEAICEAVTRPTMRFVEIKTPEQQSVLMLHRTRQLFVRQRTALINALRAHLAEFGIVAGVGRNGLEKLMEVIADEQDERVPAAARDCLLALRDQLAFVQQQILGADRRILICHRASPLSRRLAEIPGVGPLIATALVASIPDPHAFRSGRDLSAWIGLVPRQNSTGGKERLGHISKAGNRYLRSLLVVGALLCDPAGQASGLHA

SEQ ID NO: 312339 - protein, 335 aa, unidentified
MKNYLFHVGIDVSKSKLDIVILNINSLNQTAHFIVENNSKGIKSIINYLQKNEIDPTTSLFCFESTGVYSYPLSSFFLENKFDYWVVPAIEIKRSKGFSRGKNDKNDAKDIALYSLRNIDKLTLSSVAEKEIQQLKLLFSEREKLVKAILLFKSSSENKGFIPKDIYKEIALINSKTIQNLKNSLKAIEKKMKSIINKNETLSKQFNLVKSVPGIGEQTALYFIIATKGFKSFKTWRKFACYSGVAPFEYSSGSSVRGKTKVNHLADKKMKSLLQMCSMTSLKYDPQLKEYYNKKKAEGKNSMLVLNNIRCKIISRVFAVVNRETPYINTYKFAS

SEQ ID NO: 312340 - protein, 409 aa, unidentified
MSEDTAEIVYVGLDWAAATHAVCVLSAVGKVLAQFVIEHTAEGIATLIGKLAKFGDPADVQIGIERPNGRLVDVLLEAGHPVIPVSPNAIKTWREGEVVSGAKSDAGDALVIAEYLRLRHHRLRPVAPYSAQTKALRMVVRTRDDIVKMRVSATNQLSALLDDHWPGAKAIFADVESPISLAFLRQYPTAVSAARLGEKRLAAFLAKHAYSGRRPATELLARLRSAPAGTTDPTLTTAIAATVAALVSILEALNGACKALDRSTIAHLGEHPDAEIFTSLPRSGQINAAQVLAEWGDSRAAYDGPDAIAALAGVTPVTKASGKQHAVHFRWACNKRFRRALTTFADNSRHESPWAAHIYTTARARGHDHPHAVRILARAWIRVIYRCWHNHQPYDPNLHGAAQRTQNAA

SEQ ID NO: 312341 - protein, 359 aa, unidentified
MRFYTHNHRFYCGIDLHARSLHLCVLDQDGKVVLDKNIAARPETFLKAIAPFRDDVVVGVECMYAWYWLADLCAKEKIPFVLGHALYMKLIYGAKAKNDKIDAHKIARLLRGGNFPLAYVYPKGMRETRDLLRRRNYLVRQRSALFTHLQILNGQYNLPPFPKKLSFAANRQEMDIAQRFTDPSVQRSAAVDLAVIDCLDEQIGDLELYLTRTAKVDDVQTYHRLQTIPGVGKILALVLLYEIHDIARFGSEGQFLSYARLVRCEHVSAGKQLGSGGQKIGNAHLRWAFAEAACLFLRSSERAKKWQEKQLKKRDEGRVLAILAARLARAVYHLWRKGEAFDETRFWQGQAATIPVPSV

SEQ ID NO: 312342 - protein, 400 aa, unidentified
MNEYDEIGVFLGLDVGKSAHHGHGLTPIGKKVFDKQLPNTEPKLRQVFDKLREKFGTVLVVVDQPASIGALPLTVARDTGCQVAYLPGLSMRRIADLYPGEAKTDARDAAVIADAARTMPHTLRSLQLTDEITAELTVLVGFDQDLAAEATRTSNRIRGLLTQFHPSLERVLGPRLDHQAVTWLLERYGSPAALRKAGRRRLVEVVRPKAPRMAKRLIDDVFEALDEQTVVVPGTGTLDVVIPSLARSLGAVHEQRRAAEAQITALLEDHPLSKVLTSLPGVGVRTAAALLVTVGDGTSFPTAAHLASYAGLAPTTKSSGTSIHGEHAPRGGNRQLKRAMFLSAFAALHDPASRTYYDRCRARGKTHTQALLRLARQRINVLFAMLRDGTFYEPRTPRLA

SEQ ID NO: 312343 - protein, 351 aa, unidentified
MPRTATVHAVTAIGIDMGKNTLHMVGLDTRGTIVLREKVSRGRITSRLANLPPCLIGIEAGMATHYVARELAVLGHDVKQVPPAYSKPFRQGQKNDFRDAFVVAEAVQRPTTRFVPAKTNEQLDLQALHRVRSRLVSERTAVINQIRGFLLERGIIVRQGLRFLRQALPDILAKRTDVLSPRMVRIIADLASDWRQLDERIEPVTDEIETLAKSDSSCRRVMTVPGIGPIISSAMVAAIGSGAAFARGRDFSAWIGLVPKQMSTGDRTILGRISKRGNGYLRTLFMQAARVILLRPASWPKHGFGVWLARAAQRLHPNVLAAALANKLARIAWTVLAQERSYEARVTKAAA

SEQ ID NO: 312344 - protein, 381 aa, unidentified
MSALVIGLDPHKASNTIAVLDAEETLVARRRFENTADGLVAMLEAVSGWSDRIWAVEGANGIGRSVAQRLVAAGEMVVDVPAKLATRVRVYSSGHGTKTDDTDAVAIARAALHSRRLWMVRPDDENVALKLLSDRRHELVGSRTQSVCRLHRLLRELVPGGMPRHLTAERAEALVTGLEVSDPASLMRVELALDHIEDMKRFDRRIDDVTLKIHAAVKASGTTVTRIYGVGAVSAGLILGEVGDISRFPTRNHFASYTGTAPVAVSSRDQNRHRLNRAGNRRLNHAIHIAAIAQIRYDNPGRAYFRRKLGEGKSRREALRCLKRRISDAVWRQLQLDRETDQHQDHSWPRWPSARGDFPSYPSPDTPRQNGQPKKAKTMPA

SEQ ID NO: 312345 - protein, 339 aa, unidentified
MQVSTLGIDLAKNVFVLHGVDHTGQTVLKKKLSRAKFAEFVIRLDPCLIGMEACSSSHHFARMFIRHGHQVRLMPPQYVKPYVKTNKTDATDAEAICEAVTRPNMRFVQVKTVDQQAVLALHTERDIIIRERVTCTNSLRAMLAEFGFVMATGRKALNQGVPEILEDGENELSPFVRASASRQMAHIDALDDHLVLIEQQLQSWAETQAACKRMTKVPGVGLLTATYLVASVGDGKQFSCAKQFSAWMGLTPREHSSGGKQRLGRISKRGDGYFRYLLVHGARAVASVIERHREDMRWLDGLLKRKNYNVAVVAQASKTARILWSMLVHETEYRPPAVA

SEQ ID NO: 312346 - protein, 469 aa, unidentified
MDLLKLPIYTFYCKFLDVEEKFMKKVFVGIDIGKGKDSIHVIDILGNPIIKKGFDIQNDYYGFIKLRDRLDLILKNLNLTYDDCLVGFESTGHYWFNVRDYLNDINIDTVMVKGDKVKHRRALEEGQKGKNDTLDARVIASCLRNNNYILIRNDERALRALKKLTRMRDNQTKDLVALKNKIHRCIDICNPVFFKIFGNLNSKTGLELMKLYPSPKDIINVDLLDIKEKLRVNVSKPNLRMVNLYKEECESWVHIVKEPTYAEKIEMVMYINKFFLEKEYKEELDKEIRKIAKDLFPLYSEFEKIKGIPMIQLISVLSEIGDISNFKNTRALLGFLGLTVIGKMSGQYVGEIKINKAGSRIVRKHLFNIMESLIKHNEYFRVAYCYYKSYRHKDPTKKRSMQIAVMCKFVRVMYGMLKYSASFDYKEMMKGYYFGDCNMQVFKEEFEGENRRKKIENCKLAYDIYTIYS

SEQ ID NO: 312347 - protein, 395 aa, unidentified
MRLLQSQTWEPSVKQIIRIGMDTSKHIFQLHGVDAAEQVVLRKRLGRKQMVEFFASLPPTVIGMEACGASHHWGRELSALGHEVVLLPPQRVKPYVERNKNDAADAEAICEAMSRPRMSFVPVKTAEQQAALMLVGVRDQLVGRRTQLSNAIRGYAAEFGLVAAKGTDKIEPLLVRIASDENLPPLAKGLFATLGNEYVRLKPELRKIEARLMAWHRGNELSRRLAEIPSVGPIGATLSVMKVGNPHAFRSGRDFSAWLGMTPKDHSTAGKVRLGAITKAGDEALRSVLVAGATSVIQQVRKGRGRPSPWLVALVKRKPPKLAAVALANKTARIIWKLMVSGERYNPQRAPQRCVPPTDSLASGKRRQGQAACGGDRRSALTAPALRAPSAPPSA

SEQ ID NO: 312348 - protein, 412 aa, unidentified
METWVKCGCGLDVHQATVVACLLAVQNDGKVQKQMRTFATTTRELLSLSDWLLLEGCTHVAMESTGIHWKPIYAILEGGLQIVVANAQHVKKVPGRKTDVKDAEWIADLLCHGLLRSSFVPPKPVRELRDLTRYRRKLVESRSAERNRLLKLLESANIKLASVAADVFGVSGQLMLRALIEGKATPQEMAELAKRRLRSKIPQLALALEGKLEEHHRFLLQLQLDRLEAVEKDLTTLEQRIQEKLKPYATQLALLQEIPGVDWTLAAVIIAELGVDMSVFQSVSQLASWAGVCPGNNESAGKRKSSRIPKGNVYLKTALVEAANSAARAKGTYLRDKFYRLKARRGYKRAAVAVAHKILVSIYHMLSQNVSYNDLGDLYLDKLNKQHLTRNLVHRLERLGYTVALTPQQEAA

SEQ ID NO: 312349 - protein, 347 aa, unidentified
MTAAKCTTIGIDIGKNTFHLIGFDIRGSIVLRQKLSRGQLERRLVNMPACVIGMEACAGAHHIGRQLAALGHDVRLMPAKYVKPFLKGHKNDYRDAEAIAEAVGRPTMRFVPLKSADQLDLQALHRVRSRLIGQRTAVINQIRGFLLEHGLTVRQGPAALRRALPDILAKRTDVLSPRMVRLIEDLADDWRRLDARIDMVTSEIGTAASQDADCRRLMGAPGIGPITASAMVAAISDGSAFARGRDFGAWLGMVPKQLSTGDRTILGGISKRGNRYLRTLFIQGARAVLLRRGSWARHGFGPWLEAAAKRLHRNVLAVALANKLARIAWGVLAKGRGYEPDFGAQAA

SEQ ID NO: 312350 - protein, 430 aa, unidentified
MEIVYPRSCGVDVHNSFIVAVICISESVKPKYIKKRFSTFNNQLIQFRDWLIENNCQNVCMESTGKYYIPVYNALEGHISNVVVANPKWVKAIKGEKDDNKDAKWIADLFKFGIVRSSYIPEKDIRILREFTRYQYKLVNMRSSEKNRFQNALTTGNCKLDLVFTDVFGKSASSIVDTILSNDPYTSEDILSKVHGRCKASHEDILSAVDGIQLNQFQKARIQIVQKHMEYLDSLLDEIQHHIDLMVANYEEYIQILCTIPGINRKSAITIISEVGTDMSQWSSHRKLAAWAGLAPGCNQSAGKKKSVKISKAGVYLKPCLVQVAHAAIKDKKCDYYATKYNKISKRRGKKRAIIAIARKILIAVYHLLKTGEVFNPTDMADVETTKKQRIEYIKNNLRNAFNQLSRTGLSEAEILQFIRKEPTNSPQIE

SEQ ID NO: 312351 - protein, 377 aa, unidentified
MKRIKFVGLDVHAETISVAVAEQGGEIRSLGVIPNREESIRKLVKKLGPVEELGFCYEAGPTGYVLYWQLTRMGAKCEVVAPTLVPVKAGDRVKTDRRDALKLARNYRAGELTAVWVPDAAHEALRDLVRAREAAKKDELRARHRLSKFLLRHGRRPPMAVKPWTMKYLEWVKRDVHFEQLAQEVTLLDYLHEVEHGATRIARLDGAITEAVKSAPPQMRAVIDALQALRGIAQVSAVTVVAELGELSRFARAKQLMAYGGIVPSEDSSGERRRRGNITKTGNAHLRRVVVEAAWAYRHRPSVGATLRKRQEKVSEEVKEIAWKAQQRLHERYRKLLAKGKNKGVVVTAVGRELLGFIWAIGIQVETAQKESLERAA

SEQ ID NO: 312352 - protein, 343 aa, unidentified
MVISRIGLDLAKNVFQVHGVDEHGKTVLRKTLRRSDVSRFFANLPPCIVGMEACSGAHYWAREVAGFGHDARLISPQFVKPYVKSNKSDRNDAEAICEATGRPSMRFVPIKSSEQLTIQATHRIRSRLVGSRTALVNQIRGILAEFGVVVARNITALRRRLPEILDSEAGSLDAMTRSLIIDLREELADIDKRISAYDRRIKQLCSLSEACQRLCRIEGIGPVTATALVAAAGNAQAFKNGRQFAAWLGLVPRQHSSGGRVRLLGISKRGDRYLRTLLIHGARSALVRCGRKRDARSLWLQKLRERRHPNVAAVALANKNARIAWVLLRRGEVYDQQLGVATA

SEQ ID NO: 312353 - protein, 341 aa, unidentified
MEKFIRTAIDLGKNYFQVHGLESEGGRSISRKVKRSKMHEFYSQIEPCRVGMEACGSAHYWARQLTAMGHEVVLIPPAYIKPYVKRGKNDVVDAAAICEAMSRPDMRFVPIKSADQQAVLMLHKTRELLVKQRTMAVNALRGHLAEFGIVAAKGIGRVDELLALAKADAALPHIAGAAVACLAQHLEGLDLSIETVDEEIAKAHRQNPTSRLLDEIPGIGTLIASVIAASVPDPGVFRSGRDFAAWLGLTPRQNSSGGKEKLGAITKQGNRYIRKMLVTGATSVLRVAGKRKGALADWINALRARKPERLVAVALANKLARICWAIMTTGEGFRTDTYVKA

SEQ ID NO: 312354 - protein, 438 aa, unidentified
MSNKVIFNLDELFISVGIDVGADFSWMSIALPNQQFVGKPYKILHNSIDSLTTAVSKIKEAEELYSLESRIFLESTGIYHYPLFCYLRDKSFNCSVINPIITKNSTNINIRKVHNDRFDSKKAALVGLKPDLKVSLMPSDLALNCRNLCREYYDLMDNRSAYVNKLQGELRMAFPQYLSIFSKVTINTSLILLETYTSPSAFLEADKQEIIDIIKSTARFGLTYAQNKYNAIIQAATDANQFGYIIDSNIKRIRLYISFIRKYDEEINNILESLHELVDANEDADFVKQIHLIETFKGAGFLSAVSIMGEIGDFSAFSKPKQLFVYFGLDPAVKQSGKFEGTKVQMSKRGSAIARRVIHTLTLQSISISRNGEAKNPVLREYSLKKCDSKPKLVAMGAVSHKVCNMIFAILRDNKSFEIITPQEHIKQYNASKCDMAA

SEQ ID NO: 312355 - protein, 360 aa, unidentified
MNTSMLKTIGVDLHKASLTATVLDSAGAVVERKDIDTKCRRQIADYFASHGPQVQVAVESVGFYQWFWDTVRPKVQILRLADPAGVRACAGRLTKTDRNDSLLLAKLLREDRLPMAYVPDEPVRALRELCRHRHRLARQLALARRHLRWIALKNNLPGPTMFVSDRAQKWLLSQESKLSAVHRLACRQLIDQIITLERQLSDVELALKQAVATDSEMAPTLALIQSVPGVGFVTAVTILCECGDITRFDSIDELSCYAGLCPRVTQSGESAYHGHVSKQGPPVLRWVLQQAAWVAIRTDPNARRIFARIAKRAGPKKAATALARKLLSYAWSVCRQGHPFVWPTDRKTGPGPVPVWSYDI

SEQ ID NO: 312356 - protein, 355 aa, unidentified
MSQEKYIGMDVHQATISVAVMDAKGKLIMECVLETKAATILEFIQGLRGTLAVTFEEGTSAAWLHDLLNPHVNRLVVCDPRKNALLKDGNKNDRVDAQKLAELLRTNQVKPVYHGKHGTRALKELGRSYLTITKDVTRVMNRIKAVYRSWAIPCAGTSVYTRRHRAEWLAKLVEPGVRIRAEHLYQQLDSLQPLRLEVRRQLLLESHKHAAVKLLRQVPAIGPIRAALLVALLQTPHRFRTKRQLWAYSGFAVEVHDSGEYRWVRGKLQRNRERITVRGLNDNHNKEVKSLFKAAAISASTRPGPLHDFYVARVESGMRPTMARLTLARKIAAITLTMWKKGVSFDPKQLYRQAA

SEQ ID NO: 312357 - protein, 424 aa, unidentified
MHTRKAIGMKNWKDLTHYAGLDWAKDHHAVVIVNAEGQIVADFEFGHSLEGWKSFAEKTSAWPNLAVAIETSQGAAVDQLLQRDYSVYPVHPVSAQSYRQRKAPSGTKTDHLDAWGLADALRVDGQGWKPLQPMDPLTQQLRLLCRDEVSLIEQRTALVNQLQQALAEYYPAALEAFDDWTDSFTWEFVLAFPTPQALVTAGKRRWEKFLHTHKLWRPQTAEKRLKLFARADQFKASEPIVRAKSQLAVSLCKLLCTLAQQLKLYRKQIEALFRDHPDHDLFGSLPGAKKVLAPRLLGAVGNDPGRYGSHEVLQCIAGTAPVSYQSGRINKIRIRWSCDKFLRHTTHLWADCFRKASAWGQTYYQNKRDQGMSHACALRCLGQRLLKILFRMLKEKTPYDAELHARNQQKHGSWVIKLVNEPAL

SEQ ID NO: 312358 - protein, 351 aa, unidentified
MIISQNVGIDGGLKDFKVCLMILHQDQSLKVKGTRTFTNNLKGFEAFFCWAEKKKEKTDPLRFTMEATGVYYEQLAYFLHRKGQHVSVILPNKTKAYFQTLNLKSKTDKLEARALAQLGLERKFAKWEPLSKQMYELKTLCRERVMLLEEKTMVSNRLHAETHCQSPNSSVVKRLKKRIDFIKRQIKEVEKQLKTIVKKDKELDKRMDNICQLKGLSFITVITVISETNGFALFRNRAQLTSFSGYDVVQRQSGSSVLGKTKISKKGNRYIRRALHMPSLCVIKYNEEYRNLYERVFERTKIKMKGIVAVQRKLLLLIFSLFKKNQAYDPDFSKQKTAKNCRQDTIPAYAG

SEQ ID NO: 312359 - protein, 441 aa, unidentified
MKVPNPLDLPIINPHAAGVDVGSEKFFVSVAGQEPRVFLTVTSQMQEVCEYLKAEGVQTVAMEATGVYWINLHGALEEAGLQVKVVNGAHCRNFPGRKTDMQDCQWIAVLHAHDLLSGGFVPPSAIRRLRDYMRLRGDLVSMAAQHVQHMQKALDRLNVKIHVVISDITGWSGMRIIKAILAGERDAEKLVTLCDPQILKTKKAPMIEALRGLWRQEHLFALRLAVESYESYQQQISQCDAQIAEVIKELSEGRATPPLSPPKELRHNAIILEGLQQQVAQIYSKDLTRLPCINESTAALLLSEIGNDMSQWPDWRHFGSWLALAPCSAQSGGKRRRVKRYLTRAGQILCRAVQCMAVGKHTWLASFYRRIRAKRGAKVAIKATAYKLAKLIFLVLTKGWEYVEQGIAKYEERIRQMRLKALQKLAKELDFVLLPKNMANS

SEQ ID NO: 312360 - protein, 423 aa, unidentified
MMMTESRDEEQIIAKVAALDIGKAELVCCVRVPGKGTSTRRLQEVTTHSTMTRALTELANHLVDLGIERVIMEATSDYWKPVFYLLEAHGLDPWLVNARDVKHLPGRPKTDVLDAVWLCKVAERQMLRPSFVPPRPIRQLRDLTRYRSTLVAARTAEKNRIEKLLEDACIKLSVVASDIFGVSGREMMDALIAGQHDPKVLAQMARARMRTKIVRLEEALDGHFDHHHAFLLSRMLGRIDTLDADITAVDEQIEVHLAPFAVAAARLDEIPGVGPVVASAIIAEVGVDMSRFPTAGHLCSWAKFSPGINSSAGKTTGNGSTGHGNRYLAAALGQAAVMTQKTDTFLGSRYRRLAKRRGKKRAIVAVGRSILIVVWHLLRDQNATFHDLGSEHYTRHIHPHIKKRSHIRQLEALGYTVTLTPTA

SEQ ID NO: 312361 - protein, 331 aa, unidentified
MTSLPNHTVTNSLTVGIDVAKATLEMALSNRLATSSHSNDEAGHAALLARLEQLRTQGAHIALVVLEATGGFEAEVAWALQLAGWPVVVVNPRQARDFARSMGQLAKTDRIDAQLLARLGQTLLQRPDLAKLIKPLPDERQRMLQAMVTRRRQLLAMRVAEQQRAAGPDRRMRKSLNIMLKALDRELARLEQELHVFIGEHHAELLALLGEVKGVGKATISTLLAEVPELGELSGREISALVGVAPINRDSGTLRGKRTTFGGRPQVRKVLFMAAMVASRYNPVIKAFYERLVAAGKPKKLALTACMRKLLTILNAMAKARKPFNAGLHLA

SEQ ID NO: 312362 - protein, 404 aa, unidentified
MNAVGIDVSKGKSTVAVLRPYGEVVVSPFDVAHTGSDLRALADLIKKLPGETKVVMEATGNYFESIARYLHEQNIFVSVVNPVLISDFGGNTLRKPKTDKKDSVKIASYALTYWLDLKEYTPQEDLRKSLKLLNRQYQQSIKLKTMMNNNLISLLDLTFPGINKLFTSPSRESDGHEKWVDFVLEFSHCDMISKLTIKAFAKKYKKWSDKNSYHFTESSCEKIYDFAKDCVSSVSSDKAIVFSVVQAAKMLISATENCHAIQSEMNRVASKLPEYDTVMNMYGVGKAVGPQLMAEIGDPRRFHSRKAITAYFGYDSENNDSGQKTTRSNPMTKKGSGALRRTLFIIMQVLLQTKPQDNPVYDFLIKKKSEGKHYYSYINAAANKFLRIYYARVKEVLNVSEQMT

SEQ ID NO: 312363 - protein, 346 aa, unidentified
MLYSGIDLHKCFVLITVINESGCQISQVRINNDVNALISFFAQFNEPIEIVVEATLNWYWLVDLLDNLGYTIVLAHPKKLKAIVDTKFVDDKISSETLAQLLRNNYIPKVYYLNPEIRALRDLCRTRLYLVRQRTSLVNGSRSTLLKYNLFAPAKGKLYSPNGLAYLRKPDLAIHDIYKFGLNCRANIIELLTENIDHLEQEIKRNMVTDEIIELLKSISGIGDVLAPTIRYEIGDMSRFYNEKRLSSYCRFTPRTHRSAKRTKQYKTSKDGNAYLKWAFSEVTVNAIRYDSDVKRRYQRLKSKKGKPVALTIIGRNMTTIVYNVWTKREPYRGFKKPKIETNKEQ

SEQ ID NO: 312364 - protein, 391 aa, unidentified
MSMYFIGIDISKYKHDCCIISAADQKVVSKVTIKNNKAGFNELLTIIHSLANPADIRIGFESTAHYALNLELFLENSLLTFMEVNPVLISEYKKSKTLRRTKTDSVDCESIARWLMTVEYKPHSKGFYHAYSLKSLTRLRDKLIRQRSFYLIKITNVLDHTFPEFKPFFNERLSKTALYLLENYGSAEKMARMNSASYEKLRSLSRGKFSPQQFLRLKELAANTVGVNNSIFDVELNSLLSLYKSLVKEINTIEKEINKLIEEVHPHYMSVPGIGPLSAAVIYSEYGDISNFTNPGQMLAFAGIEPGINESGTESHGGKMVKRGSSQLRYTLINCCLPLIRFDMTFATYYAKKRGEGKPHRVAITHVAKKLIRVIYALERHDIDFNAQKLR

SEQ ID NO: 312365 - protein, 451 aa, unidentified
MEGLYLRCCDIDVHKKVLVACVIQVIDGQRHKEIRTFATTTQGILQLLDWLQATGCTHVAMESTGVYWKPIYNLLEGHFQLLVVNAQHIKAVPGRKTDVRDAEWIADLLQHGLLKASFIPPAPQRELRELTRYRVSLVQERARTVNRLQKTLEDTNIKLGDVATDILGKSARAMLEALLAGQTDPVLLADLARGRMKAKRAQLEEALVGTVKPHHRFMLSEELVLIDTLDEAIERISQEIAQRLDPPPDPTERGESSAGQIKPDQRAQPPADRSASHQLQDAQGLCWKDAVVLLDSIPGINQRAAEGILAEIGIDMSRFPTAGHLASWAGMCPGNHESAGKRLKGSMRKGSPWLRQLLVEAAHAAAHTKNTYLSSLYHRIKARHGAKQAMMAVGHAILVICYHMLDRHVAYQDVGGNYFDEHEQQAVEKRLVRRLEKLGYEVSLQPVTHVA

SEQ ID NO: 312366 - protein, 319 aa, unidentified
METKIYVGIDVSKDTLDVAVHGDKQHWSFPNNEAGINKIVAKLKGLNPELVVLEATGGFEFSLAAELVAAKIPTSVVNPRQIRDFAKSVGMLAKTDILDARIIARFAATVQPTPHQIPDIEAQELGAITARRRQIVNMITAEKNRLSTAVKTVKPRIRAHINWLEKELDEINKNMKQKVKDSPAWQAKDDLLQSVPGVGPNLSTTILAELPELGTLNRKQIAALVGVAPLNRDSGTLRGKRTVWGGRAAVRTAFYMATLVATRYNPLIRCFYERLRAAGKPKKVALTACMRKLLTILNAMLKYNTRWDYPVVHILSTYH

SEQ ID NO: 312367 - protein, 465 aa, unidentified
MHTIERTAEAPSERKQTTRSMSGLDVIHPGAAGLDLHKEVIVACAPMTAGETQHPVKKFGTYTSALLELAAWLKQHGVTTVAMEATGVFWLPVIGILRAKGLEVLLVNAREVRSVKGRPKTDKLDCEWIRRLHACGLLRGSFIPDAETEMLKSLWRHRLNMEEEDARAIQRMQKAFQIMNIRLDIAVTDIVGETGIRIIEAILAGERDPRKLAKLRDPRVAKSEREIADALTGNFKDEQLFIIRENLAHHRFLLERIRETDARMGAQMDTMKKKSDAAELPAATKPDRSRHGETLSRERLYELLGVDLTQIDGVGVLTVSSFLVNAGRDMSPWMTENHFASWLGLSPNVKQSAGKTRAGATRKTASALAHSFRMAVMTIGRLDSWLGAYYRRLKGRIGAPKAITATARKLAIIFYRAVKAGGTVKRLTAEAYEQANRNRILKALRQRAAHFGFDLTMKSNVPVEA

SEQ ID NO: 312368 - protein, 351 aa, unidentified
MDATTVGVDLAKNIFVACVADCAGRIVERREFNRTGFLTWLGTLPAGTVIGMEACGSAHHWGRTAQRLGLAPRLMAAEFVRPYRKRQSVKNDRADAEAILIALRSPGMRFVPVKTEAQQQRLAWHSLRIGWVEERTALFNRVRGLLAEFGLIVDPGPKHLRTLLAEREFDTALSPALRGVIQSVRDQLEALDTRIGECDRQITAQQADDPLAKRARDLPGVGLITADAVTASVGDASMFKNGRQFAAWLGLTPSQSGSGGKTKLGRITRRGDDYLRTLLVQGARSVLAATMRKQRRESPDQLTRLQQWIVALNGRIGYHKTLIAIANKHARQLWAVLAKGEAYNAQAWQRA

SEQ ID NO: 312369 - protein, 428 aa, unidentified
MNDVARFTQFCKLRNEIRGSGKYLIVGIDIAKDKHHAFFGTHNGKVLWRRLIFTNDIVGYNRLVEQVNTLTHQHQLQHVVFGLEPTSNYHKPLAQWLTQNDYLVVLVAGKAVKDNRELIDGRWDKNDTKDSANVADLIGQGKCLFYENPEEDIISLRNLLSVRKQLKKQEHRQRMRIRNGLLAKYFPEMDRYWGSCIEENLAIVRWYLDPRKISKTDFSLFLQRVTTTDRGARQVTRLRKIHDAAKKSIGLPVDAAAVYEAKMLVKRFKSVRQESLQIMEQIEAICRRLPSYKLLLTIPGFGPYIAPLVLSALANPLRFKSRKQVIRLAGLDLNASRSGKNSQDSVPVISKKGDADLRYGLYQAALIASYHNDYFRTIYLRVLEGRQGERGIKTKARVKLAAKMLVVAWTMLKNNEPFNPNHLLTEPV

SEQ ID NO: 312370 - protein, 418 aa, unidentified
MNLFVGLDVSSEKLDVCFLSDDDNLTILEEITLGNDIDGATIVKEKVIDFQEAYGFHKIVMGMESTSMYSFHPAMFFNQDKELKGLNTVVTIENPFRINQFSRMFDEDKTDRNDAFRIADFLRIQRFTTSPIKEKKYMALQRLTRTRYQLIKQLVRTKQHFLENLTYKCNTLTRELKELDGTTSVFSATVMSLMTDDYSLDELAEMPLEDFATLLQEKGKGRFKNPKSLAKAIQRAIANSYRLGTIAQESIDVVLSILVREIRALEASIKDLDKAIEQLVVILPEYQCLTSIPGVGKVYAAGMIAEIGQIERFEDQTKLAKYAGLSWKVKQSGNYQSEYTPLTKQGNRYFRYYLVEAANSVRRYLPEFQEFYSKKFKETPKHQHKRALVLTARKFTRLVDMLLRNHQLYAPPRSVIDK

SEQ ID NO: 312371 - protein, 338 aa, unidentified
MENLGLDVHSANFTLAHVNAKGKLCRMYERNTSGENLIEVVEGIRGPKRLVVEESHLAQWVKHMVEAFVDELIVCDPKRNRWIAADDYADDKTSARKLAILLHGGFIKAIRHPDDVGAELRSLFLHYYSLTRQSVRFKNMLKATFRQVAIRAPGAEVYEAPEREKWLAKLKDFKHLRHRAYHYFKLLDSLSELRQSSFSELSKRSRKSPAYELLQTIVGIGPVLSAGYIALIDTPERFSRKNKLWAYGCLGNKYHESDAAVYAQRSSKTGCRPLKWLVMQQFNAAVNRGTKTNRFKRQYAAALGSGLGKKTARRHVCRNMLSVVRAVWMKGQAYRDEA

SEQ ID NO: 312372 - protein, 349 aa, unidentified
MRFYTQQHRFYCGIDLHARLLAICIVDQAGTIVLRKQIPDDKQMLLEVLAPFRPDVVIAVECLFAWYWVADLCAAEGIPFVLGHALYMKAIHGGKAKDDDIDAEKIGRLLRGGNIPMAYGYPKGMRETRDLLRRRNYLVHKRAELIAHIQITNAHYNLPPFGKKLIYAKNRVELKGAERFPDDQVRKSIAVDRALIDFLDGQIADVELYLQRTVKVEDPQTYYLLQTIPGVGKILALVLLYEIHRIARFADAGDFLSYARLVRCQHRSAGKLVGLGGPKIGNAHLKWAFSEAVGLLLRSCPAVKAWQARQEKKHGKKKTLGILAAKLGRTVYHLLRKQVAFEVRRFLGQ

SEQ ID NO: 312373 - protein, 439 aa, unidentified
MARYYLGVDWADQSHQLYVSDESGRKIRELEVQQTADGLAELGRWLEESRGQGIELWAAIEKPEGRVVDFLLDHGVVVYPVNPKALDRARDRFRMSPSKSDGFDAYVLAEFLRTDHAHLRALEPNSAEGQELKMLTRDHQRLGRQKTRLLNQIGITLKEYYPVPLEVFESLDTKIALDFLKAYPTPQALSKLTRRGWKRFAKRDHHLSEARCSELWDKLNKPQLAVPTHVVRAKAKLLAALVMQLETSVKAVDSYSQEVQSFFAAMPAAEIAKTQLEASVKAVDSYSQEVQSFFAAMPAAEIAKTLPGGKSGTTVASIWAELGDAPKRWNSFRHLQAEGGAVPVTKASGKSRMVQFRFACNKHLRQAMYWFSFNSLQRSEWAKKYYRNQRAKGHSKHESLRVLGAKWLKIIFVMWRDHKPYDENYHLANIARQMMRQAA

SEQ ID NO: 312374 - protein, 419 aa, unidentified
MSFKILKFKCCGLDVHKTWIYACIGITDSNNRTEYKQARFSSFTKGLNELCDWLAKYNCTDVCMESTGKYWIPVFNILEQHNLWVTLSHPKYTKPMKGNKTDRKDAKWICDLYMCGMVKPSFIPPADIRELRDLVRYRYKLTCMITGEKNRAQNCLTVSNLKLDDVFSDVFGKSSRSITEQILQHPGEKFDAAPFVHGRCKTPIEEIQAAVDGAISKEQAVKLRQCLDHIDELNKHISELEQEILRLSDKYEAALNLIRTVPGFDKNPMTAVQILSEIGGDMSVFPTAKHLVSWAGCCPRNDQSNQKIKSTRISRAGSYFKPVLVQVANALIKSKKHLEFTNRYKRIKARRGHKKAIIAICRMILTAIWHILTDLKPYTPEGFLESHPVKEGKVLSSSQALNFFKQRGYIIKDEPLSVS

SEQ ID NO: 312375 - protein, 372 aa, unidentified
MAATAQSAIAVIGIDIGKNSFHVVGLDGRGAIVLRQKWSRGQVEARFANMSPCLIGMEACVGAHHLSRKLKALGHDARLMPARYVRPYSKGQKNDFRDAEAIAEAVQRPTMKFVVTKTADQLDLQALHRVRERLVSQRTGIINQIRAFLLERGIAVRQGQRFLRVELPRILATPPDVLSPRMVRVIEGLASDWHRLDERIEGFSSEIEELAKRDAGCERLMSIPGIGPIISSAMVAAIGTGDSFSKGRDFAAWLGLVPRQISTGDRTILGKISKRGNRYLRVLFVQAAWVVLVKVKPTRWEGHGLRPWIEAAKKRLHAIALANKLARIAWSENLLATHGRTIHWVNIGPRAMSAQADGDRGAIGGYSPNVRY

SEQ ID NO: 312376 - protein, 417 aa, unidentified
MKCFVGLDVSSTKLDVCIMLSDTTTPFTASLPNDLVGASEIKKQILELNDSYSFERIVIGMEATSLYSFHPAMFFHEDSDLKALKVEVMVEQPNKIKKYREAFEENKNDTLDAFYIADYFRIERFSPAFLKEEKYMALQHLTRTRLQLIEQLTKTKQHFIENIYYKCNTLSTEIKNENLSTNLWSSTIISLMTEDYSLDELATIALEDLAEFLQKLGRGRFKAPEKLAKAIQAAIRGSYRLSKLQQDSVNVILGLLAREIRNLEQMIKDIDKAIEDMVEVIPEYQCLTSVPGVGKVYAAGIIAEIGQIERFKDHPQVAKYAGLNWKQYQSGNTNSQNTELVKRGNRYLRYYLVEAANSVRRHDSEYQTFYMKKYQEVPKHQHKRAIVLTARKFVRLVDALLRNRQLYTPPRRLMEDK

SEQ ID NO: 312377 - protein, 348 aa, unidentified
MDEYIAFDSHRHYTLAERDPVAGGRPRQQRIEHRPGAIRQYLASCQPGGAVAVEATGNWYWIVDEIEQAGLRPLLVHPGKAKLMMGMINKTDKLDVHGFNRLQRNQTLPTVWVPPGDLRDLRELTRTRMVLSRQRTRLKNRLGATLAKYGLAIEGFTDNFGVGARRVWPKLLVQLPPQTRFCAEALLDELDRICKRIREFEERLKEVIKITESMRLLLTMPGIGEILAPVIALEVGDVSRFPDAEHLASYAGTTPRVHSSGDKTRYGKLRSDVNRYLKWAFVEAANTIALHHRMTDGHASRLYRRLKDRKGHPKAIGAVARHLAEATWHILDRRQAYRDPELGQTRKA

SEQ ID NO: 312378 - protein, 313 aa, unidentified
MPDLHFIGIDVSKDHLDVAVRPSGERMQFANQDDGIDQLIQRIRSFSSTLIVLEATGSYHRVLLSRLIAAALPAIAINPRQARDFARAIGRLAKTDAIDADVLAEFGEKIRPELRSVADEATQQLEAACTRRRQLVGMLAAEKNRLQSSPSSVRPQIKKHIQWLEKHIQQLEKDLDHQIRSTPAWREKDDLLRSCKGIGPTTSHTMLACLPELGRLTRHQIAALVGVAPFNQDTGRHRGRRHVQGGRTDVRSTLYMATLAAIRHNTVIRHFHQRLIAAGKLKKVAITACMRKLLTILNAMLRSHKPWNANFAS

SEQ ID NO: 312379 - protein, 405 aa, unidentified
MPELWAGTDAGKAAHHCTVIDTDGTKVLSRRVPNNEPELLELIGDVLALAKESPVTWAVDLNAGGGALLIALLASHGQRLLYNPGRTVHHASRGYRGDGKTDAKDAYVIADQTRMRRDLQPLQEWDEIAVDLKILTARRYDLAADRTRAINRMRAQLLEYFPALERTFDYAASKAALILLTGYQTPAGLRRVGPSRLTTWLKNRKVRGAQAMADAAVAAAQAQQTAVAGESTAAAVVNTLARTVLAVDEEIADIDARIAARFREHRHAEVILSMPGMGPLLGAEFIACTGGDMDAFGSAGRLAGVAGLAPVPRDSGRISGNMRRPHRYHRRLLRVFYLSAQIAARFCPTSKIFYDRERNEGKSHKQAILALARRRLDVLWALIRDQRTFKAQPPQHELATGSLSA

SEQ ID NO: 312380 - protein, 482 aa, unidentified
MKKPNIYQNQSQQLLHLFEEAGSSEKVMCVPMDYAKNDHLVMFCNGHGDILRKPFSVKNTPEGIAYIDDQVTRFCRRRGIKKKHVFFGGEDANSFAKNFVSTLRTKGFVVANVNAHDAKKQRVNMQASTDRIDLMGIATMLLNCRANCCAAQSGIYRNLRTLVRHRRRLVQMLTEVKNRVHGIVDELFPGFLNEKNSGIIPFTQTSLYLMQDRFSPKQIRRRKRQKLIEILKRLGTSKAEYTAAKLQQYAAKVLHAPVEYVDAMQLSLAQHVKHIRCLKESVGQMEKEIALNLAQTQGAFLTSVRGIGLVLAAGVTAEIGDFNEQKPLNNLASYAGIVPRVKQTGGLDGKTYAGPVAKRCNRILKDYVVKSAYHLGLHGPQDLMADYKRRDASGQHADFGIGRRYLRMAINLMRTSQVYLPPNLRKDDSTLQKRAGYYLMSWPYLREKWKKVGALEAAFANNRPLGLWRQIVQELYDIKLKL

SEQ ID NO: 312381 - protein, 382 aa, unidentified
MHDSTQSIFEQAIIGLDVHLKTITDAVLLPGQQRIEKTGTFPNNEKSLRNLLERLRAIAQDHGLVFVYEAGCMGYTLFHWLYEMGIDCRVIAPGSIPKKSNHQKDDTQDAIALARYFRNGDLSEVTVPDEEVQGLRGLVQLRGATVRMRTQTKNRIKHFQMIWNLKSGGGFGQDHLLYLCRAVKNLPKAAGIQLSILLSQLQSQNDQIGLLENELFEIAKSERFKNYHDALIGLKGISTVTAIALIASIIDINRFTSPCQLMAYWGLVPQRENSGEKVCQSHITKRGNVEVRRLLVESARNQFGSYVVNSKHSFGLRRKGLDPELCRIMEKAGYRLSRRARALSNRGKSANKIKVAIAREMAGWVWALLMKVEEVSSEKNAA

SEQ ID NO: 312382 - protein, 410 aa, unidentified
MAERFVGIDVGLREHRIAVLDRDGEAVGQSFTIAASTDGVATLLRTLAARDATAAQTLIGLEASGHLWENLEAALGGAGYRVLVLNPLQTRRYRDVVRRKAKTDDIDAHVIAGLLRSGAAQASYVPDEPIQSLRELARLRARLMADRQDYQRQLVEQLDVVLPEHRAVLGDLLTARARGILAQFPTAQHLANANPRAIRRAAEDAGARGFSLDDATGVRDRARRSLYSGKAAAARAHVVRTLVSQLERLTSAIDEVDHAATTLLPPSEPGTGPSDAELLQTIPGIGPQTAATLLGELGAFTRFTDARALVAYVGFYPVIQESGDRAATPRLSRVGSRIARRSLYLAAVNAVRGSGEWRTIYLRKKAQGKTAQQALVVVAVKLLHALYAMLKHRQPYNPSRLLVAPATIGS

SEQ ID NO: 312383 - protein, 324 aa, unidentified
MNTIGIDVSKAKLDCAWLKEQDKVKTKAVANNLTGWQELLDWSLKNTGLAIAELHFVMEATGIYHEQLATFLHDAGAKVSVVNPAQVKFYAQGLGVRSKNDKKDSVVLARYGLKENPKLWQPEAQEIRTLKALLARFDGIEKDLQREKNRQEKALISLAPEEVINSLNLMIDQLTSEQQRLEKLIEDHINKHDKLRENKALLETIPAVGKVIATRMLMVVGSRQFDDAHQCAAYLGLVPVQHESGSSVKGRAKLSKAGNPVIRAKLYMAAVVAIRSNPDIKAQYERLTSKGKSKMSALGAAMRKLVQICFGVLKHQQPYQPQST

SEQ ID NO: 312384 - protein, 401 aa, unidentified
MKRACGLDVHKDTIFCATFDGQKHGPVKEYSTVTPSIRAMGEDMQSVGVDTVAMESTGMYWIPIWNILEEMGFNLMLVNPYLIKQMPGRKSDVKDAQWIATLLHKGLLRSSLVPCQEIRELRTYSRKYVKLQQRQTAVLTEMERTMEMCSIRITSFVSNISGKSVMKVIRQLVQGETNPKVLAESIHGRIVNKHKKEVVEQALTGFITAHHRFILEQSLEEFDMLVSQTSKCLSKMSVLCNEHYKDQMKLLLTIPGVSDISAMIILAETGADMKAFENSGKFSGWTGLRPRNDESAGKYKSTATTKGNRFFRAVLVQIAWAAIRTKGSSFKEKFNRLAMRKSRKKALIAIARKIGVVIWNVLNYEQVYNAEMLIIYDQGKLNAKILYHQKEHDRLQKLAQR

SEQ ID NO: 312385 - protein, 345 aa, unidentified
MSMVSGVFGGVDTHADVHVAAAIDENGGMLGIGSFPTDAAGYRSLTDWLCGFGPVIRVGVEGTGSYGVGLSRHLHREGVVVVEVDRPDRQKRRKLGKSDPIDAEAAARAALSGSATTTPKRRDGTVEQMRVLMVARRSARRQRNQTLNQLRQLVFTAPDEVRARFKDRYKTGLVSEAAAMRPRKGSDPIVFTTKVVIRGLARRIQDLNDEMGTIDDALGGLVKQTAPSLLDCYGVGAVTAATLLVTAGDNPDRLHTERSWAHLCGVSPVPTGSGKTSGRVRLNHGGDRQANAALYQIVLTRMSSDDETRNYVRRRRAEGLSTREIMRCLKRYVARQTFKHLPRVA

SEQ ID NO: 312386 - protein, 376 aa, unidentified
MGMGIRCLQRKESDMKSTTVGVDLAKSVFQLAVADASWRVIETHRLTRSQFERWFHNRDVSLVVMESCGSAHHWARYLSGLGIDVKLLPAKYVRAYVKRNKTDAADAAALLEALRASDIKPVRIKSIEQQALQGLHRTRSLWMGTRTSRINALRGFCREFGLVIPQGSRTGVEAMARALADPRSAIPELIRGSMKLLIEEIRLLEQRIAQLEQELAALVKQSPACQELLTVPGIGLLTATAMVAATSGEVAHYRDARHFASWFGLTPKEYSSGSTRYLGRISKRGDRYLRMLLTHGARAVLRSAVVAKQAGRQVDGLKDWALKVQGRTNHNKAACALANKLARICYAVLKHHEPYGNQTRREEKRKTNRTAYAVAG

SEQ ID NO: 312387 - protein, 340 aa, unidentified
MGNVTTIGLDIAKNVFQVHGVDADGAAVIRQRLTRGRMLKFFAKLPRCLIGIEACATSHFWARELVALGHDVKLMPAQYVKPYVKRGKNDAADAEAICEAVTRPTMRFVGIKSPEQQSAMMLHRVRLILNRQRTQLSNAMRAHLAEFGIAAPIGRNGIEQLLDVIADPTDERVPADARFCLEMLAAQLRIVKEQILENDRRILASARETELGRRLMEIPGVGPLLASAIVATVPDPAIFRSGRNLAAWIGLVPRQNSSGGKERLGSITKAGHQYLRQMLIVGAMAVVRYAERNGAKRPWLVQLLARRKAKVAAVALANKNARMIWAMMASGERYREPQIV

SEQ ID NO: 312388 - protein, 341 aa, unidentified
MKKFIRTAVDLGKNYFQVHGLGSEGGLSVSRKLKRSKVLEFYSQIEPCRVGMEACGSAHYWARELIAMGHEVVLIPPAYIKPYVKRGKNDAVDAAAICEAMSRPGMRFVPVKSADQQAVLMLHKTRELLVKQRTMSVNALRGHLAEFGIVAAKGIGRVDELLALAQADAALPQIAKSAVAGLAQHLEGLDQSIETVEEDIAKAHRQNPTSRLLDEIPGIGTLTASVTAASVPDPGVFKSGRDFAAWLGLTPRQNSSGGKEKLGAITKQGNRYIRKMLVTGATSVLRVAGKRKGALADWINALRARKPERVVAVALANKLARICWAIMTTGEGFRTDTYVKA

SEQ ID NO: 312389 - protein, 400 aa, unidentified
MPYRFTKSVQYLEIPGVIFLTTESRVKLRVKILKLPILFSYFFSHLKLRNFILNILKQTVGIDASMDDFEARFGTIDSNQDECISKAEKFDNNFKGFNKFLKWALSLRTSKLLPVSFVMEVTGVYHENLAYFLHSKGFQVVIVLPNKIRNYAKSLETKSKTDPIDAMVITRFALERKLTAWSPPEPFIRAIKELSREYVALKTMMTEVKNQIHAKQFANFTDKNVIKRKRRLLKELQKQIDEILMQIKKLFQSKPGLYEKITKVTTIKGIGEITAIIILAETNCFEHVTSISQLISYAGLDVVLNESGKKKGKTTISKKGNKFIRRALFMPAMSACRSNQKMKETFAHLVSKGKNKKAALIAVARKLLVLIYTLWKNDTEYIQDYKRTKPENKNLVTCNA

SEQ ID NO: 312390 - protein, 344 aa, unidentified
MQHTTIAVDLAKSVFQVAVSRAPGRVDEEHRLSRARLLPFFATQPSAVVLLEACGSAHHWGRAFAQLGHTVRLLPPHETRRYVRRNKTDQTDARAMLEAARNEEIHTVPIKSETQQAVASLHRIRTTWIRTRTARLNTLRGLLREFGITIPVGARHVVPRVEALIEDAEAPVPMSLRATLAELCDEIRTLTSRLRALERQLAAVATQLPQVALLRTIPGIGLLNATALVACVGDVRRFPSGRHFASYLGLTPREHSSGGRRRLGAISKQGDSYLRTLLMHAARGTLSHSLHPTKPSPFRTWARTVAERRGSNIATAAIANRLARMVWRVWRDNRPFVVEGPVAA

SEQ ID NO: 312391 - protein, 314 aa, unidentified
MTHYIGIDVSKKVLNIFDGKKDLIFDNKENLCSLKKYLKKRYPDFSSLVILFEATGIYSYHLKAFCATHLIKACIINPQASHHFAKSIGARTKTDTTDARTIWSYRKLTCDKDIRIPKLDQRLMTLASYLKSYQLALKQRLALSNHLEGVKDKTLYRLLKKEQKRLGQLEQELLIRMDTYIKGYPKLNEDYQRLLSISGVGRKTAISLLVLFHTYPDTNRKQITALIGLDPIQRQSGTSVHGRSRISKHGNQMMRKSLYMPTLVSIQHNHKIKVFYERLVSKHKPKKLAVIAAMRKLLLIAHAIYKNKTVYVPG

SEQ ID NO: 312392 - protein, 425 aa, unidentified
MSYKIAGIDIHKRMVAVVVADVAGEGEYQFERHKFGSGGEQLRLLAEWLVANQIEEVVMESTAQYWKPVWGALERDWQPVSRARGAGAKSGSLLLAQAKSNRAPRGRKNDFADAERLLKRLVANELVLSFVPDTEQRLWRTVSRQKLQLTRARVRLQNQLEALLEQAHLKLSSLVSDVLGVSARRMLQALADGEIDAGRLAALAHCRLRATSEQLCDALGAATKLSPVYRRLLQMLLDELKLQERHMEQLDQELSVLLTAHHSAIQRLAEVPGLGVDSAQQILAEVGANAAAFPSAKNLASWVGVCPGEEQSAEVSKSARSPKGNRNLRRLLNQAAHAAVKTKGSVFEWVFGRLRTRLAYQEAIWAIAHRLCRLIWKILHQGVHYEEHGPAVSIKSKRNRTTRMIRELRKLGYRVEPVGAFATNM

SEQ ID NO: 312393 - protein, 369 aa, unidentified
MENIIYIGMDVHKERLSLCALHGTTGEIVGEARCASNVSLVKKFVEKLKTKYREDINIKARYEAGCLGYSLHNLLEQNGIDCDILAPTTMYSSSKNKMVKNDKFDAKMIALNLANGTYKEVYVPEEEDVAVKEYIRMLGDFKTSLKKIKQQIKAFLLRHGYVYEGISSWTITYMKWVRNLDLQGLFKETLGEYLLQYEVLVDKIERFSLRLEELSHRERYEEPIAKLRCLKGIDTTAAMNVYVEIADFTHFPTAKAFMAYLGLTPIESSSGDKISRSSITKQGNSTVRSTLVECANALVKGTIGLKSKRVKVRQKGQQSEVISYADRAVERLQRKYHRMMYQGKPRNVAITAIARELECFIWGLETGKI

SEQ ID NO: 312394 - protein, 342 aa, unidentified
MKEVPHVIGIDLGKSVFQVHAVDETGRVIARRRLRRHEVMTFLGRYPSTIVALEACATSHFWAREIGTLGHEVRMIAPQYARAYVKTNKNDAADAEAICEAAMRPTMRFVRPKSADQQAMQMLHRARDLLIRQRTMLVNALRGHLAEFGVTAGSGIGNVKNLLVKFDDTRDKLPKLASDVIDALTRRLADLQNEIEALDEKMLLWHRSSAASSRLAEIPGVGPVIATALVAKVGDASQFASARHFAAWLGLVPRGSGTGGKIRLGSITKRGDGYLRRLIIHGARAVLRWIGRRTDASSAWLRRLLERRPVNVAVTAYAHKIARIAWAMLSRKEPYRSALVVA

SEQ ID NO: 312395 - protein, 338 aa, unidentified
MKLFAGIDLHSHNSVIAIIDNANKRIFKKKIKNDLQTILHSLEPFKEQLKGIVVESTYNWYWLVDGLMDQGYRLHLANPSAIKQYEGLKHSDDISDAFHLANLLRLGILPEGYIYPKEQRSVRDLLRRRMHLVQQRTAQILSFQNLVAKNLGRSMHVQEVNKLTEDDVEGLFEQKHVMLSGKACIATIRFLAGQIKAVEKAVHKAVRLSRQYKLLKTVPGIWETLAKTIMLETGPIERFSKVGNYASYCRCVKSSRLSNSKQKGTGNSKNGNRYLSWAYVEAANYALWNYDYVKKYYQRKQAKTNSVVAIKAIAHKLSRACYFIMRDQVAFDPQKAFS

SEQ ID NO: 312396 - protein, 312 aa, unidentified
MTIKRKMAGVDVGKANLDSLVSGQKEVRRSQNDSAGIRALVASFVSQEVALVVMEASGGYEKALAIAVVEAGLKVHVANPTRIRSYAKAKGVLAKSDNIDTAVILEYGEVMRPEGQEIARQNHLKLSELVRRRRQLLVHRTEEKSRIDKQLSPEMEAHIQKHIDWLSAEVEALDVEIEQMMLDDEGWQEKAAILESTPGVGKVTSRTLLAELPELGRLNRKQVAALAGLAPYNRESGKYRGKRKIFGGRSAVRCVLFMATLNAKKNNPVIRDFYDRLLAQGKPKMVAITACMRKLLTILNVMLKTKTKWKFA

SEQ ID NO: 312397 - protein, 408 aa, unidentified
MEAIIERCCGLDVHKDVVVACVLVGPPEGRARKEIRTFGTTTTQLEEMCGWLLKVGCTHVGMESTGVYWVPVYSVLEGSFELIVGNAAHIKNVPGRKTDVKDAQWIAELIRCGLIRNSFVPPKWQRALRDLTRYRRKLVEAQASERNRLQRLLETCNVKLSSVASDVFGKSGREILRAIIKGEASPGQMANLARGRLRKKLDGLVPALRGKVEAHHRFMLEMQLDRVEDIEANIAVVDGKIDEAIAPHRAIFEHLTTIPGFDRAAAVTVIAELGVDMSVFPTAAHAAAWTGVCPDNNESAGKRMGQQKRRGNVHLATALVQAAFAASKSKQNYLKSRFWKIAGRAGKKRAAVAVAHSILKAIYEMLKAGVDYKDLGSDYLDRFLNSRAEQRLVNRLRSLGYDVSPKTA

SEQ ID NO: 312398 - protein, 368 aa, unidentified
MGTKSSKLFVGMDVHKESIDIAVAEETGEVRHQGQIGGDMTALSKAVRKLESLGRVLVFVYEAGPCGFVIYRMLQTRGHQCWVVAPSNTPRRVRDRIKTDRRDSMKLAGLARAGELTPIYVPDPADEAMRDLVRTREDAVAMQRQARHRLAALLLRNDIRYAGKTAWTEAHRRWIARLTLPHPAQRIAFEEYVQAVTEATERVQRLTRSIEHELEQWRWRPVVNALQACRGIQLIHAVRIVAELGDLSRFQHPRQLMGYLGLIPSEDSSGEHRHQGAITKAGNSSARRALVEAAWAYRTAAAVSPIIARRQTGLPKTAIDIAWKAQLRLCARFRKLNARGLNRNKIVVAIARELAGFVWAIARQIKPL

SEQ ID NO: 312399 - protein, 454 aa, unidentified
MAMRKREDEVFPNAAGIDIGASSHWVGVPRHLAEAAGCDPVREVGAMTADLEALAAWLVSLGVDTVALESTGVYWIPVFEVLEQHGLKVWLVDARQLKYVPGRKSDVQDCQWLQKLMSLGLLRAAWRPSAEVCVLRAVARQRETLLREQASWVQRMQKALVQMNIQLTEVLTDVMGVTGQAIVRDIVAGVRDPLQLARHRQRRVKASEAEIAKALQGNWREEHLFVLKQALAMYDDIARHLAECDARLDALLDARSQAKVDIGKLPRMGSKTRMEFDVRQRLANWAGVDLTRINGLGVTVVMKLLTEIGPDVSRFASVKHFCSWLGLCPGTKISGGKVLSSGTKRSANRARQALKMAAQSLWRSESALGAFYRRLTARMDKPKANTAAAHKLARMVYFMLTRGEAFVDQGQQRYEEQQRQRSIAALKRRAAALGFQINPMGDGLVNSAAFSSVS

SEQ ID NO: 312400 - protein, 490 aa, unidentified
MECIAIGIDISKGRCDVAILNQSGTLLAGSGGYDDIRRDHERLRDVLLALHDKHPEVRVVVGMEATGGLERNWMAFFRTEKRWEKFVFAHRLNPLAVKRYLESDLHRKADDASAALGIAQFVMEKHQERSPAPEAFDGKVAFYRVVRTQILRRTQTVQRLQSLLPAVHPGLVQYCRKGVPDWVLFVITRYPTAGKLTRAKAEKLADLPHVDLKRAQSLIEGAKESVAALNDEGTALAIGAITDEIRDLDRRIDDGKERLKALLSDDPRVALLDSIIGIGTWSAIALSLEIGDVSRFATVRSLIAFAGLDPRTSVSGDGEVKHGISHRGNANIRATLFMVAQVALVHNPVIAAFYQRLTSGEKPKPGMVALTACMAKVLRIAYALLCSGRTFDAEYEENRAASAAATRQAGRSASASATPALLQEQAPALEPQLDAPITRKEARRRREMAAKNAAAPGSGKNEVRPQTGTGASAPPLSRSQAAAKRPLRRT

SEQ ID NO: 312401 - protein, 364 aa, unidentified
MSDGICFAGLDVHARATAAAAVRLGSGEVFRARLSGGPVATIDWLRSLPGPVRAVYEAGPTGFGLARAARAAGVEVMVCAPGAIPRQPGDRVKTDARDALKLARLHAAGQLRPVVVPAPELEALRDLVRAREDLRGDLMAARHRISKLLLRRGLVWAGPGETWSERYLGWLSRVSLDAPLADVVLGEYLACHEALLARRERLDALIAEQAAREPWAPTVARLRCLRGVDTLTAVGLVAEIGDIAAFAHPKHLASYVGLVPSEQSTGERRRQGTITKAGSGHARRLLIESAWHYRRAPRVSRTLRRRQAGQPAATIDAAWRAQLRLHRRWTHLDATRGKKRTTVAVAVARELACFVWEIARQPEG

SEQ ID NO: 312402 - protein, 449 aa, unidentified
MREPQEIEDEEHEQVWERVAAIDVAKASGTVCIRVPHSSRPGRRVSKVWDVEATTGAITQLGDHLVGLGIQKVTVESTSDYWRLFFYLLQAAGLSVQLVNAREVKNVPGRPKTDKLDAVWLAKLTERGMLRPSFVPPAEIRQLRDYTRLRIDLTQERARHWQRLEKLLEDALIKVSSVASKLDTLSVRAMVEALIAGQRDPKVLAGLAKGRMRSKHAALVEALTGQFDDHHAELARMLLDQIDTLSAQIGTLTARIEELVAAIPAAQGVDADGTTGPGAGTGPGAAVLPAVARLDEVTGIGRNAAQVVIAEIGLDMGIFPSPGQLVSWAKLCPRTIQSGATNRAGKTGKGNPYLKGILGEAAAAAAKTDTFLGERYRRIVKRRGKLKALVAIARSILVIIWHLLADPAARYHDLGAGYYPSRIDKDKKARNHIRQLEALGFTVTLAPAA

SEQ ID NO: 312403 - protein, 329 aa, unidentified
MEHTTIAVDLAKSVFEIAVSRHPGRVAERHPATVLLEACGSAHHWGRQIQALGHRVLLLPPHKTRPYVTGNKTDRSDAKGLLEAQRNEQIRPVPIKSLDQQALSTLHRLRSAWLAARTARINTVRGLLREFGVAIPLGAKRVVPVLQQLLEDADSGLPDSVRPALDEARAEILELEHRMATVEQQLRALARQMPVVCRLRTIPGVGLITATALVAFVGDITRFPTARHFASYLGLTPRERSSGLRRRLGAISKRGDAYVRMLLTHGARAVLWKAKSREQPDRLRAWALRLEHLRGHNKAAIALANKLARIVWAVWGRDVEFDEYTAPAA

SEQ ID NO: 312404 - protein, 333 aa, unidentified
MQFELFIGIDVSKLTLDIAFLNQDAEVESFKIENKPVSIKRFFKKLSKQLNLENSLVCAEFTGHYCYPLRKVCLEEGYSLWLESGAEIKQRSGVTRYKNDKVDAIRIADYARRHQDKAKVQRIEDYTLESVRALSAERELFIKERAKYKTQIKDLKGFMDEALYKARSKRLTKQVESLTKLIKEVDQQIKSLLESSEKLTNQKAILTSIDGIGDQVAIHTILATSAFTKFNSGRKFACHAGVAPFAFESGTSQRSRRKVSFRANMELKKLFHMAALSAIKMKGEFKDYFDRKVAEGKNKMTVINAVRAKLINRIFALIRDNRINEKNYQPNLA

SEQ ID NO: 312405 - protein, 411 aa, unidentified
MDVVHARCCGLDVHKKSVVACVLASESDGLINRQVRTFGTMTADLLALSDWLSSLNVTQVALESTGVYWRPVYNVLEADERTLLLVNPQHMRAVPGKKTDVKDAEWIADLLQHGLLRGSFIPPVPIRVIRELTRYRKTLVQARADEVNRLQKTLEGANLKLASVATDVLGVSGRAMFAALLDGERDPDVLADLARGRLRAKLPQLRQALVGRVKPHHLVLISQILAHIDFLEQAIAEMQVEIDRCLPPFEKALELLQTIPGIREVAAAAILAEIGTDMSRFPSAGHLASWAGLCPTNKESAGKRMKGPRNRGNVWLRAIMGEVAWASIRTKASYFYAQYHRLARRRGKEKAAVAVAHSLLVVIYHVLSTGRPYQELGVDHFDRLNTAHIQRHHVRRLEQLGYTVTLTPIAA

SEQ ID NO: 312406 - protein, 339 aa, unidentified
MWYSGIDQHKRDSVIATYGPDGPRVKQVRVVNTPLALAQYFADFPAPHRAVVESTGGWYWLADVLAPLGVELVLAHATRLQAISAAKVKTDQVDSDVLAQLLRADLIPVAHMIRPDQRGPRDLMRTRLRLVEKCVSAQNSIDRLLEKFNVDTVAELEAIYQLQAACHQAQIDLLEEQITTLERALHPHLIPNPDVQRLLWIPGVGKVNAFTLYTEIDGITRFPSVRQFFSYSRLVPGADNSGGRTRHRSGSKAGNRYLKLAFSHAGIRAVQYYPEIRAFFKAKARRKPIRIARTLVALELARIVYQVLMKQEAFNGQFKHRPLSRGKHAQWPRRASPPV

SEQ ID NO: 312407 - protein, 429 aa, unidentified
MKKIRSHCAGIDIGAKRVFTNVEGEQVVSHLTFTEDFYKLRDYLLQHKVETVAMEATGVYWIILYEILEEAGIDVWLVDGRQTKQVPGRKTDVKDCQWICELHSFGLLNRCLVVDSDIKELRTYVRIREGHIESGSKHINQMQKALVMMNIRLKEVLSQIHGVSGMAIIEAILNGERNRDKLVSLCHIKVLNNKKDLVYKALEGKYTEAGLFALKQAYDGYYFYQNQISECDKKISDVLNRLGNSGVGQDKKKRKAIRHNKPNVDKLDGNLLNLFDNNDATKISGISDYTWMQLLSEIGTDLSRWPSEKHFTSWLGLSPGQKNSGKKNRNARKKGKPRAGQIFKIIAQGLINSKNIAIGAFGRRLRGRKGPAIAIKAMARKLAEIYWRMMVKGVDYVEQGVKMYEKQIAANKLKTLKKLANEFNLEISG

SEQ ID NO: 312408 - protein, 369 aa, unidentified
MPPQLGCARRPIPNEPPPTRRRRLDGDPRDRCAQALTHTVVVVDAQGRQLTQRTTGTTSTDHLELVAWAANQDSERLWAVEDCRHLSRRLERDLLVAGERILRVPPKLMANARDSARSFGKSDPIDALAVARAALREPNLPTARLDGREREVRLLVDHREDLVQERTRMISRLRWHLHELDPSREPKARTLNHQRNLDRLAERLDGVDGTVARIARDLTERCRSLTITIKQLEREITLLVDRLAPALVAICGCGPLTAAKILGETAGIERFKSADAYARHNGTAPLPVWSSNRSRHRLSRSGNRQLNAAIHRIALTQAHWHPPAQAMIARRRANGDGGLEALRILKRRLSDVVYRALLADVNATLAESA

SEQ ID NO: 312409 - protein, 504 aa, unidentified
MDWFESVWRASEVSHRGKRKPVPVDKSAPEVIPDAEHELVIERVAAVDVAKAAGKVWVRLPGKAGRRFSRVWDVPARTGAITDLGEQLVESRIEKVTVESTSDYWRIWYYLLEAAGLSVQLVNAGDVKNVPGRPKTDKLDAVWLAKLTEKGLLRPSFVPTTQIRRLRDYTRLREDLTHERTRYWQRLEKLLEDALIKVSVVASRLDTMSTRDMIEALIAGERDPQRLAELARGKMRAKRSELITALDGRFDDHHAELARLLLNQIDALAAQINTLTGRIEDLIAELPEAGAVDHGGSQDTDITAPGAADRSHAAPQPARGAHEPTGSTPCRVDPAIEAECARLGAIERLDEITGVGEHNAQVIIAETGLDMTRFPTPAHLVAWAKLCPRTIQSGPLTRGGPTGKANPYLKGALGQAAAAAARTDTFLGQRYRRIVKRRGKLKALVAVARSLLVIVWHLLADPLARFHDLGPDYHARRINIERRMRNHIAQLTALGYRVTLEPAA

SEQ ID NO: 312410 - protein, 353 aa, unidentified
MERIYIGVDFHARQQTICYLKIETGELVFCELAHENKEQVRAFYAAFPSQVIVGLEASGYSPWFERMLEELGCEVWLGHATEIRRRARWRQKNDRRDAELILDLMLHEEFPRLHRPAVQSREVMRMLRYRQKLIKMRTMSKNSLQALALQSGLARRSRLFTREGKHELSIALMSPAMQWQRDHWWQLLQSLNEQLQETMGWLKTHAQGDVKVARLRTHPGIGLLTALCLVHTLQPVDRFRNTRKVAAYGGFDPLERSSAERKCFLGISKAGSRILRHLVVEAANVAVRSDEDLKRFYKRLAERRGRPKAKVAVARKLLIRAYIMLRDEIDYAEFRHRAVAARLAREITKASSA

SEQ ID NO: 312411 - protein, 369 aa, unidentified
MEQVTTIGLDLAKRVFQVHAVNAAGAVRVRRSLRRKQVLTFFAKLPPCLVGMEACATAHYWAREIAKLGHDARLIPPAYAKAYVRRNKNDPADAEAICEAVSRPSMRFVTIKTEAQQAAAGIHKVREMLMKQRTMLINTLRGLMAEFGIVVADGPHHVGELVAILADPADRRIPTPLHEGLLAIVESLRGLERRIEIVDKQIVGWGRGNQTCRHLITIPGYGPILSSAMAAIAVDPASFGSGRHFSASLGLVPRQDGPGGKVKLGPISKRGNGYLRRLLVNGAMSVLCSKQATQDPWLVKLLETKKRKVAACALANKMARIGWAVMVRQEDFRSRRHDQPCPDLGEPGAVLAAVKTAARAPAAVAFGQS

SEQ ID NO: 312412 - protein, 343 aa, unidentified
MQTVTTIGLDIAKSVFQVHGIDDAGQVVIRRQLKRRYVLAFFEKLPACLVGIEACASSHHWSRELQSLGHTVRLMPPAYVKPYVKRQKNDTTDAEAICEAVTRPNMRFVPTKTVDQQGCLMLHCARHLFIRQQTAVINSIRAYLAEFGIVAAVGRRGVEQLLEVVADAADRRLPDVARVCLAALGSQLRRLKAQILEFDRRIMVWHRSNATSKRLDAIPGVGPALATALVASIADPKAFRSGRDFSAWVGLVPKQNSSGGKDKLGSISKQGDRYLRSLFTVGALAVIRYAKIHGTGHRPWLTALLARRPTKVAAIALANKLARMAWAMMARNERYREPVALAA

SEQ ID NO: 312413 - protein, 421 aa, unidentified
MAGLSAGSDCGERRSGVGLRQRIWVGIDVGKATHHVCVMDETGKVCWSGKFGNDQRAIEAIIARAHETGIEVQWAIDLISPLAALLITVLLTAGESVAYVPGRVVATMTGILRGEGKTDAKDARVIADTARMRNDLTPVTAPDELVAELTQLSSYRADLMSDWVRGVNQLRGMLAAIFPALEAAFDYSARSPLILVAGLCTPSEIRAAGINGVTTHLTNKGAWRKSIDTIATTAVAAAGEQDIAVPGERATATLIKRLAAKLLDLDREIKDLDKQITMRFREHPQASIIESLPGMGPHLGTEFLVTTGGDLTTFATPGRLASYAGLVPVPRDSGRVSGNLHRPKRFNRRLRRVFYMAALSSIRAEGPSRTFYQRKRNERLIHTQALLALARRLVDVLWALLRDNRPFDTKPPSINAVPVAA

SEQ ID NO: 312414 - protein, 326 aa, unidentified
MKKSYFIGADVSKEKIDFCFLTSVENVKPKFASLPNDTTTIKAYFQSFIKDDIFIVFEHTNNYHVPLQSALSDLQIKHSALNPAKISHFLKHLTFQKSDITDAYGLALYCRIFKADLNPSVYNREYSLIKSYNSTILLLSKIQTQLKNFKKSQDFVTDTELSEIIKSLTGQVQKTQEKLKLIAFEILKSFVPNCEEIIKNNKGFGIDLALNLFPQLHFNRAKSEKQFISFLGLSPRIYESGSSVHKSPKINKRGSSAIRRILFLNAFSCVRFNEKFKKRYDHLISKGKSKKVALVAVMCAIVRYLKSLFPLSESYLNENLYNAHTS

SEQ ID NO: 312415 - protein, 347 aa, unidentified
MRFYNQQHKYYCGIDLHARKMYVCIIDQKGKNKVHQNIKTDPEMLFELIFPYIDDIVIGVECVFCWYWVADLCAEHQIPFVLGHALYMKAIHGGKTKNDKIDSYKIALLLKGGNFPTAYSYPAKWRATRDLLRRRMYLSRHCSELVAHILNTNTQYNLPGFNKKLSRKYNHEGVAERFEDPQVRKSVEVDLEMINSLNQVLKKLEWHIEKTARQHDYHTLYLLRSIPGVGQILALVILYEIHDIKRFPRVQDFSSYARLIRPVKESDGKWAGHSNKKIGNHHLKWAIKEAAILMLRDSAEAKYYVSKLERKYNKGKALGIFTHKLGRAIYFMMKNKEAFDMKRFFAK

SEQ ID NO: 312416 - protein, 383 aa, unidentified
MGVLQHGVIPGIVPDEGKRISSPETYGASLMWPRNDGRATMDHYVGLDVSLKQTSICVVSGTGSVVREGVVDSDPDAIAAFVRSKAPGAIRIGLETGPTTTWLWTELKRLGLPVICIDARHAKAVLKMQVNKSDRNDAAGIARIMQTGWFKEVRVKDLDSHTVKALLASRALLVKIKRDLENQIRGLLKNFGLVIGRAKFNVFAVRAEELIEDRPELIAVVGPLLKARKAIEQQTGDLDRKVLTLARYDAQVRRFMTVPGVGPITALCFKATIDDPTRFKRSRSVGAYVGLTTRRHASGEIDWTGRISKCGDAMLRSYLFEAAGVLLTRVPKWSALKAWGLRLVKRNGPRKAKVAVARKLAVIMHRMWIDGTEFNWSKKEVAA

SEQ ID NO: 312417 - protein, 346 aa, unidentified
MNQIIRIGMDTSKHIFQLHGVDAAEQPVLRKRLRRKEVVTFFAGLAPTVIGIEACGAAHYWARELEQLGHEVKLIAPQLVKPYVTRNKNDGRDAEALCEAMSRPRMRFVPVKTAEQQTALMLAGMRERLIARRTQLSNAIRGYAAEFGLAAARGLDKIEPLLARISQDESLPALARELFAIQGRDYAQLQVELKAIEVRLLAWHRADACSRRLAQIPGVGPIGATTLVMKTPDPRAFLSGRHFAAWIGLTPKDHSTGGKTRLGKITRAGDEVLRSLLVAGATAVIQQVRRGRGHPSRWLLALLKRKPPKLAAVALANKIARIAWKLMTTGEDYDGARMSGVSAFAA

SEQ ID NO: 312418 - protein, 411 aa, unidentified
MDVLHDCCCGLDVHKRSVSACLILPHPTGGWTKEHRTFGCMTNDILQMCDWLEAAGCTHVAMESTGVYWKPFYNLMEDRFTVLVVNAHHIKAVPGRKTDTRDAEWIADLLQHGLVRGSAIPSRAQRTVRDLTRHRTTLVQDRVRVVNRLEKVLEDTNIKLSSVVSSLTGVSAHAMLVALVGGENDPAKLSQLAKGRLREKRAELEAALVGIVRPHHRFMIVEHLGQIDYYDEAIERVSAQIAEHLRPFEHELALLDSIPGVNRYGAETLLAEWGMQIDRYPSADHLSAWAGICPGNNESGGKRKSGKIRKGNPWLKAMLVEAAHGASHAKKTYLCAQYRRLASRRGKKRALVAVGHSILVIAYHMLKRKTGYVDIGSNYFDERQITVVTKHLVRRLERLGFEVSLTQREAA

SEQ ID NO: 312419 - protein, 431 aa, unidentified
MIYCGIDWAERTHDVALVDDAGTLMAKRHITDDAAGYRLLLELLAEHGDTEENPIPVAIETSRGLLVAVLRTGKRKVFAIDPMAAARYRDRHSVSRKKSDPGDALVLANILRTDMHAHRTLPNDSDLGRAIAVLARAQQDALWNRQQIANQLRSLLREYYPAALDAVAKWENGLCRPEARELLKAAPTPSRAARLSRTQLHAALKRAGRKRGIEAEANRIRDVFRDEWAHQPPLIEDALGKQMLALLVQLEAACTATDDLAKAVEETFPQHPDAEILLSFPGLGIQLAARVMAEIGDDRSRFADARGLKAYAGSSPITRASGKKSAITRRWVKNDRLNHAGYLWAFASLRASAGANAHYRRRRERGDWHAAAQRNLFNRMIGQLHHCLQGRRRYDESLAFPTSLEATDSAAAKGTAGRGPYSGMTRPRARS

SEQ ID NO: 312420 - protein, 347 aa, unidentified
MKKVSVIGMDMGDKNHMAVGLSEDGEVIDRAEVPCTPKDVRAYLKRHPGALLAIETGTHCRWVSKLGMELGHEVLVGNARKLRMIWDSSRKNDWRDAEMLAKVARTDRSLLHPVKLRGDGDQGLMRLVKSRDLLVKGRTGIVNQIRGFCKSEGVHLPKCSAESFARQEHEIPSAVSAVVKPLFAVLKELGKKIALYDKMLANTVKKLHKEEAALLEPVVGVGPVTAAAYLAAIGDVATFGRARDAGPYFGLIPRQDQSGQTDKQLRISKEGNEIVRRLLVTAANYIMGPFCKDCELRRHGIKIAERGGKNAKKRAKVAVARKLAVLMLAILRTKSAYRPLTDVEVVA

SEQ ID NO: 312421 - protein, 358 aa, unidentified
MNMSKLSTLDFEGQTFFIGIDVHHAKWVITIRTGGMELKTGMFEPSPEKLAKYLRVNYPGGKFRSVYEAGFCGFWIHRELIRHGIENIVVNPSDVPTNNKERMNKRDKVDSRKLSRELENCSLKGIYIPDEWPQQLRSLCRLRRESVGNMTATKNRIKGHLYGYGITLPPNTECSHWSGAFIKWIEKNCVAKGGPFSDYLEFCIQDLKEEKKRLAAIMRKIREYVKSPSSERIIRYLLTVPGIGVTAAVTVYTEIMDINRFPDLDRLCSFVGFVPTCHSSGDRESVGDITPRRNKYLRYIIIEAAWVAIRKDPVLLRVYSDLLKRMKGQHAIIRIAKKLLSRIRYVWKNQQPYTLCAN

SEQ ID NO: 312422 - protein, 341 aa, unidentified
MDHYAGIDVSLEYSSICVVDANGKIIREGRVESAPAALISWFAALGHGLARIGLEAGPLSQWLYAAMKEAGLAVELLETRHVRNAFKAMPVKSDRNDARGIAQLMRLGWFRSVHCKSISAQETRAVLTARKLLQSKLGDVERSLRGILRGFGLKVGRTTERSFAARIRTLVTGQAELERIAAALLQAHAVLLREFEGLERRVIEIARLDVRARLLMSVPGVGPIIAVSFAAAIDDPARFKSSKNVGAHFGLTPKKYQSGEIDRDGRISKIGDKPVRTSLYQAAHCILTKPLKGCPQLKSWAMKIARRAGMNKAKVALARKLAVIMHRMLVDGTPFNAAAAA

SEQ ID NO: 312423 - protein, 341 aa, unidentified
MSPSVCHVVGVDIGKETIAVRLVATNPNVEPVGAAQTCSNDAAGYRQMLRWLGEQNDPEVETAATAVVMEATGVYWEACALFVHEQEFLVRVVNPAQTHAFAKTTLQRGKTDTQDADMIARFGATVPTRRWTPPDALSKELKQIMRQREDYVAMRVQEKNRLHALQHQARPSAQLMRMARNHIHFIQQQIDLLERTFKEQASESPSWQQSLNALRTLPGFGFIVAGTLLTETDGLEAFLTAKQLIAYAGLAPAPYESGSSVKRRTHISKVGNQRLRRIAYLAAVSSIRTDSVFREFYTRLRKRGKPPKVALVAVARKLLTVAFAVVRSQTPFDPTYVPKRA

SEQ ID NO: 312424 - protein, 354 aa, unidentified
MKQTSKYVGLDVHQATTLAEVREDSGRVIARCILPTERTVLLEFVRGMRGAVHVAFEEGTQAQWLYDLLAPEVARVIVCDRRGQLQRGNKGDQGDAAHLAEDLRRGVLRAVYHGSPERATLKEVARTYQQVVADATRVMLRLKAVFRARAIRTPGRGVYDGAQRAQWLAHLPERGVRFRAEVLYDHLAVLQQLRPRAKAALLTEARRDPAWPVLGTIPFLGPVRVALLLATLQTPWRFRTKRHLWAYAGLAVVTRTSAEYLYEGDRAVRRQRAPLTRGLNRNHSGLVKAVFKGAATAAATRRGPLQDFYQAMLTRGMRAELARVTLARKLAAVTLHLWKTGDRYDPAKLTLQAR

SEQ ID NO: 312425 - protein, 345 aa, unidentified
MEPSHYVGLDVSQELTSICVIDEQGAIIWRGKCATDPDVLTRTVGQHAPHLARAGLETGLLSNFLTRALRARGVPIVCIDARHAKAALRVQINKTDANDAHGLAQVVRTGWFREVTIKSMDAQSLRLLLVARAQLISQRQATANTLRGLLKAFGHVVRKGAGGLFARRVREVCDGNPALGAIAEPMLAVWQSLREQICILDGQLLKRAKADPAARRLMSIPAVGVIVALAYVAVIDSPGRFRHSSTVGAYVGLTPRRYQSGDVDCAGHISKCGDGLLRSYLFQAANAILTRKVTDSTLRSWGRAMAVRIGLRRATVAVARKLAIIMHAVWKSDRDFDCAGIPARV

SEQ ID NO: 312426 - protein, 336 aa, unidentified
MRYIGVDLHTTQITVCYLKAEADFEIRKYQLVEMEKFVNTLEAGDEIAVEATCNTRWFYEQVASSVRRVVLVNPRQFEVVKNSCKKTDKNDALNLARFLKADLLPEVRAKREEAERVQSLVNTRTKLVRLKTSLINKIHALQVANGRKLKKASLASDKGLEKVRLSEWSAIERIELEIIIEQIRSLKVSIKKLDKAIEAESEKLQGYRSLVSMSGIGSLSAGILLSVIGEIKDFGSADKLASYFGIVPRVSNSNETVNHGRITKRGNRTGRTTLVQCSLAAIKKSEYLKNYYEQVKARRGHGKAKIALARKYLGIIYNTLSNNWVFADFNNFELAE

SEQ ID NO: 312427 - protein, 344 aa, unidentified
MDHSAGLDVSVKETSICVVDDTGRIVREVKVASEPEALLSVLTNPGYHFKRIGLEAGPMSQWLYSALAEAGLPVICVETRHMRAVLKAQINKTDRNDARGIAQMMRVGLYRPVHVKTLRSQKLRMLLTHRKLLQSKAIAIENDLRGTLRNFGLKVGMVGKVKFEARIKELIGNLPDLALLVEPLLIVRRVLREQLVILHSRLLAIVRNDEVCRRLMTTPGVGPVVALTYRATVDVPARFRKSKAVGAVFGLTCSKYQSGEIDRSGRISRCGDEMMRVMLYEAAQSMLHSKKWSWLKAWAMQIARRRGMKKAIVALARRLAVIMHRIWVDGTEFRWTREQAAAAA

SEQ ID NO: 312428 - protein, 301 aa, unidentified
MTDPSLQAWTRYIAIDIHKHYLMIGGIDAHKRIVLPPRKVELHRWLDWAQANLHPSDAVVLEATTNAWVIYDQVVTLVGRAVVAHPAKVKLIAEARVKTDKVDVLTLAQLLRADMLPEVWVPPLHVRDLRALLSHRRRLVSLQTTAKNRLQSVLHRLNLRPPDGELFANRQRDWWNALALSATERLRVDQDIATLDHIGPQIAAIDAELRRLSTSEHWAEQVPYLVQLPGIALLGAMTILGAVGDITRFPSAKQLVGYAGLGAGVHDSGKTHRDKGITKQGRRDLRYVLIEAARAAVQSHP

SEQ ID NO: 312429 - protein, 347 aa, unidentified
MRFYNNQHKYYCGIDLHTRKMYVCIIDEKGEIKEHRNMKTDRDAFLRAIAPFREDIVVAVECIFTWYWVADLCHNEGIPFVLGHALYMKAIHGGKAKNDKIDSHKIAALLRGGMIPMSYVYPEKMRATRDLMRRRNHLMRKRSELYAHIKNTNSQYNLSDSFGCLARPKNRTGIIEQFEHPSVQESITADMEMIRSYDAIISQLEKSIINMAIHHDPVSYTLLQTIPGVGKIIALIILYEVENIRRFASVQDFVSYSRLVKCAKESNGKKCGSGGSKIGNGHLKWAFSEAASFFANNSDPAKKYLDRNTKKHGKSKALSILAHKLGRAVYFMLKNKEAFNQNKLLNL

SEQ ID NO: 312430 - protein, 328 aa, unidentified
MEIVSGLDLHRSQITFRTADLRTGEVERGKIYPGTREAVREWLDRFEPGTDAHFALEGTTGWRLVVEEIQRRGFAAHLADPDELSERRGPKRRAKTDPADCELMVNLLIEGRLPESFIPPAHILELRTLVRLRKTLVDQRTEWQQRLQAQLFHQGVVPGLKLCRAEDRRRLADVEISQAGRQMIETGIVMLDGFDAKLKPLSAQLVALAKAQPGCRGLQRGLYGVGWLTAVAIVAELGDCRRFHSADQAVRASGLDVTVYESNGKRPGGHLARQGPQVLRWALFEAAQCAARKSSPDHAYYLGVGDASTTTGPACRCPARSAGGPATS

SEQ ID NO: 312431 - protein, 343 aa, unidentified
MEYYAGIDVSLESSSICIVDATGRMVREAKVASEPEALTAWCKGLGFDIARIGLEAGPLSQWLFAGMKQAGLAIELLETRHVRNAFKLMPVKTDRKDARGIAQLIRMGWFRPVHCKSVAAQETRSLLGARKLLQSKLHDIELGLRGTLRGFGLKLGKTTPKTFESRVRTLVEDHPTLLAVAEALLRARTMLAEQFIKLDKLLHSMARGDGRARLLTTIPGVGSIVALTFASAIDDPGRFKSSKTVGALFGLTPKKYQSGETDVTGRISKIGDAGVRTALYEAANVILTRTRKGSSLKNWAMGVAKRAGMRKAKVALARKLAVVMHRMLVDGSAFVAQKTAMTA

SEQ ID NO: 312432 - protein, 318 aa, unidentified
MQISGCFIGVDVGKFELQVAGHEGAIVSGSLANSRSSIVGWLKRLPTGSVIAMEATGGYQELLARLAHERGFAVYVLNPTHVHHYAISLGNRGKTDRLDAEVIAQYIAQRHTKLHRYEPVSAELQQVRSLQSLRAAVVRVGASLRLSSQRHGCASGHQEKALASLRAWADALERELIAKVKAHGEWAKTYGLLTGICGIGPINGAALTTLFSRVPFASSDAAVAFCGLDPRPKESGRKVGRRRLSKQGDKAARTLLYNAASSAARTAHFKDYYATLRARGLPSTAALVVIARKLLRIAYGVWRTGLAFDPAKLNFKKT

SEQ ID NO: 312433 - protein, 475 aa, unidentified
MSKRAISKQASTQKRTRQGQKRKAKAKAKAQGMVTLPVFRPDTAGIDIGAMEILVAVPADRDAEPVRSFGTFTRDLEAAVAWLESCEVRTVAMESTGVYWIPLYQILAEHKIEVCLVNARHFHNVPGRKTDVLDCQWLQYLHSVGLLRGSFRPEQDICAVRTLLRHRQNLVQMAAEHTLHMQKAMEQMNVKLAHVISDITGVSGLRIIDAILQGERDPRALAKLRDKRIQADEETMLKSLEGDYRAEHLITLKQSLAGYRFYQQQIAELDQEMEGFLGALPPKIDLREHPLPPATKRQTRQHNAPAYDLRSHCYRAFGVDLRAIPGFQAPTAQVMLTEVGPDLSMFPSGSAFANWLTLCPNNVITGGKIISAKTRPGKSRAALALRQAAQTLEHSENHLGQFFRRMRGKLGRAEAITAVAHKLARIFFAMVRTGQAYDESALAKADVRQRAQQEAKLRRQAREIGFQLVPMEAHC

SEQ ID NO: 312434 - protein, 329 aa, unidentified
MPGFLDPDDKHGISEKMSNDLPQTIGIDISKASLDCHAHPAGVEHQFANSAKGLKALIAWLGQWQVERIAYEATATYHRALEVALADWPCVKLNPERARRFAQATGTLAKTDRIDAMLLARMTATLQPPVRPAKSAEQVQLAELINARDGLVRDRTALKNREKNLTITLLKRQCRQRLDQIDRHIEALDAEIANLIAADAALARRHQILTSIAGVGTLTANQLIATMPELGSLENKQAAALAGLAPIARQSGQWKGKSFIRGGRGNVRQALYMPALVAARYNPDLKAKYQQLVTAGKPAKIAITAVMRKLVVTANALLKADRCWQQSLA

SEQ ID NO: 312435 - protein, 419 aa, unidentified
MKVEYGNVAEDAVWAGVDTHAATNWLSVVDARGSELFSGEFATDPEGYRKLCDEIRRLGSPVAAGVECTGTYGAGLVRAMAAYGIACYEVITPGRPRRGPGCDKDDAADALRAAKQALSGENLAVPKSQDGWVEEVRNMTVAREELVKQCTSLANLALATVRKGPDEIRARLERLGTAKMMGALAGWDEAEADPICDAVMFSLAALGRVWAEARRSARLLEERIERTLKAGNPALASMYGCGPISAAMLAIAAGDNPERMGSEASFAALCGVSPIRASSGKVERHRLNRGGNRNANKALHIIAMHRMRTDPRTTEYVERRRAEGLSDREIRRCVKRYIAREAYRLIMHPYDVPIEGKGPEMRAERIASGVSQKDAAIALGVTASTLCDLELGHHQFRELALRYRQWIDDGFPLEAGIAS

SEQ ID NO: 312436 - protein, 465 aa, unidentified
MSKGSGSGTRRGDRRRNARRERLRELLPRDGAVIGIDLAEDKQALAVIDHDVRVLARKTVRVKAFRLGEALDWAAAQAKVKGFTHVTVACEPTGPRWMQVQRLCAERGLPLVCVQPLVSHIAREQQDYTPHKTDESDCVLISRLATELHCYVPEELDETWAHLRHLGRRRAQLITAATASVQRIRDFLSVAWPVVTEACAGPFGSVTWLAALQVVTARCGGDPARLAALGLEEFTALVRGAVPGWGGKKGWSRICGRVFAALTDTEGVVSWSRRGLLRRCADELGDLARTRAQLRAVEADMVLVLGELGLSRLGDIPGLTAVGAAAILAETGDPRRYDSSSSLVKHAGLSPAENASGALEGQARISRRGRPGLRLTAWRAVWPMLQFNPVMAAKYAALTQTADAAAADAGSRQARAAAAARARRAKARVACAASLLRWIYSMVVHGTSWDAAVASGVPACQPEAA

SEQ ID NO: 312437 - protein, 410 aa, unidentified
MTETNIAQNAPILVAIDIAKARHEVLIAIPGKKRRRRLTVLNQLEDFDRLIASLASYDLPVRVAFEATGNYHRAIAYHLAVAGFEMKLVSSVSLARTREALHNSWDKNDPKDAQVILHMMEIGNTQFYHDPLACGTNDIQELSKTHDVVSKSKTELWHRILTHYLPLYFPEADRFHRSSRGDWFFAFLERYPSPHMISAMDRDAFIADAWDVVGRKVAKERLLTDIYETAKTSVGLPVNPDSDAVGMFRLVLGEGRGLIAQRNQIERRAIELLQDLPDYQLLTSVPGIGPINALTILAEAGDLRRFNHHRQFLKFCGMDLATIQSGTFRGQTKLSKYGNARLRRTLWMAGQVAILQKTNSFRDKFERYIAKDRHNTHLRRKAYTAIAAKMARTVHGIIKHGEPYRPFFEG

SEQ ID NO: 312438 - protein, 451 aa, unidentified
MSRTKKSRSRRDISPTHLNAAAIDIGATMHVAAVGPDQASEPVRSFGTFTGDLHRLADWFTTCGVRTVAMESTGVYWIPVFEILDQRGFEVIVVNARDAKHVPGRKTDISDARWLQRLHEYGLLRASFRLKGEVAVMRAYLRQRERLLDYAASHIQHMQKALTQMNLQLHHVVTDITGVTGMAIIRAIVAGERDPMVLASYRDPRCHASAETIRQALVGNDREEHIFALTQALELYDVYQAKVALCDVRIEAVLKRLRQVSSTPVGKPPTVRTTQKQSNDPAFDVRAALYGLLGCDVTQIHGLGPYLTLKLVGECGTNLSAWPSAKHFTSWLCLSPSNKISGGKVLSSRTRRSGSRAAALLRLAAVAVGRTQTALGAFYRRLSARVGKAKAVTATARKIAVLFYNTLRHGMEYSDPGASHYEDNHRRRILTNLERRAKSLGYVLQPTPMPA

SEQ ID NO: 312439 - protein, 405 aa, unidentified
MFYCGIDIAKYKHEATVIDQTGVSLLDSISFSNSKEGCEKLLALFQRLNIAKEDLLIGMEATGHYWLSVYGYLLEQDFEVKVINPIQSEAFRKMYIRQTKNDRKDSFIIAQIMRFGQFSATSLSEEVIIAMRQLSRYRLALVDACGDCKRRVIALLDQVFPEYDALFSDTFGVTSKEVLSQYPVPEELLTVSTRKLTTLLENASHGRFGKEKAEQLKAAAANSFGVSFAKNAFAFQIRQLVEQLEFLEGQIMELEAQISSLLKQTGSYITTIPGIGDTLGAIILSEIGDIHRFNAPNKLVAFAGLDVRVTQSGEFTGTRQKISKRGSPYLRRAIWLAASRAAFCDPILSEYYQSLRARGKHHLTAVGAVSRKLCNTIYTILREERPWQPVPPRDKKVSNHTEQQR

SEQ ID NO: 312440 - protein, 341 aa, unidentified
MGEVSTIGLDLAKTVFQAHGADASGGVVFRKKLRRDQMLAFFAGQPRCLVAMEACASAHYWAREIGALGHEIRLIPPAYVKPYVKRQKNDMADAEAICEAAQRPTMRFVTPKSAEAQGAAVVFRTRDLLVRQRTQLINALRGHLMEFGYIVRQGAGHVSKLIDLVADPASELPAEARPVLAVIADSLHATHARVQTLDREIAARAKANPVVKRLMTIPGVGPVVATAMVALAPDASTFRRGRDFAAWLGLTPRQHSSGGKERLGRTTKMGERSLRRLLILGASASAKVAARDGLRASPWLVGMLARKPRMLVTVALANKMARIVWALMAHGGTYRAPAVAA

SEQ ID NO: 312441 - protein, 385 aa, unidentified
MSSKAFVPRDYDVFAGLDVDKKSISVTFTNHQGFIRSLHMPYSVEHLVNHVRKHFPDQKVAFAYEAGPTGYGLYDGLVANSYPCLIASPSMIPKAPGQRVKTNRIDSVGLAENLRGGQLKSIHVPSPVYRELRHLTQLRDTFVSAMVGMKQRVKSLLLLEGIGFPPAPAGSQWSFMVKAKLRKLPCSGTVRFKLDELLDSLEFNEKRVVKTTQQIRRFCQTDPELSRCMKYVMSVSGIGSIVASQLLARIGDWRELKNIRQLGGFLGLVPTEHSTGDRTDRGSITHTGDGRLRSKLIQASWSAIRQDSELREFFASVCKTHARHLASRVAIVAVARKLSVRISVVLMKQRPYVVREKVQSAPLTQEETSPQGTTRRQAEPGNKNS

SEQ ID NO: 312442 - protein, 410 aa, unidentified
MDVFCGIDWAEDHHDIALVNRDGGLLARARIGDDAAGLTRLLDLLAEHGDSAEDPVPVAIETPRGLLVACLRATRRVYPVNPMAVARYRDRHSVAGRKSDHGDAVVLANILRTDLHAHRPLPADSELAQAIAVLARAQQDAVWGRITAHNKLRSHLREYYPGFLAAFAAAKGGITRPEARAILAAAPTPADAAKLTLAQLRALLRKAGRSRGIDAGAARLRDALRKGQMRQLPLVEQAMGRQALALLRQLDAACHSADDLEQAATESFNLHPDAGIITSFPGIGPLTGARVLAETGDDRSRFTDAKGLKAYAGAAPVTRASGKTRSVTRRHVKNNRLAQAGYIWAFSALTASPGARAHYDRRRGNGDRHAAAQRNLFGRLLGCLWHCLATGQHYDEATAFPNQAAGPAAA

SEQ ID NO: 312443 - protein, 352 aa, unidentified
MERYVGLDGHSRSCTLGVMSASGQRLKSLVVETNGSALIEAVRGIPGQVHLCLEEGTQSAWLYELLRPHVAEIVVAVAPERKGPKDDQRDAWARANELRTGAIETRVYKAPEHLASLRNAVRAYGFVVTDLVRAKNRLKAAFLSRGISADAGVYDAEKRPQWLKKLSSPHRELAEWLGRQVDQVEPLRDEAEEWLLKESKAHPIIRKLATAPGMGPIRTAQVVAIVATPDRFRTRRQFWSYCGLGIVTQSSGDWVQDTNRKWVRSQVAQTRGLSRKRQPRLKAVFKGAATTVIAQLPDELLHGDYERMLQSGIKPSLAKLTLARKIAATVLSMWKHQEVYDPKRHRSSSDKP

SEQ ID NO: 312444 - protein, 346 aa, unidentified
MPVYMGVDFHARVQTISYLTTEDGAIEQVELDHLKDDVRGFYQQFVGEVIVGFETSGYAYWFEEMLEELGHQVWIGDPAEIRRLARRRQKNDRRDANLILELMLRGDFPRLHRQSPESRQVLQQLRYRQRLVKMRTMTINTLRFMAMSRGVSIRGHLSSRVSQERMKSLPLSPVLSQQRDELVSLVQELTLKIARAQQWLEQQARQDAQVRLLMTHPGLGPLTGLCLVHTLSPISRFQNGRRVTGYVGLDPMEDSSADRQRFGSISKQGSRLLRFLLVEAGQVAARQDQDLKQFYRRVQLRRNRPKAKVAVARRLLGRAFIMLRDQIDYAEFLRRGVAARSARNSP

SEQ ID NO: 312445 - protein, 423 aa, unidentified
MKSLITQNFAAYVGLDWADAKHDICLQAAGSDRREFACIAHQVECIDEWAKSLRQRFGGPIAIALELAKGPIVYALQKYDFLVLFPINPLTLAKYREAFRPSRAKDDPTDAELALDLLVRHPERFAPLQPQSVGMRTLISLTERRRELINDKTRVTNRLTNTLKQYYPQALEWFDQHDTVMFCDFLSRWPTPLQAKRAHQASLKAFHHAHNAHRPKLIAERLAAIKAAVPLPQDPGVVVPCRLHAMVLVEQLRLALQAIEQFDRHIAELAPTLPDYRLFERLPGAGPHLAPRLLVAFGEDRERFRRAEELQKYAGIAPVTERSGKKSWVHWRWQCPTFLRQTFVEWAGQTINKSFWAGAYYYQQRAKGSTYQAAVRALAFKWIRILYRCWKSRTPYDETKYLKALKKRRSSLLNNLVPDPLNT

SEQ ID NO: 312446 - protein, 374 aa, unidentified
MTQNPHSESSLYMAMELSNQEWKLAFGDGKQTRLVGMPARDAARLKREVAKAKVKMGLPAEASVYSCYEAGRDGFWIHRMLEESGIRNLVVDAASIEVNRRMRRAKTDRMDALKLLAMLLRHWLHGERTHWSAVRVPSEADEAQRRHHRNEERLKKERTQHLVRMKSLAVLHGTCFSRLPKDWTAVRDWKGRPLPPELVRELEQERERLEVVDRQLKEIAERRRTRMRAAKKGAEATSSERWAAKLAGARGVGEDTAWKLAHEFFGWREFRNRRQVGAAAGLTGSPYSSGDSQREQGISKAGNARVRHLMTELAWRWLRFQPGSALAKWYAARFAEGTGRMRRVGIVALSRKLLIALWRYGAHGVVPEGALIKA

SEQ ID NO: 312447 - protein, 329 aa, unidentified
MITAGTGAVGQQAQFPTSPSGLRRTVDWIERHTHQSPTPIVIDSAGSYGATFTEQLSAAGLTVAEAPDVAATTRRRRGKSDAVDAVAMAQAARSLDINELCWPRAGGDRTALRVLTVAREQMSGERTRAVNALTALLRTVDLGIDARRALTTTTIATVAAWRTRSDNATLAVCRAEAIRLARRIRALDAELAANHTALHEAVTAQAPQLLALPGVGAVVAATVLLAWSHPGRVRSEAAFAALAGASPLPASSGNTTHYRLNRGGDRRLNRALYTVALVRMGHDPRTRDYVTRRTRERRTKREIMHSLKRYISRQLFRTLNGTHPATSTT

SEQ ID NO: 312448 - protein, 317 aa, unidentified
MSNNSIICAGIDIGKRRLDVAVCGAKASLEVDNTSAGHEKLVTWLQRHKVERVGVEATGGYEQEVVRALRREGFPVVVFQPIQVRAYARFRLKLAKNDKIDASLIAACVASVDNVRTAPDPRFEAFAAAQTLIDQLTDDIVLYKTRLETARDEFSRAFWKGEIAGRKAQLRGVLKTLRTDMRAHTDIAAKLDLITSVEGIAEKTAIAVLIRMPEIGTLSREQVAALAGLAPYDDDSGRRAGSRHIQGGRTRLRSSLYAAALPAAFFWNPQLITFYKRLRANGKTHKMALVACARKLLIFINTVVARATPWQPKPAAI

SEQ ID NO: 312449 - protein, 342 aa, unidentified
MSEVTIIGIDLAKRVFHLHGARVDGSVVFRKKASRAQLLAFFTQHPRCIVAMEACATAHGWGREFEKLGHDVRLIAPIYVKPFVKRQKNDAADAEAIVEAALRPTMRFVAVKTEDQQARAMLFRTRQIFVGQRTQMINALRGHLAEHGLVAARGPAHVKRLADALADEDTALPDGVRDLGQIYLDQIDGLTARIADLDAKMKRAAKDADLARRAQTMPGVGPVTALAIETFAPDMASFRRGRDFAAWLGLVPKQHSTGGKARLGKTSKMGQRDIRTLLVSGAMAVLQAVERFDTPNNGWLKRLLTRKPRMVAAIALANKMARGLWAMMTKQEDYRNPVAAMV

SEQ ID NO: 312450 - protein, 359 aa, unidentified
MTASNIVGVDPHRKTFTATVLDSRGGELGHAHFPNTRQGHDAGLAWAGGFGPADRWGVEGASGLGRHLAEFLVAAGCDVRDVPPHKTAVRQRGRHEGKTDRLDSHRVAAETQTNPRLARAFKHAVSAAPDSVRDRIALWHNARTSLTKVRVQLLGELDALVHDLPEDLRTQLRPAKTVSARVNSLRRLDTSGVTDLTVALRLRLIEHRVAMLRDVLEQDKAATTELTALVEETKSTLTELVGIAPRAAAEIIVETGDIRRFTEAGFARFNGTAPIPASSGEGENAPVRHRLSRGGNRRLNAAIYRIAMIQLRYEPRARQIHDQARAHGHTRREAMRVLKRHLSDAIYRTMLRDARQAGT

SEQ ID NO: 312451 - protein, 324 aa, unidentified
MNKYNEIFGVDISKDVFDVYGSKSGHNQFKNAASGFMFFLKNLPKKSLVVMEATGYYHYSLAQFLFKQGVLVSVVNPLSVKRFIQMKLAKVKTDKSDAKAICEYGQINQVPLYSALSDVQSECLQLFRLLDSYLKKRTMTKNKLHGEDVLGIPSKHVYRSLKRNRKHLDTEIESIETKLLSLVKQDQQAQLTLLKSIPGLGVKTALFLIVITDGFTKFETAAQLCSYVGITPTIRQSGSSVRGRSRISKVGNKKLRNLLFLCSFSACKHNKSCREIYERIVNKGKSKKLALIAVSNKLLKQAFAIAKSGNPYDETFVSVLMANG

SEQ ID NO: 312452 - protein, 517 aa, unidentified
MHKMFVRVRDSHLQYKLKGARIRSGVFAMSEIIPSIIESPQQLLLLEEGIEVQQSKAYGIGIDCHSQFIQVSVIVKRDLRTFEYRHEFGTDWKSLVDARDWSTTIINSCSSPAVDMTKPIHYCIESTSTYHLPVIISWGGKPSIVNPQIAGASKRKTDVLDARMLAFHDLTGVWPESFIPSTEVQELRLLIAERNHYRRMANVASNRINNGILRFGYTIGRDGSVTRNKVVRSIIEDEISDSPSGSWSNICPHGIPTDVRTAFKDEYDMYDQLRSQEKTYQQNALSKVRSMSWETNDGFKSGCEMINILTTAPAIGEMTAAVWLSNIVTPLRFPNSKAIAAYCGLDPSLKISAKKVTSTVKRGGHKDLHGALCMSASILVKNHNELFGQWGYNIYKQTGRWKKATNAVARKLAVALYHMNMKAETFSYDQYNLIRDVVVIDISLDELIELNHEFKRYIRVLKTSGISSTADMVEQYYSCRLKDYRGLGKKFYGLVKDFITNQKQYRESYYSTHPEEE

SEQ ID NO: 312453 - protein, 316 aa, unidentified
MSAVPLFVGIDVANAQLDVALRPTGERWAVANEDTSIAALVVRLQAMHPTLMVLEATGGYQRAVVAALAAAGLPVAVVNPRHARDVAKATGPLATTDALDARALAHVAEAVRPTPRPLPDAQADELGALLARRRPLVARRTAAQNRLGSVPARLQADIQAHLAWLNTRLAALDDDLDTTWRASPVWREREELLRSVPGIGPVWARTLLLDLPELGTLSRQRLAALVGVAPLHRDRGTFRGSRTIWSGRAAVRATLSMSALVAVRYHPVLNTFYEHLRAAGKPAKVALTACMRKLWTILNAMVKRHTPWQPQEVLGA

SEQ ID NO: 312454 - protein, 348 aa, unidentified
MSSNNITIGIDLGDRRHAVCVLSAAGEILAEEAITNTRECLTAFAQRHPAAVFVMETGTHSPWISRLLESLGHTVHVANARKVRAIFTSPNKNDQEDARMLARLGRADPKLLSPVQHRSESAQRALVRLKVREALVRSRVNAMNTVRFLVKSLGLQVPRGVKATAFVRKFRLLASAADTALVEPLLQTLDALNARIKELDLDLETLAHERYPVTGQLRQVPGVGPLTALGFVLTIEDPARFPHTRDVGASLGLVPRRDQSGLTDKQLPITKRGNVQLRCLLVNCAHYILGPFGPPSALRSCGERIVARGGKSAKKRAVIAVARKLAVTLLALWKSGAEYHPQPLLEAA

SEQ ID NO: 312455 - protein, 473 aa, unidentified
MSKGNGMTRGDRRRNARREQLRGMLPRDGAVIGIDLADEKQALAVIDHDVRVLARKTVRVKAFRLGEALDWAAGQARGKGFRSVTVACEPTGPRWLQVQRLCAERGLRLVCVQPLVSHIARQQQDYTAHKTDEADCVMIARLAVELHCYIPEELDEVWAGLRHLGRRRAALITSETASVQRIRDFLSVAWPTVTEACAKPFESMTWLAALQAVTSRCGGQPGKLAVIGLEAFTALVRDALPGWGGQRIHGPICKTVFAALTSTEGVVRGHRRGLLRRVAAELGDLQRARAQRQETEAAMTAALGDLGLARLGDIPGLTATGAAAILAETGDPKRYDTSSSVVKHAGLSPSDNASGAFDGEAHISRRGRPGLRLTVWRAVWPVLIHNPVMAAKYAAMTQAADQAAADARAGNSGHATSAAEAARRRRAKARVACAAALLRWIYSMVIHGTCWDPGVAAGRKDTLAAPSCQSEAA

SEQ ID NO: 312456 - protein, 343 aa, unidentified
MKEISLIGLDLSKSVFQIHGVDSKGKEIMKKKFNRKELVEFLSNLKPCTVGLEACGGSNYWARKIKSMNHEVKMIAPQFVKPFVKSNKNDARDAAAIAEAVSRPSMKFVPIKTIHQQDVQSIHRIRQSFVKSRSGLVNMTRGLLHEYGIVFPKGITQTRKMMIAIVTGEIASTGDMTELTIHLINTLYEQLKRLDEQISLLDKKTEIYSDQNEICKRIKTIPGVGPIISTAIYASAGDGSTFKSGRHMAAWLGIVPKHDGTGGKIKIKGISKRGNPYLRMMLIHGARNVVMNSGKKNNKFNDWVTKLKERRGFNKACVAVANKNARIIWALLNKKEDYIARVA

SEQ ID NO: 312457 - protein, 324 aa, unidentified
MIDGILGIDVCKNTLDVSISSYTKVRTKSFTNSPDGWRHLLDWLIAQKIQRVHACLESTGRYSLGIACALYEADHVVSIINPAQIRDFVRTKLGRNKTDGVDASHIREYCELFKPSPWAPPSKAHRRLGELQTIRSGIIAGLTEWKNRKNSGIVDAEAQALADATISHFTSQLGAVDKAIALTIDNDCDLQSKRDLLLSISGVGETLAGVVLAEMPGPDVLRSSAEVVAYAGLNPRQHQSGTSIDRATRISKIGNAVLRAALYMPALSAMRYNSAIVALVTRLKSRGRLKPKQIVVAAMRKLLVLCFGVLKTGRPFDAAITMGG

SEQ ID NO: 312458 - protein, 347 aa, unidentified
MNMIGCDFHAGSQQIALVDAERGEMVEKELEHEKGEARKFYAGLKEPAWVGIESTSYTRWFAEMRAELGHELVGGDAAKIRGMEARKQKHDRRDARHLLNLLLGGDFPKIWLPSAEERDVRVWLEHRHQWVQLRTRAKNGLQAVALSYGLRRRSRLGTRVGQEELQKIPLREGPERRRADLRALLAQWDTWVKELEQRIAEEVGRRPDAQRWMTHPGVGPSTALGTVLGRGPVERFPDGKHLTSDVGVIPQEESSGGRQRFGHLSKPGNRLLRFLLGEAAQTACRFDPTLQRVYRRLAFRKGHASAKVAVARKLLIRLYIMLRDKIDYAEFCRRGSHAGMLEQVALA

SEQ ID NO: 312459 - protein, 340 aa, unidentified
MPVTRIGLDLAKNVFQAHGVDEHGTVVLRKQLRRREVLSFFASLPPCLIGIEACSASHHWARELTALGHQVRMMPARYVKPYVQRGKNDALDAAAICEAVSRPTMRFAAIKSIEQQSALMLHRAREILVKQETMLANLIRGCLGEFGIVAPLGIRRIAELVDIIRDQADSRIPPYARIAMTAVADQLGDLQRRIKEIEQAIRTWHRNNDASRRLATIPGVGILTASAIAATVATPTQFKSARHFAAFLGLTPKQHSTGGRQRLGRISKQGDGYIRRLLILGGTALVRYARGAGGTVWAKQLLARRPARVVTVALANKAARIIWALLTRGGVYRSTAPQMA

SEQ ID NO: 312460 - protein, 406 aa, unidentified
MDVKYERCCGIDVHKKMIVACLIRGGKQELRKFGTMTKELRELSAWLLESKYQMIAMESTASYWKPLYNIFELSGLDAMVVNAQHMKALPGRKTDIKDAEWIADLLRHGLLKASYIPDREQRELREIARYRKSLIDERSRETNRLQKMLEGANVKLSSVVSTINGKSSRRLLDTIIQDKKLDEEEMLTLLHISMHSKLNEIMAAVDGVVSPLQRRLLRSILDHIDDMTRRIEDMDKLIGDYLNEYEAAIAALDEIPGIGRISAETILAEIGLDMSRFPTASHLCSWAGVAPGNHESAGKRKNGKTTHGNKALKAMLAQCAKAAQKVKGSFFSAQYQRIAVRRGSNRATVAVAHSMLIAIYHMLKTGSLYRELSSEYYNQFNQEKKIQSYLKKLSALGWKLPTTVTT

SEQ ID NO: 312461 - protein, 394 aa, unidentified
MHKKNVTACVLTPKGKEIRTFGTMTDDLMQMADWIKGHRCTHVAMESTGVLWKPVYNILELEELQVIVVNAQHIKAVPGRKTDVKDAEWIANLLRHGLLQGSFIPNREQRELRELVRYRRSLIEERSREVSRIQKVLEGANIKLSSVATDTLGVSGRAMIEAMIRGIEDPKELSELAKRRLKTKKDDLQRALQGLVGPHQKLMLDAQLKHIDFLDEQISKLDEEVKLRMLPFEKDLERLDTIPGVGRRNAEQILAEIGTDVKNQFPSAAHLCSWAGMAPGNHESAGKRKSGRTRKGNKKLRHALVEAARAAARTKNTYLSAQYHRIAARRGANRAAVAVGHTILTIAYYLLTRQQNYVDLGADYYDQRRKDIVIKQSIKRLESLGVKVSIEQPA

SEQ ID NO: 312462 - protein, 328 aa, unidentified
MIKTTFYVGIDVGQEELVVAVKGSKIRSFKHTVAGIGRMIAWVRQVDEDSMLHFCLESTGVYGYSLAARLTNKFGMTVSIINGAQIAAFARAQLRRTKTDEVDAQVILNFAQTQHPPVWQPETKVIRQLYHLVVTADKLHQTSREWSNRNHCYKYVDDLPPLVKKTHQSLQRTLQRQILRIETEIEKLVLQDPQLNQQVQLLCSIPGVAMKSATRILAYGRRALVERNRKAIVAHAGLAPAQKQSGISIHGKSRIAKQGDRRLRKALFMSALVASHHNPCLKIFYQRLLQKGKPKMLAITAVMRKLLLMIQAILKNKNPFDPNYALDN

SEQ ID NO: 312463 - protein, 343 aa, unidentified
MLPDSVELVVGIDTHKEAHTAAVVDRLGGVSETFEFPADPAGYRKVLGRVAGGGAVRVWAVEGTGSYGAGLTGFLQAAGERVVEVERPGRPPRRNRVKSDAIDAVRAARQVLASEHLIEPRRGGEREAVRVLLATRNGAVVARTKALNHLHALVVTAPMRLRSRLVGLTTLQLTRQAARLRLSTDQPIEDQATVRAMRACAHRAGACEQEATELEAELQRILTQQVPHLLAEPGVGPISAAAIYLAWSHRGRIRNDAAFASLAGVAPIPASSGQTTRHRLNRGGDRQLNRALHTITLSRLGCHPETRAYATRRLTEGKTSREIRRCLKRHIARRIYKLLEHTP

SEQ ID NO: 312464 - protein, 437 aa, unidentified
MIPVTFSELVIRNQQRSIAVSKIKSQKIKSVNNQTMIVTLDIGKGSHYGYFRAPDGQDVEPFAFYNTYDSFHSFWKKLSRFKKVHGCSRVVVGFESTGPYAEPITHFLKQQPVTLVQINPMHSKRVRELTGNSPNKTDRKDPRVIADVIMLGHALRVVIPQGSSAHLRRLTQARERTIRDRTAIVNQLQHLVFVIFPEFLQVIKNISCKTGLYLLRHWPSPQAIAALGEQQLSRIIRRVSRAKMGQWHAEQLFQSAQASVGINEGQESIVEEIGHLVDKINRENDFIDRVECQMRSHLEQIPYSSCLLSLPGVGLITVAGLIGEVGDFRQYGTIAEITKLAGLDLFEVSSGKHKGQRRISKRGRPLMRKLLYFAAINAVKPTGVMHQPYTRMLERGMPKIKALVAISRRLLRVMYALARDQSMYMEKYDNHRYQFAA

SEQ ID NO: 312465 - protein, 343 aa, unidentified
MQENACFIFWVGVDVSKDSFTAAFRSVARNEATRFPPRDRYAVDRNGVREFLQWADGLSGGLGFGIAMESTGVYSRRLAALIRSVSPSRHVAVCNAASVSLYARSFTEQKSDRSDAELIARYACDRNPRAPRPKDATEERLRELVRERDRIVGLKTDMDNSGEALESADARRIHAAAAKALEKAIERLDTLIRETVASSKNLGEEVARMATAPGVGFLSAACIYAELGSMRNYTRRQISAMSGVCPVNRVSGTSLDRHAVSRRGSRLLRKILFLDSHQAIQRMPAMGEFHRRMLEKPNSSKMSAKCACMRKLLLILHAMVVNETDFRPDYKSEKIIKKTDETA

SEQ ID NO: 312466 - protein, 466 aa, unidentified
MKPFYMGIDVSKGYADFMIINSKKQPVVQSFQLDDTFEGHRSLYNLLSRFLADYPESTLFAAVESTGGYENNWYNSLIEFQGSLNIQTARLNPLGVMHNSKADLKKNTTDKISAQNIAEYLVAHREKVVYQQHDQLAGLRKQWGFIKMLTKQCTQFLNQLNALIYSANPELLSYCQAEMSAWMLKLLVKYPSADRLKKAHVKTVAKIPYVSKQKAQQLIAGAKRSVASDTDVTTQQLIVATAEQILHLKKTIADQTNQMLRECSIPEVELLKTFPGIGDFSAVGLIIEIQTIKRFAEAKKLASFFGVHPVYKISGDGVGGFKMSKQGRTAPRQILYMAALSAIQCNPLIREIYEKHQKQGKHNMAAMGICMHKILRILYGMLRNNKPFNPHIDIANRLRSVRMKNDTPVKNTSRRFQDYDQKAPVSKRQRKKRLERERSHSVSDTKVGITAPVPLADIIANILPQL

SEQ ID NO: 312467 - protein, 432 aa, unidentified
MRPNAAGIDIGATEIFVAVPADRDSDSVRSFPSFTEDLHRLADWLQTCRVDTVAMESTGVYWIPLFQILEARGIEVHLVNAQHVHHVPGRKSDVLDCQWLQYLHSVGLLKASFRPEQAVCEIRSLMRHRESLVEMASVHVQHMHKALDQMNLQIHHVISDITGVTGLAIVDAIADGQTNPKQLAALRDYRIKASEQTVTKSLVGTYRREHIFTLKQSRTAYRHYQQLIADCDREIQQRIETFDNGDPGSSPSASSPDSTPSNPLPFDLKSHLERIFGVDLTAIPGFQCLRIQTLFSELGASLTRFSTVDSFSSWLNLCPKDGFSAGRRIRATKNKTRNRAAQAFRLAAVSLQNNQSYLGDYYRKQRARHGAPKAIKNTAHKLARIFYRLVTTRQPYDQSVFLKLERRNQQRRVHKLQSLAKQMGYNLVPSHT

SEQ ID NO: 312468 - protein, 369 aa, unidentified
MEKNTIYIALDDSKRKLVVAMLRPGATEPEEREIPKDPSPIQRLFRRLQREGPVQACYEAGVSGYDLYRQLTACGVTCQVIAPALTPRRPGQRIKTDRRDARKLVRLFRAGELTPIHVPDEAEEAARDLVRCREAVRRDVVRWRHRLLKLLDRHGRLWVTEKNWTQRHWTWIRAQHFALPALQRAFEATVFALEQALARQAALDHEIEALAQTAPYRDPVGWLRCFRGIGTLSAMVLLAEIVDFQRFRRPRELMAYLGLVPSEYSSGETQRRGALTKAGNTHARRVLIEAAWHYRHRPTVGRALASRSQAQPEEVVGQAWRAQQRLHRRYRHLIGHGKRPPVAVAAIARELVGFLWAAMTRRETRVPVA

SEQ ID NO: 312469 - protein, 409 aa, unidentified
MIYCGIDWAEKTHDVAMVDHTGTLVAKRHITDDAAGYKVLLDLLAEHGDTEDNPIPIAIETSRGLLVAVLRTGRRKVYAINPMAAARYRDRHSVSRKKSDPGDALVLANILRTDMHAHRPLPDDTDLARAIAVLARAQQDATWNRQTIANQLRSLLREYYPAALAAVEPWKNGLCRPEAHALLKAAPTPNRAARLTRTQLQATLKRAGRQRGIEAEADRLQEVLRAEWAHQPALVEDALGEQMLALLIQLEAACTAADRLAKAVEEVFPRHPDADIYLSFPGLGAQLGARVLAEIGDDRTRFTDARGLKAYAGSSPITRASGKKSSITRRWVKNDRLNAAGYLWAFSAPNASPGAKAHYRHRRDDCGGWHAGAQRHLFNRMIGQLYHCLQHTELFDEHTAFPAEPAEAA

SEQ ID NO: 312470 - protein, 429 aa, unidentified
MNYNTQNAKIASITEKTLIIGIDVGSETHYARAFSWRNYEYSKKPFAFSNDEAGFAAFKEWMDDIAEEHGMEVIIPGMEPTGHYWLNLGAYLQEQGMKPVHVNPHHVKKSKELDDNNPSKNDRKDPKTIAGLVNEGRFSYPYIPTGIYAEIRNLSNLRIQTQEEITRIKNRMARWFSIYFPEIKDVYRNPDAVSGLMVIKQAPMPCDIRELGVEGVNKIWRDARLKGAGIKRATTLVTAAEHSIGNTEAPRSARKEIRNLLEDYEGYKKRMDELMEEIEKTLSEIPYIDKLMKINGIRIKTVSCFIAEVGDIGRFDNPKQVQKLAGYAIVADSSGKHNGESRISHRGRKRLRYALYEAAISVIGKNKEFKEIHSYYRTREKNPLKKMQSVIAVACKLIRIFYTILTKGVDYDGQKMLNDIVRPEIQPAA

SEQ ID NO: 312471 - protein, 322 aa, unidentified
MYSIGMDVGKSSIAVHIPGHNLDLEIENTMASLKTFYAKLKKLYKKELKKVVWVFESTGSYSSLIYRFCAQKGIAVFMPNPQQARGFAKAIAQRNKSDRIDARVLAQSIVIAKETEIKVPVIDAMVEEFKEMIGYYRLLVKQQSQLKNHREALQAKGASKSLLDAVERQIHSLNKEIEKLKATMLKTVHSDPKLSRKLDAIASIPGVGTLTALILLHLFLRYPNANQRQIVSLAGLDPVIRESGTSIRKRSRISKAGDRIYRAALFMPAMVAVRHNERLKAYYRRLKERGKHTTAAQVAVMRKILIIAHALYKTEETYRKEL

SEQ ID NO: 312472 - protein, 400 aa, unidentified
MISVGIDVSKGKSTVCILKPYGEIVSKPFNITHTQKDLSELSSMLFRLNDEVKIVMEATGIYHLPILTYLQEKGFFVSVINPYLMKSYRNESLRKAKTDKIDSRIIANYGIDHWFKMKEFQTSGEIYEELKLLGQQYRHYMKLHLLSLAELTHLLDLTMPGIKNLLASWNETNRKDKRSDFVERFWHYDIITSMSEQEFTEEYILWAKEKKYVPSQEKAKVIYTLAQESIPTLPSETSSVKILVTEAVRVLKEVDATLGLILSRMQEIAKTLPEYSVVREMGGVGNTLAPKLIAEIGDVRRFRNGKALVAFAGIDPPPYESGQFVGCNRKISKRGSASLRKVGYETMRSLKMRSRPEDPVYRYVVKKESEGKSKKSAKIAGLNKFLRIYYARVTELYKNI

SEQ ID NO: 312473 - protein, 424 aa, unidentified
MAATETPALHLCVGLDWATEHHALTVYRPDGTVVARFQIRATPAGYAELVHRLRTLGANRPVGLCLEASRGPIFHALPPQDFLYFYPLNPKCASRLRELFKADPGKTDPSDADLLGLFLVHNWPHLRPWGPEDPLTRRLQTLVEFEQTWIRRQTALANQLRARLLLYFPQALAVSADLDSPLLLDLLGRWPSLAAVQSAGPAQLRRVLAAHLQHRGEVAAQGEALRQAQPLTTDPSIVEPLAEEVQALVGLLAAGRARLAALRRQIDQLFDAHPDAPIFRSFTGVGPKLGPRLLACLGTDRGRFATAGDLLAFGGVAPVTEASGKHRLVRRRRGCHKPLRHAFHLWARASVQAGGWAGALVAHGLAQGMKRPALYRVLAYKWGRILFACWQHRSPYDPARYVQALREHGSWVAAELAPRPAAAR

SEQ ID NO: 312474 - protein, 360 aa, unidentified
MNTVTWVGMDVHARSTHAAAINLLTGEVQRIRFGAGTDGPVAWLGKLPGPVHACYEAGPTGFGLYRAAVAAGVRIDVIAPGKTPRGPSDRVKTDRKDAELLARLLIAGQLTAVKVPPAGVEAARELTRLHDACRRDLMTARHRISKMLLRHGRVYPKPTTWKVDHRRWLAGQRFDEPTSELVYLDLLARVDTLTARKLQLRDEVIKLAEDERWWPTVARLRTFRAIDTLTALSIHLELGADWARFQRPHRLGAWLGLTPSLNQSGESSASGSITKTGSTLARRLLIEAAWHYGPRPSSGPILQARQAGQPEHILAISNKAQRRLHRVYQHMKARGKPHGIVTVAVARELSCFLWAAATAD

SEQ ID NO: 312475 - protein, 355 aa, unidentified
MAELYHVGLDLHRRFSQVAVLDETGNVISNTQVRNNSEEIREYFKTLPKGTPVAVEATTGWEWLRDVLEEECMEVKLANSHKVKLIAESTIKTDKIDAVVLAQLERSNFLPMAYMAPKEIREYRELLRHRFLLVRTRVRFKNVIHSILMKMGILPPEVSDQFGKEGIAFLKAVEVPTVYRQRIDTYLEIIENLSCFIKGVDEEIKKRVVTENEQAKLLTTMPGISYLSGLLLVAEIGDINRFSSYKKLSSYAGLIPTTDQSAEKRHQGHIKKDSNKYIRGVLIEAVRHAIKKDPVLGFKYNRISRKKGVNKARIAIANQLLISVYFMLKRNTPYQIRRLRNNYSGNPLRRAGHQR

SEQ ID NO: 312476 - protein, 407 aa, unidentified
MDLLKTVFGIDVSSRKSNVCIMVNGQKVNDYAISNDMVGFNQLLGDLKQVTKPQIIFEATGVYSRRLQAFLDMHELRYVMMNPLEAKRKTKDDLHQNKTDKLDALYLAKLQSEHPQRLAYVQSKEYQELMANNRIYEQASHDLITNKNRLHKAVQLTFPEIEHLLANPRGKNYWSIALRFPHPDIVLETKEADIIDFLKGLSGIGKKRANDITQSLIRLAKVACPAVKKNSAHIRGLKMDINNILSAEEECQTALQEMAKLAPKRDLEILTSIPGIGKNTALRIISELGDIRRFNNPSKLNAFVGVDPQVYESGNLTAHLSISKRGTAIGRKVLYLAINQIQSAKKAGNPCHIADYYEKRKRSSETASHKKAAIASIHKLLRTMFALIKNDQLYSYDVAKHNQKLLS

SEQ ID NO: 312477 - protein, 356 aa, unidentified
MDNSNRLDFTGQPIYIGLDVHKKSWSVSIHSAVCEHKTFTQPPEVDILVNYLRRNFPGATYRSVYEAGYSGFWVHDQLTEKGVACTVANPADVPTKDKERRTKRDRIDCRKLARSLRAGEIEGIYVPCRTKLEDRSLVRTRQSMVRKQTRCKNQIKGILFFYGIPLPEDWAERRWSGPFVRWLENLPMERASGEVALRMHLEELKHLRQILARLDREIRVLAQSGEYGVQVRLLRTIPGISTLTAMILLTELQEINRFRSLDELTSYVGLIPDTHSSGETEHTGNITQRRHAQLRASLVEAAWTAVRKDPALLMAFQESCKRMRKTRAIVKIARKLLNRVRYVLKNQTPYRMGVVQ

SEQ ID NO: 312478 - protein, 397 aa, unidentified
MDQVWAGVDAGKAHHHCVVIDGDGRRLLSRRVANDEPDLLALISDVTALGDQVSWAVDLPDGGAALLIGLLVAAGQPLLYIPGRVVNRASDGYRGEGKTDARDAAVIADQARIRRDLAPLRPGDEITTELKILTARRADLVADRTRAINRLRALLTSIFPALDRALEDLTLTGPLVLLTGFQTPAAIRAAGPDGLAAWLRGRKVRNAGKIAALAAGAASRQHATLPGEQLTALMIAAMAQEVMALSEQIKHTDKLIEGRFHQHERAAVITSLPGIGTLLGAEFLAATGGDMASFATPDRLAAFAGLSPAPRDSGRIHGNLHRPRHYHRGLNRVFYYSAMISIATCPESRRFYDRKRAEGKKHTQAVLALARRRVNVLWALLRDNRPYQATPPLRSAA

SEQ ID NO: 312479 - protein, 406 aa, unidentified
MENRHHKVYVGIDIHRQEHTVAIIPATLLHHSKVSWKESQFFNINNNSTDFERLDIAIREHILYANEAVIAVDHTGGHYSEPVVYFLQSKGYDVYHLEPKAVKAARERLLDEQSKSDTIDAAGAAYLLYLRDVHGLSFRISAITPELGSKASVLHYLVIQKQQYSKQATQLTNRLHQFLLAVFPEAEAKYFKKLLRITPYYPTPKDILASQGLKDVKYMSKADKEAIMVLAAQTVGAPGELYRELIRDLSQQRNETIAKRKAVTSLIEQEVAAHPYGSILLSFPYFGSTAAATIIGVVKDIDRWPSKKKLKKALGVYSTLRQSGTSAGKGRMGKEGSRDGRRVLFQVVFRCIRNSTPDNDFKDYYLRQVSRGKPRLKAVVSTMGKLAEVILFRQLRCPRCKRSELV

SEQ ID NO: 312480 - protein, 348 aa, unidentified
MTTAYIGIDLHRTVIQICVLDAGGERIAEERFRYHNLEEGLEAVSFVKRFGPDCRVAVEALGLNRWFVNACQAAELEVLVCDARKLDLKKLGKKTDRRDAREIARKLWLGDLDRTARTYYPSDEEYGRRKLLRVRHRLVQMRQQTINQLRGMLNAYQVSAPRGVLYTRPSRERLAEILLPVEELQEAYTALLAVLDQLQEQIQRLTNQIRQLPKRDTRVGALEATLPGIGAQSAATLIAELGDATRFRNSRAVAAYAGLVPKVNQSADKAHHGRLTKQGNPELRWIVSQWAVRLIKDDPEVNAWARNLRGRVHKNKARMALARRLLVGVWVVLTRGEAFDLRRCLGQA

SEQ ID NO: 312481 - protein, 346 aa, unidentified
MTIVEDTRAITGGVDTDSEVHVAAALDPVGGLLGTREFPATAAGYAGLPGWLGEFGDVALVGVEGTGSYGAGLARYLAARGVRVVEAARAGRQDRHRKGKSDPLDAVSAARAAQSGRASGVPKGRDGAVEAIRALMADGRSARGERTQAVNQARALILTGPDELRARFAGKRAAALAEAVAALRPRPGDAAGYAVRTALRELGRRVEFPGAQIERLDDLIVPLVTVRAPGLLSLYGVGPDTAAMLLITAGDHPERLRSEAAWAHMCAVAPIPASSGKTRRHRLNRGGNREANHALRRIVITRMSAHPATRAYVQRRTAEGLSKKDIIRCLKRYVAREAYPCPRAGS

SEQ ID NO: 312482 - protein, 317 aa, unidentified
MDELRSVSAYVGIDVSKDRLDVHLRPSDEAFSVARDGKGLQTLVERLRALDVALIVLEATGGFETTVAAALAGAGLPLAVVNPRQIRDFARALGKLAKTDAIDAKVIAIFAEKISPQARPIASQQAQRLGELVARRRQIVEMIGMEQNRRRRVGEKRLIKQIDRHIVFLEKELAEVDSDIDAGVRASPVWRETEELLTSVPGVGPVTARTLIAELPELGQLDRRKLAALVGVAPFNRDSGTWRGHRMISGGRTSVRTVLFMSSLAAVRFNPVIRANYQRLVARGRPKKVAIIACLRQLLTILNAIVRDATPWAVQSP

SEQ ID NO: 312483 - protein, 409 aa, unidentified
MSQNHFNWYVGIDWGSKKHRVYVMDAQGNRLGHRWIEHDGAGMKELLEWLHSFCGEQPEQTAVAIEVPHGALVETLVEQNFAVFSINPKQLDRFRDRYSPAGAKDDERDAMVLADSLRTDQHCFRRVHLAPADILRLRELSRLQESLGKECQRLQNQLWDLARRYYPQLLQLMSTPDQPWHWDLWQAAPLPAQGAKLSLNKITRILKQHRIRRVDAAKVHQILSAPALRLAPGAAEAASEHVLVLLPLVRLLHRQEAEVAQRVASLLEKLAAPQGENEHSDAAIFLSIPGVGPKVAATLLSESFQAITERDGASFRQQAGVAPVTRRSGKKTVILMRYACSCRLRDAMHHWAGNNMQRDPRSQQIYQQKQRAGKSYARGLRGVGDRLVDLSFSMLRHGTLYDPKRRMVA

SEQ ID NO: 312484 - protein, 349 aa, unidentified
MGVLLKRTMQTTKYFIGFDISADDFSASCITSPDNLVFSTQKFLNNFDGFSGFVSLLFKHNIQPSEAILCMEATGVYSESLSYFLVSKGFTVCIEAPHKVKNKIKDSPQKNDFIDALTVAEYAYRYTDKLSAWKPKDEILEQIQVLLTTREHLTVQMTANVNALKTLSYKYYQTPLANKIYEQTINKLKEHIKQIEQEIKNLIDKDSSFKNKISLAKSVPGVGLLLAANLLVLTKGFTEYVNYRHTAAYSGICPYEQTSGTSLRKPPRSKRCGPAKLRKLLFLAALSVRTHNLNFKKYFLRKVAEGKNKRLVLNNIENKLLKIIFAVVNSGVAYTENYKSVNPSLLKIA

SEQ ID NO: 312485 - protein, 335 aa, unidentified
MEFTYFIGTDVSKNELDFAVMRGKVFLFHKEIANTETAIILFIKELVKLPGFDLASAIFCMEHTGIYNNHLLACLHNKKANIWLESALQIKRSSGNIRGKNDKVDAIRIADYAYTKRDKVRLWVPRREIIQQLANLAATRVRLIEAKKILKTPLQEQDSFTAKKIIRHSTYVCSHTLKAIDADLDRAEKAINNLIAKDPELKRLFNLVTSVNGIGKVTATQILITTNEFKDISNPKQYACYAGVAPFIEESGIFKGKGRVSHQANKKVKTLLHMAAIVAIQYNQDIKQYYDRKVNEQKKNKMSVINAVRNKLILRIFACVNHNSPYQNNYQQSLA

SEQ ID NO: 312486 - protein, 408 aa, unidentified
MTVVGIDVSKGKSMVAAMKPGGELVAAPYEVRHSDIELSHLALDVLCMEPDTCVVMEATGRYHEPVAALLHSEGIFVSILNPLLIKQSGAGSLRKVKSDPKDALKIAKYGLDNWSTLREYTPMEAIRQQLKLCARQCDLYNKNIVMLTNNLISLSDKTFPGVNELFSSPEKADGHLKWVDFYRSFWHCDCINRMSPDAFEERYKKWCKRKGYHFSTDAADALYAASCGSYTTLPRDNNAKLLVTVAADQLIALRENQSKLEAEMLNLCKQLPEYETVMAMYGVGKSTGPHLMAELGDVRRFPHRSSIVAFAGVDPVVVGSGKMQLSSVTTSKRGSPQLRKALFQVVSTYVKCKPENEAVYQFYAKKRDEGKPFFVCTTAAANKFLRIYYARVKECLNAAESATQVEEG

SEQ ID NO: 312487 - protein, 342 aa, unidentified
MPLPKNLIGVDMAADNFALTAYDSKKASYSKTQTFDNDPEGLAALQTYLDQSQMTSSDTIFCLEATGVYVEPLVHFLAAKGYRVAVEAPHKTKRAFYPLGPKTDPLDSRQIAEYAHRFFDQLPFWKPSEAIVEQLRVLLATREQLVQQRTSNQNALLAVRRKMVKTPPAEEAFKATIDHLQKQIKQLDKEIKDRSSGHPTFGSTVGLIMTIPGVGFLLAAHLLRLSDGFTKPLEARHVASHLGVCPQPFQSGTSIHRKSKSRGGGHPRLRKLLFLAAMNLRAHQMSFKEYFIRKTQAGKAGRLVINNIENRLLKIICAIIRTRTSYISDYRSVNPMFLQKVA

SEQ ID NO: 312488 - protein, 389 aa, unidentified
MLLDHPFDGPTAIRTHIAAIFISLELSRSNWLVTSLSPGKGEKMSKHSVAAGDTAELLALFAELRRKAEVRTGHSYPIVTIQEAGLDGFWLHRVLQQNGIESHVVDPASIATPRRRRRAKTDRLDGETLLRALLAYKRGEPRVCAMVVAPSPEEEDRRRLCRERRTLIEERITQVNRIKGLLFAQGISDYAPLRRDRRARLEALRTGDGRELPSHLKAQLGRALDRIELLVDQIKAVEAGQEALLAAARKPASEEAVPDPVTMLLALKGMGANFAAVLWSEAFYRQFANRRQVAAYAGLAATPWQSGGIRHEQGVSKAGNPRLRTTMIQLAWLWIRHQPQSALTRWFKERSQQGRKRAIVALARKLLVALWKYVTQGVVIEGAVMKPAA

SEQ ID NO: 312489 - protein, 327 aa, unidentified
MNEITRVAIDTSKSIFTLHGTDERGRAVLRRNVRRRDLIRFFERLAPVEVALEACGGSHHWGRTLMALGHRVRLIPPQYVKPFVKRSKNDRNDAEAISEAASRPGMHEVPVKPAAAQASAMLLSVREVLVRQHTQLINALRGHAAEFGVVAAKGDKGLTELRSEIAVASAEALPRAAMHALDLLGSEIDRIEVRLAQIEKTLIAQHKTTAQSRRLAEIPGIGPMSALNFALRVDASQFRSGRHFAAWLGLVPKERSTGGKQRLGAISRAGDERLRQLLVLGATPSFAMPSQGAQAPRLGSSPCWGASRASSRLLPWPTRWPGSFGPC

SEQ ID NO: 312490 - protein, 334 aa, unidentified
MENIALIGIVLGKNSFHIHCQDRRGKAVYRKKFTRPKLIEFLATCPATTIAMEACGGSHFMARKLEELGHFPKLISPQFVRPFVKSNKNDFVDAEAICEAASRPSMRFVQPRTESQQAMRALHRVRESLVQDKVKTTNQMHAFLLEFGISVPRGAAVISRLSTLLEDNSLPLYLSQLLLKLQQHYHYLVEQIKDLESQLKRKLDEDEIGQRLLSIPCVGTLTASTISTEIGDGKQYASSRDFAAATGLVPRQYSTGGRTTLLGISKRGNKKIRTLLVQCARVFIQKLEHQSGKLADWVRDLLCRKSNFVVTCALANKLARIAWALTARQQTYVA

SEQ ID NO: 312491 - protein, 408 aa, unidentified
MDKIYPRCGGLDVHKDSVWACARVDGKSFTEKFGTSSKELLRLGDWLVDKGVTIVAMESTGVYWKPFWNLLEGRVELMLVNAQHVKQVPGRKTDVTDCQWIAQLLEHGLLKASFVPPRPQRELRDLTRQRTQLLRDRARVVNRLQKVLEDANIKLASVATDIAGKSGRAILDALVEGKSTPEQMAELVHKRMEAKKPALREALRGRVTDHHRFMLRQLLGQLDSLDQLVDTFDARVEEVMSPLERESLKRLDEVPGIDQRSGQIVIAEIGTDMGRFPNAQHLASWAGICPGNHESAGKRKSGRTRKANPWLKGALTQAAWGASRTRRSYYSAQHRRLAARRGARRATIAVAHSLLVTVHSLLSKPAAYVDLGADYFTGPRGPDHQAQKMIQKLKRLGYEVEVTRPEAA

SEQ ID NO: 312492 - protein, 363 aa, unidentified
MAAFGCHSSSVRRRPLVIMLHVGLDLSRHRLDVHVLDPGGSTVAQLAVAPHGEELRGLAARFNRKGPVRAVIESMNGARFIHDTLEMAGWDVLIADAYKAKGIAPLACKTDKVDAMVLAELSRRDLVPAIWLPTPEVRGERERIRYRAHLVKHRSMLKCRIHATLLAFGLPNDYSDLFAGGGRAYLDELVFPTPWRDNVNAARTLIDELTSQIKAIDRDLNLIASRHPYVKLLVTAPGIGPVLGYSIASEIGDITRFPTPTQLVGYSGLCPKVYQSGQTDRRGALAKNGPRYLRWALMEAAIHAAAHPAYRDRYLRTRSRLGRYRGSKTARVDVARRLAHATWHMLTKGEPFAPAGATCVLTP

SEQ ID NO: 312493 - protein, 342 aa, unidentified
MKHFIGLDVSLKETHVCVVDETGTAVAVCREATRPDLLASAIGRLAPSVERVVLETGGQSSWLQRSLRGLGVPTVIVDARQAKAALSCRLNKTDANDAEGLAQLARTGWYREVRAKRPEAALGRSVLLARQQLVKQRRDMENQVRALLRGFGLAVGAVSRGRFEERVWELVRCQPQLENAIGPLLMVRRCVDDHIQELEGRIRSVVGGSAVCSRLMMVPGVGLITALAFVTAIDDPYRFARSASVGAYLGLTPRRHQSGEVDWAGRISKRGDALARCMLYEAANVLLTRVRKWSAPKAWAAKLARKAGAKKARVALARKLATILHSMWVNGTEFQWTREATA

SEQ ID NO: 312494 - protein, 375 aa, unidentified
MKLIGIDIGKNKHFFCVMDQQTGEIISQPVSFSNDKEGFDFLVQKIKSYPKDSILIGMEDTGHYHFALLKYLLDLQYTVALINPKTTDFNRKMQGGITKNDKLDTINICDVLDTPERKKQYRITKVNSFDLYEQKQLTRHHHNLKEEENVYKNRLQKCIDIVFPEFNKLFNSKYGIVYMNILKMFGSAENIANTDIRTIRKCFEIEGRGNRISLTPERLKECAISSIGISSSAEVIQIKHLTAQIELIEEQLTEIDKKIEEFSIQNNSPILSIPGISHFSGTSILAELGDISNYSKPSQIIKFAGVAPLHYESSQFNAQHTAITKKGSKYLRKTLYQIILPVIRHNPVFNKYYQLKISQGKGHRCAQGHCVRKSA

SEQ ID NO: 312495 - protein, 389 aa, unidentified
MYSYFVGIDIAKNTHWASCLSSDGEIILEPFSFSNDNSGFQKFISKLESLDKTKILIGLESTAHYGENIISYLFNLDYNIGLINPIQTANLRRSNIRKTKNDKVDTKIIIKALTLGNYSLITSRDINNLKLKGLCRSRRNLVTMRSKAKIQLVSYLDQIFPELAQFFKGNLHLNVSYQLLKEYSSPKQISSLHLTKLSNILHDNSHGRYNKQDAIRLRKLAKNSVGIDNPSLSLQIKHSILQIELYNEQIAEVEALYKQILDEMNTPILSIPGMSYNQAAVIIGCIGDINRFEHSCQLLAYAGLDPSVIQSGNFQARSTRMSKRGSGMLRYSLVYSAHNVVKNNKTFRDYYELKRSQGKSHYCALGHVAHKLVRIIFKMLKDNVAFNLD

SEQ ID NO: 312496 - protein, 354 aa, unidentified
MNDAKYIGLDVHQATISVAVRDSAGKLVMEAVLETKAETILQFVRGVRGSLHVTLEEGTWAAWLHDLLLPHVTRVVVCDPRRNSLLKSGNHNDRVDARKLAELLYLNELNPVYHGEHGLRTLRELGRSYIAITRDLTRVMTRLKAIYRSWAIPCAGEQVYAPRYRAEWLAKISEGGVRCRAEHYYQQLDALAALRQEVRRELLAESRKHHATRLLRQIPSIGPIRAALLIAIMQTPNRFRTKRQLWGYCGLALRTYTSGEYRFVKGQLKRSKKVLAIRGLNLNHNHDLKNIFKGAATRAAAVGPFKNFYEACVARGMKPHLARLTLARKIAAITLLVWKKGVRFDAKHLKQQAA

SEQ ID NO: 312497 - protein, 409 aa, unidentified
MRYYLGVDWADQTHAVWVVDEGGTKVAMRTVPHTAEGLTEWGRELDEWRAQGIELWAAIERPEGRVVDLLLDHGVVVYAVNPKTLDRARDRFRQSAAKSDPFDARVLADFLRTDHAHLRAVQPSSEAAQELKLLTDDYQRQIRQQTRLVNQLTTTLKAYYPRGLEVAELTTGLAREFLQAYPTPATITALTERQWQRWAHAHRLSETRTQQLWVVLQRPQLPVPPHVVRAKARLMQSLVAQLMVVMEGVGAYREAIEDFFARIPAAQWIRTLPIGDHGITAPTLWARLGDAPGRWESFRHLQAQAGTVPVTIRSGKQQVVRFRFACDKSLRYIIDHVAFLSLRWSEWAHAYYAGQRARGHSYRQALRALSAKWLKIIFVMWERQIPYDEQYHLAMMTRQQLRQRQEKVA

SEQ ID NO: 312498 - protein, 329 aa, unidentified
MYYVGIDISKRFIDVCLLIDGIKGKRKTKVLPNDLNSAQALAQWLILQKCDPSQAHIIMEATGVYHEHLADGLHQSDILVSVINPHRVREFAKGMGILTKTDKVDAYVLACYGCLKQPENWLPPSQEIRKLKALLQHRDSLLNDKQRIENRLSTLKSTTAPEEVLTSLESIEQNLKDELARIERLIAEHIDKHPRLKNDLKLLKSIDGVGEQIGWNMLAIIRGNNFRSAEQVAAYLGVIPIERRSGTSVCGRARLSRIGPPGIRAKLYMGAIAAISWNSHVRALYERLRLKGKAKMVAIGAAMRKLVHLCYGLLHTQQPYDKNHGVVAG

SEQ ID NO: 312499 - protein, 347 aa, unidentified
MSVTMIGVDTAKSVFQIHAVGATGKVLIRRKLSRTEMIPFFEKQEACTIVLEACGASHHWARLLTCLGHHVKLIAPEAVRPFVKKGKKNDAADAAALCEAASRPDMKFVPIKTAEQQAILALHSARSMLVKQQTMLVNAMRGLATEFGLTVPKGINRLDELTALVDADEAFPEGARRVFRELHGQCDSLSASIERTETKIVAHARGDETARRLATIPGIGPITSSLIAATVTDIGMFKSARHFAAWLGLVPRQFSTGGKTRLGRITKAGNREIRRLLVLGATSMVYRAEQWNSDVGAWTRGVLERRPVRLVTVALANKMARIAWALMTRKEVYRAKGRIATAAEVAA

SEQ ID NO: 312500 - protein, 351 aa, unidentified
MVTAGLDLGDKYSYLCLIDQESGEVMEEGRLRTNPETLRRRFCSEQQPLRIAIEAGTHSPWVSRVLEECGHEVLVANPRKTRLIYSNKRKTDEIDAENLARLARLDPKLLYPLKHRAENSQAHLAIIRSREALVGCRTQLVNHVRGAVKSFGARLPKCPASSFHNKAAAHSPEALWPAVEPLLETIGSLTERIRKYDRQLETICQEHYPETELLRQVEGVGALTALSFVLTLEDPYRFQTSRQVGAYLGLVPASDQSGDRDPQKRISKEGDEMLRKLLVGSAHYILGPFGQDSDLRRHGEKIARRGGKNAKKRAAVAVARKLSVLLHRLWVTREIYEPLYNAHRRQEQQAA

SEQ ID NO: 312501 - protein, 355 aa, unidentified
MHMKYYISTTEYNCGIDLHARQMYVCLMDRQGKKLVHTNIRNNDFEYFLKLVAPYRHDLTVCCECMFGWYWLADACHQAGLKFVLAHALYLKAIHGGKNKNDRIDSEKVAHLLRTNLIPWGYVYPAALRPLRALLRQRLSLVWGRHESLARIQSHQLARNRPLLKQTNRDEWEKQLLVQEPDEVSQLALQNEMAMVRAYDQQISQVDEQLKKHTRQVAARDYALLQSAPGIGKQLGLTILYEIGDIERFPTVKDFLSYCRLVKGTVASAGKIKGLRGAKLGNPYLRWAFGEAAVIAKRDTAWFGPLAQRLEARMNGNKFKANTVLAIKLARAVYFMLKNKTVFDPQRLVMALQRN

SEQ ID NO: 312502 - protein, 336 aa, unidentified
MKYIGLDVHKKNTCACIMNNSGKEIHSMEVSSKPSGLEKIAEYMGDEEYAVLMESSTYSIRVHRFFADRGVPAHTAHAKYLSMITKSDRKTDKIDASHLARYLRLWMNGELPLSMSYIPDRDAEAKRALCRLREDLTKDIGDCIRKIKSHMSAIGIEIPYPVSSAKTKKFLEYLRNWHFKDITLMNRLDMLESLLRKANEINKEMEIIGKHDENVRLLMTIPGMGMQSAVQIMSMIMDINRFADQEKLCSYFGLVPRVRDSGGKESHGHMTKTGDPMMRAVLDRVTYVHVCHCDSSITEFFNRKSNENKKKALTSASRKMLCMIYAILTRRTGFAA

SEQ ID NO: 312503 - protein, 358 aa, unidentified
MDKIKNSKLDCTGQPVYVGLDVHKKSWSVSVFSRYGEYKSFTQPPQVDTLVSYLKRHFPGGEYHSVYEAGYCGFWIHDQLKERGINCTVVNPADVPTKQKEEQHKRDRVDCRKLARGLCNGEMEGIYVPSRQTREDRTLVRTRQALVKKRTRCKNQIKGMLSFYGIHVTDEQTFTPWSGRFIKWIESIRMERDSGNTALKAHLEELAYLRQLIATVNRAILKLAGSAEYATPVKVLKSAPGISTLTAMILLTELCDMARFASLDSLCNYVGLIPAIKRSGETEYVRGITPRRNAHLRWILIEAAWVAVRKDPALMMAFTEYCKRMRKNRAIVKIARKLLNRIRYILKHQTPYVPCIAK

SEQ ID NO: 312504 - protein, 354 aa, unidentified
MSQKLNAAMTVIGIDIGKNSFHIVGHDQRGAIVLRQKWSRGQVETRLANLPPCLIGMEACVGAHHLSRKLQMLGHDARLMPAKYVRPYSKGQKNDFRDAEAIAEAVQRPTMKFVATKTADQLDLQALHRVRERLVGQRTGIINQIRAFLLERGIAVRQGLRFLRTELPGILAMRTDVLSPRMLSIIEDLAGDWRRLDERIEGLSGEIEALARQDLACARLMTVPGIGPIISSAMVAAIGTGDAFSKGRDFGAWLGLVPKQTSTGDRTILGKISRRGNRYLRVLFVQAAWVVLVRLKRWERYGLKSWIEAAKKRLHHNVLAIALANKLARIAWAVLHKGRAFECSKTAETASRPA

SEQ ID NO: 312505 - protein, 342 aa, unidentified
MGIDIGKNSFHVVGLDQRGAIVVRQRWTRSQIRARLANMPPCLIGMEACVGAHHLSRRLHSLGHDARLMPAKYVKPYRKGQKNDFRDAEAIAEAVQRPTMKFVATKTADQLDLQALHRVRARLVSQRTGIINQIRAFLLERGIAVRQGLRFLRAQLPEVLGKRTDVLSDRMVHVIEDLAADWRRLDERIQGLSGEIQIVASQDPGCKRLMTVPGIGPIISSAMVAAIGSGAVFSNGRDFGAWLGLVPRQLSTGDRTILGKVSKQGNRYLRVLFVQAAWVVLIKPQIWERYGLKQWITAAKRRLHPNVLAIALANKLARIAWAVLSNDCDFRCEKTDETPRCA

SEQ ID NO: 312506 - protein, 467 aa, unidentified
MFVLGCDVSRGYVDITVVNERGELALPPSQADASAQGESRIFRQISALRKNYPQETVIAVMENTGGYEANIAQCFRQHGVPVSVLNPKNIHSFRQLELHHAITDPSSARDIALFALQHLDAIKTEVEGTSERALKRLAHILDALSRDMTRLKNRLDNLLFTVRPELLSLTRGDKPRWLLQLLLQYPIPQKLARGRMSRVTRIPSITPDKARNLISLAKSSRGADNHPDFAPLIVYLATRLLQAMDQEKTLRKELEQRFNRIHPSCPLPTIKGVSSYGAAIILAHIGNVHRFHSAKALVAFFGLDPLVRESGDLQHRRHISKRGPGMVRRVLYMQCLSMCSDPDHSIGRFYARLTKQGNPHYYAITACMRKLTVILYAMLRSGNAFDPNYEDSSKALKQSERDRGRKKLRVAKHARTSLALDVPISTREAKRRKRIIALQNKKREGPHVSCDTSAGSCPKNLNEVTFP

SEQ ID NO: 312507 - protein, 426 aa, unidentified
MNCKQNQRINQVEETSLVVGIDIGSTTHYARAFDWRKMEMAKVFKFSNTLEGFEALSRWVRNIQAVSKKKKVIVGIEPTGHYWFALGQYLQSQGIKLVMVNPYAVKQSKELDDNNQTKNDAKDPSVIAKLVIDGRYSIPYVPQGAYADLRIMFTNRTRIAREIGAIKNHLARWFAIHFPEYRDVFSNYAAQSSLCLLKVAATPGTIVALGVEGINKIWRDAKIRAVGMKRATALYETAKKSIGQTQGTAAAEVEMKLLLEDYEAKMRQYTSIMAGLEEAVGRIPGAERLLAIKGIGLVTVAGFLAETGDLGRFESPKQIQKLAGLSLRENSSGKHKGETTISRRGRHGLRNVLFNAVIPLLATNDEFRSLHEYYTTRAANPLRKKQSAIVLCGKLIRVFYVILVRNAVYDGQKMLADIHRNGNQAA

SEQ ID NO: 312508 - protein, 341 aa, unidentified
MSTVTLIGIDLGKHSFHLHGQDGSGRMVFRKKLTRSQMFTLLGNTPACTVAMEACAGAHWVARRVQALGHQARLISPQFVKPFVQGNKNDFADAQAICEAASRPSMRFVSPRNEAQQTVSMLHRLRESLVRDRTGAINQIHAFLLEFGVSLPKGPAIIRKLPAVLATQELPPRLVALLERLQGHFKYLDEQIAQVERDLTAQLCEDERSQRLLEVPGIGPITASVLMTELGDARQFGSARQFAASVGLVPRQYSTGGKPTLLGISKRGDKNLRRLLVQCARVLLVRIDQRTDKLGAWVRSLLTRRHSNVVACALANKLARIAWAILARGTHYRSEQVVATA

SEQ ID NO: 312509 - protein, 481 aa, unidentified
MSKPKQQPPGPAGEKAEVSKGKRGRRRKGMCLEDRPLSEPDAGGIDIGAREIFVAVPPDRDENPVRVFSTFTEDLESMARWLVSCGVTTVAMESTGVYWIPAYDVLEQHGIKPCLVDARGMKNVPGRRTDWHECQWIQFLHSVGLLRAAFRPDGEVCAVRSLMRHRGDMVQMTSQHVQHMHKALTQMNVQIHHVISDITGFTGLAIVDAIVGGQRDPLELAKLRDPRIKASEETIRKSLVGNWRREHLFTLKQSRQMYQNYQEQIAACDEEIEKLLVGFPPWVDPEGKPLPPDRKKRQSGRKKKNVNPKTGFDLRTESYKLFGVDLTQIPGLRTMVLTLFGEVGRDMSRWPTARHFASWLALCPDNDISGGRVLWKGMRMVHNRAGDLFRLAAYSLHHEPSPLGNYLRRMKSKMDAPAATTATAHKIAIIFYTMVKKQVEYDATLWEQRDTEREKRFEEKLKRQAHQRGYKLVPIEEKPAA

SEQ ID NO: 312510 - protein, 366 aa, unidentified
MTRMTHPPQSHQADTGDQEVVLGVDTHKDTHVAAVLDPVGALLGSRCFATTVAGYQQLLGWAQTLGRVRRAGVECTGSYGAALTRHLRAAGVQVIEVNQPDKGTRRRRGKTDAIDAEAAARAVLAGRATATAKTGDGPVEMARMFKLAKDSAVKSRTQAINQLKAVLVSADPALRESLSGLSTTKLIRRCVQLDTGVPTDTTSAAAWTLRLLAQRIIGLTAEVDDLQARITNAVNRSTPTLLERNGVGPDSAAALLITAGDNPQRLGSDTAFAALCGASPVEASSGKTQRHRLNQGGDRQANAALYRIALSRLRWDPRTQDYMTKRLKQGKPKREIIRCLKRYIAREIYQIIIQSRPNPTTVPSAA

SEQ ID NO: 312511 - protein, 286 aa, unidentified
MSLVAEVVDAVVGGDTHRDTHALEMTAPSGATISTISVENDEAGFAAALAWIAEHAPGGRLVVGLEGTRSYGVGLARAVQQAGLAVVEVERPRRGDRRRGKSDPIDAHLAALQVLRLDADRLPTPRADGDREALRILLGARRELTTVRTRQINRLRALLLTGEEADRSLARGPLSDARLAAISRRRGTADESVERAVRRAEARRLALAIRDACRELKTNKQQLADLVDSIAPQLRDKVGVGPVSAAQAVVSWSHQGRCRNDAAFAALAGANPLPASSGPGSVKRTV

SEQ ID NO: 312512 - protein, 418 aa, unidentified
MSKIKSQKIKSVNNQTMIVTLDIGKGSHYGYFRAPDGQDVEPFAFYNTYDSFHSFWKKLSRFKKVHGCSRVVVGFESTGPYAEPITHFLKQQPVTLVQINPMHSKRVRELTGNSPNKTDRKDPRVIADVIMLGHALRVVIPQGSSAHLRRLTQARERTIRDRTAIVNQLQHLVFVIFPEFLQVIKNISCKTGLYLLRHWPSPQAIAALGEQQLSRIIRRVSRAKMGQWHAEQLFQSAQASVGINEGQESIVEEIGHLVDKINRENDFIDRVECQMRSHLEQIPYSSCLLSLPGVGLITVAGLIGEVGDFRQYGTIAEITKLAGLDLFEVSSGKHKGQRRISKRGRPLMRKLLYFAAINAVKPTGVMHQPYTRMLERGMPKIKALVAISRRLLRVMYALARDQSMYMEKYDNHRYQFAA

SEQ ID NO: 312513 - protein, 342 aa, unidentified
MSEVTIIGIDLAKRIFHLHGAGHDGSVVFRKRLSRGQLLAFMSQVPRCVVAMEACATAHGWGRAFETFGHEVRLIPPVYVKPFVKRQKNDCADAEAIVEAAVRPTMRFVALKTEDQQARAMLFRTRQMFVGQRTQMINALRGHLAEHGLVAARGVAQLKKLADAIGDVKTPLPTTVRELGQMYLNAIEGLSERIAELDRKMGQATKEAASTRRAQTMPGVGPITALAIETFAPDLTSFRRGRDFAAWLGLVPRQHSTGGKPRLGKTSKMGQRDIRRLLISGAMAVLQAVERYGSSKHGWLVRLRGRKPRMVAAVALANKMARGLWAMMTKQEDYRNPAATMA

SEQ ID NO: 312514 - protein, 341 aa, unidentified
MEQATTIGLDIAKHVFQLHGADGAGHVLFRKRITRVKLLGFSAAQARCVVAMEACAGAHCWAREISKLGHHVRLIAPTYVKPFTRRQKNDAANAEAICEAVQRPSMRFVPVKTEEQQANGIVFRARDLLVRQRTQCVNALRGHQMEYGYVFPKGITHVKALVAVVEDPQSSLPDSVRVTLKLLVDTFTGLEAQIAVLDAEINRRSKTDSAACRLMTIPGVGPIVSTAITALAPAAHSFAAGRDFAAWLGLTPRQRSTGGKQKLGAVTKRGERRIRRLLIIGASAVVRQASRRGAPKGTWLAQMLARKPKMLVTVALANKMARIVWALLAKGGSYRAQVAAA

SEQ ID NO: 312515 - protein, 346 aa, unidentified
MGKSIIDLSSVTTVGLDLAKHVFQVHGVDASGRVVIARAMRRNKLLEFFASLPSCVVGLEASGSAHHWARELIKLGHEARMMPPAYVKPYIRRQKNDAADAAAICEAVMRPSMRFVGVRSLKNQAALMRHKTREMLVSQRTQLLNGLRGHLAEVGVIAAQGPRHARELAELIEACDETIPFEVCEALAPLVVQLRNLDEAIGRLERTIAKLAQKDETARRLMSIPGFGPITASAMAATIQDASSFAGPREFAAFLGLTPKQNSSGGKQKLGRISKMGNRNLRKLLVVGAHAVLFHRESHTDPLRMWARKLIEKKPFKLVAVALANKMARIAFAILRSKTTYQEIPA

SEQ ID NO: 312516 - protein, 362 aa, unidentified
MNKKKMTTTQDPKPLAPDQVDPCGTEVSAEELIVALCRKGVQEPLKSFPNTPEGHREIGRYLARPGRLVRVCLESTGIYGLDLALALAAQAGIQVMVANPRAIRHFAQALMERNKNDRVDAGVLQEFAARMPFEPWQPPSRPALHLCAVARRLEAITDLCTAEKNRLHASTAAQALPAIICQDLKKSIRFHQRAAQRLTREALKIISTDSNLQERYTLLVTMPGIAQTSALRILAELVMISSDLDVRQWVAYAGLDPREYSSGTSVHKKARISKAGNRHLRRSLYMPALVAVRRDPHLRAFYEHLLASGKVKMQALVAVERKLLHAIFGMFKHQQAYDGTKLYRLPDRLAPASSAPVRTEAA

SEQ ID NO: 312517 - protein, 350 aa, unidentified
MIIGVDYHPSFQAIAFFVEETGECGEQELNHGDGQAEKFYRDLKQRGICVRVGMEATGYSRWFERLLAELGFELWIGDPAQIKAKRVKKQKFDREDARLLLRLMREDNFPQIWVPSPENRDLRQLLWHRHRLVQMRTRIMNQLQALAMNEGYRWKKKLFSEQGRVQLEKLPLAPWASRRRQELLELLDRMNPTIEELTAAAERETRKRPEVLRLMTHPGVGPLTALAYVLIIGTPARFQRGKQIGNYVGMIPSEGSSAGKQRLGHISKQGNSLLRFLLVEAAQAAARINPDWRRRYIHLAMRRHKSIAKIAMGRRLAVRLYWMWRNGCEYSSSFEFGSYAGQLGTGHGVK

SEQ ID NO: 312518 - protein, 392 aa, unidentified
MLEVKVEKCAGIDVGKKFLAVCILIGLANQKPVGEVRRFGTSVKELERLRTWLLESGCTEAVMESTGSYWKPVFNILEGSLKIILANPEQVKALRGKKTDPNDSRWLASLLRHGLVQGSFIPPRDIRELRDLTRRRRTLVGEGAAERNRVQKILEDANVKIGNVLSDVFGTSGQRMLEALLENKQSAAEIAQLGHWSLAPKIPQIIEAVEGHRMTDHHRFMIRQSLRHMRDIEEMIEELDKEIAVRLKPYEQHIRLACTVPGIKPTSAASILAETGMDMSPEGPFPDCHHLASWATVCPGNNESAGKRKSGRTRQGNRWLRATLTQTGWAGAADKKSLFQRRFQRVKLRRGGQRAVMAIAHAQLIAIYWALRNGTPHLQRLTKLGYESDIHA

SEQ ID NO: 312519 - protein, 342 aa, unidentified
MLYVGIDVAKNKHDVTALNVPGKTVLKPLTFSNNKAGFELLDLSLRQLNQDCLIALENTGHYAFNLLNFLHEQGYKVYTYNPLLIKEFAKSLSLRKTKTDKKDAHGIALKLLSDPNREQFQHDNRQVELKILARHIHRLKKKQSDWKVQYTRCLDIIFPELDKIVGKHSEYTYQLLTCYPNPQKRLEAGFDKLIEIKRLTASKIQDILSVAPRSIGTTSPAREFEIIEIIKHYKRLIDKAETCVNDLMAEFNSVITTVTGIGDRLGAVILAEIRNIHAFDNPAQLQAFAGLDSSIYQSGQIDLAGRMIKRGSPHLRWALIQAAKACARFSPAFKAYLKTKLE

SEQ ID NO: 312520 - protein, 351 aa, unidentified
MNFIGIDLHKKTISVCVMNQDRKVLKRQTLPCLEPEPIVAFFRQWGEFQAVVEATASYEWLWQLLEPLARRLVLAHPKKLRVIAESKNKSDRLDAQVLADFLALNMIPEAYRPTLRQRQHRSLVRQRCFVKKNLTRVRNKIRRVLSDYNADRRDLFTQAGLQYLREAKKKFSEVDRFVLQQLLTQWEYHRQQFQMVQRQLKTFASQASTKEKEIRAVLGSMPSVGPTTIEIVVSEIGDIERFRSQKRVVAYAGLAPGHRESAGHKKDLGITKEGSGLLRWALIQTAWRTVRCSLRWRWVYENLKKRRGSKRAIVAVARRLLTVMAALWRTGQRYRLDSGGPPGIPALAPAK

SEQ ID NO: 312521 - protein, 473 aa, unidentified
MRTIGIDLSVCGEHKAIIANEQGRFVVPVLTFHTEPASMQRLIGLAQKGNTDEQVQAVMEPTGMVWFAVAVYLIRNGVTVYLVNSQQVADLRRYYKKHAKSDRIDVRVMAKLPLVNAENLHRLEPLSADGMACQRGCKQLDRYQKQITAAKNRLIALDRFAWPGLEHEVFGEAFSACAMWFREHWYDPRKVKAVGAELIRQAWADSQVGPDDPGDWVQDLVVLAQQALALYGEDGKYLDYEAVQAEAVREQAYMQFLQTQHHQLQVQVVRPLYRQMHPSRNLETIPGVGQDGACVYASFIGRPERFATLHEFRSWSGMIPNSKQSADSQASGLKITQSGPRLIKKFSYLDAETARRYDPQIAAIYYDQVVNKGKHHLQAICTCATHVLDRVLTILREDRPYQLRDIDGTALTKDQALTIIQQRYQVPAEVRRRNNKRSRRERIEKQAEKKGEGRLHNDGVVTTPQASRVRGKH

SEQ ID NO: 312522 - protein, 339 aa, unidentified
MEITTIGLDLAKNVFQVHGINSAGEVVVRRTLRRAQMQRFFEQLEPCLVGIEACGTSHYWAREIIKCGHHVRLMPPAYVKPYVKRGKSDASDAEAICEAVTRPTMRFVAIKSPEQQAMLALHRTRDLFVKQRTQLVNMIRNLLAEFGIEIRRGIEQALIVARHIGVHSLPEVPPLAAKVIAGLSEQVLDLQAKLRELERELLVWHRSSDVAKRLATIPGIGTVCATALAASVSDPHQFRSGRQFAAWLGLTPLQHSSGGKERLGRISKMGDKYLRRLLIVGMTSLVRRAKYKPEAVDPWLADLLSRKPARLVTVALANKAARVVWAIMVRGGVYRRASA

SEQ ID NO: 312523 - protein, 326 aa, unidentified
MTLSHSLDNTFIGIDVGGASLDVAWHRGDSARYANRPDAIAALVKRLQAQREITRIVVEPTGGYEKALVKALRHAQLPVEIIHTSRFKAYRALVGVNAKSDASDARLLASYAAAPDEVRGRKAGHVELPEDATREALSELASRRDQLKHMIHAETCRLGTVRMAELREAITTHLEELRAEDKHMHRMMLALVRQRVDLQRDQRLLKTVKGIGVKSALAFLASVPELGRVDNKAAAALIGVAPFVRQSGTMNAPARIHGGRAAVRSILYMAAVSASRHNPVLRPFYERLLAKGKPPKLALIAVLRRLVVFANAVLKSGQPWKGAIAS

SEQ ID NO: 312524 - protein, 432 aa, unidentified
MNPLSVSPEPPPVAAWVGLDWADQQHAICLYEVATGQSTVSRLEQKPEALQDWLSQLRQRFGGAPVAIVLEQARGAVIYALLSADFVRLYPVNPQSLASYRKAYAPSGAKSDPADAVLLMEMVRNSPERFRPWKPDDADTRSLQLLTQNRRQLVNQKTALTNQLTSLLKTYYPQALELAGVLDSLQACDLLTQWPTLEALQQARHGQIRQLYREHGHPSPEQLDRRLEQIRQARPLTTDPAALLSGSMMVQALVQQLRPLLGAIERFDRQIAVIFGKHPDRPLFDSLPGAGAVLAPRLVAAFGTDRDRFQSAQQAQQLFGIAPVTEQSGKQRWVHWRWACPKFLRQTFHEFAGHSRHWCSWAKALYQRLRRFGKGHHAALRVLAFKWIRILFHCWKTRTGYDEQIYLKSLQKRNPTLWAEIQLLPPRKKKVA

SEQ ID NO: 312525 - protein, 347 aa, unidentified
MKTYVGLDVSLDETSICIVTEDGKVLAERKLPSTPEAIAAFISAKAPEVVRVGLETGSLSVWLHGELRARGLPVICIDARHAKAALSMRINKTDRNDAAGLAQVVRTGWYREVHVKSGPSHLARALLASRALLVGMRGDIDNQIRGLLKTFGVIVGRPEGGFRQRAKKLSTQDLAESPELGHLVETLLAAREEVAKRITVLDREVMRTARASEVCKRFMTAPGVGGVVALSVWSAIDDPMRFAKSSSVGAYFGLTPRRYASGEIDRTGRVSKCGDKDVRKHLYEAANVLLTRIRRTSTLQAWGLAIAKRAGFKKAKVAVARKLAVILHRMWRDATEFRWENAAARAA

SEQ ID NO: 312526 - protein, 347 aa, unidentified
MKKIIIGIDISKEKIDASAIDVRNSQLGVLKLDYQAFENRPMGFRRMLVWAKHLIKGVTLEEVMFCCETTGGYDRCLCDYLFAKGLDIWRESSLQIKKSIGLRKGKDDKADSLTIAEYAMRHMDKAVYYVSPSETVRELKALLLYRRKLEQEKTSKKVRVAELKATAAKSKSVSFILRDAQKSIRALEKSIKECEKQILALYDRDEELKRSYDHLTSIKGISIVNATAMIAYTNNFKNITTSRKLASYYGIAPFREKSGTSVDKKAQVKCYSNSMLRAYLTQAAQWTIKEHGIYRDYYLRMSARGKCHGIIINNIKNKLLHLSVSLIANDMDYEENHEFLRVQRMAQ

SEQ ID NO: 312527 - protein, 433 aa, unidentified
MKVKYEDRLKQKMLVITTDTLVVGVDIAKRYHWARFVDYRGFEQSNALKFENNSNGFKTILTRIKEICKQEKLSKVVVGLEPTGHYWKAFANRLTKQNGITVVLVNPYATKQAKELDDNSQTKSDKKDALTIAKLVKDGRYFELYMPDDIYAELRGLATTRTSLNKRKTALKNTIAAVMDEFFPEFEEVFKHPLLGKASRHILKICPFPKFILELGEDGVTEEIKKSVKKTVGTKKAKQLVEVAKESIGVDYGLQAARFKLRLLLDELELLEKQTEELEEHMASALQKIDYAKYLLSIKGIGVVSLATCLGELGDPNRFDNPRQMSRMAGYNLIEDSSGINKSGTKISKRGRKNLRGILYQIALTMVATNPEMKQLYKYLKTRETNPLKKKQALVVISKKVLTLIHTLARKKENYNPDKVFGHVRREQFKEAA

SEQ ID NO: 312528 - protein, 424 aa, unidentified
MTDTFSFFVGVDLGAERHAVVVLNAAAEILGRRYFAHNGAEVLELFSWLAKLTDQASPQQIAIAAETPRGSILESALERGHPAFSINPKQLDRFRDRFSMAGAKDDHRDAFVLASSLRTDQHCFRRLQLGDPRLVLLRELSRSQEQLQQNLRRACNQLWSLLQRYFPALLQLSPAADDPWLWSLLQAGPRPATAARLKLPRLEKILAQHRVRRFSASELKALLEQPPLPMAPGAAEALAEPVLLLLPHLELLHKQLAQLSARIDKLIDQLQQDTSFTEHRDIEILRAFPGLGRVFTATVLAEAYLPLVERDYHALRALSGVAPVTRQSGKTELVLLRRACNHRVQHAIFHSANVFVQKDPRAKLQYRRLRAKGKTHARALRGVADRMLNLLFALLKSQSCYDPERRTVPTEPEGTPPPKKTLDK

SEQ ID NO: 312529 - protein, 368 aa, unidentified
MKQYTLKAAPAAEAKEIKNQKAPKAKRILVGLDTGLGTNQACRKVDNAAIGPVQNLRSETEVALYIEHQLELADEVVVVYEAGPFGYGLYRKLTARGAKCLVCAPDSTQQKRKRRKNNPIDSRTLASNLFNYLNGNEAALQLVRVPTPEQEQARLVSRQQDQLVEERKRLGAMGNALLLSQGFGSWKNWWRPKAFNSLKRVVPGWLLEMLGSWVDLLKVLDEKIQKAKAAQAKGWNGPRPKGAGANSLVQLQSHVLDWNLYPNRRKIACLAGMVPSEWSTGKSQRLGSITKVGVPAIRRIITEMVWRIILFQPHYRPVQKWQEVLRGTNKTLKKKAVVAIGRQLIVDLWRLQTGRLSAQELNLVLIGG

SEQ ID NO: 312530 - protein, 407 aa, unidentified
MGATTREGYHRCLAKQVMERPMKRNDLSQSLVVFEQHSTLVAVIEMGLKSWLVAGLVPGLVRQPLKRQAADEKLLVKQLYRWRDEAIKADSTIKRIAVAFEAGRDGFWLARWLRAHGIEAHVIHPNSVPVPREHRRAKSDRLDTALLMRAFLGWLRGEAKHCSMVAIPSLAEEDARRPNREHEHLVGERTSIINRMKAALVRLGVRGFNVKLRKAAEQLEKLRTAEGEALPPNTLAELRRDMARLKLVHEQIAAIEKERLARLRRAPRQDAHPMVLLLARVMGIGVETADMLVHEALTRPLRDGGAVGRYAGLTGAPDESGQRRREKGLAKAGNARVRRGMIQLAWRWLMFQKGSALAKWFTARTAHAPREVRKTMVVALARKLLIALWRYVTTGEVPAGARLRPAV

SEQ ID NO: 312531 - protein, 475 aa, unidentified
MGKGSGTTRGDRRRNARRERLRAMLPRDGAVIGIDLAEDKQAIAVVDHDVRVVARKTVRVKAFRLGEALDWAVAQARAKGFPAVAVACEPTGPRWLQVQRLCAERGLPLACIQPLVSHIAREQQDYTTHKSDESDCVMIARLAIELHCYIPEELDEAWAHLRHLGRRRAQLITSATASVQRIRDFLSVAWPTVAETCAYPLESTTWLAAVQVVTSRCGGQPGRLAVMGDEAFTAAVRDAQRGWGGQKAWGTICRRVFAALTDTEGVVVSCRRGLLRRCADELGDLQRTRAQLRQAEADMVAVLGELGLSRLGDIPGLSAVGAAAILAETGDPCRYDSSSSLVKHAGLSPSENASGAFAGQAHISRRGRPGLRLAVWRAVWPMLQYNPVMAAKYAAMTRAAGAAADAAAAADAGSRQASAATAAARAQRARARVACAASLLRWIYSMVIHDTSWDPAAAAGTAAARHAPRCQPEAA

SEQ ID NO: 312532 - protein, 345 aa, unidentified
MKNTIVGVDLAKKVIQVCVVQANQIVSNDEMSCSQLTSWLAMAKPAVIVFESCATSNYWKQVAKEKGHDARIISAKLVSQIRQNQKTDKNDALAIVQASQLVDIKFINGKTFEQQELQSIMRMRELTVKHKVALRNQIEALLLEFNIRVSSRSGGLGGTIQGVLEDAENGFCLPFRQALNTSWNRYVQIIEDIAEKDKLLAQAIQLHPECEKLLALEGVSTINAVNLYIAIGCEEAGTFKTGRDASACIGLTPLQHSSGGKTKLGSIGKSMKNIALRSYLVNGAMSVIHAVNRREPRTKKEKWLKQLLERKSKKCAAVALANKTVRTAFALLTQGTEYKAEPLVV

SEQ ID NO: 312533 - protein, 266 aa, unidentified
MKYYAGLDVSMEETAICVVNQEGDILFEDMRPSEPKYIAKYLKETELEISVVGLETGSITRWLATELKKLDVNAIAIDARRMAAYLNITINKNDPNDARGIAQAVRSKMYREVYVKSDEAAQINVLLGTRDTLVKQRTQTILTIRGHLKSVGIRPGPFSHENACERLEPVLKKVPSLLRSCGLVLLDVLNVLNAKIAELEQVLKNDVKESEQVKLLKTIPGVGPLVSTAFVNEMEDPTRFTDSRSVPAYFGLTPRLYESGDTHIMG

SEQ ID NO: 312534 - protein, 361 aa, unidentified
MPTQMNNLNFKGQNIYAGFDVHLKSWKVTILSQEMMLKSFTMPPKPEVLSDYLQKNYPGANYHSAYEAGFSGLWAHYQLLELGINNIVVNPADIPGTQKDKLQKEDKRDSRKIAYALRSGSLNPIFTPSESTLNDRSLIRSRKMIVNDMTRFKNRIKGLLHFYGIEYPEEFTSSRTHWSKRFITWLESIHMKEPSGKTALLHLISEARFHKELLKTVLLDITLLSKTDKYKERVVLLRSVPGIALITAMTILTEIEDINRFPNAERFASFIGLIPMTSSSGEKQKVGEITFRAHDFLRSIIIEASWIAIGRDPALLMAYQHLSKRMESNKAIVRIAKKLANRIYTVLKYKKTYEFGKTDNL

SEQ ID NO: 312535 - protein, 346 aa, unidentified
MEHYVGLDVSLKLTAICIIDRTGKIEREGVVASDPEAIAAFIKLHAPHVVRIGLETGATSTWLWTELNKMGLPVICIDARHAKAALKMQINKSDRNDAVGIARIMQCGWYKEVRVKDLDSHATKALLVSRALLVKIKRDIENQIRGLLKNLGLVIGRAKMNTFAARAAELAGDRPELAVAVDPLLKAREAVEQQIVDLHRKVLRLARNNAQVRRFMTAPGVGPVTALCFLATIDDPARFKRSRSVGAYAGLTTRRYASGEIDWTGRISKCGDKMLRSYLYEAANVLLTRVAKWSALKAWGVRLAKRSGLRKAKVAVARKLAVILHRMWIEGTEFKWSSKEAANQPA

SEQ ID NO: 312536 - protein, 344 aa, unidentified
MKINLLGIDLAKNVFQLCALNQANKILFNRSIRRAHLRSSIARLEPTTIAMEACSSAHYWGRAFEGMGHQVVLVPAQHVTPFVRGGKNDARDALAICEAAQRPNLHRVPIKTIEQQDIQLLHRLRQRQVQHSTALANQIRSLGREYGVIFPSGIKSLISQVPSVLEDGDNELSAVARHALNDQYQCLRQTRQAMRTFLHQIEQLAAQHPAYYDLQVLPGIGPMTASAYLAAVGNGRQFKRGRQVSAWLGLVPRQYGTGGQIQLKGVTKSGDRYLRTLMIHGARAVITRGLKTRPLLAQWVQPIIDRQGFNKGVVALANKLARISWVILTTGEPFDMKQAFKPAK

SEQ ID NO: 312537 - protein, 353 aa, unidentified
MIVIGVDPHKSTHTATALDPATNSDVGSLRIEASVAEYQRLIGWAKAWPDRTWAIENADGLGHHLALWLLARGEVVLDIPTTATARVRELSRGGRRKNDRIDAAAAASVAALQGDARQVHPETAADSLALLDERRVNLSHSRTRTVNQLHALLRDLMAGGAPTSLTPVSAAAALRGFRPRTGPDRIRVELAKDLIADVRRFDEQLKANAAKLAALLDEHGTRLREIDGVGPVLAARLLGRTGSPGRFVSAAAYANYTGTAPVQIASADSTRHRLSRYGDRQLNSAIYTIAMIQIRMPASAGRAYYDKKIAEGKSPRYATRALKRHLAGHLWRTMIADETRTARTTSEAVAHAS

SEQ ID NO: 312538 - protein, 389 aa, unidentified
MKIFVGIDLAKLNHFAAAISSDGEILIEPFKFTNDADGFQLLVSKLESFDKNSIIIGLESTAHYGDNLVRYLVAEFYQVCVLNPIKTCQMRKNNVRKTKTDKVDTFVIAKTLMMQDDLRFITFFDLDMMDLKALGRFRQKTIKQRTRLKIQLTTYVDQVFPEIQYFFKSGLHQNAVYALLKEAPSPKEIASMHMTHLANLLKVNSHGHFTKEQAKELRVLAQKSVGANDSAISIQITQTIQQIELLDSQLEKIEAEMTDIMKFNDSVIMTIPGIGYINGGMILGEIGDIHRFSNPNKLLAFAGLDPSVYQSGNFQAKTTRMSKRGSRVLRYALVNAAWNVVRNNATFKAYYDAKRAEGRSHYNALGHCAGKLVRVIWKMLTDKVEFNLE

SEQ ID NO: 312539 - protein, 317 aa, unidentified
MSKSFIGIDVSKNSLDVHILPESMSLSYRYETKPMKALIKKLKTYAPELVVLEATGGYEITIGIALADAGLPVAIVNPRQVRDYARALGILAKTDKIDAYVIARFAQDVKPEARGQLTFKELELKSLVVRRQQLVEMRSAEVNRLSRTTVPQVKNGIEKLIRVLDAQIKAIDDDLNDEIKKNPTWSQKLELITSFTGVGDHTAHTLLFGLPELGTLNRQEIAALVGVAPFNRDSGMLRGKRTISGGRANIRKALHMPTLSAATRWNNDMMAFYQRLIARGKKHKVALTACMRKLLITLNAMVKNNELYNPKFKGVRA

SEQ ID NO: 312540 - protein, 412 aa, unidentified
MQDILTCAMGLDIHRDVIVACLAKGELGTDPEIEIRSFSTLIPEMRKLRDWVLEAECRYVAMESTGIYWQPIYEMLEPCFDGQINILVVNARHMKNVPGRKTDMRDAQWIATLLRAGLLKGSFIPDKTFRELRHLTRYRKSIVRDITAQKNRIDKFLQSSGFRFTAFLSDAFGASGRNIIRHLMEYGNISREALDRCLKTQTRKRIDEILIALNGSLSEHQRGFLRMIFGHLEALEQHRHTVEDAITKEITKHEEALRLLCSIPGIDVTAAAAIIAEIGTDMSAFPDSQHICSWAGLSPGNNESAGKRKSAHINKGNPYLKSMLCEVGWVISGKRSLYLSGWYWRIKQRKGAKRATIALARKLLALIYTMLKTGSPYNEDCFEIRRKQSERKRTSRMVNELQKLGYFVVAPG

SEQ ID NO: 312541 - protein, 457 aa, unidentified
MAQRKLGASLRRKSAPATLCLTYPNAAGIDIGSSSHYVAVPADRDDEPVREFRSFTADLNRLADWLQACGVDTVAMESTGVYWIPLFELLEARGIKVFLVNARHVKNVAGRKSDVLDCQWLQQLMSYGLLQGAYRPADEIVVLRSYVRQRSMLQRSQARHVQHMQKALAQMNIQLATVISDVVGVTGMNILRAILAGERDGHRLAQLRDKRIRASKQEIALSLQGNWRQEHLFALKQAVALYDFYDAELAECEAAIEAQLQRLEKHEQQPQPATKRGPTHNAPKFDLRTRLFKMCGVDLTRIDGINVTTALTVIAEVGTNLSRFPTVKQFTAWLCLCPGTKISGNKVLSGKTHRCANKAAHALKLAVTSLRSSKSALGAYYRRLCARMDKAKAVTAAAHKLARLIYAMLTKGEEYVDVGQQYYEERYRERVLRQMGQRAAKLGMTLVPAAPTCQGAT

SEQ ID NO: 312542 - protein, 322 aa, unidentified
MSIYTDYFGIDISKETFDVVNKKGKHYQFLNDNRGFAKFNKIITDGSICVMEVTGIYHLRLAKFLYSKNIATAVVNPLRIKRFSQMLLRRNKTDKADARMICLYAQDQQVDLWKPAPKVIEQSKDIYQTMEQYIEFKAGLKNKLDALKVKKAASFLIDSVTNQIKVISESIDALQNELDSLVKIYNPVMLQNITSIVGIGQRTASLLIIATEGFQHFDSAKQVSSYFGLAPTETTSGTTINGSRQITKMGNPLVRKKLYMCSLQASRYNLSCVNLYQRLLAKGKPKKLALIAVANKLLKIVFAIAKSGLPYDRLYKSYMTIV

SEQ ID NO: 312543 - protein, 378 aa, unidentified
MRFYNRVHRFYCGVDLHARTMYLCILDHGGAIVFHREVPAEPGALLEAIAPFREGLVVACECLFRWYWLADLCQAENIAFVLGHALYMKAIHGGKAADDKIDSSKIAHLLRGGNLPIAYAYPKGLRETRDLLRRRMYLVHKRAEVVAHVVNANSQYNLPPFGKKLIYARNRQVLKIAQRFADASVRKNIELDLALLDSLDELIGDVELYLDRTVKVDDADSFYRLRSIPGVGKILALVLFYEIHDIGRFASEGEFLSYARLVRPLKTSAGKVKGGGGAKIGNAHLKWAFSEAACLLARESGQAKRFLARKEKQHGKPKALGILAARLGRAVYHMLRQKRAFDAKRFWNGEPKVPPTPKGKSVMTPGRRRKGARCVLEA

SEQ ID NO: 312544 - protein, 320 aa, unidentified
MASRESLFIGIDVSKQTLDVAFGADPHAPRETIPSTDEGVQLLVTRLQRLQPTLIVLEATGGLERMVFAQLLQAGVPTARVQPRRVRALAHAEGRQAKTDRLDARLLARFAERVRPPHHQATDEQRASLRDLLVRREQLIQMRTAEINRLTAAAPNLRPGIQKHIDWLDQEIRALEQERDNEAERTDEVRRKRELRESVPGIGAITALNLLLRLPELGTINRKEAAAFVGVAPYANQSGAQHKPRHISGGRRDVRSVLYMATLAATRRRLVRRAFDQRLCQAGKPRKVAIVAAMRKLLTILGAILRQQKPWDPAVHTSAP

SEQ ID NO: 312545 - protein, 441 aa, unidentified
MGCMIVGVDPHKRSVTLEVVDEDGKVAATGRFGTGNRDYRAMLGFVRRQWPDHRWAVEGAQGVGRPLAQRLLADGETVVDVPARLSARVRVFDTGNARKTDPVDAHAVAMAALRAPTLKVLTFDEELVALRLLADRRDELSALRVQTVNRLHRLFAELIPGGAPRNLSATTAKALLAGVRPRTLVGRTTRRMAVEELADLVRVDAKLKALNRELTAAVLARGSHLMDLHGIGPAGAARILADVGDIARFPDRDHFASWTGTAPLDASSGEHIRHRLSRAGNRRINHVLYVAAISQIRQDSEGRRYYRRKLAEAKTSKEALRCLKRRLSNLVYRQLRADVIGSQVDREPARQAGPGGHSGASDGSSAADLHTPVIGSSDQPQPEPAAPTLPDPRRPGTAHAASAHTTPRRSAGAVKVQRPTGRKTLTATTTGAHSTTPKLGS

SEQ ID NO: 312546 - protein, 325 aa, unidentified
MTNETREPVYVGIDVSKDSLEVALADKAASVRFINDEQGVKALLEHLAGHNVAVVLLEATGGLEKRCAHALYLAGMTVVVANPRQAHEFAKSMGYLAKTDGIDARILSHFARTLHGSERFDKLLFKMATPQQEQLQALVTRRSQLVQMRVAESNRLNLAHALSAKSIQAVIKLLDKQIKTLDEDIGNRLKQHFAQKLKLLEGFKGIGEGTKAVLMAALPELGRLNRREISKLVGVAPLNHDSGKMRGKRSVWGGRADVRSALYMAALSAVRFDPTIKAFYERLRAAGKPPKVALVACMRKILSILNAVIKSNTAWEQRCPQASTA

SEQ ID NO: 312547 - protein, 413 aa, unidentified
MWEKKLKFFVGDDWAEAHHDVEVMDPAGRVLVKARLPEGVAGMARLHALLAGQFGDTDPDEVEVVVGIETDRGPWVAALVAAGYQVFAVNPLQASQYRKRHAVSGAKSDAGDAHMLADMVRTDSHQLRTVAGDSAEAEAIKVVTRIHKTMIWERTRTTQRLRHALREYFPAALEAFEDLDAADTLELLAKAPDPAAAARLTIAQISAALKRARRRTIAEKAARIQAALRAEHLAQPAQVTAAYAASTRALVAVLVVLDEQVRGLQGQVEDHFGRHPAAEIVLSQPGLGPIFGARVLAEFGDDPDRYASAKARKNYAGTSPITIASGKKKVALARYVHNDRLIDALTGQAFAALNASPGARAYYDKQRARGADHNPALRQLANRLVGILHGCLKTGTHYNETTAWSHRAETIAA

SEQ ID NO: 312548 - protein, 425 aa, unidentified
MDFKQNQKINQVTENTLVVGIDIAKRKHSACFVDDRGRVLRKSFSVLQSSQGFESFYQRILTAMKEYEKTEVIVGIEPTGHYWLNLAYFLEERGIPLAMTNPMHVKRSKELDDNLPTKHDRKDALVIARLIKDGRFSYPRILKDIEAELRVGSTFRSKLTEELGAVKNMIIRWIDRYFPEFSQVFPSFGKMAMAVLECTPFPADLHKKQPDEVLALYRKVEGLKSPQRPKAIRLIELASDSIGVTEGREMARIEIATLVRRYHQLEQEIESITQHLVELIQTSVEYEWLSTVPGLGDTTIVDLLAEIGSFSHYEDPRQLIKLAGLTLRENSSGQHKGQKRISKRGRRKLRALLFRVMMPMVRHNDAFRRLHEYYTNRKDNPLRKKQSIVVLCGKLLKVLHGISTKHKAFDAQRMMKDIPSLAEAM

SEQ ID NO: 312549 - protein, 369 aa, unidentified
MSDTVTHYIGLDVHKDSISIAAAKANSRAQPTFIGTTQYSPKQIRKALCKVGAPSEMRLCHEAGPCGYGLARELEALGIACDVIAPSRVARQPADRIKTDRRDAVLLARLHRAGELTPVIIPDPNDEAMRDLVRAREDAVNARRRARQQLAAFLLRHGQRYTGGRAWTKRYQLYLSRLKFDNPIHHIVFGEARLALTATDNRVERANQALSDHLENWRWIDTVRGLMTLRGVDLIVATTLVAELGDFRRFARPSALMSYVGLVPSEHSSGNLQRRGQITKTGNQHARRILIECAWNYRFPARVGETIQPRLAGQPQDIIDIAWKAQLRLTKRFRKLKARGVHHNKVCTAVARELLGFVWDIGNRTSPSQ

SEQ ID NO: 312550 - protein, 375 aa, unidentified
MSNHSEAFVAFDTSKLRNAVAIADSGRTGEIRFLGEIENSATATAKLVRKLAGKYERLTFCYEAGPTGYELYRQIKSLGQECLVVAPSLIPKKPGDRVKTNRRDAVSLAKLLRAGELTAVWVPDRHHEAMRDLTRARDTAVDDLRSKRQQISAFLLRKGLHYCAGKKTWSQAHLNWLMSQKFEYPEHRLVFEEMMMAMRQAQERLERLEQAIRAAVADWSLADLVTALMAMRGIDLIAAATFLAEIGDLSRFQSPCELMAYLGLVPSEDSTGDCVKRGPITKAGNRRARRMLVECAWSYQHPPRVGKDKQEKVAAAPRAVREIAWKAQARLNRRYRALIRRGKLKTVAITAVAREFAGFIWAVARAATAARATAK

SEQ ID NO: 312551 - protein, 346 aa, unidentified
MTIVEERTAITAGVDTHSEVHVAAALDPVGGLLGTREFPATAAGYAGLLGWLAKFGDVALAGVEGTGSYGAGLARHLAKRGVRVVEAGRADRQDRRRQGKSDPLDAVSAARAALSGRASGQPKGRDGAVEAIRALMADGRSARHERTQAISQARALILTGPDELRARFAGQRAAALAEAVAALRPRPGDAADYSLRVALRELGRRVEFLDAQVERLDDLIVPLVTARAPGLLSLYGVGPDTAVLLLIAAGDQPERLRSEAAWAHMCAVAPIPASSGKTRRHRLNRGGNREANHALWRIVITRMNAHPATRAYIQRRTAEGLPEKEIIRCLKRYVAREVYPCLRPGA

SEQ ID NO: 312552 - protein, 436 aa, unidentified
MQPLPVLDPKAAGIDVGSEQLHVSIAGDLPKIFGTTTGQLHALRDWLKENGVRSVAMEATGVYWLCAYEVLEVAGLDVLVVNGKHVKNLPGRKTDLKDCQWIATLHAHGLLRSGFVPPEHIRRLQDYLRLRGDHLTLAAGHVQKMQQALERLNVKFHDVISDLTGMSGLKVIRAILAGERDPQRLLALCDAQIQKKKAAAVIESLRGTWKAEHLFALRQAVAGWEFYQQRIVECDEQIGRELRVLAGPEDPQAPAPKATKPGGGNAPQIEGLHGLLWRLCGGKDPTVLPGVADYTLLQLVGEVGTDLSAWKSEKHFTAWLGLAPGSKQSGKRKGNQKRSRNRAGRLFCVIARSVGRSVDKALGGFYRRLKARRGGLVANLALARKLAALFWRLMVHGMRYVEEGLKKYETRVAHTEQWLLQKLARKHGLVLMPKAT

SEQ ID NO: 312553 - protein, 343 aa, unidentified
MKQKYVIGIDVSKSKLDCTAISSTLQIQSETVIANNEKSIQSYLKEMLKVLKVKKEDILICCENTGIYNRPLERICVKSGLNLWVEHALRIKRASTDMRGKSDRKDALRIAEYGVRYNDRAIIYSEPLDHVKQMQILTKSRETLLSQKIAIHNQLREAVSHDRFEYNLLVQSYKKVLKTLEVSIKEIEEKIELLTNEDHDIRRSKELLTSIPGIGNICAVNLIVITNNFQSFRNAKHLACYIGVVPFKNESGGIIKKERVSKMANTKIKKLLHMAAMATIRSDQELKAYFHRKVSQGKNKMSVLNAVKNKLVHRIIAVINRNEHFISKNELTLNEEKNSCILT

SEQ ID NO: 312554 - protein, 341 aa, unidentified
MNQVSTVGLDLAKHLFQLHGADSAGAVVFRKRLRRGQLLAFLATLPPCTVAMEACGSAHYWGREIAKLGHTVKLIAPAYVKPFVKRQKNDMADAEAICEAAQRPTMRFVALKSANQQAAAVVFRTRDLLVRQRTQAINALRGHLAEFGVIASKGLVHTSKLIAALEDPASDLPQAARGILAVLVEELRSLDERVAVLDREIARHAKENAVARRLMTIPGIGAVTAAALTALAPPADTFRRGRDFAAWLGLTPVQRSSGGKERLGKTSKMGERSLRRLLIIGASAVARWAARKGVPAGSWLGRMLARKPPMLVRVALANKMARIVWALLAKGGVYRAPGAAV

SEQ ID NO: 312555 - protein, 347 aa, unidentified
MKFYTTLHKYYCGIDLHAKILYVCILDQQGNKLVHQKIGADPLALLRLLEPYIGDVVVGVECMHCWYWVSDFCQTHEVDFVLGHALYMKAIHGGKAKNDKIDSYKIATLLKGGNFPLAYNYPKEMRATRDLLRRRTGVVRHGASLKAHVVNTDSQYNLPAQSLNLKNVSAREHLRHHYDDEVVQRTIELDMVLLDCYAKELAKVEYFIEKQAKQHHGTYLYIIRSFPGVGQILSLTILYEIGHITRFKSVQNFASYSRLVKCKAESAGKTYGTSGNKIGNGHLKWAFSEAAVLYLRGNDKAKNYLNKLQRRMSKGKALSALAHKIGRCIYFMLRDKTVFDEKKFLKG

SEQ ID NO: 312556 - protein, 386 aa, unidentified
MSSIADYTSVAAIRVDLAAIFISLELSRSKWLVTSLAPGAGEKMSKHILGSGDVPALLSCLANLRRKAEARTGHDYPIIVIQEAGLDGFWIHRVLEAEGMESHVVDPASVATSRRRRRAKTDRLDGEALVRALLAYKRGEPRVCAMVRAPTPEQEDRRRIARERKALTNERVRHINRIKGLLFSQGISGYEPMHLTRRERLEELRTGDGRPLPAHMKAQISRELERLEMLIKQIKEVERERDTMFQEVQSMSPAPTMLRDLKGVGAEFAAVLWTEGLSRSFNNRRQLAAYAGLAPTPWQSGAIDHEQGVSKSGNPRLRTALVQLAWMWVIHQPQSALTLWFKQRVRQNDGRHKKKSIVALARKLLIAIWKYINDGIVIEGAILKSA

SEQ ID NO: 312557 - protein, 311 aa, unidentified
MNDTIGIDISKDTLDTFWLSKRKHKQFANTKTGLRALTSWIREAEVPLVVFEATGIYHRLLETSLAEHDFSFARVNPRLARRFAEGTGTLAKTDRVDAAMLARMGSLLELQADKPRSEMLHNLKGMTTARQALIKDRTAARARLATATHPLLKKQATLRLRQVERDIAQIDAAIETTISVDKTLSQKAEILISIPGIAKVTAFAMLIEMPELGSLSGKQAASLAGLAPISRQSGKWQGKERIQGGRACLRRAIYLPAVVATRFNPDMKAKYHELIAKGKCKKLAITAVMRKLVVMANALLRDGRKWTETRA

SEQ ID NO: 312558 - protein, 368 aa, unidentified
MKKNSIRHQNPSRGEQVRQSITIGMDLGDRTSRYCALDGRGEVREGSVATTPRAMRQKFGSRARCRIAMEVGAHSRWVSRLLRELGHEVFVANARQVRLITHSTRKDDRLDAQTLARLARVDPQLLRPIRHRGEEAQADLTVIRMRAGLLDARTKLVNLVRGTVKGFGERLAKCDADRLGGEHGQALPEPLRETLKPVLEQIESLTERIRQYDVKLEQIARTKYPETELLRQVSGVGILIALTFVLTLEDAARFSRSREVGCYVGLRPKRSESGQRQPQLGISKEGDRYLRKLLVQGAHLIVQRRAPDTDLKRWGLKLAERGGRNAKKRAIVAVARKLAVLLHRLWATAEVYEPLRNSRARERLRTAA

SEQ ID NO: 312559 - protein, 359 aa, unidentified
MDKSSMFFVGLDLGDKFSYITILDQDGEVIEETRLPTTRASFQRKFSALHTCRVAMEVGSHSRWVSYQLKDLGHDVLVANARKLRAIYHNPRKGDRVDAETLARLARLDPRLLSPVHHRSAQAQAHLAVIRSRDALVRSRTSLINHVRGIAKSNGAQLPSCSARCFSVKVEPAVPEALRPALLPVLETIASLTQQIRAYDRQIEQLCQIHYPETKLLSKPSGVGDLTALAYVLTLEEPRRFQKSRQVGPALGLVPKRDQSGDHDPQLRITKTGDSYLRRLLVGSAQYILGPFGPDCDLRRWGLKLAERGGKNAKRRAVVAVARKLAILLHHLWKTGEIYDPFYHASKKVDEPVSVPVSV

SEQ ID NO: 312560 - protein, 300 aa, unidentified
MNNDTTLFIGLDTHKSFTQVALLKDNRGETPISYGRIDTSKSALIKLAQKIQSQFPKATIHFIYEAEPCGYWIYRLLTSLGYHCYIVAPSLIPKKPGDRVKTDKRDAAKLARLFRADELSTIYVPEAEDEAIRDLSRARETAMKDLKDAKLQLKGFFLRNNINTVVKDNWSKKHLRWLTELVLPHHSQQIVLQEMIQIISERMQRLQRLDNELIHQVKNWRYYPVVKAIQAMRGIRLLVALGTIAELGDLRRFDHPRKLMSYLGLVPSENSSGQKRRQGSITKCGNSRARRLLIEGAHLL

SEQ ID NO: 312561 - protein, 349 aa, unidentified
MRDITTVGVDLAKEVFAVCVLDQTGAVVHSKVLKRDAFISWAEQLSPCAVAMEACGSAHYWGRWFAARGHTARLIAAEFVQPFRKSVAAKNDRNDAEAIAIASRQPTMRYVAIKSVEQQSILAWHRMREGWKEERTALLNRLRGLLGEFGIWPDRSSDKLIRALPGLSEDERLPLGVRAMVIETREHLTALHTRLAHCDQEIARHAHTHPGAKRMKEIVGIGTLTASAAAATVVDAKGFRCGRQFAAWLGLVPRQMSSGGKTRLGRISRRGDAYLRSLLVQGAKSALQAALRQPPEKANRLQRWTVDVYGRVGYHKTLVAIANKHARMIWAMLAKDEHYDPGAWQRLSM

SEQ ID NO: 312562 - protein, 363 aa, unidentified
MTMVADAYTHVVGVDTHAATHHYAILETRTGAVLDHRAFPTTTPGLLRATDWITRRTTGNEGNEGNEGNDGNQTDRVLISMEGTRSYGTQAAAVLTESGYRVTDAPSPRRERGQGKNDHIDAVTAARGILGRDIDRLADIRTGHTSGSLQILLTARTCITTERTAKINALHALLRTHDLGVDARRALSRTTITTIAGWRTRSHDDPTQTHARREAIRLATRVLDLDLEARDNLRSLTDLVEAAAPTLLELPGVGPVNAAIVLTAWSHPGRIHSEAAFAKLGGVCPLEISSGNRHEHRLNRTGDRQLNKALYSIANERMKRDPATRAYVERRQRENLTKRRIRRCLKRYIARDLYRHLESLDRT

SEQ ID NO: 312563 - protein, 384 aa, unidentified
MQKPNDLNQSGIVLKQDSTLIAVIEMSLRSWLVAGIVPGVERQPLKKLAVDESALLKLLNRWREEAERAGRRIERITVAFEAGRDGFWLARWLRARGIEAHIIHASSVAVSREHRRAKTDRLDTELLKRAFLGWLRGERDHCKMVAIPTTKDEDAKRPNRERQSLVGEQTRIVNRMKAALIRLGIRGFNPKLKKAAGRLEDLRTPEGEPIPPNTLAELHRDMERRRLVSDQIRQIEEARLERMEQAPGDGPHAMVRLIARVIGVGIETADMLVHEVLSRKLRDRRAVARYAGLTGAPDESGSKRREKGLAKAGNARVRGGMIQLAWRFLLFQKNSALAQWYRTRTEGGRNRKTIIVALARKLLIALWRLVTTGEVPAGVVLRAA

SEQ ID NO: 312564 - protein, 338 aa, unidentified
MKTYAGIDLHSSNNFIGVIDAKDKRLYSKRHNNRIEDVLKVLGQFKASLQGIVVESTYNWYWLVDGLMDQGYTVHLANPNAIKSYDGLKHTDDKWDSFWLAHLLRLGILSEGYIYPKHQRPLRDLLRRRLMFVRQRTSQILSLQSMITRNRGLNFSGAQIKRFRDEFIEKLFSDRHLVFTAQKNMETIRFLDRIASEVEIEVASQIKLKKEFIKLLTTPGIGNILGLTIMLEVGNVGRFAKVGNYSSYCRCVESKKTSNGKKKGENNKKNGNRYLGWAYVEAANHAIRCCPKAQKFFQRKMAKSERVLATKALANKLTKATYYIMRDQVAFDEDKLFG

SEQ ID NO: 312565 - protein, 329 aa, unidentified
MLQQASVVSVGIDVAKAKLDVAMLRSDREATFLTVANNSIGIGELADFLRQQRTAETVPCVMESTGNLHLLSACSLTQDGFTVKVINPLITKRYQRASIRNAKNDRIDAERLATIGTIEKDLPVFSANESAIVSRKLISYLGHLEHTRQQLYSSSKQLSETLQTLGISGKSIQSGAKTMLKTVNKQIALLQKRIIALAPPEAKKLSDNVQGLSETQASVLLGALSDKQFTDKDQLVAFVGLDIMVRKSGTFQGKEKLSKRGNPYLRKVLYQTAWSLKQHNPIFRAYYNRLYREQGKHYTASLIAVARKFLKFLFAYYWKHTITFPQPIT

SEQ ID NO: 312566 - protein, 397 aa, unidentified
MYIVGIDIAKRKHEAAVIDGEGTVIIKPFSFTNNCSGYNRLLAMLTKAKLPLDEVSFAMEATGHYWLALFTRLQKEGFRVQVINPVQTNSIRSFYIRQAKTDPRDALLIAEVIRFGHFSESTLHPENIYELRELCRGRHAIVSMQADIKRKVVALLDQVFPEYETAFTNLFGDTSMAILQACPTPKELSEMPLEEFCHLIEVSSHKRFRTEKAQELQALARNSFGFAMAGDVFSTMIRLYAKHLDFLKQQVREMDRKIAEIMETLDTPITTITGIGPTLGAYILSEIGDISRFSSAAKLAAYAGIDPTMRQSGEYNGVRNRMSKRGSPYLRHAIWLAASSAVLHDPALKLYFQKKRDEGKPYMASVGHACRKMVSIIYAVMRDNKAYTPYIPNEISA

SEQ ID NO: 312567 - protein, 346 aa, unidentified
MIAIGIDVHKGKCTVALQGEDGQLQMLPSIENTREGWRELLGQLPPGAEIALEVSTSGYFAMSVLEEAGWRERAHWVHTAGIDSLRKQKTDRLDARRLARKLSVADRDPLPEAWFPSPEIRELRLRARQRCWLAVLRAQVRNRVQSLLQRHGLRSGRNPFSPAGQAWLAKQTVPAATRESLDQLGRLHAFLQQEVEASESALAEAAKSIPEIARLRSIPGLGRILAAVIWSEIGDLARFASPSALVNYTGLVPSLYESGEVSVHGPITRQGSTWLRWALITGVNAALRGRSPFAQRYRKLKQRKPANVAKTAVARSLARCVYGVLKHECDYQEERWGRKLGSLVEQ

SEQ ID NO: 312568 - protein, 346 aa, unidentified
MKQVNTIGLDLAKNVFQIHGADAEGAPIFNRKLRRAELLVFFEKLPRCLVGLEACGGSHYWAREIAALGHDVRLIPPIYVKPFVKRGKTDAADAEAISEAVTRKTMRFVPIKSADQQAAAMVLRTRALLIRQQTQAINALRGHLSELGVVAALGTAKVAALIEIVRDEEDVCLPKAARLALAEIADQIEALTRQIDKLERGIVGEAKRDEDMRRLTTIPGVGAITAATVKALIPDPDGFKSGRHFAAWLGLTPKPHSSGGKERLGGISKMGNPTLRSLLVCGATSVLRRVKGNDKAPRWLVALLAGRPFKVVAIALANKMARIIWALLTRGGTYRNTGAASGAAHA

SEQ ID NO: 312569 - protein, 312 aa, unidentified
MSHKSAPPTVSTIGIDLGKNSFHLIGLDQRGAIVWQLKCSRAQLERRLVNIPCCLIGMEACSGAHYIARQLAALGHDVRLIPAQYVKPFLKGHKNDYRDAEAIAEAVQRPTMHFVAIKTPEQMDLLALHRVRSRLVGQRTGVINQIRGFLIERGITVRQGVVPLRKALPDILSSNNDALSPRMVNLIAELAQDWRRLDERIAAVSDEIESLAEQDEACQRVMTVPGVGPIISSAVVAAIGNGAGFTQGRDFGAWLGLVPKQESTGDRTILGKILAAAAAFRRRGTQSRSLPLAIDAGFSRGSSTWCPSPSRP

SEQ ID NO: 312570 - protein, 410 aa, unidentified
MHYKQNHVYVGLDLHKETHTAVIIDCWNEKLDTIVIENKPSDFTKLLNKVNKMAGNLTPVFGLEDVHGYGRSLAVFLLDKGQVVKEVNSALSYSERMSYPTTKKSDDWDAYCVASALLRILDKLPDANPQDLYWTIKMMVNRRDAIVKALTTLTNQLHGQLCYHYPSYKKFFNDVNCKTALVFWEKYPSPHHLKGVADEELAKVLRKPSHNSCSTKKAKEILDIVKADGDTIREYQESRDFIVQSIVRDIRFKAEEIKVVEKEMKNLLKLLNYKLETIPGIDTVTAIALVAGIGDIKRFRSADKLARFAGIAPVNFSSAGKGKDKKSKQGNRELYAVFYFLAVQQIQVAKGNNLPRNPVFLEYYKRKISEGKTKIQSLVCVMRRLVNIIFGMMKNKSKYIMPVISLKEAV

SEQ ID NO: 312571 - protein, 411 aa, unidentified
MNPVVGLDVAKGESQVQAFLDKKQPYKKSFKVAHTLEGLASLLDFIREVENVSGGRPPIVLESTGHYHTPVVQFFEDIGYLLIIVNPLISYRAKSSSLRKVKTDVIDARHLCELYYKEDLEPYKQRGIQLLNLRNLTRQHENITGLFVQTKLQFQAILDQMFPEYREVFGDLHSYVSLLTLQTFPTSQKILDTGEETVAKKIKELCKSRSQKWADSQAEKFMAAAAQNPFQKNLYHSLTLSLDMYITMLLEYKKHLSKLEDEIDALAKGIEECKIIQSIPGIGEKIAATIISEIGEIDRFNHPKKLVAFAGIDPSVFESGTFKGTLNRITKRGSSRLRHALYMAVKCAIRDCRKKKTTDEIIPRNKRLREFYDKKREEGKPFKVAVIACANKFLHWIYALLKSKSTFQDLA

SEQ ID NO: 312572 - protein, 320 aa, unidentified
MTRVICGVDVSSVSLAARIGRAGAEASFPNNPEGIFALAGFCCTHEVDLVAMEATGGYERQPFALLAEQHLAVAILNPRAVRRFAEGMGLEKTDAIDAGVIAWFAEVKRSPPQALAPASQQRLRALVTRLRQLTGIRTAQRNQARLIADPAVLASFTELLALIARQMRELETAIAGLIAADPLWRELDQTFRSIKGVAGRTVARLFAEMPEIGTLSNKAISKLAGVAPLANDSGKHQGKRRIRGGRAAVREILFVVASVAGRYEPDFILFQKRLRAAGKPGKVVRIALAHKLLVRLNAKAREVRNRIEATPITGPSSVAA

SEQ ID NO: 312573 - protein, 307 aa, unidentified
MVGIGIDVSKATLDVAVAGQAPVRQFKNTTAGIAQLLKWLAGQPEARVVMEATGGYEEAALDACAHAGIWVARVNPRQARDFAKATGQLAKTDSLDARVLAEMVDVLHARLRRHSPAPAWQAELKAWLVRRRQVIDTLQRSHQQSLTAPKLIRATMKNSVAALRKELAAIDVQMKNISQQHATPALRSAKGLGPVFQTTALAMLPELGQLSRQQIAKLVGVAPLNRDSGQMQGKRMIHGGRATVRIALYMATLSAVRWEPALRDHYQQLRARGKVAKVALVACMRKLLGILNARRRDELRAEGLLMG

SEQ ID NO: 312574 - protein, 296 aa, unidentified
MNLLKQNVGLEVDSKKIKVSFQVMYQDLSIKILGSRTWDNSVKTFDTMKEWIEKKRIEEFDVHLTMEATGVYYENLAYFFNERSSFIVHVLLPNMSNAFRKSLNEKSKTDEIDARLLGQMGLERQLREWEPMSDQMRQLKKLNRERLRLHKEKTMVSNQLHAEQASYDPKKTSIKRFEKRLEFLAKQIEQIEKELRSNVNKDPELKQRIDHACTAKGLGFITVCGVVSELNGFALFTNRGQIVSYTGYDVIKKESGSTVNSPTKISKKGNSYIRQMLYMSAMSAARSDEHHRDYYH

SEQ ID NO: 312575 - protein, 343 aa, unidentified
MSIVILGVDLGKNACSVVGVDAAGAVVMRRSMRRQTLIDFVGKLPACVVAMEACCGAHHLGRLFAAHGHEIRLMSPEYVRPYVKAQKNDDRDAEGIAEAASRPTMRFVELKNQEQLDIQTLHRVRSRLVAERRSLTNQLRAILLERGTIFPVGRRKLELGIDGMLADEDATLSPRLRQLVGELRAEWRELDGRIEALNGEFVELARNDAAARRLTSIPGVGVLNATALIAAVGNASSVAKARDLGAWLGLVPRQHTTGGKPRLLGISKRGNTYLRTLLIHGARAAMPSLARSETPLGRWLTGMIERGVHRNAIVVALANKLAWIAWAALRKEATFERGYPVAA

SEQ ID NO: 312576 - protein, 389 aa, unidentified
MWGGENCESIFSVQNNLGGAKLLSERIVSALSSMRLNDVVIGLEATSIYGNSLVYALREDGSLGRFQRKIHVLNPKQVKKFKESYPDLPKNDFVDAFVIADHLRFGRIAKEVYMDDYRYQALRTLTRARFDVIQNLTREKQRFANYLFLKCSGMAQDKNIPNTSATTIALMEHFETVDDLANADLDELTAFIAKTGRGRFADPDVVAKAIQTAAKGSYRLPKTVNDTVNQAMSVSIASMRALKEQVKVLDKAIEQQFEIIPNTLTSIPGIGMVYSAGIIAEIGDIHRFNSQASVAKFAGLVWHKNQSGGFEAEHSQMIKSGNRYLRYYLLEAANSVRRCDSEFRRYYDLKFKEVNKFQHKRALVLTARKLVRLVFRLLKDNRLYIPPEG

SEQ ID NO: 312577 - protein, 386 aa, unidentified
MIQHTHLTASNGLDYDRTLILAVEVSGRSWVVAAQVPGLRQKSAKQQLAPCADALMAAVEGYKRRAAAAGMAVDRVIVAYESGGSGFWLARWLQQRGVEVHVMQPSSVPVDRRMRRAKSDRIDADRLLRTLLAWLRGEPRVCSMVPVPDEATEDARRPIREREELIRARVAIVNRIEAVLTVLGSGEDNPLRRDCRERLGQLRTALDQPLPPHARAQMERLLDRLDLVCQQVAELEAQRDQAVESEAAGQAERMIQRLARVRGIGVQTATVLVHEAFVRRFRNARALGSYAGLTGTPSSSGGTQREQGISKDGNRRLRATLVELAWMGLRDQPDCALSRWFHDRLGSSRGRLRKVMIVALARKLLIALWRYLQDGAVPQGMELKPA

SEQ ID NO: 312578 - protein, 428 aa, unidentified
MDQVNRNRLEEFRQLRQEIRHSGEYLIVGIDIAKDQHHAFFGTATGKTLLRRLVFSNDYEGFRKLLDQGETLRVRHGLKKVVYGMEPTANYHKPLGEYLITQGRKVVLVCGVTVKQNRESLDGRWDKHDVKDSANVADLISQGKCLYYEYASAKLRGLRGLLSLKRRLKKQEHGYRVRIRNHLIAQYFPEMDRDYERLGAEGLSIVRWCFPPSQMTELDVDPFIERVTSRRVGMEKRRRLEGVWERAGVSIGCDGVPGVEHEAKVMVEGLRQIREIIKETEDKIQELCEQFPEYKYLLTIPGFGPDVSSKVLGAIGEPDRFQNGKQVLKLAGLDLSADRSGKDSAKAVPEISKRGKADLRYALYQAALIASTRNPDFMRYYASKLEGRQKEKGIQTKMWVKLSAKMLLIAWTLMKKKEAFDPAYLTAE

SEQ ID NO: 312579 - protein, 381 aa, unidentified
MKKELLFLGLDVHAKSITIATAESGSGGEVRLYGAIANDLHALEKVFAKLRKAHPGAELRVCYEAGPTGFVLARRLAQLQIDCTVVAPSLIPVRCGERIKTDRRDARKLARLHRAGELSAVHVPDASDEAMRDLCRARTDAVQDLRRGRAQLKAFLLRNGYRYTGKSAWTEAHRRYLRELVLPHAAQRVVLEDAIASIASAGERIARLEEQMGALLESWPMKPVVEAMMGLRGFALVGAMVIVSELGGAWRFEHPRQLMAYLGLVPSENTSSEKRRQGSITKAGNSHARWLLVEAAHHYRLSPKVSKELSARQEGLPEEIKACSWKAQTRLHKRMMQLLARGKRRNKVIVAVARELCGFVWHIFRLMEPRMSPKSTASASA

SEQ ID NO: 312580 - protein, 343 aa, unidentified
MHYIGIDVSVKESALCILDGKGKIVRETKVPTDPEIIACFIADTGLAIERIGLESGCTAAWLFAGLQRHGLPVICIDARHAAAALQAGFRNKNDRNDARGIADLMRVNKYRPVWVKSPQAQRQGRLLTARATLQSQLVALENTIRGLLRQEGIGLTDRRTAFEAAVREVIADDHLLQAAVLPLLETRTAVLQHRAALDRQILRIVRVDPVCRLLMTAPGVGAFVSLAFRVAVDDPRRFSRSRNVGAHFGLTPREYSSGQVSYRGRISKMGDREMRRLLYLAAARILRRDAALWCPLKVWAVRLAQRVGLSKARVALARKLAVVLHAMWSDGQVFQWRRSATSA

SEQ ID NO: 312581 - protein, 359 aa, unidentified
MREQRNKISFRGQKIYVGIDVHLKSWSVTVLSETSVLKKFSQHPSPEALYGFLTRSYPGAEYHSVYEAGFCGFWIHERLTALGIDNIVVNPADVPTKSSEKLRKTDTVDSGKLARSLRANELKGIYTPDSVSLEMRSLIRLKNSITKDTTRQKNRLKSQLRYLGIEIPQEFLTPFSNWSKRFFAWLKEIETLTPSGRQALDIHIRHLEELRRQKLEMTRALRALAKADRFREPQRLIMSVPGFGQATGMAFLSEICDITRFRNAEQLAAYIGMIPMCHSSGEKDGTGDITIRKHAVMRCNLIEAAWVAVRQDPAMNLFYTEQCKRMPKSKAIVKVARKLVNRLFFVLKHQTEYVNSIVS

SEQ ID NO: 312582 - protein, 397 aa, unidentified
MNYIGIDIGKEKHAACGIDDSGRTVFGAQFFAADAGGYASLTGQLRKLDLPADLLIGMEATGHYGKLLVHRLREDGWTVRVFNPAVIAAVAKGDLRGRKTDKLDAQIIAHALRDGRCSSAQIASSDEEQLKILGRQRTFLVRQRTECKNHLTALLDVLFPELADFFSPNFSPSFLALVGRFPSAVAVAAADLRTLTSLLQAASRGQLGRDDALALKKTAQTSLARTRTNVGEAFAAQQTAQMIQTLNEQIDQVETQMQSCTSLIATYLMSIKGFGHVLPFVIAGEIGNLERFEGPNMAKRLLAFAGCEPRVRESGKWKGHTKMSRRGSTTLRCALYLGANTVRLNTPAFGEVYQRQIARGKSHAVALSHVMRAILNTLCGMHKTKTLYRAPEYRKAG

SEQ ID NO: 312583 - protein, 345 aa, unidentified
MPIVGGLDIHRKQITFDYLDTVTGEVRRGQIAPADREHLRAWLARFAGHGDVAFAVEGCTGWRYVTRELAAAGIAAHLGEPADTAALRGRKRHAKTDKTDSAHLRRLLAEGRLPECWIPPEHILEYRALLETYHDLRREHTAWVQRIHAVFFHQGAPPLSEGMLRTGPGLEALRAAAAAHLSAAGQQQVATALDMLAATEARMGPLRHQLRQAAAHLMGAKVLAERLYGVGPVTGLALTCWLAGAGRFSSSRKAVRFTGLDITVHSSDRKGPPGRLSRQGPPVLRWAVYEAGKTHARAAAPDHGYYAAVKDRSNGKRAALSEARKIVRQACHILAELGDDALTAA

SEQ ID NO: 312584 - protein, 355 aa, unidentified
MRVLYERCCGLDVHKQSITACALTPEGKEIRTFGTLTDDLEELVDWLKEKKVTHVAMESTGVYWKPVYNLLEAEPIEVLVVNAQHIKAVPGRKTDVKDAEWIADLLRHGLLKGSYIPHRAQRELRELVRYRRSLIEERARELNRIQKVLEGANIKLSSVVSDINGMSARLIIRALIEGKDDPAALAQLAKGRLKQKTEELRRALKGVIGPHQRMMLAEQWRHVEYLDEAIARLDREIEERTSPFHEALELIDTIPGVGRQSAEQIVAEIGTDMSRFPTAAHLASWAGMAPGNHESAGKRLSGRTRKGNKKLRSCLVECAPVPPPERRTRTYRPSIIGSPNEEERIERVSRSGERF

SEQ ID NO: 312585 - protein, 343 aa, unidentified
MKLSRVGIDLAKNVYQLHGVDRHGEAVWKRRLRRGQWLQALLDKAEPGCEIGMEACTGAHHWARELQSRGYTVRLIAPQFVKPYVKSNKNDANDAEAICEAMSRPNMRFVTVKSVEQQDIQATHRVRTELKDQRNAKANQIRGLVAEYGLVTPKTLLALRRAIPCWLEDADNGLTDYFRSLLHGLWGDLVALDDRMSELDKQIKTLADSSEVAQRLQQLRGVGPLVATALIATVGTGEQYCKGKQMAAALGLTPKQCSSGDKQRLLGISKRGDVYLRTMLIHGARAVVSQAKHRDDRLSQWVTSISKRSHPNVAAVALANKTARMAWAMLRNDANYDPDFAIG

SEQ ID NO: 312586 - protein, 410 aa, unidentified
MEVVHAHCAGLDVHKDTVVACVRHMTDGKVTTTIKTFNTATQELLALSDWLSAENATHIAMEATGVYWKPVWNILSDGEFELVLGNAAHIKNVPGRKTDVKDAAWLADLMAHGLVSGSFVPDQTTQEMRDLLRTRKQLVRERTSHTQRIQKTLECANIKLDSVVSNVVGVSGRRMLEALIAGQTDPQELAAMAHGRLQATAAELEAALRGRVTAHHRFMLKLHLDQIDSFDEAIARIDKEVKDNDKNFCAAVELLKSVPGVGSLAAEVIVSEIGIEMNRFATAGHLVSWAGLCPKNDESAGKRRSNRLKAGAPWLKTTLVQCAWAAARSKGTYLHAQYVRIRARRGNQKAICAVAASILTTVYHMLKDGTFYEDPGPDYFDKRNKDQQANKLVNRLQSLGFNVTIQPAAA

SEQ ID NO: 312587 - protein, 366 aa, unidentified
MEHIAIDLGARESQVCVRRADGEIVEERRIATRPWVVRRYLAGRAKSRVIVETGSEAFWVAQIAIDCGHEVRVVPSMLAPSLGVGQRRLKSDQRDARLLSESSCRMDLPSVHIPAVETRQLQSRLTMREALVRSRTKLVNTVKAYLRTVGERAPMRYGEKWITNLREKLAHAAAEVTPILDVLEALDRSIEQFDHELEELSNANALVQRWQTVPGVGVVTSLRYLATLDTADRFHNGAAVGSYLELVPSEHSSGQSQRRGAITKAGSPAMRGVLVQAAWAGLRSRCHHNDPLMRWTRQVAGRRGKKIAAVALARKLSGILFALWRDGTTYDPRRAATELSELPAPPRRPAPSKGPRRPLRLEPATI

SEQ ID NO: 312588 - protein, 402 aa, unidentified
MNMNAVGIDVSKGKSTVAVLRPFGEVVASPFDVIHNDSDLKQLVDLIKTLPGESKVVMECTGTYFEPIAQFLHNNGIFVSVVNALLVHDYGGNSLRKVKTDKKDALKLASYTLDRWTELEEYVPADEQRKTLKILNRQYNQSNKIQTMMKNNLISLTDSVFPGINKLFTSPERQSDGHEKWVDFLNAFPHKDCIAGLYLSVFKTKYKSWCKKNKYNYSDSKAEEIHTFAKSIIAVLPLNYSVKLLVTQAVMQLNTILETVSSIRKEMDRIASSLPEYKTVMAMYGVGKVYGPQLMAEIGDTRRFRNRRAITAFAGLDAPPYQSGQLDITSRHISKRGSAALRKVLFQITQVFILNKPENEPVYQFIDKKRSEGKHYYSYRIAAANKFLRIYYAKVNQTLKLL

SEQ ID NO: 312589 - protein, 405 aa, unidentified
MSVSMGIDWSEKKHDVTFLNEAGQIISQLTLSHSPEGLLKLEQTRQALGVCPAECLVGLETAHNLIIDWLWSRGYRQIYVIAPTVVKSSRGRYNQSGARTDRHDSRLNADLVRTDRPRLYPWRPDELLTRQIGAKVREINDLTKTIVARSNRLRAILVRYYPAALSVFSSLSSQIALEFVRTYPTPAAAADLSWSQFEAFALAQGYPHPKQLPDCYLRLQQAQLAATPETVLIYQAEVPWLAEELLRWVQHKTQALRQLRQLFGQHPDQAIFASLPGLGELLAPALLAKFGDDRQRFPSPASLQALAGTCPVTDQSGQRRLIKFRRGCDHEFRQICQQWARHSLETSLWAKAYWQQIRPHCQSDQHAYRCLANRWLAVAWKLWQTGQTYDQTYHLQQRMIRAKAR

SEQ ID NO: 312590 - protein, 414 aa, unidentified
MSLARRVGRAIGLDVHRDFCVVAICEDGRVRTAGRVPSTPDGLRMLAESLVKSDRMALEVTGSCWEVARILEPYVDRVVVVSPDDTGITRARAKTDRLDARTLARLLWSGELESVWMPDERCRVLRRRLARREQLVRSRSRAKNEIQAVLQRRLQGKPPCSDLFGVKGRQWLAGLELPPEERESVDAGIRHIDFLDSEIAAVERLIAQQALGWPEIRRLMTVPGVNLVCAATFIAAVGDPRRFLTSRKLVAYLGLDPKVRQSGDAPARSGRISKRGSAAARWALVEAAWSVVLQPGPLHAFYDRTRARRGHGKAIVATARKLAILFWCMLTRGEDYAHQQPSLTKKKLRRLEITAGAPRYAKTARGVWSSNVAIRQAERQLAAQAEASYRRMLKDRQAAAAARKVGASVTAEHA

SEQ ID NO: 312591 - protein, 277 aa, unidentified
MDKTGMAHEVIRFVGMDIHRSYATVAAVDGNQQVVLTARRIDYEHFDEWMRKNLRPSDAVTLESTGNAWYFHDLLAPLVASVTVANPIQVALIAKARVKTDPRDALTLARLLAARMLPSVWVPPTEVRELRALVAHRHRLVKQRTQVRNRLRAVLIRHNLVAPASEIFGSGQRAWWEGLDLPTSEKLRVRHDLSILDSLEPLVKEVEAELARQSNLAPWEDLAAFLLQLPGIGVPSAMQLLAAIGDINRFPTPHQLVGYAGLGAGVHSSGQEHYGGG

SEQ ID NO: 312592 - protein, 365 aa, unidentified
MKKISTAAAPKIEKVEGQKLTIGLDLGDRSSWYCVLDEGGEVLLERKLATTPKAMKEVFGGMPRSRIALETGMHSPWVSRLLSELEHEVIVAHARNVRLIGESRRKDDRFDARTLARLARIDPDLLGPVQHRSRKAQVDLTVIRARAGLVRARTSLINTARGLTKSYGERLRRCSPRKVSRELAEGLSPELQGALQPLLEEIESLSERIGEYNERVQQIAQESYPEVARLEQVKGVGTLIALTYVLTLEDPRRFRKSRDVGCYLGLRPGRRNSGQSEPQLHISKEGDPYLRTMMVQSAHHILGPFGADSDLRRWGLKLAERGGKNAKKRAVVAVARKLSILLHRLWVSGEAYEPLRNQRVLTAAA

SEQ ID NO: 312593 - protein, 423 aa, unidentified
MAVVEEQLLHARCAGVDLSKKDAKVCVRIVPEGQKRAQVKRSTWGSTIPQIRDLRDHLVAQQVTCVVLEATSSYWKPFYQVLEDAEFEVILVNPQHVKSMRGRKSDMADANHLARLGALGLLRPSFVPPREFRALRLLTRRRLKVTQSRTREISRLEKLLEDAGIKITSESSATLNASVRDILDAICAGVADPGALADLSRLKTTRQRLIDALSGTVEAWHVQMIRSHLRMIDFHTEELDKLDEQIAELAAPYQEQLELLRTIPGIGPRLAVDILAEIGPDMDVFPTAANLASWCGVAPGSNQSAGVIKSTRCRKGDHHAKRVLQIAANNAVRKPGTFYHSRYQRLVRRMGKVKAQTAIARCIAVAIWHMLTNGEPYKDLGGAHHDNRNKAGLIAWHQARLNELIADQDANPPPPQDHHTPAA

SEQ ID NO: 312594 - protein, 390 aa, unidentified
MLYIGVDISKYKHDCIVIDDAGVVIRNVFSFDNSRTGFDQFMEMYRSLDPKEIKKIGFEATGHYQDNFKVYLERSGIEFMQLNSLLVHKFKNSQTLRGVKTDKTDARLIANYLSSIEFKPYPKISYHTLALRSLCKRHFNLINERTKYLIRITNFLDRTFPEFKEFIKGNIKSKTCMYILHNYGIPNKIMNVNIQSYENLKKESHGHFSVAKFDKLKELAKNTIGFSYETDLFEIRSLLRVYDTLQDEISLVENEITTIMSKINSHIPSILGIGMVSAASIIAEIEDITRFDNPNKLLAFAGLDPRIYQSGTQEFKGRMNKKGSVVLRRVLMNCAESILMYNPAFYTYYRKKRDEGKTHRVAISHVARKLVRIIYKLETEHIDFDLSFVK

SEQ ID NO: 312595 - protein, 346 aa, unidentified
MTVYCGVDFHARQQTVCYCDTTDGALHLSELEHEGDHVRGFYSRFTGEVIVGIEASGYSTWFVELLEGLGHRVLIGDAAEVRRLAKRRQKNDRRDAGLILDLLLRDEFPQVHRPPFESREVLRLLRHRHKLVQIRTRAKNGLQALAFSAGSSGRSRLLSRAGRAQSLQLEMSEAMGRQREEWLSLVDDLSRRIKSLDAWLDERAKHDERVLRLQTHPGIGLLTSLALVHALEPVSRFAGGRKVAAYVGLDPMEYSSGEKQRFGSISKGGSRLLRYLLVEAARITVRRDEESKRFYQRLLGRRGSQKARVAVARKLLIRGYIFLRDGVDYAEFIRRGVEARPARAAT

SEQ ID NO: 312596 - protein, 338 aa, unidentified
MKSWSVAILSEHSVLKRFSQSPEPELLHKYLVSNYPGANYFSVYEAGFCGFWIHESLTDLGITNIVVNPADVPTMSKEKLRKTDAVDCNKLARELRSGSLEGIYVPGTATLELRSLIRMRTLIVKDSTRAKNRIKSLLHFHGVKIPEEFIRCSSHCWSKRFLRWLHNLELSTEYGKKTLELHLEQFIRLRKMLLQETRAIREISRKAPFAKPIRLLSSVPGIGITTAATLMVEIDDIVRFNSAEHLASFIDLVPMCHSSGDNDAVSNMTIRRHFMLRWLLVESAWTAIRIDPAMTMAYTEYRKRMNPQKAIVKIARRLVNRVYFGLKYEKEYVSCIVK

SEQ ID NO: 312597 - protein, 421 aa, unidentified
MSENQRVVGFDCGEDEHSAVLLDAAGEFEERFSVANERGKIQELLAELLLAVRPGERLVVVVESKRSHGRVVSDVAVELGCDLRQVNTVALNHFRDLEGQPRKNDEWDAYLAAPMVFLRMGGCRKATEVTEEERALSRLTRTHRRLVDERRKHLARLRAVLLELAPEMLHSSWEGPQPGRKAMLYLLERWPGFEGLERAQLRSIEKILLRCRYGSRATRVAKLIREMARGISIADEERQAFTLELDLLVRQIRFCDESKDRLRTEIVQRVEHHPIGQKLLGMDGNGPVITGVLVSELLPVARVSSEPKSATYAGVTPLSRKSGKSLDSDKLTQGVNQRVLNALYTSSVVAIKHSAIDRAYYQKKLRGYIGHPKPHVAAFIALSRQRHKLVYKLMTTDAQYDKEVLMAAHLARLEQKQMAAA

SEQ ID NO: 312598 - protein, 341 aa, unidentified
MSIITVGIDLAKNVFAVHGVDDNGKSALVKPKVSREHLLPLIAQLPPCVIGMEACSGAHHWARLFRQHGHSVKLMAPKFVTPYRMGGKRGKNDAADAAAICEAVTRPNMRFVPIKEEHQQIILCLHRTRQGFVEERTATYNRLRGLIAEFGIVLPQKVANLHRHIGARLEDLPGFANQCVGDLLSHADQLDVRIAEYDRLIAKAAREDARSKRLMQHPGIGPVTASALLASIGSGHDFKNGRQVAAWIGLTPGQHSSGGKDRLGRITKAGDHYLRTLLVLGARTILNTLGDKQDHFSRWARNLVVRRGYGRAAVAIAAKNARLAWAVLRYGEDFRLSPSAA

SEQ ID NO: 312599 - protein, 418 aa, unidentified
MDRMFEVAAGIDVHRDKLVVAVRRRHIGTKDSLETRTFETFHDGITAMTTWLQEQRVQVVGLESTGVYWHPVVRAIQQLVPSAMVWLVNPAQVRKVPGRKTDVTDSQWLSKLVMYGLVSPSFLASPELQELRKLTRHRTKLTADQTRYKNRILKHLESDGIKLATVCSDVLGKTGRSLLDAMLKREVLDEAAIDKIAHGNLRKKIPDLLRAVHCPLTPCTVVVLNQLLRRLDDLTTDISQLESEIRRLVSPMAADVQRLIQVPGIDDVASAAILAEIGADMSVFPSAKHVGSWGGLSPGSEESAGKSKKAPTRKGNKYFRTILVQVAISASKTKGTFWQRKFARLARLGPKKAAVALARSLAGVVYHLLKDRVDYREPDTVLPPPHRIRTRVAALTRQIEALGFKVALTATPAHDAIS

SEQ ID NO: 312600 - protein, 466 aa, unidentified
MLNQQVALREMLVDAAWSNSPLCVNRAPAKKHLRWGPPRIPELHVIAWTRFPSACPITKLHVMNNESNSPGCVIGLDIHPDSFTAGLLRGSNARDAIVEKVFDKVPMRRLLAWADKQLGPEDLIVMEAQGNSFATQRKLEAGGHKALVLESAQIGKLKEAFANNDKISAVRIARAYLGGKAKTVWVPDLITQDRRDWFHAHRKAVAQTTRVRNRICSYLSDNGVRLKPKTPLIKPGAAEEVLRAARQWSPSQWQVIEGLLMELRNAEALRKHWRSLIAQEVASDPMLLSLVRLCGIRERVAFALGAILGDIRRFKSPASLVKYIGLNPAFDQSGSGEWKGGIGGHGRRDLRGLLTESAQSLLRSKHPLAQWARKLRARKGEIKLVVAAVARKLAVAVWYLMMGRWTPQEEVDGRLSQKIGSITLAILPEALNQRGWTRRGLRKDMEERLKTGRIYHLWTRADHANA

SEQ ID NO: 312601 - protein, 327 aa, unidentified
MQHDSTQRDPIPSTVVGIDVAKATLDCYFDPSGQRLQLTNDDTGIAELLTHLRKLNVQLVVIEATGRMHRYVASELLQCHISVALVNPQRAREYARSTGKLEKTDRVDAEVLARFGRGAEHQILRKQSEKQVELGDLVSRRRALVQMRVAEKNRLAESQQPKLAKTQAKQLLRLIDQQIQDIDRAIAKLIDGDDDWKRKSDIITSVPGVSTGTANQLLADLPELGDLSRQRIAKLSGLAPLANDSGPRRGQRSIRGGRQPVRNALYMAAFNTIKYCERFKRFAKRLSDAGKPFKVIVTATMRKLLVTLNQMIKTNDFYNPSFIESLS

SEQ ID NO: 312602 - protein, 412 aa, unidentified
MQIVYERCAGLDVHKKSVMACLITPAANGERRKERRTFSTMTADLVRLRDWLTEQQCSQVAMESTGVFWRPIFNILEGHLEVMVVNAQHIKAVPGRKTDIKDAEWIADLLQHGLLRPSFIPPAWQRIVRELTRSRVSLSEERSRVIARLQKGLEDANIKLASVASDLMGKSAQQMLHALLEGELTPEAMAEFARGRMRPKREQLVQALTGHLQAHHRFLLAEHLKHLSELQEAIARLSTEIAERLRPYEELLVRLETIPGVKRRLAEIILAEIGPDMQRFPSAQHLASWAGMCPGNHESGGKRLSGKTRKGSQWLRTALVEAAHAASHGKNAYLSAQYHRLAFRRGKKRAAVALAHTLLIIVYHLLAQEEKYQDLGGTYFDELDREKKEQRLVRQLEKLGFEVSLTPAVSQA

SEQ ID NO: 312603 - protein, 425 aa, unidentified
MNETTPFACTIGLDWADQKHDLWICPAGSSKSEHLRLDQTPEALHEWVAKLRARFDNQPVAIGIETSRGPVISGLLAYDFISLFPVNPKALKDYRAAFSVSGAKDDRTDAMLLEEWVRLHRDKLKALEPDTELTRKLAGLVENRRRLVDERTRIVNQLHSALKTYYPLAESLLEGQMTKPMATEFLIRWPDLEVLQKTSAQTLRAFFYKHNSRSAPLIEQRLQALQQAKALTTDPAIVEPARVLVSALAGMLRPLHKAVSHMDQQIQHAMDQHPDAALVRSWPGAGPALAPRLLVAFGTNRERFGSATEVAQFYGIAPVVQQSGSAKTVHMRHRCPKFGRQTFHENAACALKKEPWAKCFYEEHKTKHDDKHHQACRALAFKLVRIYFRCWKDRKPYQPERYLLALQKHGSPLHKSLAPQPAKAL

SEQ ID NO: 312604 - protein, 320 aa, unidentified
MSDCAVETFAGIDVSKDHLDVSLAPSASGLLGRWTYDEDGLASLVQALRARHPTLIVMEASGGLERRLSCELAAARLPVAVVNPRQVRQFARAQGELAKTDLIDARILCDFARAIRPQARTPKDADARAFADILIRRRQLVEMRVQELQRQHTADTPALRKSLTEHIAWLERRIAKLDDDMGQRLRKSDHWRAKDDLLQSIPGVGPVLSRTALALCPELGQLNRREIAKLIGVAPLARDSGRHHGRRRIWGGRADVRVVLYMATQAAMRHNPSIAAFADRLKAQGKLPKVVITACMRKLLTIMNTILKTGQGWHAPGSTT

SEQ ID NO: 312605 - protein, 343 aa, unidentified
MKSMNYVGLDVHKKSISYCVRQADGTSLREGSIAATRQALDALIRELPQPWTAGMEATMFTGWIYDHLLSRGATVKVGHSAMLKAIAAGKKKNDRLDAGKIADLLRCNYFPECRMAPREIRDRRRVLRYRNLLVRQAVRMKNKVSGLLMEAGVAYNQQKVHGKKYFAELMKEQRKEMPPSLPQLLQLSRSTIETLSGMERQLMTALERDALLASRVERLETIPGVGRVLALTWALEIGEITRFSSVKKAVSYCGLCGGEKSSGGKMERTPISKQRNKHLQTMLIEAANLAPRWNAELALVYEREKQKGNRNRATLAVARKLVAYLMAVDRREKAFGPAAKVAA

SEQ ID NO: 312606 - protein, 397 aa, unidentified
MDPTYAVFCGIDVGKGEHHAVGLDPSGTRLFDKALPNDETKLRTVFDRLAEHGPVLVIVDQPNTIGALPVTVARACGHAVAYLPGLTMRRVADLYPGQAKTDARDAFIIADTARTMPHTLRRVDVGDEALAELGVLVGFDDDLAGEATRISNRIRGLLTGIHPALERVLGPRIAHPAVLEILSRCGGPVGIRKAGKRRLTTLATKHAPRMGTRLAEEILAALDAQSVTVPGSAAAEIVLPKLADSLKEVLQQRKSIAEDVERMLDDHPLSQVLMSMPGVGIRTAARVLLEVGDGSAFASAAHLAAYAGIAPVTHRSGSSIRGEHPARSGNRKLKRALFLSAFAALHDPTSRAYYDRKRAEGKKHNAALICLARRRVDVLHAMLRNGTLYEPRTPAAA

SEQ ID NO: 312607 - protein, 342 aa, unidentified
MKPNFEPGKLFMQCVGIDIAKGTFTACLCMYDFNQGCSTAPVVFNNHKTGFNQFVRWSRKEALKGYPLRYVMEPTGVYYEKLAAHLSKLGLDVCVVLPNKAREFAKYEGILTKTDDMDAYTLGMLGCLDKRLKTWVPPSPIYRELRQMTRFVADINKVKTELRNHLEALAHSEIAEKSIVKHYNKLIEEIDKQLDSNQKAIREKIKQEPGLSERIDRITTINGIGFMTVVTVVAETNGFALIENRKQLARYAGLDVPAHQSGPVDPKRHISKQGNVHIRTALYFPAIVSTQCNPQMKDFYDRLCARNTQSKMIGVTATMRKLLLLIYSLWKSGEKYDPTRDR

SEQ ID NO: 312608 - protein, 347 aa, unidentified
MNITQVGIDLAKSVFQVHGVNSRGKVLLRKQLKRQQMIAFFTQLAPCLIGMEACGGSHHWARRLSALGHSVKLIAPQFVKPYVKTNKNDAADAEAICEAVGRPNMRFVPIKTCDQQALLGLHRARQGFVVARTAQVNQIRGYLAEFGLVIPLSVRALERKLPEFLEDAGNGLSDASRALLARLFEHYRSLDRQVVELEREINAWHREDFASKRLQAIPGVGPLTASALVASVGDARVFRNGRQFAAWLGLVPRQFSTGGKTTLLGISKRGDVYLRTLLIHGARSVLYSLKRCPERAQGWLGRLATRRNPNIAAVALANKNARTIWALLVHGRDYEANYDTARGLAVP

SEQ ID NO: 312609 - protein, 387 aa, unidentified
MGRVIIGMDPHKRSATIEIIDDGEQILIAGRFATDRDGYRSMLKTGRRYPDRIWAVEGCNGIGRHLAQRLVADGETVIDVPAKLSARARVFATGQGRKTDPVDAHSVAVVALRTTGLRQVTVDDSTVALRLLVDRRDELGRARTETISRLHQQLLELIPGGAKQFLSAAQARALLATVRPRDIVGRTRRQLAAELITELTTIDKKIKAANKQLTELVAATGSSLLQLNGIGPSGAARLLGDIGDITRFASRAHFASWNGTAPIDASSGDQHHHRLSRAGNRRINRVLHIMAIVQLRHDTEGRAYYRRRLAAGKTPMEAIRALKRRLSNVVYQRILNDTRSVATGPGGHRGTTLQSSAASPIPTADTSEQSLPGPSTKHSRTPSLVSS

SEQ ID NO: 312610 - protein, 345 aa, unidentified
MRHIAIDLGGRESQICVREADGTVVEERRVGTGLLKEYLRRQEAAQVVVETCAESFAVADAAVASGHRVRVVPATLAPSLGVGARRIKTDRRDAQVLSEVSCQLKELHSVHVPSAASREHKAVVHLRESLVKSRTLLVNSVRGYLRTQLIRVPGGVVETFPRRIRQYLIEKCQREVSDFVERQLLAIEALTEQIRGADRDVSRRAKSTPVCRRLMTVPGVGPVTALFFAATVDDVSRFDNSHRVASFLGLTPGESSSSDTKHRLSITKAGSSTMRWLLQQAAWSALRARRLDPLQRWMRNVEARRGRRIAVVALARKLAGVMYAIWKGGDGMTYQAHLAASERAT

SEQ ID NO: 312611 - protein, 338 aa, unidentified
MKNFSIGIDVSKEKFDLTVKKVHFGAEQSEFLHYDVYENNPSGFRKMLKAVDKATGRADKSEWLFCLETTGAYELHLCNYLYAKGYDVWRESALQIKMSNGVTRSKNDRVDSDRIADYAIRHMDKMVIYVPVEEKLGTLKSLFLYRDRLVKEKQSKHTSSQEIKCTHVMNDEMRWMHTRSQQDIARLNKEIKECEDHIQELIASSAEIEKNYKHIMSIKGMGIITTTALIICTHNFATITSARKASSYCGVAPFFAQSGTSISHKKNVSHYSNAQLKAILTQAAFIATRYNEDIAIYYNRLKEKGKPLGVCVNNVRNKLLRIAFSLVQNDCDYEEKHE

SEQ ID NO: 312612 - protein, 427 aa, unidentified
MSGIETGGQEPAFAAFVGIDWADQKHVWCLQGQDSTKRESGELEHTPEAVEAWVAQLCQRFGNRPIAVALEQSRGSLVFMLAKYEPLHLFPVPSTMSASMRKALYPSGSKDDPRDADVLLDLLLQHRNKLRRLSPDTEATRRIQNLVEERRKLVDEKTEHTNRLASHLKIYFPQMLKWFEHLDTELVCALLERWPTLEDLQKVPPSKLRKFFGKHHCRNQELTEWRILAIRQSIPAIRDRAVIEAKSAAVKVIVQLIRILLEGIADLDERIEEAAAVHPDFFIFKSLPGAGPALAPRLLAAFGSQRERYRNAGEVQTYSGIAPVMEKSGKKQWIHFRWACPKFLRQSFHEWAGHSIGYSMWARAYYRQQRGKGVDHHGAVRALAFKWIRIVFRCWKERVAYDESKYLAALTRRGSPLVAVVAIAKAL

SEQ ID NO: 312613 - protein, 410 aa, unidentified
MLFIGDDWAEAHHDIEIVDAEGRRLARRRLPEGVEGLATLHGLIADHLDEDTEADQVTIGIETDRGPWVGALIAAGYTVYAVNPLQAARYRERHGTSGAKSDPGDAHVLAELVRLDRAHHRPVAGDSATAEHVKVLARTHQSLIWSRQRQTNALRSMLREFYPGALAAFGEELDGRDALAILAIAPSPDDGRRLSRSKIAAALRRAGRQRNLETTAERIQTTLRAPQLAAHPGVVGAYAAAVRSLVAVIAEMVTQIEVLSAEVQAGFGRHPDAEIYRSQPGLGPVLGARVLAEFGDDPTRYTDPKARKNYSGMAPITRASGTRRIVLARYARNRRLADALYCQAFSALTTSPGARAYYDAHRARGATHHQALRALANRLVGILHGCLHHHRSYDETTAWPREKTEAHLAA

SEQ ID NO: 312614 - protein, 347 aa, unidentified
MGTPSYEGKQVYMGLDVHREFFVASCICDGVVVKRCRMPGTAEAVISLVSKEFSGASVRAAYEAGYSGFWLYRKLVAVGIDCIVVHAASIEVSSRDTVKTDKRDSLKIAQQLAAGRLRGVRVPTEEAEQRRLLTRTREQLMNKKRRVMVQIRMRLHYFGRFPESIQRRVKLQDVEDILVGLEGELQRTIGMLRDEWVELAKRIKEIDRLLVEQAKEDPLDAAYRSVPGVGPLISRILSAELGDMSQFRNERALFSFTGLTPSEYSSGGHICRGHISRQGNTRLRHMLVEASWKAVRKDPVIKEYYIKLSERIGKRKAIVAVARKLAGRIRAALRKHEHYTLDYRAAA

SEQ ID NO: 312615 - protein, 411 aa, unidentified
MEVLFPFCAGIDVHQKSVVACRIYPDSHGTLRTEKQTFRTMTAGLLQLGDWLAEANITHVALESTGDYWKSVYNILEGNFEVWVVNAHHVKNVPGRKTDVKDAQWLADLMRHGLLRASFIPSQDQREWRDLTRMRLTLVRERAATCNRLHKALESANIKLGAVATDLLGTSSRLILRALVETEVPDPTALADLALGRLRDKREDLIAALDGRMNAHHRFVIGQLLDHAQELDRRIEAFEARIQAACAPFERAVTLVDTIPGISVTAAHALISEIGTQMDRFATAGHLASWLGLCPGNHQSGGKRLSGRTRKGNVYARAVLVQAAQVVCRMPTTHYFALYRRIAARRGKKRALIAVAHAVVVTVWHLLTRGQEYQEPGPDARIKPNPARELADLRRRAARLGHEIVPLAQAA

SEQ ID NO: 312616 - protein, 418 aa, unidentified
MTAHHSTAATVLVAIDISKHRHEVLIGIPGKTRRRRMTVMNTLEDFQRLSAALASYDLPVRIGFEATGNYHRPLAHHLGLAGFDLKLVSSVGLARTREALHNSWDKNDPKDAQVILHMLEIGAVQFFHDPLVVGTADIQELSKTHEIVSRSKTELWHRILTHYLPLYFPEAERFHRSSRTDWFLAFLERYPTPTMITTMTREAFIADAWQVVGKKVSKERLLSDIYATAVGSVGLPVGPDSDAVRMFRLVLAEGRSLVRQRNEIEARAVKLLSDLPDYQLLTTIPGIGPINAMTILAEAGDLRRFRHHRQFLKFCGMDLATVQSGMFRGQSRISKYGNARLRRTLWMAGQTAVLKRTNSFRDKFERYISKDRHNAHLRRKAYTAIAAKMARTVHAVVNHGEPYRPFFEGVSPGGRTSL

SEQ ID NO: 312617 - protein, 355 aa, unidentified
MERYIGMDVHAASCTLAVISEKGRKLKDFPIETNGEALVEAVRMIPGHRHLVFEEGLQSAWLYETLSPHVDELVVAGITQSRGLKSDKRDAYGLAEKLRVGNLDKIVFKSPRQFTHLRELSRIHMTLVRDTVRVQARIKSLYRSRGILVSGEKVYGTRHRDDWQNQLCSSAQTRATRLYDHLDFLLEQKKQAEIDLLREGKKHSIVRILETAPGFGPIRAARLVPIVVTPHRFRTKRQFWSYCGLGIVTRSSSDWIQTADGGWIKARVPQTRGLSRQFNHVLKSIFKGAATTVITQHNKDPIHARYERLLDGGTKPTLAKLSLARMIAATVLRMWKDEEEYDPGRAALPTKTRQS

SEQ ID NO: 312618 - protein, 425 aa, unidentified
MNYKQNEKINQVKESTLVVGIDIGSTTQYARAFDWRGIELGKVFTFSNSREGFEAFKAWMQHLQDKYRKSDVIVGIEPTGHYWFDLGAYLEDEGILLVMVNPYAVKQTKELDDNSQSKNDRKDPKVIAKLVTEGRYSAPYTPDGVYADLRIMVANRKRLIREMTQIKNRFARWFAIYFPEYTDVFGDYEAQSSMLLLKKVCTPEAIVELGAEKINQIWRDAKLRAVGMKRATTLCETAKRSIGLKKGSSAARYEMKLLLEDYEYKKAQLDAVMEEIEKLCRKIPESEQMLAIKGIGVITVAGFLAEVGDVRRFESPRQIQKLAGLSLRENSSGKHKGQTIISKRGRSKLRAVLFNAAIPLIAKNPEFKSLHEYYTTRANNPLKKKQSVIAISCKLIRVFYAILAKGVTYDAQKLISDIHRQPQVA

SEQ ID NO: 312619 - protein, 311 aa, unidentified
MTLARVMLGIDVSKTRLDSFSAASLAKAFANEAAGIDRLVKLAQSLGAFVVFEATGGYEEALCLALEAAGIAYHLANPRKAREFARSAGFLAKTDQVDARMLAAYGQALDLPATQPRSPACRQLGRLVGRRDQLVELRKIEKTRLRQTNEAWALDSLKQVIAVLSEQIRRLEGLIERCIQADEALRRTRDIVRTAPGVGPVTAMVLMAELPELGRIDRRAVAAIAGLAPLACDSGALRGKRRIWGGRKRLRDALYMAALSASKGQVFRPGYEKMRAAGKPHKVALIAVARKLLVGINAAMRQNQPFALMTA

SEQ ID NO: 312620 - protein, 279 aa, unidentified
MKTYAGIDLHSSNNYLGIINDEDQRLYRKRLPNRLDGILAALEPFKETLKGVVVESTFNWYWLVDGLMEHGYKVHLANPSAIKQYEGLKHTDDTWDSFWLAHLLRLNILPEGYIYPKEERPVRDLLRRRLLFVKHRTSHILSLQSMISRNLGTQMSANAIKRLDQGAAETLFDSPHLVLAANSNIAVIHFLKERITLIEKAVKSHIALREEFRYLLTVPGIGDILALTIMVEVGDIARFPQVGDYSSYCRCVKVSGSRMARKRMKTTEKTATVIYPGHM

SEQ ID NO: 312621 - protein, 344 aa, unidentified
MVEVSIIGIDLAKRVFQVHGTAADGSVVFRRKLSRQKLLGYLSQQPRCRVAMEACATAHYWGREIMKFGHEVKLIPPIYVKPFVKRQKNDAADSEAIAEAASRPTMRFVTVKTEDQQANSMLFRTRDLLVRQRTQLVNALRGHLAEYGVIAAQGIIHLGQLIHAIDDSASGLPNPVRQLGRLYLEQIAGHEAKIKALEQQLRSRATEDEVTARLMTMPGIGPIAALAIQAFAPPPENFKSGRDFAAWTGLVPRQKSTGGKQILGKTSKMGQRDIRRLLIIGAMAVIRWAIRKKAPAGTWLPRMIARKPPMVVATALANKMARTVWAMMIRGENYKNSAATAATA

SEQ ID NO: 312622 - protein, 449 aa, unidentified
MKRHLPIACGLDVHKDIIEACITVSRENEEPEVIRREFTTLRGDLINLREWLLNHGCKNVAMESTGVYWRAVYDILEEVDGVNLCLVNAQHMKNLPGRKSDIKDAQWISELFMCGLLENSFVPEKGIRHLRECTRYYRKVTQERGRALNRIGKLLQTHGFKLSSVLSSIDGVSAKRILEKLCDCGEVSVADVRCALARGVKRTAEEIAFAVNGKLPEIARALLRHMLDALKTIDNQLTLLGEIMKQASAAYSSHIQLLSTIPGIDILAATYIIAEIGVDMSRFAVSDIRKKPASRITSWAGLTPKNDTSAGKVKSRKIKKGNNYVKTILVQCAWATTKCRNKRLANWYWSRVGKLGEKTAIIAVARKLLVYIFQMLSTGELYNNDLDCEAAERIKTKKLESAKRLLDNSEKTKSKYTKGLKSPISSPTIIPDAEPSKKMGRPKEKPNIA

SEQ ID NO: 312623 - protein, 456 aa, unidentified
MRRHSCRATKGAVVPKLRRQNGAAAGLDIGAEEIWACVPADRDARPVRAFGTFTPDLHALADWLAQCQVRSVAMESTGVYWIPIYEILEARGVEVCVVNARHLKNVPGRKSDVQDCQWLQQLHSYGLLRASFRPAEEMQVLRTYLRQRAMLLEHRAGHIQHMQKALQQMNVQLTQVVSDITGTTGLQILRALVAGERDPQVLARLRHGRCHHSEAEIAKALSGQYRPEQVFALKQALALYDVYTAQVQECDTYIARHYAAIKPTSDEPLPPLGPAPKPNSHAKNAPAFDVRGCLYRLLGVDLTAIAGLEASSAQVLVAEIGTDMRKWPTEKHFASWLGLAPHNDISGGKVLRSKPLKGNRRAAQVLRLAAQTLGRTQTALGSYYRRLRARKGPTHAITATAHKLARLLYHVLTHRTPYQPQSQETYDQHLRQRSIRHLKRTAARLGFTLLPQPVTA

SEQ ID NO: 312624 - protein, 418 aa, unidentified
MLANVRKMEAAVITAVGIDVSKSKSTVAVRRPGGEIVLRPFEVHHTNSDLKKLASTLKKLGGDIRIVVEHTSTYWRPIALTLKEAGFFVSVVNAMLIHDFSDNTIRKLKTDRADALKIANYALTFWDTLPPFNNEEETRLLLKMQSRANERITATATALRNGLIALADQTFPGVNIAFDPNTKNANGHEKWVDFFLRYWHKDCVCQYSMEAFTESYRGWCKRKNYKFRTDTAHKIYLLAQEGVATLPKCESTKMLITQACKSLNAVCEAKQSTQLEMQRLAAMLPEYEVVMQMEGAGPITGPALMAEIGDVRRFKNKKALVAFAGIDAPPFQSGAFESKSRHVSKRGSPHLRRTIFIISNIILTRSNPENAVYCFMDKKRSEGKHYYVYTVAGSAKFLRVYYARVTEFLRSQPSSDAC

SEQ ID NO: 312625 - protein, 344 aa, unidentified
MEHFAGLDVSVNETSVCIVDETGKIVREVKVASEPGALLTVLNSGAHHFKRIGLEAGPLSQWLYSALGEANLPVICVETRHMRAVLQAQINKTDRNDARGIAQMMRAGLYRPVHVKTLRSQKLRMLLTHRKLLQSKAVAVENDLRGTLRNFGLKVGIVGTLRFETRIRELVENLPDLAILVEPLLLVRRVLREQIAVLHRRLLVIVRDDDVCRRLMTVPGVGPVVALTFRATLDVPARFRNSRAVGAALGLTPCKYQSGESDRTSGISRCGDEMMRVMLYEAAQVMLVRSTRWSWLKAWAMQIARRRGMKKAIVALARRLAVVLHRIWVDGTEFRWSRQEAAAA

SEQ ID NO: 312626 - protein, 320 aa, unidentified
MKASYPTVPCTVGVDVSKAYLDLATWPSGSADRFENNPQGIAQLLAFLKGLQVKCVVVESTGGYERLLIDLLQQTHYDVAMANPRAVRDYAKALGILAKTDALDAGVLARFGDHVKPRLCPQRSQAQIRHQALLTRRQQIQDQRIVTLGHLEHTTEPDLRKDAKAMVKYLEAKVLKLDALIEQALQQNPQHQARLDKLRQVTGIGPVTSRSVLIELPELGRINRQQIAALVGVAPFNCDSGKYVGQRRISGGRASLRKVLYMATLSAVKHNTVIAAHYTQLRARGKPFKVAMIACLHKLLTYLNSLMKESTQPLSLSVSP

SEQ ID NO: 312627 - protein, 323 aa, unidentified
MKCIQKSIGVDVSKLKLDIFIKGQTDGKGDISQELPNSPEGFKTIKELALKHGAVVCCEPTGGYEHQLVEYMQKAKVPVAYTPGTLVRYYARAQGNKHKNDRIDAKMIAEFAINSEIKTATQKDALLDRLCRRMRLYRFIIEERRRLSGMFESEYDTVSRRLLARELKHNLLLEKKILQHCITLVESDPQLADLINRMCMVKGVSKITAISIVTELPEIGQLGDAQLFAMAGIAPIEKQSGDKEWRRKIYGGRQRVRSALYMSAVASLSHNTIMRQYYQKKRNEGHPFKWCIVPVMRKLLSLLNTIARNPEFTPIETPVIRRK

SEQ ID NO: 312628 - protein, 451 aa, unidentified
MAKKKLEMDIINPHCAGIDIGSRSHFVATGQALEDVKEFGVYADDLIEICEHLNARGITSVAMESTGSYWQNLYVELVKHGFDVVLANGKFTKNIKGKKTDVKDARWIQKLHSIGLLTGSFLPDDQTETLRTYCRQRQNWLDLAVEATHKMQKYLKLLNFRLDVVVRDVCGLTGMTIIKDICKGNLNPEELAKHRHFNCRKSQDEIAKALKGNNRTDYLFGLKQEFESYEFYQKKIAECEKMIAAFLKSEINTNPQKKKLKTTDKQHKRLNKNAIKGIDLNQASFQYFGGVDLMAIEGLGHSTVLSIISEVGPEGFSKFETAKHFTSWLRLAPNNKISGGKLLSSKTPKGSNRLKIALRNAANAIGNLKDTHLSNFFNRVCYRKGRTVAVSATARKLAVIIWNMVVKQIPYQPPTQYLFLDEKRKLGMVKRIRKQMDRFKLSNADLGLAIK

SEQ ID NO: 312629 - protein, 457 aa, unidentified
MSKRRKRAQSKSFNLQSLPKQLQHINLNAAGIDIGSERHMVAVPEGRDEVSVREFGAFTADLIALADWLQHCGVTTVAMESTGVYWIPLFELLERRGFEVKLVDARHVKNVTGRKSDILDCQWIQQLHTYGLLAGAFRPADELCVLRSYLRQREMLTQTASMHIQHMQKALQQMNLLLHNVVSDITGVTGMKIIKALLAGERDPQVLASHRDNKCHHDSATIAKSLVGNYRAEHLFALRQAVDLYEIYQTKIGDCDEAIVTQVSAQPNITDEPPPPEQKRTSARDRQRSGVNVRDLLFQKSGVDLFAIPGLAADTLLVLSSEVGFDLSPWKTVKHFSSWLSLCLGTKISGGKVLSRRVKRNPNRAAQAFRMAAATLSRSKSALGAFYRRIKARSGGKQAITATAHKIARIYYALLTQGTTYVELGQQAYEQKYEARRLKHLMAQAKSLGFQLVPSQT

SEQ ID NO: 312630 - protein, 337 aa, unidentified
MNKIVIGLDVSKKKIDATAIVTSCGGNGMEKLGYSVFENTACGFRKLLSWCSVIGRGCSAEDCLFCCETTGSYDRAMCLYLCAHRCFIWRESAIQIKRSSGVRKGKDDRSDSLMIAEYAVRHMDKAECFRPLDGTVEELRQLFLYRQRLVEERKGAAVSVSESFVGIKDGPVANRIKREMQRHLRHLDAMIRRCEILIRQTLMKDREVWDNFCRITTIKGVGLVNAVAFIVYTNNFQNFKTARQLASYYGVAAFRNRSGTSVDRRAQVSNLSNHRLKAYLAQAAECAARTNGIYRQYYERMVERGKHRMIILNNIRNKIIHTVFALVRDKCDFCIAK

SEQ ID NO: 312631 - protein, 341 aa, unidentified
MEYIGLDAHRHYTVAARVDESGAVIEQRRLKNEELPCYLAGLCGPTRVALEATANWYHIYELAEPLVAEVALGHPLKTRIIAEAKIKTDKVDATILAQLLRADMLPRAYIAPAAVRELRELLRLRASLVRQRTMVRNKVHAILIKRGLKPPVSSLFGKRGRVWLEEEAARLPQAYGDAVACYLRVLDALQEEIRGVSAGVEERAQLSEEACWLDTMPGIGPYTALLILAEVGDIKRFPDAAHLASYAGLVPSVHSSGGRTRYGSLTKQGSPWLRWAMVEAAHSAMRVRGPLRERYERMRRRKPHGTAIVDLARFMLGCIYAMLTERRSFKSVPRGSREDMV

SEQ ID NO: 312632 - protein, 470 aa, unidentified
MKKSTRTTPLVSKGISKTEPIPKHLEQINQWAAGIDIGATSHFVAVPEGCTTTAVREFKSFTPDLYSLAEWLKECGIQTIAMESTGVYWIPVYELLEEKGFEVKLVDARRVKNVSGRKTDVLDCQWIQQLHTYGLLNGAFRPDNEICALRSYVRQRSMLIRSASRYIQQMQKALTQMNLQLHHVITDITGDTGMRIIRAIINGEREPALLANHRDPRCKSSKEDIEASLTGNYREEHLFTLRQSLELYDYFQEKIQACDSEIEKSLSGFSTNTLGKDFSVERLKFNKKKVSKNAPAFNLREELYRLTGVDLLAVPGINNISALQLLSEIGFDMTRWKNSKQFSSWLGLCPGNKVSGGKHLSGKTKPSNNKAAATLRMAASTLYRSQTSLGAYLRRLKSRIGPMKAITATAHKLAIIIYNMLLHGVDYIESGQAYYDEKYRERMIKNLKRKATEFGMSLIENQINFAPNIN

SEQ ID NO: 312633 - protein, 362 aa, unidentified
MRIIGCDLHARQQTLAMLDTATGEVVEVTLKHEGDNVREFYSSLPRPVRVGIEATGSMQWFLNLMEELGIECQVGHPAQIRASAPRKQKNDRRDAELILKMLVEGRFPAIWLPSKELLDLRSLLRHRHQWVRMRTRIQNALQSIALANGLRRGTALWSHDGQSRIASLPLAPHTAYRRSELQAMYEKFEAEIEKLNQRVEEQACQRPGARLLMTHPGVGPITALATEVFLGDPARFADSKALASYVGMIPREYSSGGRQRLGGLSKQGNPLLRFLWGEAGAHAARKDPELQRFYRRKLVQKGLGKASVAVARKLGIRLWIMLRDQIEYNEFCRRGQKQQKSSDACAGMPETPYGANSHRPVD

SEQ ID NO: 312634 - protein, 452 aa, unidentified
MARKKINKKKVTLPVLNPDAAGIDIGATEIYVAVPPDRDSDPVRMFPTFTQDLHALADWLQQTGIHTVAMESTGVYWIPLMQILEARGLDVYLVNAKHVRNVPGRRTDVSDCQWLQYLHSVGLLRASFRPDQEICAIRSLWRHRNALVEMATCHVHHMQKALDQMNLQIHHVISDITGLTGLAIIDAILNGERDPEKLALLRDPRIRASHETIVKSLVGDYRQEHLFTLRQSLDMYRQYERKILQCEAEIQRLMQALEGQSDPSSLPPAKDSVKKCKVMKPAKALTLRTEAYRILGVDLTTIPGISVLHVQTIVAELGADFFSQFRSAAAFSSWMGLCPDNDISGGKILWSGTRKVKNRVALALRMAAQSLQHSKSSLGEFYRRMRTRLGAPKAITATAHKLARIIFHLLTTKEAYDDSVFARSEERCQQRARKRLIAQARALGFNLVPASS

SEQ ID NO: 312635 - protein, 361 aa, unidentified
MVGQRTSVGLDVHARSVVACGLDRETGEVVERRLTPEHREILDWIGDLPGPVAVTYEAGPTGFCLARALDAAGVECQVAAPSKLIRPAGDRVKTDARDAAHLARLLHLGQITAVAIPSADQEAARDLVRAREDCRGDLMAARHRLSKLLLRQGIVYYGGATWTSRHELWLRQQRFDNRALQLTYDATFDAMTACVDRRERLEAAIEEMAADSEFTAVVRRLGCLRGIATLTAFGLATEIGDWHRLTGRTIGAYLGLVPSEFSSGGSRVQGEVTKTGNKHVRRLLVEAAWHHRSPYRPGAVLRRRWDLACPAARARGQAANRRLHQRWANFDQRKKRSVVANIAVARELAGWCWSLAVLDGE

SEQ ID NO: 312636 - protein, 344 aa, unidentified
MPTEARPSVYAGLDLHKRNVFCGIIDQEGQPIYRRRLPAELPVILQALDVYRPQLKAVAVESTFNWYWLVDGLQAADYPVHLANPAAMQKYSGLKQTDDETDALWLAEMLRLGILPTGYIYPKAERPVRDMLRRRMLVVRQATQTVLSLQSMVTRHTGQSVSAAKLQGWTLSELRTTFADPCVQETAAALVELLGQQRRIQHRLEKQVLAAVKPTGSFQRLLSLPGIGNILGLTISLETGPITRFASAGDYASYCRAVNSRCESDGKKKGENNRKNGNKYLGWAYVEAAQFAQRYSPRAQAWFARKVARTNRVVAVKALACKLAKAVFYVLRDEVDFDENKLFG

SEQ ID NO: 312637 - protein, 338 aa, unidentified
MKLYGAIDLHSNNNVTVLIDEQDQVVYQKRLANDLSLIGEQLSPYASSLEGIVVESTYNWYWLVDGLMGKGHRVHLANTAAIQQYNGLKYTDDDSDARWLAHMLRLGVLPQGYIYPQQERAVRDLLRKRSQLVRQKTANLLSIQNLYTRNTGLSLSANRIKKLRSEEVDDLFTLGDVALAVKANLSVMRCLEAEIKTLEQVVKERVKLKPAFRYLLSVSGIGQTLALTIMLETGDIRRFPSVGNFASYCRCVGSEKISNGKRKGKGNTKNGNKYLSWAFVEAANFAIRFEPLIGRFYQRKKAKTHGVVAIKAVAHKLSRACYYVMRDAVPFDVARAFS

SEQ ID NO: 312638 - protein, 397 aa, unidentified
MYIVGIDIAKRKHEAAVIDGEGAVIIKPFSFTNNCSGYNRLLAMLAKAKLPLDEVSFAMEATGHYWLALFTRLQKEGFRVQVINPVQTNSIRSFYIRQAKTDPRDALLIAEVIRFGHFSESTLHPENIYELRELCRGRHAIVSMQADVKRKVVALLDQVFPEYETAFTNLFGDTSMAILQTCPTPKELSEMPLEELCHLIEVSSHKRFRMAKAQELQELARNSFGFAMAGDVFSTMIRLYAKHLDFLKQQVREMDRKIAEIMETLDTPITTITGIGPTLGAYILSEIGDISRFSSAAKLAAYAGIDPTMRQSGEYNGVRNRMSKRGSPYLRHAIWLAASSAVLHDPALKLYFQKKRDEGKPYMASVGHACRKMVSIIYAVMRDNKAYTPYIPNEISA

SEQ ID NO: 312639 - protein, 344 aa, unidentified
MKHYVGLDVSLKETAICVVDENGVVIREGKAFSDPEAIIAWLNESGLSVAKVGLEIGGLARWLYGELRAGGLQAICIDPRRLRGVTKTMPIKTDRNDARAIAQVMRVGWYTVVHIKSGPSQELRMLLNNRKTLLTKQIDIENEIRGVLRVFGLKLSGRISQATFEQRTLELVADQPRLAAMLRPMLVARAALRQQYGVLHKMVLELVRREPTCQRLMTIPGVGALTAITFVTTIDDPDRFQHSRDVGAHLGLTPRKYASGETDRNGAISRCGDVMLRTVLYQAALALLTRTQRWSALKAWGVQVAKRRGLRRAVVAVARKLSIVMHRIWTDGSEFRWTREEANA

SEQ ID NO: 312640 - protein, 323 aa, unidentified
MNKYKETFGVDISKDVFDVPGSTVGNDQYKNDESGFRKFLKALLDNSLVVMEATGYYYYRLAQFFYKNGITVSVVNPLSVKRFIQMKWAKVKTDKSDAKAICEYAVKNEVPLYTALTDVQNECLQLFRVLDSYLKKRTATKNKRHGEEVLGLPSKFVYRSLRRNRKHLDKEIKGIEKKLLSLVKQDQQHQLTVLTSIPGIGIRTALFLIVCTDGFKKFETASQLCSYVGIIPTIRESGSSVRGRSRISKVGNRKLRNLLFLCSFNASKHNKACKGVYERIVNKGKSKKLTLIAVANKLLKQSFAIAKSGRPYDETYVSVLRVK

SEQ ID NO: 312641 - protein, 411 aa, unidentified
MNAVGIDVSKGKSMVAILRPLGEVVQTPMEIKHNKMDLKQLADLILALEGDTKVIMEATGRYHESVASYLHECGIFVSVVNPIAIHNAGNGVSVRKTKTDRKDAIKIAKFGLDNWVDLREYTVMDTIRQQLKLFSRQYDLYMKTVVALENNLMSMCEKTFPGVEDLFSSPERGDGHTKWVDFVVTFWHSDCVSNMSKNAFIKRYQKWCKRNRYNFSEKKATEIYQESINHITTLPKNENTKALIQIAAKELIAASENIAAIRKEMTRLAKQLPEYDVVRSMYGVGDITAAQLMAEIGDIRNFKTRRSIVAFAGVDPSIDQSGKDDGKGKPSTKRGSPHLRKTLFQIMSTYVKVKPADEPIYQFLEKKKDEGKPYYVYMSAGANKFLRIYFARVKECMAAIEPQSQEPSTDG

SEQ ID NO: 312642 - protein, 347 aa, unidentified
MRKIAYLSMDVHARNIVLGDMNANGKFLGNRAFTTCENNIIDALKAIKAKRKYLVMEAGPLANWVAQTASPYVTQVFISDPRENALIYKSSLKKDKIDTKKMCRLLRLGEFKEVYRPESDQRAIFKAAVQHYIDLRDQLTALKYKIKAMFRQWGVIDVFTKSVYSTSGRDKFLKLVNHHPIYLQLKRLYELMDHTATMKQDAEKAMVALGRNYPEIKEFKKIPGIATVNAHTYDAFIQTPHRFEKTSRMWRYCKMGVTDRSSDGKPLGYKRLDKSGIGELKALSHRAFMVAMKSDNEVKRFYLQSLQRTHNHKHARLNTQRKILCVMLSIWKKGQPYRAELFLNPSI

SEQ ID NO: 312643 - protein, 358 aa, unidentified
MKYIGCDFHPSFQQIAMLDKETGELVERRLLHTEEARGFYEELKGPVVVGVEASGNMNWFESLLAGCQHELWIGDAGAIARQEGRKQKHDRRAAALILKLMVENRFPKIWVPTVEERDLRQLLIHRQHLVRMRTRIKNQLQHIALNQGWQKKRKLWSKAGLELLRSLKLEPWTEQRRNTLLEMLEELEEKIKPLDQAVAQEAEQSEAARRLATHPGVGSVISLATVLTMGDVKRFSNSRSWVSYLGLNPSEQSSGQRRRLGSISKQGNPFLRYLLVEGAVSATRRDKSLARMYARLKAKKHHGVAKVAVARKLAVRLYWMARTEKSYPEVVRTQGSQSHPVAEVKAVRLSRPPASHQM

SEQ ID NO: 312644 - protein, 370 aa, unidentified
MKSIIYVGMDVHKASFTISCFSVTTQETFATVKISPDAKAIKKYLDGVSLSRSEECEFVCGYEAGCLGYTLYHQLTAMNIRCVIMAPTTILRNSKRVKTDRIDAENLARCLAYGGYKSVYIPTAQDEAVRDYLRMRDDHKLMLKKIKQQINAFCLKHNKIYPGNKSKWTQAHLKWLNALEFDGYLQDAFNEYMITYRELADKVERLESQIEQLAELEEYRDKVKKLICIKGIKTHTALSLIVETGDFSRFQSAERYASYIGLVPGEHSSSEDQNRLGITKAGNRHMRMLLIEAAQCYSRGVPAKKSKDLKSRQKGASPEVIAYADKASIRLRRKYIRMELVNKKKANVAKTAVARELACFIWGMMTDNIA

SEQ ID NO: 312645 - protein, 454 aa, unidentified
MAKKREKRECRAVVLEPDAAGIDIGAEEIYVAVPPDRDEESIRMFSSFTCDLHALADWLVQCRIRTVAMESTGVYWIPLFQILEARGLEVYLVNARYLKSVPGRKSDVSDCQWIQYLHSVGLLRASFRPTMDICAVRSLWRHRGSLLQMASEHILHMQKSLSQMNLQIHHVLSDITGASGQAILDAILAGERNPVQLAQLCNCRVKSPREKVAKALEGDYRPEHVFTLKQSLDGYRYYQRLIAELDREIQRLLQTLPSAVETGQEMPRRTKHSAFQRQGNDPGFDLRGQLYRIAGVDLTDIPGVSAVTAQVILTEIGPDLRRFRNASAFASWLGLCPENRVSGGRVLSCKTRKVKSRAALALRLGANSLCRAKGYFGEFFRRMRAKLGTAQAITATAHKIARVLYHVLLTKEPYAETVFHRSDEHARRRAEMRLRKHAALLGFQIIPVPADSAT

SEQ ID NO: 312646 - protein, 410 aa, unidentified
MQVLYPCCCGLDIHKKFVVACVMTTNAEGQVQKESRTFSTMTKDLLALLDWLQAAGCTHVAMESTGSYWRPVYNLLEGQFTLLVGNAYHMKTVPGRKTDVKDAEWIADLLRHGLIRGSFIPAPAQRQLRDLTRYRTHLVEERARLTNRLQTVLEDANVKLASVVTDIRGVSARAILAALIAGETDPVVLAELARGRMRSKREVLAQAVVGRFTPHHAFLLTEHLSQLDYLEEAVERVSGEIAQRLADERAAVELLDTIPGVGQRAAEIILAEIGTDMARFPSAKHLASWAGMCPGNKESGGKRLSGKTRKGNPWLRQVLIEVAHAASKTKDTYLSAQYRRLASRRGKQRALVALGHTILVMVYHILTRRAPYRELGPLYFDVLDRQRVQQRLVQRLERLGYTVNLQPLAA

SEQ ID NO: 312647 - protein, 363 aa, unidentified
MKREKRRFVGIDLGKREYTMAVIGKDGKMHIHHGETGIRGRQALYKKLERTDKVALEAGNLAFIMAREIQERAGSEVRVLNSAKLPFIWDAPTKTDKEDAMKLAHLVEERRDEKLPIVPMPSGQEMERRKLIANYSREVKGRTKTINLLHALFVHRGHTTIARKDIATAEKRLEAVELLRGQEREEAGWLLKHLELYEQRIKELKVKMQREAKTDEDMKRLQTVAGVGPIVAYAYVAHVGDGSRFSKGAQVSNYLGFVPRLDYSGTIQRHGHITKRGNAYLRGLLVQAAWTAVRSKKGGALREIYLYKTSEKGFSKKKTIVAIGRRIAELMYAVLRNKTEYEPRPWKGMRDNSAVLAEQALCA

SEQ ID NO: 312648 - protein, 436 aa, unidentified
MDEVTDEPLYRDRVCGIDIGKAGMVATIRVPSDKNPARRAAETRSFGTTKREVLALADWLRSWQVPAVVMEATGDYWKGPFYRLEAEGFDCVLADAKQVKHLPGRPKHDPGDSRWLAACFERGAVTSCFVATAEFRVIRLHTRYRRDLTGERTREKQRAEKLLESAAIKLSSVVTDLHGVTGRDIMDHLIAGERSPRALAQLARARARRKIAQLEEALEGAEFFTAEHAGLLATMLERIDQLNAKIDGLTEVIERLLAPHEEQLQQAESMPGWGRRSAQDAVAETGADMSRFPTGGHLASWAGRTPLDNSSGKRTGRTRSKKGNRYLAGITGETAAAAGKTQTREGARYRRLARRRGKAKAQVALGNTQLKVYHKLLSSPGMRYQDPGPDYYDRQASTRRQIAHHVGKLGALGFEVTLCRLPSPDPDPAGTGTQAA

SEQ ID NO: 312649 - protein, 391 aa, unidentified
MIYVGIDVAKDKHDCFITNSDGKVLFPVFTIQNNRDGFDVLFSRIQSSSSDVSNIKVGLEATGHYSYNLLGYLIDKGLHTFVINPLHTNLYRKSLSLRKTKTDKVDARTIALMLMSDVNLKSYSDTSYHNEELKSLTRYRFRKVQERAQLRQSVSRLVTILFPELEKLVPSLHIASIYALLSEFPSAGTIASCHLTHLTKRLENASKGRYSREKAIEIRNAARASIGSNMPAKSLELKHTLRLIGELDSEISEIESEIKRIMDEIHSPILTIPGIGYRMGAMILAEIGDFSRFDSPDKILAYAGASPSTYQSGQMESSYSHMEKRGSRYLRFALINATKYVCQWDETFGAYLQKKISEGKHYNVAITHAAKKLVRLIYAMEKSGKPYIKTA

SEQ ID NO: 312650 - protein, 354 aa, unidentified
MNEITTMAIDLAKNVFQLHGVDARGVCQQRRRVRRAQLLRVMAQMPPCLVAMEACASAHYWGREFIELGHRVKLIPPQYVKPFVRGNKTDGNDAEGICEAALRPRMPSVAVKTQEQQAVLAEHRIRQLLEGQRKQLGNQLRGLLAEFGIVIPLGSAVLSKGLAEAIERAPARLRPALNEAHQRLVALQQQCKEQTRRIEQLAAAAPLCQRFMQERGVGPIIASAYAATLGSPTHYRNGRQVSASLGLVPKQYSSGDEPQLLGISKRGDTYLRTQLIHGARAVVRGIGGRSDPLSVWLQGLVARRGRTKRPSRWRTRPRDGYGRSGAMRERSSLPSPSELTNDDHVPSCEGSEHS

SEQ ID NO: 312651 - protein, 340 aa, unidentified
MNITTVGLDLAKNVFHIVGLDAHGHEKMKKCLSRSQVLKYFANLPACVIGMEACASSHYFAREFRKLGHEAKLIPPQYVKAYVRGQKNDTNDARAIAEAVRVPSMRFVAVKSVEQQDVQSLIRLREGAINTRTAAANRVRGLLGEYGLVMVKGLSALRRTLPEVLEDARNGLTGVFRRLLNQERQHLLELDAHIDALTAELTALSKQDDRVQRLQTAPGYGPIVASVFASVIGDGAQYRRGREASASVGLVPRQHSSGGKNVLMGISKRGDRYLRSLLIHGARAVVNAAQKKDDPLSRWINRLREQRGMNKATVAYANKMARIGWAILRNGTTYQAAPVS

SEQ ID NO: 312652 - protein, 339 aa, unidentified
MCKQSMVLPGRLFCGIDVSAVSLAVAVQREEQLIEEREFPNNASGHKLLITWLRKRKTAVRVTLEATGIYSFDLSVALHATDGIELAVLNPKVANRFAQTLRRSKTDSADAQVLAEYSRRMPFTAWCSPNHNELQLRTICRHVESLTVQHTRDQNRLYAAQGSISTPRCVIQDLKHALAAGERRIHKLRREAMTLVRSDENLRQRYDLLISIPGVAQISAMQLLGELATLSPDMTVRQWVAHSGLDPAHEISGTSVRKASRISRAGNRHLRRALYMPALVASRCDPHGKAFFESLLARNKARLQALIAVARKLLHAIYGMFRSGLKYEGTKLFPRISLS

SEQ ID NO: 312653 - protein, 325 aa, unidentified
MESKKLCCGIDVSHTKLDVCYQNNLGELFHLQVGNNNKGFEKIMEHTGSEYHFVMEATGVYYIRLAFYLHQQGCQLSVVNALSIKRYIQMHLERNKSDKKDAGWICRYAIEQTPPYWEMPDSAYFESKQLYNTIREYTEQIKRFNNQLHSLRLLPVPSKDTIKSLEKVNKQIQKEIKILESKLQTILEQWQPAQLKSVGSIKGIGKRATAMLIVFTQGFKYTHSHRQLISFAGLSPTEYSSGSSIHGRPRIYKRGGKNLRDVLYMCSMNAIKTNTACKTLYERLRANGKTGKQALIAVCNKLLKQVFAVVKNNSLYQPNYCSAKP

SEQ ID NO: 312654 - protein, 421 aa, unidentified
MPNIEIGVDSMVKENFIYVGIDLHKETHTAVMIDCYNQKLGEITFPNRPAAFPKLVTKVKKCNTDGKEVVYGLENAYGYGRALAVWLIDKGYLVKDVNTAISHRQAKHRGAMYRKSDSDDAKAIALATLNMLDKLPDACPNDAYWSLGQLVHRRDNIMKQRTRLVNQLHEQLCIAYPSYKQFFNDISRPTALYFWEHYPSRKYLKGKSVEDLRAELVPVSHNKCSTKTCEKILDAVASDKVKNNAYQDARDMVTLSIVSDLQHYDSQLTEVDKMLEQMYKMLGCTLTTIPGVNVITAVKILAEIGDIKRFSNANKLAQFAGIAPLHLSSSGKGKDVATKQGNRRLQATIYFLAIQMVQISSKGTPRNPVVRAYYEKRKAEGKTSQQALICISRRLISIIYGMLKHGTEYRMPVVESAGENR

SEQ ID NO: 312655 - protein, 407 aa, unidentified
MRVIFGIDVSKSTSTVCELINDSKTITTITNDRPGFLELLKDLKAFTQHPQIIFEATGVYSRRLQTFLDDYGYEYVVLNPLKAKKEMNLGLRHNKTDKTDAYHLALIQKLYNHPVSQLQAEQYHQLNALSRFYDQLTNDIVIAKNRLHKVLQFTFPELESLFSTAKGFNYWSIVKMYPHCELINDLTELEIYTKLIKLPGFQAKKANRFALKLIDLAQKTYPVAPCKSVESDEARYYAQRLIDLDKRRQDLVNQMVRIAKSLPNRDLEILESIPGIAQTTAVRILGELGDLRRFSNPNKINAFIGIDPGRYQSGEMDTSLSITKHGNAVARKILYRAIGQIDQAAKTQHCHIADYYENKKLSSQTKGFKKIAIASIHKLIRTMYALISNDQLYDYNVAKHNQKRLLS

SEQ ID NO: 312656 - protein, 353 aa, unidentified
MKCDKYIGCDLHQATTVVAVLDAEGKIVMETIVATEAAAIIRFLKGLSGTLHITFEETTQARWMYDVVRGYVKEVIVCDPRRNKLLGEGSKADKPDARKLAELLRAGLLRPVYHGHEATRQLKELVRGYETLSADTQRMMVRIKAIYRAHGIRTPGSAVYQQKQREQWLQLLTEPGTRQRVSWLYEELDHLRPLRKQAKTAMVAEGRKHQAFRLLRTIPQMGPVRCAMLVATVDTPYRFRTKHQLWAYSGLAIVTYMSSEYEIKSGRVVRSRKPLATRGLNRNCNRRLKELFISAAVAGSRSEPYRSYVEGLQQKGIRAEMARLTLARKIAAVALRVWKKGETFDPKKLNSMT

SEQ ID NO: 312657 - protein, 404 aa, unidentified
MNGLPDRTYAVYLGLDVGKEHHHACALDPAGKRLHDKTLPQDEQRIRDLLTDLSVHGDVLVVVDQPASIGALPVAVARSMNIQVAYLPGLAMRRIADLHPGNAKTDARDAYVIADAARTLPHALRRVDVGDDALADLEVIVGFDDDLAAETTRVTNRVHGLLTQIHPALERAIGGSLHHPAVLELLSRFGGPSGLRTAGRRRQLAVAKPRAPRKYQAFVDAIMTALDEQTVTVPGTRAADLVLPKLADQLAGLLAQRAEAATQVEEMLDAHPLAQVLTSMPGVGVRTGARILLEVGDASSFATPGHLAAYAGLAPVTRRSGTSIRGEHPSRSGNKNLKRAFFLAAFAALKDPASRAYYDRKRAEGKRHNAALICLARRRCDVLYAMLRDGTTYQPGRPVTPIAA

SEQ ID NO: 312658 - protein, 415 aa, unidentified
MEVLYGICSGVDVHKKLMVVCLRSGRKSEIRNFGTTTKELFELAEWLKDSGCKMAAMESTGSYWKPLYNVLEVMEIPAMVVNAQHMKAVPGRKTDMKDAEWIADLCQHGLLKASYIPDKDQRELRELVRYRKSLIEDRSRELNRLQKMLEGGNIKISGTIGEIGGKSSMNILKRFINGEKIDEKVYDEMYAKKEISHNLKCTKEQIIADMNGVLSDLQIRMIKELLRHVEELDAHISSLDREVERFMTVDEATACRMIEDVPGIGTSSAQVVISVIGTDMSRFPTDKHISKWSGLCPGNNESANKRRSGKTTKGNKLLKTTLITCAHSAVKVKDSFFSAQFARISARRGTKRAYVAVAHSMLIAIYHILSTGEMYKDLGSNYYNQFNKERKASTMLRKLKELGYEVTIAAVPETA

SEQ ID NO: 312659 - protein, 334 aa, unidentified
MRKETDAGIDVSKAVLDVAAHCEGQDLAPAQFANNAAGHGKLIAWLTKRGRRARVVLEATGTYSLDIALALHRAARVEVMVVNPRAVKQFTGALMQRAKTDLTAAVALREYVRRMAFVAWQPPAAAVLELRGVARRIAALVVERTRERNRLHAAQVPQETVAIVVNDLEVNLRHLARRIERLTEQARGLIAANAALQGAYDRLTSISGIAVHSAVQLLPELLVLPADMTVRQWVAHAGLDPRPYQSGTSVHKKVRISKVGNANIRRILFMPALVAVQREAHVKAFFDQLVARRKTPLQAYVAVMRKLLHAIHGMFRTHTDFVAEKFYAMAGAAT

SEQ ID NO: 312660 - protein, 390 aa, unidentified
MYFIGIDISKYKHDCFITTEAGEVIKETFSFDNNGTGFKQFFDILSDLGDPNQIKVGFESTGHYMNNLIKHLSVKGYSFTVLNPIIVARFRSSTTLRRIKTDSIDARLIAQYLSTVDFKSYHLQVYHFPELKSLTRMRDRLVKQRSLYLVMLTNSLDQVFPEFKPFFANNLKSKTAQYILHKYVIPSRIATMNLASFDNIRTISNGKFSFAKFTKLKELARSTIGCSTDTDTLLITSTLHLYDQLDEQIKLIESKIEVMMLQLDSPTASIPGVGLNSAAAIIAEFGDVSFFAHPDKMVAFAGLDCGRSQSGTQDFKGRMVKHGSGYLRQALMNSAVSVLIHAPTFYEYYHKKREEGKAHRVALSHVARKLVRLIYKLESSNTHFDPSQCR

SEQ ID NO: 312661 - protein, 354 aa, unidentified
MPAPSIIEGTTMEYYAGIDVSLESSSLCVVDANGRVVREAKVASEPEALTAWLKNLGLEIVRIGLEAGPLSQWLYAGMKQAGLPAELLETRHVRTAFKIMPVKTDRKDARGIAQLMRLGWFRPVHCKSLAAQETRALLGARKLLQIKLHDIEMSLRGTLRGFGLKVGKTTAKTFESQVRSLVAEHPTLLAISDALLQARTVLVEQFNKLDNQAHRAARADKRARLLTTAPGVGSIVALTFASAIDDPGRFKSSKSVGPLFGLTPRRYQSGETDVTGRISKAGDSMVRTALYEAANVILTRMTGDAPLRRWALAVARRAGMRKAKVALARKLAVILHRILVDGAPFDAAKAAAAA

SEQ ID NO: 312662 - protein, 417 aa, unidentified
MDSDKEIVCGADIHRDFLIATMISRSGLKLQERFNMNQDGLLAFRSWILTHRCQRLAVESTGGFWYPIFTILEGHVEFILANAYQIRNIEHKKTDKLDSERIAIYCLNNLITPSRIYPKDYRDLRSITRARETLVNARSKVKNQIHQLLSTCCIKLSSVISDSFGKSGRYIIDRLLEGKTIDQILSGIPSKRVRKKEDELREAIRNGIDPVQVFLIKANLDVIDDISKKIKILEAEIAIKVKPFEEDLKIALSVPGVGFISAATIIAEMGDYRDFSSADKMAKYFGIVPSVYQSAGKLRTGKITKTGSKHMRRILVEVAKAISRTKKNSKLKRFFQRILARCGKKNIAAVALARKVLCILHHLLMNHENYQEPEVKKTKPRIPSSVSPISMMDIDEMIKVISQAGYLVEKDLKEGCG

SEQ ID NO: 312663 - protein, 411 aa, unidentified
MEVLYPVCCGLDVHKRTVAACLRRPSGKAPRAEEVRTFGTTTRELLRLADWLGAAGGTHVAMESTGVYWRPVYQILEGNFELLLVNAQHIKAVPGRKTDIRDCQWIARLLEHGLLRASFVPPAPVRELRELTRYRRQLVQERARETNRVQKVLETANIKLGDVATDVLGASGRAILKALIAGERDAENLAALAQGLLRKKEAQLREALVGQVTAHHSFLLQRLLSHIEFLDQQITRFDAHIEARTQPFAPALERLDTIPGVARRSAEQILAELGDDMRRFPTAAHAASWTGICPGNHESAGKRKSGRTRKGNRWLRATLIECARGAVRTRGSYLAAQYHRIARRRGDKKAIVAVAHSIVVAAWYVLRYGVPYHDLGHDHFDRLDRDRLVRYHTRRLADLGVVLPASAPVPA

SEQ ID NO: 312664 - protein, 353 aa, unidentified
MRKLLGYQAKGKEVFIGLEDAKRTWKICARSEGDIIDQVSMPAKYEVLIKYLKRAYPECKIKVMYEAGFHGFWLHDLLESDGIKCIVTPPNLLVMEKQNKVKTDKRDARRIARNLENGDYKECFVPDQELREDRQISRTLNQIQKKVISTKNQIRRFLEFHGLDREMKAGAWSNRDYENLRGLKLNDSLSICLTISLDTLSYLQKQQLKLTKELKKLSQKDRYQKTYNLFIGVYGIGFLTAMRFLLEWGDMRRFKSRTGFSSYLGFTPSEYSTGDTIHKGRITKQGNSFVRRWLVECAWLAKRKDPVLQMKYQRVLKSCGCKRKAIVATARKLALRLRYIALTEEPYCIGLLN

SEQ ID NO: 312665 - protein, 340 aa, unidentified
MLHVGLDIHTTRISICVLDERGQIVHRSQVRGLEETLAVLKGLPDRFEVCYEASCGYGHYHDLLTPLAARVLVAHPGHLRLIFRSKNKNDRNDAERLAKLLYLGETPAVHVPSPEVRAWRELINCRGQLVAKRTRAKNGIRSLLRSAGVVVPKRPGLWTKTGLAWLRRVEFPTASQRLRRDLLLEEIDTLTRQVQRVEQELSRQARKTPAVALLRTIPGVGARTAEAVVAFIDDPHRFRTAKAVGRYFGLVPSQDQSGDRNRLGHITREGPPVVRQLVAEAAWQAIRRSPTVRSFFEQIHREDPQRQKIALVATAHYLVRVMWAMLRHGTTWRENGARAA

SEQ ID NO: 312666 - protein, 425 aa, unidentified
MLAVGIDWSEEFHLVALGRPGEGVVELRRVEHSPKAVDALVERITTLEPDPAEVRVVLEARHGLLVERLLDAGYVVVPVNPDLIARRRGPAKKKDDAEDARIACLLALDRFERLRPLIPHGELAGELRAIARDDERATKDERRLLNRLRQDLLSTFPAALEIAGEDLGAPSFLRALVRWPTAAALARASREELVAFARASHHGWPERFADRVEQALAADHFQPRPYLARAKADTIRLSAQQLLAIGQQRRSWERRMGELLLGAPRRGRAKQPREEERGQSFPGGEVYLSFPGLGDRLAARVAGEIGDHPAQFESPNALQCYGGKAPVTRRSGKSEHIVSCRLAYNRYLGDAVQQWAFCSLRYSGWAREFYDRQRAKGKGHHAALRALGNRWLEVLWHCLQKGVPYDESVHVANRRRALEPLAQAA

SEQ ID NO: 312667 - protein, 316 aa, unidentified
MLYVGIDVAKNKHDVTALNVPGKTVLKPLTFSNNKAGFELLDLSLRQLNQDCLIALENTGHYAFNLLNFLHEQGYKVYTYNPLLIKEFAKSLSLRKTKTDKKDAHGIALKLLSDPNREQFQHDNRQVELKILARHIHRLKKKQSDWKVQYTRCLDIIFPELDKIVGKHSEYTYQLLTRYPNPQKRLEAGFDKLIEIKRLTASKIQDILSVAPRSIGTTSPAREFEIIEIIKHYKRLIDKAETCVNDLMAEFNSVITTVTGIGGRLGAVILAEIRNIHAFDNPAQLQAFAGLDSSIYQSGQIDLAGRMVKRGSPHLR

SEQ ID NO: 312668 - protein, 349 aa, unidentified
MNATIVAVDLAKNVFELAVADADWHIAQRQRLTRAKFFGFFVQLAPCQVVMEACGSAHYWARRIVGLGHTVRLLPAHYVKAYVRRNKTDQADAAALIEAARCAEIREVPVKTVEAQQIQSLHRLRSQWMSTRQRYVNTLRGILREFGFAIPLGVNVAKEQIGVALADFDSEVPQALRATLTDMLQEVRSLEEKILGVEHQLNALTRADVRVQQLRQIPGVGALTSTALRAIVGDIQRFPSGRHFASWLGLTPNERSSAEKRRLGKISKQGDVYLRTLLVHGARSALLAAHRAERSGHTLDHLRRWALDCERQRGHNKATVALANRLARIVWATWTHERPFDGNWSAQAA

SEQ ID NO: 312669 - protein, 343 aa, unidentified
MLDTETGEIVNLTLMHEGNEVREFYSQLPRPVLVGIEATGSMHWFLNLMEELGIECRVGHPATIRAAAPRKQKTDRRDAELILQMLVEKRFPAIWLPTKELLDLRALVLHRHQWVRIRTRIQNALQAIALANGLRRGPSLWSYDGQAKIAFLALLPHASYRRSMLQEMYRKMKEEIENLTQQVAEQAGQRCGARLLMTHPGVGPVTALATEVFLGDARRFVDGKALASYVGLIPREYSSGARQRLGGVTKQGSPLLRFLWCEAGAHAVRRDPELKRFYRRKLVQKGLGKARVAVARKLGIRLWIMLRDEIDYQEFCRRGQKQQSGAACAGKPEVANGAKSPAD

SEQ ID NO: 312670 - protein, 350 aa, unidentified
MQITTIGFDLAKNVFQVHGIDACEKVVVQKQLRRAQVLPFFAKLAPCLIGMEACASAHYWAREIRKLGHNVRLMPAKDVKAYVKRNKNDAVDAAACCEAVRRPTVRTVPVKTPEQQASLMQHRVRDLLVRQRTQTINALRAHMAELGIIAAQGYDGLKTLLSIIADGSDSRLPENARASLSALVAQIASCQVEISAIEKRLLAQHRKNEDSKRLETVPGIGIIGASAIVATVPDASIFKTGRDFAAWIGIVSREDSTGGKQRLGPISKQGDRYLRRLLVLGALAVLKRARAHPDKYPWLTQLLARKPAKVAAVALANKMARVAWAVLTKKETYRAQSIVVRPAPASAGRD

SEQ ID NO: 312671 - protein, 350 aa, unidentified
MSQKTAAVARTIGIDTGKNTLHLIGLDDKGAIVLREKVARGRITARLANVPRCLIGIEAGMATHYVARELSALGHDVKQVPPAYAKPFRQGHKNDFRDAHAIAEAVQRPSTRCVPVKTDDQLDLQALHRVRSRLVGQRTAVINQIRGFLLEHGIAVRQGLRFLRQQLPDILAKRSDVLSPRMIRIMEDLSGDWRRLDERIEHVTEEIEVLAHGSEGCRQLMTVPGIGPIIASAMVAAIGNGAAFAKGRDFAAWLGLVPKQMSTGDRTILGRISKRGNRYLRTMIMQGARVILLRPANWAKHSFGPWLTAAANRLHHNVLATALANKLARIAWTVLMQARSYEARVEPRTA

SEQ ID NO: 312672 - protein, 406 aa, unidentified
MEVVHERCSGLDVHKKTVVACAITPEGREVRTFGTMTDDLEALAAWLEERGVTHVAMESTGVFWKPIYNVLETFEFELLVVNAQHMKAVPGRKTDVKDAEWIADLLRHGLLRASYVPSREERELRELVRYRKSLIRERAAEVNRVQKVLEGANIKLASVASDVMGKSGRAMVEALSIGATDPKALATLARGKLQDKQGELERALRGVVGAHQRMVLATQLRHIAYLDEEIERLSGEVMERQRPFADALERLQTIPGVGQRTAEVILAEVGPDMSRFPTAGHLASWAGLCPGQNESAGKRKSGRTRKGCVSLRESLTESARAAGRTRRTYLAAQYHRIAARRGAKRAAVAVAHTILVIAHHLLRDGTTYEDLGANYFDERDKTGTVKRAVARISRLGYDVTLVPKAA

SEQ ID NO: 312673 - protein, 425 aa, unidentified
MNYKQNEKINQVKESTLVVGIDIGSTTQYARAFDWRGFELGKVFTFSNSREGFESFKAWMQHLQDKYEKLDAIVGIEPTGHYWFDLGAYLEDEGILLVMVNPYAVKQTKELDDNSQSKNDRKDPKVIAKLVTEGRYSAPYTPDGVYADLRIMVANRKRLIREMTQIKNRFARWFAIYFPEYTDVFGDYEAQSSMLLLKKVCTPEAIVELGAEKINQIWRDAKLRAVGMKRATTLCETAKRSIGLKKGSSAARYEMKLLLEDYEYKKAQLDAVMEEIEKLCRKIPESEQMLAIKGIGVITVAGFLAEVGDVRRFESPRQIQKLAGLSLRENSSGKHKGQTTISKRGRSNLRAVLFNAAIPLIATNPEFKSLHEYYTTRANNPLKKKQSVIAISCKLIRVFYAILANGVTYDAQKMLSDIHRQPQAA

SEQ ID NO: 312674 - protein, 345 aa, unidentified
MTQYKRIGIDTSKAVFTLHGIDQQDRPVLRINLRRAQMISFFKKLPPTEIAMEACGGAHHWARELAALGHEVRLIPPQYVKPYVKRGKNDRNDAEAICEAAGRPGMHFVPVKSVSQQAQGMILKVRETLVGQRTLLVNTLRGHAAEFGVIAGKGLGEIGPLLTAIEQQASIPPEAKDMAALLGRQIEDLDARIKEIDAKLTAAHKANGVSLRLATIPGVGPVTALTLAVEIDPAAFESGRHLAAWAGLTPKDRSTGGKQRLGGISRAGNERLRVLLVSGATSVINAAMRPGSRQMTDWLRALLQRKPRKLAAVALANKMARMAWAMMTSGEAYRRPPAAAGAVPA

SEQ ID NO: 312675 - protein, 343 aa, unidentified
MSEVTVIGLDIAKSVFQAHGADARGQQLFSRRITRGKVLEFFEDQPRCLVALEACGGAHHWARELTRMGHDVRLIPPACVKPFVKRQKNDAADAEAICEAAQRPNMRFVAVKSEEQQASALVFRTRDLLVRQRTQTINAIRGHMAEYGWVAPKGPSWVTKLGDLMEDGVGASLPRAAQDMFRVMLAMLEELNRQVAALDKEIARRAREDEVARRLMTIPGIGPITATAIVALAPAAETFRRGRDFAAWLGLTPRQKSTGGKTRLGRTSKMGERTLRRLLIIGSSTVVKYASSRGAPEGSWLASMMARKPRMLVTVAQANKTARIVWALLMKNENYKAPVAAAA

SEQ ID NO: 312676 - protein, 410 aa, unidentified
MHTVVERCCGLDIHQASVVACILIQEGRTARKEIRTFSTMTRDLEALRDWLMAQGVTHVAMESTGVYWKPVHAILYGSFELIVANAHHIRHVPGRKTDVKDAEWIAELVRHGLITASFVPPPAIAELRDLTRYRRKVVGSQATERNRTLKLLESANVKLSAVATDVFGVSGMAMLKALIAGDAAPADMADPAKGRLRRKLGPLAQALDGRLTETHRFLLKLQVNRLAEMERDILALDQLIAEKAKPYGRQVGLLIRIPGVDRQIALVIIAEIGVDLSHWPTAQKLAAWAGVCPGNHESARKARSGRTRQGNLYLKSALFLAATTAARTRGSYLKDKYHRLKARRGAKRAGMAIAHKILIAAYHMLTEGTDYVELGEAYLDKLAEKRITRGLVRRLSNLGYKVTLEQQQAA

SEQ ID NO: 312677 - protein, 364 aa, unidentified
MNKCHSNTELSSLEETRCQFNGGRCTIKLGIDVHQDFYVVVLQEGGANPKPPQRFRKEAFLQWAAKLVRLGAQVHAIYEACGFGFSLQRQLSALGVHCYVVCPQKLDELAKRVKTDGLDAKALCLKLDRFVQGNRAALALVRIATEKEEQLRAIHRQREQLVKVRKMLEAHGRSLMVNHGIEPLKNWWKERTFSVLQVPAWMKELLLNTQPILLALQEKIAALTLQLQGAAESTQPRGLGKMTSVIIDREIGDWHRFNNRRQIGSYTGLCPGEYSSGKSRLQSCVTKHGNPRLRAALVELAWRLVRFQPDYKPVLKWKQLLKKGALITGAARKKAIVAMARQLAVDLWRIRTGRLTSEQLGLSI

SEQ ID NO: 312678 - protein, 410 aa, unidentified
MANYFQLFVGIDWGSEKHRVCMLNSEGSTVDQRWIEHTGDSLHELIEWLRTKASQTPNTVAVAIEVPRGAVVETLVENGFAVFSINPKQLDRFRDRYSPAGAKDDRRDALVLADSLRTDLHCFHRVKLDEPTLIRLRELSRLEDDIAQEQNRLHNQLREQFHRFFPQLLALSPAANEPWLWDLFQAAPFPAKAAKLSAARIEGILKKHRIRRVDAVKVQAAVSTRALTLAPGAAEAASEHALLLLPRLRLLEQQREHIAKRVQTLLEELTQKADDEESLEHRDAAILLSLPGVGRKVAATMLSEASEAIAERDYHALRCYAGSAPITRQSGKKTVILMRQGCNERLRNALYHWARVSVICDPKAKTMYAGMRARGHSHGRALRGVADRWIAVLISMLRHNALYDSKKRAA

SEQ ID NO: 312679 - protein, 338 aa, unidentified
MTTTISMLAIDLAKGSFQVCAIGADGAVLYNRVLSRTRLMTLLAEQSACVVAMEACATSHHWGRVAQSHGHEVRLVPAAYVKPFVKRQKNDKADAEAIAEAASRPTMRFVAVKSAETQGRAVAFRTHQCLVRQRTQLINALRGHLAEFGLVAPKGPASLKVLENALADEASDLPDPVREMGTIYVEQIARLTEVIERLVDELEAASKTDEELRRLCTIPGIGPVTAGAVAAFAPDLDTFDSGRNFAAWLGLVPRQRSTGGKTRLGSVSKMGQTDIRRLLIVGAMSVIRWVVRKGGSTNRWLAALVARKPKMVAAVALANKMARMIWALTTKQENYRMA

SEQ ID NO: 312680 - protein, 331 aa, unidentified
MSVWVGLDIGSRNSIVGVRKDGRPAGQWDIAQTPAGRKAAVKKLLALKPKSIVMEATGIYYLDLALELHAADLPVSVINPKSFHNFAKLMLVNSKTDAIDAQLLSEYGERMTPRLWIPPSLEQLELRALGRHINRLVGHRTRAKNELHALQATTTTVPMLIEDQEEAIASLDNRIERFRKAGRELVAQCPTLTRQYKQLLAGPGIGEVSALAALAELTTLPQMLKSSQVARHAGLDVRQTQSGTSIDKPGRLGKSGNAYLRAAMYMPALTAVRCDPYAKAFYESMLSRGKKKMQAIAAVMRKYLTGIWACMRGEDLFDTAKLFSSEHLGKA

SEQ ID NO: 312681 - protein, 349 aa, unidentified
MAVTFVEEARPVTGGVDTHADTDVAAALDSVGGLLGVREFPATAAGYSRLLGWLGGCGTVCLVGIEGTGSYGAGLARHVTAAGIRVVEVDRSDRQDRRRQGKSDPLDAVSAARAAQSGRARGAPKGRDGAVEAIRALVVARRSAAGERTPTINQARALILTGPDDLRARFTRHTPAALVAGLASLRPRPGDVAGYAVRVALRELGRRAQFPGGQPGRLDDLIVSLVTARAAGLLALYEIGPRTAALLLIAAGDHPGRLRSEAAWAHLCGAAPIPASSGKVTRHRLNPGGDRQANHALWRIVFTRLGSDPATRAYAERRTAEGKSKAEIIRCLKRYVAREVYPHLRPAGG

SEQ ID NO: 312682 - protein, 417 aa, unidentified
MNSPPETIPIQRYIGIDIHKHYLMIGGQNRHQEWTLRPRKVQVSRFRDWAEKNFQPGDAVVIETTGSVWDIYDIVAPLVTRTQVAHARKVRQIAEARVKTDKEDIKRLITLLIADIVPKVWVPPQHVRELRSLISFRWRLNKQITMSKNRLHSVVQRFNLNAPEGGLLTDKNRTWWEKQEFSDLTGFEVKQDLEIVKTLEGQKEAIDLKLAELSNTEPWASDMVYLMQIPGIGLIFSMVILSAIGDIKRFSHPKKLVGYAGLGAGVHDSGQKHQSKSITKEGRKELRWALVEAAWVAVRFDPFWKAQFQRLEKRMPRNKAIVAIARRLLVSIWHILTKREPYRHFDEETIAYKMLIWAQAIGEEGRQGLNRQQFAKYGLLRLGIGKDLERIVKGGGPRRIAPTEEILALKPELAPPR

SEQ ID NO: 312683 - protein, 359 aa, unidentified
MQRNKISFKGQKIYIGIDVHAKTWEVCVLTESGYKERHPQQASAKTLFDFLKKNFPDGEYHAVYESGFSGFSTYYALKEYGINCVVTHAADVPTTQYEEVMKTDKVDAAKLARSLRAGDIRPIYIREKENIDDRSVIRIRKTIQKQLSGYKARVKHLLHCNGVEIPERFARPGTHWSRAFIKWLKEDVVLLSSSRLSLDLLVKQVETIRQTLLDATKSIRRLAQTDRYRNNYELLMSIPGIGVSVAMCILTEIYDVKRFRNENQFASYLGLIPTCHNSGEKTASGEKTFRGNKHLGPMIIEAAWIAIYRDYGLGMAYARYKQSMKPQEAIVKIARKMSNIIFSVLKNSRKYEPYRWDKE

SEQ ID NO: 312684 - protein, 353 aa, unidentified
MAKLSKDLQGVTIGLDVGDRSSCLCVLDADGEIVEESKVPTTPKAIEARFGSQKPVRVVLETGTHANWLHDALEALGHEVIVADARRLRAISDGDRKDDRKDAETLARLGRSDIRLLSPVDPRAPEARKDLEVLRARAKLVVIRTMLVNHIRGVIKSFGLRMPECSAERLHKRALPPELSNELATMMVMLESTSAAIDAYDTKIASMVETKYPQTTVLMQVHGIGPLTSLCFVLTVGDPRRFKDTRDVGPYLGMTPKKHQSGANDPKLRITKSGDSMMRTLLVQSAQHLLRRSSPDCDLKRFGTRLAQRGGKYAKQRAVIATARKLSVVLLAMWKTGEVYEPLRVTPQVKHKR

SEQ ID NO: 312685 - protein, 409 aa, unidentified
MIYCGIDWAERTHDVALVDDSGQLLAKRHITDDAAGYKLLLDLLAEYGDTEDNPIPVAIETSRGLLVAVLRTGKRQVFAINPMAAARYRDRHSVSRKKSDPGDALVLANILRTDMHAHRPLPQDTDLAQALAVLARAQQDATWNKQQCANQLRSLLREYYPAALDAFAKWNNGLCRPEARELLKIAPTPTRAARLTRTQIQVALKRAGRKRGIEAEAERLREVFRAEWAHQPPLVEDALGKQMLALLVQLEAACTAADDLAEAVEEAFPQHPDADVILSFPGLGVQLGARVLAEIGDDRQRFADARGLKAYAGSSPITRASGKKSSITRRWVKNDRLNHAGYLWAFSAITASPGAKAHYRRRRDDHGDWHAAAQRNLFNRMIGQLYHCLQNHTLFDESTAFPTELPVAA

SEQ ID NO: 312686 - protein, 343 aa, unidentified
MGEVSTIGLDIAKSVFQVHGVDGTGAVVMRKRVGRAKVLEFFGGLSPCLVGIEACPSAHYWSRELQALGHTVKLMPPSYVKAYLKRNKNDANDAAAIGEAVTRPSMRFVPTKTPEQQTGLMLHRTRQLLVRQRTMLSNAIRGHMAELGIISAKGRNGTAELLRIIANVADDRIPSVARFCLDLLARQYLTLIAEVSSIDKRIHAWHRSCEASRRLEEIPGIGPIVATALVAEIGDWRAFHSGRSLAAWIGLVPKQHSTGGKERLGSITKQGNRYLRWLLVAGAMAVIRHANQYGTKRPWLTRIMDRRPAKVAAVALANKIARMAWAIMVYGERYREPKLSLAA

SEQ ID NO: 312687 - protein, 337 aa, unidentified
MKRYLGVDLHRTQFTVCTRLENGRTYLRQWPLRELKLFAAQLRKDDEVAVESTGNTRLFHDAVVEHVAHVAVVNPSQFKVISQSVKKTDKNDAELLALYLAKGLLPEVRMKQRNQREMSHLAQTRDLLVKQRSALKAKINNMLSGEGINLKREALSSNKALERVLALPLSPLMLAEARVLVGQIRGLNQSIAELEGLIEEEGPKLAGHQNLMSIKGIGPVSAAVLLSVIGDIRDFSDPGKLAAYLGLVPRIQNSNETEHSGRITKQGNKLARTALVQCALIAKRYSSFLQQFYQRIQRRRGGGKANIALARKFLGVIYHTLKNNWVFEDFPNFVLAS

SEQ ID NO: 312688 - protein, 315 aa, unidentified
MTNLKKSKSVVNVGVDVGKYVLDVCIYEKEIHWQDDNSPEGIKRILKRLAYYKLERLVMEATGRYEFELAQAAYKKHLPVCVVKPLRVRRFAGAIDQIAKTDKLDAALIAEFAYKVKPDVTPQKSKNLIAIKDLISRRRQLMTMRTQEMNRVKIMGKSLEVSCRRIVRCLDQEIERIEKKLTKYIEDHTDWTEKQTLLKSAPGVGNALVFTLLADLPELGNLSRNQVSALVGLAPMNRDSGKLKGKRRIQGGRYTVRTMLYMATLSATQCNPVIKAFYKRLVAQGKHKKVALTACMRKFITMLNAMVRDKCEWAY

SEQ ID NO: 312689 - protein, 322 aa, unidentified
MNARIFVGVDVSKDSLDVHLLHVDANEQRSTSLRVDNSQKGIDELIQKLKDKPIELLVIESTGGYERRALLELLNAGVNVAMVNPTRVRRFAEAFDTLAKTDSIDAAILAQFALRMEPRRSEIPSQNQIVLNELMTRRRQLIVMRTMEKNRAQQAVGKLPVKQIRSLLKLIDKQVEEIDRQLEKLIQADPDWKERAELLDTIPGIGKNTAFRLIAELPELGKLNREQITALAGIAPMNRDSGRQRGKRHIRGGRVEARNALYITAWVAKRYSPKIKAYAERLKAAGKPFKVIMIACMRKLLIIANLMLKSKTPWNENPVLGA

SEQ ID NO: 312690 - protein, 396 aa, unidentified
MGITDTNGRTEYKQARFSSFTKGLQKLADWLAKYDCNDVCMESTGKFWIPVFNILEKTCWVTLAYPKYTKPQKGNKTDHKDAKWICDLYMCDMVNPSFIPPPDIRQLRDLMRYRSKLTNIMTSEKNRALNCLTVSNLKLDDVFSDVFGKSSRSVIRYILEHPGETFQVAPFIDRRCKHPVEEIQAVIDGTISHQQAVKLRECLQHLDELEVHKTNVEKEILCLVQQYPYQLELLQTVPGFSGNIMTAIALISEIGADMSVFPSAKHLVSWAGCCPRNDQSSKKVKSTRISRAGVYLKPLLVQVANAVIKSDKYPECKERYRRIKARRGHKKAIIAVCRMLLTAIWNILSKLEPYSAAGYLEDKLAEHSVVISKAQGLELLRKRGYIFKDEVDPAPA

SEQ ID NO: 312691 - protein, 325 aa, unidentified
MNEVTTIGLDLAKRVFQVHGADATGRPILQKKLRREEVLTFFAQLPPCVVGMEACASSHHWAREIRALGHDARMIPASYVRPYVARQKNDAADAAAICEAVTRPAVRTAPIKSLTQQALRVLHRTHELLSRQRVSLINAIRSHMAEFGVIAPAGPQHVGSLIERISDPKTPIPDAVRAPLGILVDEYVALNARINALQAQMRKSCHEEPESARLLSIPGVGPITVSAILAGVPNIRGFRSGRDFAAWLGLVPRQNSSGGKDWAELPRWVIVPSDVSWSSARCLRYAGRGVSRTSLKVGWGALSLANRSNSQPLPWQTRWQGSFGR

SEQ ID NO: 312692 - protein, 350 aa, unidentified
MVVVGADVHKRTHTFVAVDQVGRKIGEKVVEATTVGHHQAIRWARTQFGVELVWAIEDCRHLSARLERDLLSADQKVVRVPSKLMAQTRASARTRGKSDPIDALAVARAYLREPDLPVASHDELSRELKLLVDRREDLVGQRTSTINRLLWRVHELDPGQAPKPASLDLAKHRRMLGDWLAAQPGLVAELAREELADITRLTEAINALAKRIGERVRAIAPALLAMPGCGELTAAKIIGETAGVARFKSEAAFARHTGVAPIPVWSGNTVGRVRMTRTGNRQLNAALHRIAVTQIRLDGLGQAYYRSRLAAGDSSTEALRCLKRRLARVVFHHLHTDHNIRTKPCQPAAA

SEQ ID NO: 312693 - protein, 404 aa, unidentified
MAPVNLPPLRFIGLDIHKEYLVASGVNAAQEPVLGPRRIGITEVASWASKQLTPQDAVVLEMTTNTWEVYDLLLPHVHSVTVVHPPHVALIVRAQVKTDRKAALTLAQLHAAGLLVGIWAPPPEVRDLRLLIAQRWKMVRLATIAKNRLHSALHRHHLAAPDSSLPFSPKQEEFWLNLPVSEAERAAIRCDWETIAFAERQKQALQESIARAAAADPRAPLLVQLPGVGMIGAATLLAAIGDITRFADAKSLVGYAGLGARVHDSGRLHQTGRITKSGRKDIRYTMVEAAQHAARAHAYWRAQFARLEPRLGKAKAIVAIARRLLVAVWHVLSAETADCHAEPQQAACALFAHAYHVGVRNLPDGQSALAFTRQQLDRLGLGRELTHLPWGSKRYKLPPSKLPA

SEQ ID NO: 312694 - protein, 355 aa, unidentified
MDSIKYVGLDVHRDTISVAVLNADGKLVMQSVIATQASAILDFLSGLRGTLHVTFEEGTHSAWLYDLLVRRVAHLVVCNPRKNALLKAGNKSDAIDARKLAELLRAGLLSPVYHGQNSTAAVKHLGRSYAALTEDTTRIMGRLKALYRGQAIACAGKKPYGSRHREEWLAQLADSGLQRRARRLYQELDLLQQLRREARRDLILECCKHSETKLLRTVPWLGPIRVALLIGRVQTPHRFRTKRQFWAYCGLALETRSSADYGFVDGQLERRKKPVFIRGLNRNHNHDLKNLFKSAATTASGSEGVFGAFYENLLKKGMRPEMARLTLARKIAAITLHVWKKGEAFDAEYLKSQAA

SEQ ID NO: 312695 - protein, 352 aa, unidentified
MSQKSNCAIAVIGIDIGKNSFHVVGHDRRGAIVLRQKWSRGQVEARLANLPACLIGMEACVGAHHLSRKLRMLGHEARLMPAKYVRPYSKGQKNDFRDAEAIAEAVQRPTMKFVATKTVDQLDLQALHRVRERLVSQRTGVINQIRAFLLERGVAVRQGLRFLRVELPGILATRTDVLSPRMLRILEDLAGDWRRLDERVEGLSNEIEAIAQQDAGCERLMSVPGIGPIISSAMVAAIGAGDVFNKGRDFAAWLGLVPKQISTGDRTILGKISRRGNRYLRVLFVQAAWVVLIKPKSWERHGLKSWIEAAKKRLHRNVLAIALANKLARIAWSILAHGRHFEATKVGGAIAQ

SEQ ID NO: 312696 - protein, 320 aa, unidentified
MTTVYKRFIGVDVASRKLDLFDSVAKVHQTIDNTPEAINAWIKLLRRKRAKTIVVMEATGGYESNLVDALHEADTDCCVCNPAQVRSFAKGIGLIEKNDPIDARMIARFGEVVTPKLREKPSPEERKLKALVHRRDQILSQQSAERNRLAQARDEEVREVIQEALDFYKRQIAGIEKKIAALIDASQPLSERAALLASCPGVGTATVAMFLAELPELGSLNRGQIAKLVGVAPIVRDSGQKEGKRSTFAGRSLVRKVLYMAALVATRHNSIMKAFYQRLLAKGKPPKVAIVAVMRKLLVTLNVMVREGTPWRESTLAPAG

SEQ ID NO: 312697 - protein, 311 aa, unidentified
MDEIIIDKGCGLDVHKETVVACVMGSGIKKDIRTFSTMTNDLLRLKTWLSRLGITHVAMESTGPYWKPVFNVLEDGFTLILANARHIKNVPGRKTDVKDSEWICRLLRSGLLSASFVPSQRIRELRDLTRYRRKLTQALSAEKNRIQKVLEDANVKISSVLSDTFGVSGNQMIEAIMEGKLREEEIADLAKGRLKSKKEEIREALVGYFHDHHRFMIKASLEHIKYLEKLISDLDRATKEKLEQYQKEYELLQTIPGVKEQGAAAIIAEIGADMDVFPSEGHLSTWAGMSPGNNESAGKKRVERRPTAIRI

SEQ ID NO: 312698 - protein, 340 aa, unidentified
MHATIIGLDLAKNVFQLHAEDRSGTVLWKRRLRREELEAFLRKQPPALIGMEACGSAHHWARVFTAVGHEVRLMHAKYVKAYVKRGKSDVRDAEAICEAVQRSSMRFVPIKSVEQQIERSLERARDLLVKQRTQLMNATRALLAELGVVACAGLRGFTTLADKIAAGDAVIPRPSLTALKPLVEQWRALQASIDQLEARLVARAHSDERMRRLMKIPGVGPLTAHAVVTAIGDPKRFSTGRDFAAWAGLTPLTDSSAEKTRIGHISRQGDHSLRRLMVLGAVNMARHARAKPCEANAWLNGVIARRPVKVAMVAQAAKTARIAWALLCSGENYRGRTAAA

SEQ ID NO: 312699 - protein, 364 aa, unidentified
MTGSSLAQVVADIVEVLPVDAVVKVGIEAAGHYHRPLLNAAWPIGWEVLELNPAHVTEQRRVLGKRTVKTDVIDLQAMTELLLAGRGQPVRDRSLVLGELTAWSAHRASRVVVRTATKNQLLGHLDRTFPGLTLALPDVLATRVGRLVAAEFPDPARLAALGTARFIRFGATRGLQIRKPVADRLVQAAREALPTADAAVARAVLAADLALLADLDAQVDTATDQLARLLPRTPFAPLLTVPGWGVVRAGNYGGALGDPARFDNHRQIYRTAGLNPIQYESAGKRRDSAISREGSVELRRALIDLGVGLWLNDPAAKVYGAQLRARGKKGLVIACAMANRANRIAFALVRDQASYDPDRWTQED

SEQ ID NO: 312700 - protein, 409 aa, unidentified
MERQIERGCGLDVHRDTVAACVRGPGPNGHRQQHVRTFGAPAAERLARRDWLEAHEVTHVAMESTGVYWKPVFYVLEDRFTCLLVNAAHIKQVPGRKTDVLDCIWIAQLLEHGLLRGSFVPPAPIRELRDLTRHRKVLIQERSRAANRLHKLLQDAGIKLASVAPDILGVSGRAMLEALVQGTTDPATLADLARGKLRAKLPALRQALAGRFRPHHAFLVSQLLAHVDYLDEAITTMSTEIAARLLPFEPQVTQLDTIHGIARRTAEVAIAELGVTMSAFPSDRHLASWAGLCPGNHASAGKHRSGTTRKGNHWLRMALIEAATAAIRTKDSAFAARYRRVMRHRGHKKAVVAVAHALLRTIYHLLAQGTPYHDPGPDYYDRRHAQRAARRAIETLERQGYRVVLEPAA

SEQ ID NO: 312701 - protein, 308 aa, unidentified
MPLWIGIDVAKDTLAVHVLPLDQLLFFPNTAQGHQRLCDHLAGHCVGNALLEATGGYERAVMTALATAGIPVTRTNPRRARAFATALGTTAKTDPLDAALLARMAQLVQAPAPVPDPLREQLRMLVQRREQLVQQRDDERRRLHQATLAMVRACLIEQIGDLRRRIQRMNQAIKQVRCQLDDALAHALGTVPGIGEVTTASLMAYLPELGTLDRRQIAALVGLAPYNVDSGQHCGKRRIRGGRATIRRVLYMACWSVVRTQASFKERYQQLRARGKPAKVAITACMRVLLIRLNAMARDRTPWREVIG

SEQ ID NO: 312702 - protein, 371 aa, unidentified
MYGSQATFHQKGGPPMNYVGIDYHKKYSHVTAIDEEGRVIRSRRLDNRPESFQEFFGRLQGPSETVLEASRTWGVMYDLLEEIEGVESIELAHPQKVRAIAEAKIKTDKIDSHILAQLLRADLIPAAYIPGKQTRSYKEMIRQRVFLVRMRTRLKNRIHVLLDRLHVPLPSVTDIFGKRGTDYLRKLNLAGVDGEILRENLQLLESLNTLIKEAEREIELLLGDNPLVKLLRTVPGLGPILAAVVALEIDRIERFASPSKLASYTGLVPSTYASGGKLFHGRLLPMSNKWLKWALVEAAWVSIRTSPYCRTYFENHKRHKGPHTAAIALARRLSEIVWHVLTENRVYEERPFQRQRRVSIMATSPAALTAT

SEQ ID NO: 312703 - protein, 426 aa, unidentified
MTNSLFIGVDVSLQSNQICVLNFDQHKFFNLKFPNTPDGCEDAINKIKNIYDKFYFDKIVVVCEATGMYSFHLACYFSSHEFLNNFNTEVYQINAHDFAKYKASFSDIEKTDPSDAYILADFARVGRTKSLHPFRGSQYIALQRLTRQRYHISKNLVKEKLYVMNNIYLSFSGLIIADKKHKPFSNMFGATSCAIFDNFDSPDQIAQTPVDTLLDLISKVGKNRTKNPNEKIDLLNKAVRSSYRLDQTAYSGINIAVASSLSTIRFLENELKQVDKAILDTVSGLNSNAYNSLLSIRGIGKVYAAGILAEIGSIDYFKHNSNLAKYAGLYWNRTQSGKFEKEDKKFSQHANKYLRYYLIEATASCVRMNFPFIKNFYDSKFKEVTKHQHKRALVLSARKLVRLIFGLLRKNQYYSPLDSNTQSLIN

SEQ ID NO: 312704 - protein, 449 aa, unidentified
MREPQEIEDEEHEQVVERVAAIDVAKTSGKVCTRVPHPSRPGRRLTKVWDVDATTGAITELGDHLAGLGIEKVTVESTSDYWRVFFYLLQAAGLRVQLVNAREVKNVPGRPKTDKLDAVWLAKLTERGMLRPSFVPPVEIRQLRDYTRLRADLTHERTRHWQRLEKLLEDALIKVSSVASTLDTASTRDMLEALIAGQRDPKVLAGLARGRMRSKHAALVEALTGRFDDHHAELARMLLDQIDALTAQITKLTARIEQLIAAIPAAQGVDADGTTGPGAGTGSGAVVLPAVARLDEVTGIGLGAAQVVIAEIGLDMRVFDSPAHLVSWAKLCPRTIQSGATTRAGKTGKGNPYLKAVLGEAAAAAAKTDTFLGERYRRIVKRRGKRKALVAVARSILVIVWHLLADPAARYADLGAGYYASRIDKGKKARNHIRQLEALGFTVTLAPAA

SEQ ID NO: 312705 - protein, 368 aa, unidentified
MGKSSKLFVGMDVHKESIDVGTGDDAGGEVRHYGAIGGDLASVSRLARKLESTGKVLVFVYEAGPCGFGIYRMLRGRGHECWVVSPGMTPRSNADRVKTDRRDCLKLARLARAGELTPIHVPDEADEAMRDLVRAREDAVVMQRQVRQRLGALLLRNDVRYNGKTAWSPAHRRWIAELKLPHAAQHIAFEEYAQAVDEAGKRIERLEVAIRDELTRWRWVPVVEALQAFRGIRTIHAVRLVAELGDLTRFANPRRLMGFLGLVPSENSTGNRRRQGAITKTGNSSARRALVEAAWAYRYGARVSVGIARRQSGLPKPVTDLAWKAQLRLCSRYRRLSARGLNRNKIIVAVARELSGFVWALGQQVKPL

SEQ ID NO: 312706 - protein, 334 aa, unidentified
MENIALIGIDLGKNSFHIHCQDRRGKAVYRKKFTRPKLIEFLATCPATTIAMEACGGSHFMARKLEELGHSPKLISPQFVRPFVKSNKNDFVDAEAICEAASRPSMRFVQPRTESQQAMRALHRVRESLVQDKVKTTNQMHAFLLEFGISVPRGAAVISRLSTILEDNSLPLYLSQLLLKLQQHYHYLVEQIKDLESQLKRKLDEDEVGQRLLSIPCVGILTASTISTEIGDGKQYASSRDFAAATGLVPRQYSTGGRTTLLGISKRGNKKIRTLLVQCARVFIQKLEHQSGKLADWVRELLCRKSNFVVTCALANKLARIAWALTARQQTYEA

SEQ ID NO: 312707 - protein, 343 aa, unidentified
MKHIGMDVHSTTTDITVLNSNGKKIYYQKIPTRREELVASIKSIPGKKQVVVEESSLSDWVTRLLEPYATKIIRCQPQYNRLISESEKKCDEEDSHSLAELSYLDKLKGVHHPAQIYRDLREGVRAYWYSSRQVTRAKNRLKAFLLFNGIEKQGKQTYSQRKRACMLDKIKNSSANMKLATIRYWELDAARQSQLEHQRLLRELAKPVQDKVKILKTIPGVGEIVAHTLVAYLEDGRRLPNKRKLWQYCGIGIRRHESSNKGIEGASRQGNRCLKNALMIAVAHILTGCNGDNALWRIWCSQQAARIDPRRTRRNLARKIAVIAQHLLRSKEPYDDERIIMAH

SEQ ID NO: 312708 - protein, 300 aa, unidentified
MIAVGVDTHKHEHLARALDGLGQLVGGVTIKADPAGYLELADWLADVGEDVVVGIEGTGTYGAGLCEFLLASGIHVVEVERPRREERRRGKSDEIDALLAAKKVLAGDGLSTPRAGGTRQALSALLVAYRSCMVERTRVLNQLQALHTSAPLALRERIGPGNGRKLVARLHRMRASAGAPEAQQLIFGVLRDLGSRAHHLEVQAGAYKRELTRLINSLDPTLLDEPGIGPISAAKLIICDPARLKSEAAFARCNGTAPKPASSGQTIRHRLSRGGDRQANNALHTIALSRSLHDERTRAY

SEQ ID NO: 312709 - protein, 449 aa, unidentified
MANGNGVSRGDRNRNARLGRLRELVPLENAIVGIDLADKKQMVVVTDHDSKVLARKTFRCRAWDLGAALVWAAEKAAAKGFAQVTVACEPTGHRWRVLGQLAEQRGMPFVCVQPMLTSWARRTEDLTFDKTDEKDAVLIARLTAQLRCYVPEPVDETWGRLRHLGARRQQLITDAGSQVQQMRALLECVWPAVLDTAKQPFRSATWAAALAVVVDLDCGDLTRTRRLGLARFEHVVRREISRQGKQKPCLRIVRAVFTALADPAGVSAHRVGALERVALLLGDWKQTQLRLADTEARMTSVLDELQLTALATSIIGLSAIGAAAILAETGDPRRFATARALVKHSGLAPREKLSGTFIGRTKLTGQGRPGLRVAAWRAVWGAQRANPVYAARLSHLTKRDVNKLTVTQAQAVIAATILRHLHAVITTGKAWDPVIAAQGTKKVRAPIAA

SEQ ID NO: 312710 - protein, 351 aa, unidentified
MLYTAIDYHKQYSVACTMDAAGTRVREARICNAPEAFASYFGSLPEGSQVVMEACWNWTWLYDVLDEIDQVEDVVLANPAKTRIIADAQIKTDRLDAQALCTLLRGQLVARAYVSDRVIRAKKRVLRQRVYWVRMRTMLRNRIHVILDRQRELDRPICTDLFGQKGLHWLRQLELPDPDGLLLQQSLALHDDLVAHIRALESRFNAENRDDPSVQHLQTLPGVGPVLSAVIAAEIGPIDRFNRADQLCAYAGLVPTTYASGGHVHHGRVLPFCNRWLRWALVEAAWTGISCSPYLGALYKRCRERGKKANVAIIVVARRMCQIVWSLLQEQRDFTTMPPSRTLSPVAPIPK

SEQ ID NO: 312711 - protein, 363 aa, unidentified
MFTERTSIGLDVHARSVVAAAIDGVTGEVIRARLTPSYEHIQSWIAELPGPVAVAYEAGPTGFGLYRALTDTGVRCEVVAPSKLHKPAGDRVKTDARDALHLARLLRLDEVTSVSIPSVNQEAARDLVRAREDCRGDLMRARHRLSKLLLRHGIVYYEGAAWTDAHDRWLRSRVAPQLPTLATRMAFDSDYEQVLMLQARRRGLDSAIENIATDSEFTPVVRRMSCLRGVGTLTAFALAVEIGDWNRFTGNTIGAFIGLVPSESSSGSTRSQGPITKTGNTHARRLLVEAAWHHRPKYQARAVMRARWEKAPAAARARGHEGNRRLHNRWVDFLARRKRSTVANVAIARELAGWCWSLAVMDD

SEQ ID NO: 312712 - protein, 350 aa, unidentified
MPVYLGVDFHARTQTVCWCDTEDGVIHQRTLDHERDDVRAFYAQFAAPALVGLESSGYALWFHHLLADLGHQVQVGDAAAIRKFAQRRQKNDRRDAALLRGDFPAVHVPPPASRDVLGLLRYRHRLVRVRTLLRNGLQAVALNHQLRLGPALFRTRGLVQLQALPLQGAHAAQRHHSLALLDELQKNILEVEEVLEARADDDRVRRLRTHPGVGLLTALAVVHTLEPVTRFDRARRVAAYCGLDPQEHSSGDTVRFGHISKQGNRLLRFLLVEAAHTAVGPGQDDDLRRFYFHLLVKKHSAVATVAVARKLVLRLYRMLRDQIDYDEFRRRGRDARRARENASLPQRGDG

SEQ ID NO: 312713 - protein, 463 aa, unidentified
MSMKERGKTPAKGAKPKIDWKALEIVHPDAAGIDIGGSEHWVAISPERDEQPVRCFDCFTADLEQMADWLIERGVRSVAMQSTGVYWIPVLEILQERGLEVYLVNARHTKNLPGRKSDIAECQWLLKLHTFGLLNNSFQPSDQIRVTRTLWRHRGGLVAQASSTIQRMQKALTEMNIQLCNVLSDLSGASGMAIVQAILNGERDPQALAAWADPQVKASRRVIAKSLKGNWREELLFVLKQEVEMYRMYQERIAACDQKLQGHLRVLAPKVDLQAQPLGPRPKGKRARGNAPKFDLRTELYRITGVDWTQVDGIDVQVAQSVIAEVGVDLHAFPSEKHFSNWLGLCPTNETSGGKVLKRQTPKVVNRAKVAFRQAASTLLRSQSYLGAQYRRPRTRLGAPKAITAMARKLACLFYRLLKHGQQYVDKGAEFYESRYREQQIRSVIKRAHQLGLQLLQSGDKSA

SEQ ID NO: 312714 - protein, 351 aa, unidentified
MDYRVYCGVDFHARQQTISCLTTEDGAVSTHELKHQNKAELKAFYAQLRGPVLVALEASGYSPWFEQMLEELGHEVWLGDASEIRRRARRRQKNDRRDAELILDLLLHDEFPRIHRPSVKSREILRMLRYRHKLVQMRTIIKNSLQALSIQSGLSLRARLFTGAGLDQLRSLTMSPVMQYQRDQWLVALESLNQHIDAATNWLGEQATGDARVQRLRTHPGIGLLTGLAVVHTLEPVIRFRNQRKVAAYVGFDPQERSSGEKKRYLGISKAGSRVLRYLLVEATHTAIKRDPDLKRFYLRLLHRHGKAKAKVAAARKLLIRSYILLRDHIDYAEFGRRAVAARLARLASKA

SEQ ID NO: 312715 - protein, 343 aa, unidentified
MGEVSTIGLDIAKSVFQIHGVDAGGAVVLRKRITRAKLLEFFAALPACLVGIEACPTAHHWSRRLQALGHRVRLLPPSYVKAYVKRSKNDANDAAAICEAVTRPSMRFVATKSEQQQSGLMLHRSRQLLVRQRTMLSNAIRGHLAELGIISAKGRNGTAELLEIIADEQDDRIPPAARFSLAILARQYAAIRAEIVAIEKRIHAWHRSSAESRRLEEIPGVGPIVATALVAEIGDWKTFSSGRSLAAWIGLVPRQHSTGGKERLGRISKQGNRHLRWLLVAGAMAVIRYARQRGTKRLWLARLMERRPIKVAAVALANKIARMAWAMMVRGERFKEPKLLPAA

SEQ ID NO: 312716 - protein, 482 aa, unidentified
MKPKPQEKTKKATDHPTERHWREMNRKQRRETMRKIQSEDLSLEVVHPDAAGIDIGNESHYVAVPPSRDSQPVRRFGCTTAELKAMADWLKQCGIRTVAMQSTGVYWIAVYDILEQAGLEVYLVNARETKNLPGRKSDVQESQWLMKLHTYGLLRNSFRPSQEIRRMRTYWRQRNDLVRAAGRHIQRMQKALTQMNIQLANVLSDVSGVTGQAIIKAILAGERDAHKLAAFRDCRVKASEEEIARSLEGNWQEDLLFVLKQEQAGYEFCQKQMTECDRQIEQYLQQREDRSRGASLPEEKRKERLKKKKGNKPQFDLRAELFRISGTDLTRIDGIDVMTAMTILSEGGWDMSKWKTEHHFVSWLRLCPDNKVSGDKVIGKGRLPTNNRVTIALKMAASTLWASNTYLGAQFRRLKTKLGAAVATKAMAAKLARLVYRMLRYGMPYVDRGAEFYQAQHRQLQIKYLKWKATSLGFQIIQVPAA

SEQ ID NO: 312717 - protein, 412 aa, unidentified
MDVIHPRCAGLDISKKDAKVCVRINGAGRRKTSETVTTFGATTRQIMAMRDHLAAQQVTCVVMEATGDYWKPFYYLLEDLSGVEVMLVNARHVKNLPGRKTDVADATWLASLGAHGLVRGSFVPPEPIRQLRDLTRTRTAITRERTREIQRLEKLLEDAGIKLSSVAADLNGASSRAMLEALLAGETDPAAMAELAQKRLRMKIPQLTEALYGRFTSHHAFLTRMHLDLIDQHTAAIEQLTDRIEVVIEPFRRFRDLICTIPGIGGNTADVVVAETGADMARFPTAQHLASWAGTTPGNNESAGKVKSRRTRPGNPYLQGALGTAAMSISHTHDTYLAAKYRRIATRRGPLKANVAVQRALLVAIWNIATTNTTYHDPGGDYFTRLNPQKARNNAVRQLEAMGYHVTLDQAS

SEQ ID NO: 312718 - protein, 467 aa, unidentified
MTPHKDYVLEPCPPAPMPLLPPSPVLSEALQVYHPHAAGIDIGEAEHWVAVPPGCDPQPVRRFGTFTADLDTLADWLIDCGVTTVAMESTGVYWIPLFELLEARGVQVLLIDPRQAKRVPGRPKTDRLDCKWLQRLHTYGLLAGAFRPEAHVCVLRSYLRHRQMLLTYAAHHIQHMHKALEQMNLKLTQVVSEITGVTGMAILKAIVAGERDPQHLAKLRNPHCHHDADDIAKALQGTWRAEHLFALRQAIELYDFYHQQMTQCDQQIKAHLATFDDKSAGQPLPPKARRHKKTNEPRFDARTPLYRLAGVDLTTIEGIEEGTALVILSEIGTDMHRWPSVKHFCSWLGLCPQHKISGGKVLSRRVRPGAHRVTVALRLAARSLHHSQSALGAFFRRMKARLGTPKAITATAHKLARLVYSLLQHGSAYVQQGLDAYEAQYRERKVKTMAKQAKALGYTLVPLTAQG

SEQ ID NO: 312719 - protein, 348 aa, unidentified
MQFYTGQHRYYCGIDLHARQMYVCIVDREGAILVHRNIKTDPTGFLELIAPYRDDLAVAVECIFTWYWLADLCAREGIPFVLGHALYMKAIHGGKVKNDRVDSQKIALLLRGGMLPQAYAYPERMRATRDLLRRRMHLMRFRADLIAHIQNTASQYNLPPLAEQASKKSERPAIPAHFPDPVVRQMIQLDLDVIAHLDEQLRVLEQDLALKAKAHDAFAYHLIRSVPGIGRILTLVILYEIERIERFATVGQFASYARLVKCAKESAGKRHGYSSKKIGNAYLKWAFSEAAVLFLRNNPPAQQAIQRLASRHGKGKALSILAHKLGRAVYVMLRKRQPFDQERFMASL

SEQ ID NO: 312720 - protein, 393 aa, unidentified
MSCTTGRANQVQIAAHPDRATLFVSLELSKSKWLATVLLPGGDKMSKHTVLGGDWDALLALLLRARARAEARVGKSVQIVAIHAAGLDGFSVHRVLQMNGVESHVVDPASIAVPRRKRRAKSDRIDGETLLRTVLAYKRGEPRVCSMVVPPSPEDEDRRRLSRERQTLVSERVQHTNRIRGMLMAEGIANYDPLRRDHREQLDALCTADGRPLPPHLKARILREIERIEVVLRQIAEVEAERDALLRPETKVGAAGGSETAAALLMKLKGIGAEFATVLWFEAFFRRFDNQRQLSAFAGLAPSPWKSGKIDREQGISQAGNPRLRTTAIELAWMWLRHQPGSALSCWFRERVGAERGRTRRITIVALARKLLVALWRYATQGVIPDGAVMKAA

SEQ ID NO: 312721 - protein, 392 aa, unidentified
MQVTRIGMDIAKQQFDVHGVDERGQVVLRRTLKRERVREFMAQLPGCEIGMEACGGAHYWHRELTKLGHTVRLLSAHKVKPYVVGNKNNRHDAAAICEAMSRPSMRFVEPKSTAQQDIQTLHRARALLLRERTALSNQLRGILHEYGIVMPTGLAALKRKVAALMAGDDERATTVLRTVVAEQFECFLELSRRIAKYDRQIAQFCRQDERCQRLLAIEGIGPLSATALVAACGDGREFQNGRHFSAYLGLVPGHSNTGNKTVMLGITKRGNRYLRTLLIHGGRAALYAARRRRDPRSVWLKRLQEKHCANLAAVALANKNARVAWALLRYGQEYCPARAHAQTSTSARTARPAKTTPASAVHRARPARSGAHSFAVPSARDEGHDERMLRNN

SEQ ID NO: 312722 - protein, 312 aa, unidentified
MTSSVTPTRFIGCDVGKRSITVFDSQTQRSFVVANTASALRTFAKRLDACCLVICEATGGYEARLLASLVAAKVPAHRADARKVKAFIRSFGTLGKSDKIDAKGLSRYGAERQTRLVRWQARDESRISLQTLVLTRNDLVKSRTAFQNRLAAPQSQAARPHLKAVSAKLNAEIAKIEAKIGELERNSQPLRQALEILTGIVSIGATTASALLALMPELGTLNRRQVASLGGLAPHPNQSGEQERYRRTRGGRSAVMDALFMAALSASRYHPTLSLLYQRLIQRGKKQIVALAAVRRKLLVIANAKLRDAMAV

SEQ ID NO: 312723 - protein, 310 aa, unidentified
MAMIVENYIGCDVSKAALDLFDETSRRHRRIANEEAAIAAYVAGLDPARDFVVMEATGVYDRRLRHALAGAGVAFSRHNPQHTHFYTKSSRQRAKTDRLDAAMLAQYGRRYQPAADPAPCEETERLQSLARRRDQLVEIRAKQKMILSLAFDADVATDIAGLIASLDERIAAIEALIKVAIAQAQGPAATYRLLVSAPGVADVTALTLMAHMPELGHRSPKSIAALAGLAPINQDSGKAKRKRPIRGGRPRVRRALYMAALGAIRANTRFRDAFNAIATRSGSRKLAVVAVARKLLVTLNAIIRQQKAFV

SEQ ID NO: 312724 - protein, 418 aa, unidentified
MRRVIGMDIHRTFAEVVFWEDGRLRWHGRVDMTRSGLEGFGRSLAKGDEVVLEATGNAMAVVRVLSPYVARVIMANPLQVKAIAHAHVKTDKIDAGVLASLHAAGYLPEVWLPDAETERRRRLVARRNQIVRHRTRVKNETHAILAAHLVPPCPHAELFNGPGRVWLARQALPGDERAAITRHLRELDRLGEDLTVLDREIAEATVDDPAVRRLLTIAGVNLTVAAGLVAAIGDIRRFASPQQLVSYFGLNPRVRQSGLGLAQHGRISKIGRSHARALLVEAAWAAAKAPGPLHAFFLRIRARRGHQIAAVATARKMAVLVWHLLAKETDYLWARPALVAHKLRALELQAGRPMKKGNRRGPAFAYNVKALRNQEMAIAEQAERAYQHFVAQWQPKPTRNRRATNPTAWSRGAPRQPG

SEQ ID NO: 312725 - protein, 353 aa, unidentified
MVEFSKAEAQEVVGLDLGDRSSQICRLDRRTGVVLEERRLSTTTASVQRYFSTLAPQLIALESGTHSLWMTRLLKSLGHEVIVANPSQVRAISSSLKKTDERDARFLAQLVRVDPQLLSPVQPRSEDSQQAIAVVRAREGLVKARTMLINQVRGMVKSFGFRLPSGGSAAFAPKAQQDKTLPSSLKVTLAPLLRVIAEMSEEIARFDKEVEALARRWPVTQRLRQIKGVGALTALVFVLTLGDPLRFACSRAVGAYLGLVPGSRSSGQSTPQMPITKQGDRMLRRLLVQASHYVLGPFGQDSDLRRFGLRLAERGGKSGKKRAVVAVARKLAVVLHRLWVSEADYQPLRGAAA

SEQ ID NO: 312726 - protein, 358 aa, unidentified
MPSITPQDAAIIEVAGGVDTHSDTHTAAMIDQVGRVLGTEQFPAGAAGYAALLAWMRSFGSLVRVGVEGTGAYGAGLTRLLRAERVDVVEVDRPDRKTRRFQGKSDPIDAVQAARTALAGERTGTPKQRDGRIEAVRNLRVARRSAVDQRADAQRQIKTLIVTAPDDLRERLRSLPAKELITTCANLRPDRAGAASPATAVRIALRSLARRHQQLTTEITDLDDLLDPLVAAINPGLVAANGVGTDVAGQLLVTAGENHDRLRSEAAFAMLCGAAPIPASSGKTNRHRLNRGGDRQANAALYRIVLCRLRWDPRTRAYAERRTKDGLSKKEIIRCLKRYIARELYQIITTTNDHELAA

SEQ ID NO: 312727 - protein, 411 aa, unidentified
MDADMEVVYERACGIDVHKKMVVACLITGQRKTVTRTFGTLTRELREMVAWLKGEQCQIAAMESTGSYWKPLYNIFELEGVEAIIVNAHDVKALPGRKTDVNDAQWLAKLLRHGLVKASFIPDKEQREYRELTRYRNSRIEERAREINRLQKMLEGANIKLGNFVSDITGQSANDLIKLIIQCDELTLEQVDSARSSRCKSSSEEFLDALTGVISPLQRELFTEVLRIIDEQTKQIERIEAMIKKYTTDAYGAAADALDAIPGIGRISAEQIVAETGVDMSRFPTADHLCSWAGLSPGNNESAGKRKSGKTRKGNKALKKTLVQCATSAINKKDSFFCAQYQRLVVQKGRNKAIVAVAHSLLIAVYHVLSGREYNDLGAEYYSQFNREKKTQSLLRQLKNLGWEPPCPVVA

SEQ ID NO: 312728 - protein, 335 aa, unidentified
MHYLYYVGLDVSKETFDASLVAFEDANEMAHRKFANSRKGICSCLHWVEKRHGIRLDDVIFCAEDMGSYISEMAVCASDRTLTFNFSLISPLVIKYSMGIARGKTDRVDARRIAEYAITHYRKIALYLPAEKELCQLRTWLILRAHLAKQRVAKLVLLEKLDYKEKFADVSIQRSMLQEEIAYAETHMKTIEREMKELIAADSNICRNYKLLTSIKGVGPITATVMLCSTLNFTKITDHRKFACYCGLAPFEHSSGTSVRGGCHTSSMANRDIKVQLNRSALIAIRCDPQLKAYYERKVAEGKHKFSVLNAVRAKIAARCFAVVRRGTPYVALQI

SEQ ID NO: 312729 - protein, 350 aa, unidentified
MDATTIGVDLAKTVFELALANEAWRVVGRKRLTRPQFERFLAVQSATHFVMEACGTAHHWARAARAHGHRVTLLPAQYVRPYVRRNKTDRTDAEALLEALRSGRIDPVMVKTVAQQELQALHRVRAEWMATRTARINAMRGFLQEHGVAISRGARTALTTIPTLLEDADIPIPPRLRAVLAQLLDDVRVLQVNLDALERDLAAIADTDPTVQRLMTIPGIGLITATALVATVGHIHGFRAARRFASWLGLTPSERSSAHRRRLGAISKMGDVYLRCLLTHGARAVLLAAHRAQGRRRTLTRFQQWGLSVQTRRGHNKATVAVANKLARIVWAVWSREIPYEDRPALPTAA

SEQ ID NO: 312730 - protein, 348 aa, unidentified
MLPRSVIVVSAFIGPGWLPEQDGSLNKAGSTKMTQISATAGIDTSKAKLDVAVHGGAAHWQVDNTSVGWRRLAADLCKAGVTRVGIEASGGYESGVVGHLRDNGFTVLVLQPIQVKAYARLHLRRAKNDKLDAVLIAACAATIEQQRIEPDRRLEKLAQHLTFVEQIEEDIARFKVRLEHVGHPRLRRMVIADIARLKARRSAELLRIVAVLRAHDDLARRLNLVLSIPGLGERTALALIIRMPELGRVSREHAAALAGLAPFDDDSGKRTGERHIAGGRRRLRRSLFAAALPAAFRWNKALIELYARLTARGKAHNEALIACARKLLIYANTVVQRGTPWSERPLSV

SEQ ID NO: 312731 - protein, 451 aa, unidentified
MEILYTNCAGLDVHKKTVKVCVMTHTSNGQLQKEFRTYFTTTEELLKLSDWLQEQGCTHIAFEATGVYWKPVFNLLEGNFTVLVVNAQHIKAVPGRKTDVKDAEWIADLLQHGLLKASFIPSGPQRELRDLTRYRVRLTQEKAREVNRVQKTLEDTNLKLGDVVSDIMGKASRMVLQAITDGETDPGRLAALAVGRVHASQEQLEAALRGNVTDHHRFLLSEHLTQIHHLEQAIERVTAEIVRRFTPPSPPEDGISSQKQQEAALEMMPDSASPQESPSAPHGGLSWSEAVVLLSSIPGIGERAAIGILAEIGITMQQFPSAAHLASWAGVCPGNHESAGKRLSGKTRKGNPWLRCLLVQAAHSASHQKRSYLAEQYRRIAKRRGAKRAAIAVAHSILVIIYHLLSNHTTYQEKGETFFEEQERQGAEKRLVRQLSRLGYDVTLQPIAQAG

SEQ ID NO: 312732 - protein, 405 aa, unidentified
MSQEQRSVIGGVDTHKDVHVAAVIDDVGKILDTSSFDTTAAGYRKLLAWLRSYGELQRVGVEGTGSYGAGLAHYLATEGIAVLAVNPPNRQMRRRRGKSDPVDAESAARSVLNGEATTVPKSGQSLVESIRVLRVAFTSARNSRTRVILQIRDLIVTAPDQLRGVLGPLSTNERVARCARFRVLGDLADPSEASRLALRTLARRYVALSAEMEELKHSLDDLTARANPALRAVKGVGPDVAAILLVAAGDNPERLRNEAAFAAMCGVSPVQASSGKTTRHRLNRSGNRQANHALWRIANARLITDAETRAYAARRTSEGKSRREIVRCLKRYIAREVFRTLTRPEAIPVGADLHDARTAAGFNLNQVAAVLRVDPTRVSRLERALDFDRELANRYAAWLTAQNAA

SEQ ID NO: 312733 - protein, 411 aa, unidentified
MEVIVRNGCGVDVHKRTVVACLRWIDPGGQLHKETRTFGTVTQELLALSDWLSEHEVSHVAMESTGVYWRPVYNILEGQFELLVVNAAHIKNVPGRKTDVADAEWIADLLAVGLLRGSCIPERDTRELRELVRYRKSLVRDRTAEVNRVQKVLEGANIKLSDVATDIMGKSGRAILEGLIEGEDAAEALAELSKGRLRNKREELAQALQGRMGAHQRFMLRELLGHIDYVNQTIERLETEIEERQRPFEEEIERLKGVPGLQERQARVVAAELPDVSRFPTAKHLASWAGLAPGNNESAGKRKSGKITQGNPTLREALIEAAWAAVRSKNTYLSSMYRRLAPRRGAKKAIVAVAHSMLISIYYMLTRGTDYIELGSTYFDERHHLHTKNRLVHRLEALGYQVTLEAAPAAA

SEQ ID NO: 312734 - protein, 346 aa, unidentified
MTIVEAHRAVTGGVDTHLDVHVAAALDPIGGLLGVESFATSPAGYGQLLEWLSSFGTVARVGVEGTGAYGAGLSRYLHRHGIEVIEVDRANRQARRQAGKSDPADAVEAARAAQSGRARGLAKTRDGNVEAMRALLVTRRSSRSMRVKTLCQIRHLLFTGPDELRERFQGLSHIMLPREAATMRPRTGTDVVAYTTKLAVRTLARRVVALDEETTHIDELLAVLVAETAPSLLALHGVGVEGAASLLVTAGDNPGRLRSEAAWAHLCGVSPIEASSGKVVRHRLNRGGDRQANSALWRIVVVRMVSHAPTRAYVERRTKEGRSKREIIRMLKRYVAREVYRHLPRA

SEQ ID NO: 312735 - protein, 339 aa, unidentified
MKAYAGIDLHSSNNYVGVLNEKDDRLSGKRVSNELGDVLMMLEPFKNELQGVVVESTYNWYWLVDGLQEHGYDVHLANPAAIKQYEGLKHTDDRWDSFWLAHLFRLGILPEGYIYPKEQRAVRDLLRRRLMFVQQRTSHILSLQSMITRNLGIRMSSNAIKKLKEEDAQEIFDSKHLIFMAQNNISLIQFLKTRIYGIEEAVMAQAKLRKEFDMLLSIPGIGKILALTIMFEVGDIHRFPQVGNYSSYCRCVKSERLSNGKKKGENNRKNGNRYLAWAYVEAANFAKRYCPDAQKFWQRKQAKRNNIVAIKALSNKIARASYYVMRDQVPFDPGKLFRT

SEQ ID NO: 312736 - protein, 404 aa, unidentified
MYNAVGIDVSKGKSTIAVLQPGGTVIRKPFDVSHTSQSLIELARYLGSLEGSTKIVMECTGRYHEPMLKALYEAGLFVSVVNPHLIKNFGNNSLRRVKSDPADARRIARYTLDNWAELRQYSGMDNTRTQLKTLNSQFSFFMKQKVAAKANLIALLDNTYPGVNKLFDSPPREDGSEKWVDYAYSFWHVDCVRRIGLKTFTERYRAFCRKHHYIFQPDKPEKLFHASKELVAVFPKEKTYKLLIQQSIQQSNLASGHVERLRQEMNALASTLPEYSTVMGIYGVGKTYGPQLIAEIGDVSRFTHREALTAFAGVDPGVDESGQHKSKSNRASKVGSARLRKTLFQIMTTLLQNAPEDNPVYRFLDKKRAQGKPYYVYMTAGANKFLRIYYGKVKECLRNLEQAE

SEQ ID NO: 312737 - protein, 461 aa, unidentified
MELRLGIDVACRAAHQASLADEQGKFLWSGRKFRTTTSDLQRLWSMLPAGADSSSITIIMEPTRNAWVPLAAWFRRQGATVVLVPPEQSADLRDYYCKHTKSDRLDSKILARIPLLHPEGMHTATGLGPGDTMRRAVKLRSNLVKRRTSILARLDALLELLGPGWHAALGADLANKTPLRFLAHYADPHVVIRLGRARLSRFLTRHSRGSWREEKADQLIAAARETLDLWADGLDFPELADDIAIEARLALQLTDEIKELETRIAALLDKADPGGIVCSAPGVGPILAAQILGRLGDPNRFDSLAAIRSFSGLVPKLDSSGLSGRHGGPTKSGDACLREALFMAAEQARRSDPSLAAKYHRLMTETGKHHNSAVCHLSTTLLTRIAACWRRSEHYVIRDVDGSPLTPEQGRQIVANRYTVPAEIRAARRITSARTGRRHKESRSAPPIGPSTTKATSLPPS

SEQ ID NO: 312738 - protein, 386 aa, unidentified
MTQHPHITASNGLDYDRTLILAVEVSGRSWVVAAQVPGLRQKSAKQQLAPRADALMAAVEGYKRRAAAAGMAVDRVIVAYESGGSGFWLARWLQQRGVEVYVMQPSSVPVDRRMRRTKSDRIDADMLLRTLLAWLRGEPRVCSMVPVPDEATEDARRPMREREELIRARVAIVNRIAAVLTVLGAGEYNPLRRDCRERLDQLRTALNQPFPPHARAQIERLLDRLDLIRQQVAELEAQRDRAVEGEAAGRAEQMIQHLARLRGIGVQTATVLVHEAFVRRFRNARALGSYAGLTGTPYSSGGTHREQGISKDGNRRLRATLVELAWMWLRYQPGCALSCWFHDRLGGSRGRLRKVMIVALARKLLIALWRYLQDGAVPQGMELKPA

SEQ ID NO: 312739 - protein, 501 aa, unidentified
MKTKRSKAKIQAERKSRAVPYSEPAQELQVLRPDAGGIDCGAQEHYVAVPPDRVKAGQPTVRSFSAFTEGLDAAVEWLKACRVSTVAMESTGVYWIPLYQKLEAAGIEVYLVNAGHVRHVPGRKSDVQDPQWLRQLHRCGLLNASFRPEGIICQLRSLNRHRDNLVKSSASEIQHMQKALQQMNLHLHHVVSDITGLTGLRIIDAILAGQRDPEQLVKLRDKRVHKSTPQQMQAALVGDYRAEHLFVLNQSLQAYRFYQARIQECDRETEPLLEKLAQQVETASARLKLDALKAADAQPGVTLPESPNESKASASSLKAKRHRKPRANEPKMELAGLLERICGVDLTRVVGLNVLSVLLIVSEIGVDMSKWRSAKAFCSWLGLCPGNKISGGKVLDSRTRQVVNRVADALRLAAQSAGRTESCLGIFYRRKQAHLGAPKATTATARKLACLIYHLLKYQQPYQEPDPALYQLRLHKAALTKLQRQATALGYTLLPTAPAAA

SEQ ID NO: 312740 - protein, 345 aa, unidentified
MTNILKQATGIDVAKDELVVSFGQMSQDTSINIFAYKTFPNNKKGFNDLLMWVKKIAVKEIKVRYVMEATGVYHERLAYYLSDQGQEVSIILPNKINNYTKTLNIKTVTDKTASQAICQFGLERKLDVWEKPKEIFRTLKQLTRERDQLIAERTMIKNQMHAERTEAHPNKDSIIRMNQRIKLISKQEKDIQTAIAEVIKKDEELARKVDNITSITGVGELTTAIVLGEVNGFELIRNKKQLIHYAGMNVEEKQSGTSIKGKPKISKKGNRHLRKAMHLPALSAIRHDPRFKAIFVRLVSKHGIKMKAVVAVQKKLLELMYTLWKTDTKYDKNYLQKLNGDDKAA

SEQ ID NO: 312741 - protein, 363 aa, unidentified
MTSMTTTSGPVISGPITGGVDTHGQTHHAAVIDQIGRHLADREFPTTPAGYRALERWLRGHGGPLARVGVEGTGAYGAALTRHLRAAQITVVEVDRPDRKARRAKGKSDPLDAYAAARAALSGMASGTPKLRDGQVEAIRALRVVRRGAVKARTQAMNQLRALLLTGPAELREHLRALSPTTLIATCARLRPTQDLADPEQAVKTALRRLARRHQQLTEEVRDADADLGPLVTAAGPRLLALQGVGIDVAGQLLSSAGDNPDRLHSEAAFAHLCGVAPIPASSGRTHRHRLNRGGDRAANNALHTIALCRLRYDPRTASYVARRTKDGLSKKDIIRCLKRYIVREIYTALQPVPAGANLAAAA

SEQ ID NO: 312742 - protein, 430 aa, unidentified
MKSNTQNAKIEAITEKTLVLGIDVGSETHYARAFDYRGIEYSKKPFKFSNTEAGFATFKEWILDLKERHEKDKVVPGMEPTGHYWFNLGKFLQDNEMKPVLVNPHHVKKTKELDDNNPTKNDRKDPKVIAGLVREGRYMIPYLPDGVYADLRTASNIRFQLQAELTRIQNRISRWFNIYFPEYKTVYGKPDAKSGMLILKAAPLPEDILTLGIDGVNQIWRDAKLRAVGKARAKTLIEAAEHSVGSKEGAMSARMEIRMLLEDYESRNTRLQEVMVLIEELVRKIPMAEKLLEIKGVGIRTVSGFLAEVGDISRFNNPKELQKLAGLALVENSSGKHKGETTISRRGRKRLRYLLFEVAMSLVSKNQEFRELHNYYTTRRLNPLKKMQSLMAIAAKLIRVFYAMLTKGVDYDPKKMVSDIKRPAVYLQAA

SEQ ID NO: 312743 - protein, 523 aa, unidentified
MVTKIRKRKFAGSKRRFVGKPTGQIQERVQAVGPEHFGVVAVDSAKRRSKWMLCNFYGRVLIEPTNVEHATGGLRAMTQSVAEACQAEGLTDTIVAVEMTGIYHKPVQRAFRKAGFDTRIVHPFASNHYRRPLHPDAKTDDHDLEAIFHAAVKGYGLAILPVGEVYQSLQAVSRHRHNLVKQRARLMVQIRRLLHQTMPGFADLFEDDKLFHKSIALPIAVQFTSAEAIRRAAVDGIAGHLRQTKVRFQSRTIERIVAWANTAAEPSELAALHTRQWQQLDQVRRLLEEQIAAAEREMAGFLVKTPYILLLSVTGINIVSAGRLAGEAGPIEHYASARAINGRAGLYPSRYQSDDVDRADGSLVRQCNRQLRGAAMMVAENLIKCHPYYRGLSALWMQRKVDPRDRRCRIANRAMRMVYQLVGGRQLWRGKGADREYLLAKLEEFHRVHQTPIEQAIRDLHEAFAWLPKSAYAQEAKPLAELARRKRRGPVRVGDLMIPLLIRLGIPIEEKIESPASEARSSS

SEQ ID NO: 312744 - protein, 394 aa, unidentified
MTATYADCITRSRPVLYLAFELGAKDWKLGFSIGLGVAVRLRAIGAGNLAMLRREIELAKKKFKLTDDVLVCSCYEAGRDGFWMHRWLVEQGIDNVIVDAASIEVNRRYRRQKTDSLDAAKLVAMLIRHHAGEKLWSVVRVPARDDEERRHLHRDLEEMKAEVTQHRNRIRGLLAGVGARVAEINAGFVELLPTAKTADGREVPGALRERLVREFERLRFVQQQIGSLEQERKRKLRDDGHEEHVVKARKLMQLRAIGPHSAWVCMLELFGWRRVHNRRQLASLVGLTPTPYSSGEDEREQGISKAGNRRLRTLLVEIGWCWLQYQESSALSQWYRRRFAGGGKRQKKIGIVALARKLLIALWKYLERDEIPEGATLVDWRAKLAGFSARPLPA

SEQ ID NO: 312745 - protein, 343 aa, unidentified
MQAVTTIGLDIAKSVFQIHGVDAAGNVIVRRQLKRRYVIPFFQKLPACLIGIEACASSHHWSRELTALGHTVRLMPAAYVKPYVKRQKNDAADAEAICEAVTRANMRFVATKTLEQQSCLMLHRTRHLFIRQQTAVVNAIRAHLAEFGIVAPVGRNGVEQLLDVVADTSDKRLPAIARACVLALGAQLRTLKVQILNLDRQIMAWHRSNEASKRLDDIPGVGPALATALVASVADPKAFRSGRDFSAWIGLVPKQHSSGGKDKLGSISKQGDRYLRSLFAAGALAVIRYAKVHGSKRHPWLTTLLARRPTKVVAIALANKIARMAWALMARGDRYKEPVVLAA

SEQ ID NO: 312746 - protein, 341 aa, unidentified
MRYIGLDVHKDNITACVLTSTGKPKFERDFIKDSESWNLSELMEYGDKDGFCIMMESGTYAYQPFRFFSDQGVETHVVHAQALKVITQSDKKTDKKDAYTIARMLRLWKRGEIDLQMAFIPTREQCELKDICRYREEISRKIGDETRRIKSHLSRNCEYLPESFNDFQTQRARNYVRFNFSSDITLMNRMTELERLFEERDSIQKEVESRLPGSRDVEILMTVPGIARQTAVQIMSMIVDIDRFDDAEKLCAYFGLVPRVRDSGGKEHHGRMTKNGDKMMRAIMERVTQSHVQNCDSSVTRYYKRKCSEMGTKKALITASRKMLSVIFAILKSGSDFRLAA

SEQ ID NO: 312747 - protein, 334 aa, unidentified
MVVSYCVGVDPHKKFHQVQIQDGYAHTVWEGPVPRTSLGQARLIRHLERYGKPQVHVGVEGSGPFWVRLVKALAAAGIPVSLVNPKRVKHWARSGAGSTRTDRVDAGIIADYIRVRRPRLFTVPPPEAERLMDLLKVRHPFMRTRAAWKNRLGSYRERDAAPEGLKEGDLFIQEADAHVDLLTAQIKAQVKGDPVGRALLQIKGVGPITAAWFLATFPRPEDYPTKAQVKARVGLVPQEHHSAGKKRSTYLSREGPPLGRVILHMAACVGSRHNPELKAVYEARQAHGDGKKKARVYVMIRLLVRMWQIAKRVRREERQHQGPPPGEGEERKAA

SEQ ID NO: 312748 - protein, 390 aa, unidentified
MIYVGIDIAKLNHFASAISSDGKELMKPFKFTNDGDGFQMLHSRLEELSRSGDSIIIGLESTAHYGDNLVRYLVACDYSVCVLNPIKTSVMRKDNIRKTKTDKVDTFLIAKTLMMQDSYRSVSFYDLDLMDLKQLGRFRQKTIKQRTRLKIQLTSYVDQVFPELQYFFKSGLHQKAVYALLKEAPTPQDIASMHMTHLSHLLVAASHGHFKKEQAKELRVLARKSVGACDSALSIQITHSIAQIELLDSQLDSVEAQMAEIMKFHDSVIMTIPGIGYINGGMILGEIGDIHRFSSPNKLLAFAGLDPSVYQSGNYSARRTRMSKRGSRVLRYALMNAAHNVVKNNSTFKDYYEKKMAEGRTHYNALGHCAGKLVRVIWKMLTVEVEFNLN

SEQ ID NO: 312749 - protein, 329 aa, unidentified
MTIFAGLDVHKKYFHATGLEESGDVLVQKNFPNSSDGYDSLLAVTGEDVKVALEATYAWEYVFEELEDRVEEIKLAHPKRTEAITKERIKTDVKASEALAKLLRMGWLPEAWAPPKETRKVREKLRRRAYLVWKRTGFKNKIKADLAKLGIRKKVSYSDDGREWLRDLEVDSINDYLDMIEALNNPIERITKEVEREARATEDAKLLMTIPGVGFVWSLTLTIELGNVERFSNPNEVPAQAGIVPSTEESGSKSIHGSITKEGNKYLRWAAVECAYLHKRYADDTHLKRFFHKLAAKKNDQTAAVATGRKLLITVYWMLKRGERFRPQG

SEQ ID NO: 312750 - protein, 338 aa, unidentified
MKLNVFGVDIAKDVFQIHWVDKAGKARSEKVKRQHFLDWFSNKAPSLIAMEACSGAHHWGRCFQQMGHQVRLIAAHKVKPFVIGNKNDMVDAQAIWTAVQQPQMRFVAVKTVEQQAALSAHRMREYLVKTRTGSINAIRGFLAEFGIVIARGRTAFKREIAGCLETLSQTVPKEFADRMYERVAYIHKLDDDIAGLEQHITAYFKGCPQCQRIAKVPGIGVLSATAIVATVGDVSQFKSGRELSAWLGLVPKQTGSGGKVKLHGISKRGDTYVRTLLVHGARSAITHSKHPSEWLQQLLVRRPKNVVLLALANKTARVVWALLSKDVEYDENLYSQVS

SEQ ID NO: 312751 - protein, 408 aa, unidentified
MNAVGIDVSKGKSMMAALRPMGEVALLPQEFLHTAPGLDRMAHTILALGEDTRVVMEATGRYHEPVAAALSAYGIYVCVLNPLYIKQSGAGSIRKVKTDKADSLKIAKYGLDNWVDLREHTPMDTIRQQLKLCSRQYNIYMKTVVSLQNNLISLTDKTFPGVNELFSSPTRADGHQKWIDFVMIFWHRDCVCRISEKAFTTRYEKWCKRKGYHFRAEKAAEIYARSCELFVTLPKDDNTKLLITTAAQQLLAGKMTLAALRAEMSRLAQQLPEYDTVHAMYGVGETTAAQLMAEIGDVRRFPRRSSIVAFAGVDPAVAQSGKHEVQSTATTKRGSPHLRKTLYQIVCTYLKKAPEDEPVYQFLDKKRSEGKPYFVYMTAAQNKFLRIYYARVKECLEAFDTRQNTVQD

SEQ ID NO: 312752 - protein, 348 aa, unidentified
MLHVGLDLCRTRVDVSVLDPQGGRVLTTTASPDPGGLASLAQRVSSLPGSGEVRAAIESMTGSRFVRDELQGIGWEVLVADAARVKGLAPLACKTDRIDAWVLAELSRRDLVPAIWLPPMGVRAERERARWRMHLVKHRSMLKHRIHSTLMTFGVPTKVSDLFGVAGRQSLTQLGLPEPWASDVTACLRLIDILDGEIHDCEHDLRRLGADHRYIPRLMSAPGIGWVLGYTIAAEVGDITRFPTATKLVGYTGLCPYVHQSGGKDHRGPVTKAGPKYLRWALIEATSHACKHPAYRARYQRTKTRLGRQRGPSVARVELARDLARAIWHMLTKNQDFAPAGAVNDLVA

SEQ ID NO: 312753 - protein, 368 aa, unidentified
MSTEYYTTIGMDVSDRTTKVCVMAKERGARRILEETTIPTTKDGLRAYLSGKSADWPVVFETGAHCRWMKREVESLGMKAIVANPSKLRMVTESNTKNDRNDARELARFALADVELLHPVRLRGERCQQLLRLMKARDLLVKVRTMHVNELRGFAKSMGFRLPSCPANKVHRQGRAGWPEDFESLAWPLMDVLETVDLKIRAYESQIRSLAESGGLGDKVDRVREVYGIGLLSGVALVASIDADPGRFRKARDAGAYFGLVPKQRQSGEMDVQCHITRAGSGFVRRLMIEAAQIAMRDSARDTDAKLKGLRICARGGRIAKKRALVAVARCLVVTAVALLKKPDAEYVPLSERARRELEAMRSAETVA

SEQ ID NO: 312754 - protein, 375 aa, unidentified
MKEKVRFLGLDVHAETIAVAVAEPDGSLRSLGTIANRGESIRKLVKKLGPVEQLRACYEAGPTGYVLYWQLSELGVDCKVIAPTLVPVKAGDRVKTDRRDAERLARSYRSDDLTAVWVPDEGSEALRDLVRAREAAKQDQLRARHRLSKLLLRTGRRPAPGVKAWTQAYMTWVGQIRFTQMAQESTRLDYVHEVEHMGERVVRLEQAIEEAIKLASPAIQEVVKGLQALRGIAKISAVTIAAELGNISRFEGARQLMGYSGVVPSEDSSGKRMKRGSITKTGNAHLRRIVVEAAWSYRLRPGVGPALRKRQQGVAEEIKEIAWKAQHRLHKRYQRLEAAGKDRRKIITAVGRELLGFVWAIGIKAEAATSQRMAA

SEQ ID NO: 312755 - protein, 408 aa, unidentified
MKRYYMGVDWGDRLHQVYVGDQEGKKVREMKVQESPQGLAEIGRWLDEKRAEGFELWAAIEKPQGRIVDFLLDHGVEVYPVNPKAVDRVRDRYRMSGSKSDAFDAYVLAEFLRTDQVHLRALRPSSEKAQELKMLSRDQRRVVRHKTRFLNQLTTTLKEYYARPLEVFEDLETEIALDFLQRYPTPAHLSALTRKQFNRFATKQHHLSKQRCEELWEKLNKPQLAVPEHVVRAKAQLVEVLIEQLRASIKAVKIYNHRVESFFASSPAAQFAKTLPGGKSGTLVAAVWAELGDAQGRWESSRHLQAEAGAVPVTKASGKSRVVHFRFACNKHLRYTMYWFSFVSLNHSEWAKLYYRGQRDNGHSHHQALRALGAKWLKIIFVMWRDHKPYDENYHLANIARQKMRQAA

SEQ ID NO: 312756 - protein, 347 aa, unidentified
MQVTTVGIDLAKNVFCLHGRDTNGKPVLRKQLARRQLLGFLANLPRCLVAMEACASAHYWAREIEQLGHQVRLISPRFVKPYVKANKNDASDAEAICEAAGRPTMRFVAVKSTAQQEVQAVHRVRQQLVKTRTALVNQARGRLAEFGIVVAQGVGRLRRALPTILEDRENGLSGVMRELLGEIGERLRFIDDRLHKYDLTIQRLFRQDERCQRVAAVEGVGPLVATALVAAVGNATDFRSGRELAAYLGLVPRHRASGGRTVLLGISKRGDRYLRTLLIHGARSALLRIERQRSARAIWAARLKLRRGSNVAAVALANKNARVLWALLNRHQSYQPAPFSARVPQSG

SEQ ID NO: 312757 - protein, 346 aa, unidentified
MHYIGVDYHKKYSYVVVKDKEGKVERRGKVDNTKEEFRQLLKPYQEGKAVLEATRNWGLVYDWLEEILDDVALAHPLKVRAIAEARIKTDKISADILCDLLRSNLLPEAYVPDKGTREAKNILRQRMFFVRVQTMVKNRIYTILDRHPEIVSQAPDVSDLFGASGMEWLRQAVYQLLTSELELLEVLKQKISESNGMVKELARGDKWVKLLRSIPGLGPFFSVLVAKEIDDITRFRDEKKLCAYAGLVPSTYASGGKVFHGRITKTGNKWLRWAFIEAVQPAVSCDADLFAYYQRLKMKKGANAAKVATARRLLTIVYRVLSQERLYERRNKRARRSLAPAALVTS

SEQ ID NO: 312758 - protein, 465 aa, unidentified
MRTRKPARPKKMNLPKHLQHINPHAAGIDVGSRSHFVAVPEGSCEQSVREFTSFTDDLHRMADWLLACGVTTVVMESTGIYWIPVFEILESRGLEVRLVNARHVKNVPGRKSDVLDCQWLQRLHSYGLLEGAFRPVEQVCTLRAYVRQRMNLVRYASAHIQHMQKALAQMNLQLANVVSDISGVTGLRIIKAVLAGERDALVLARLRHPRCKNDESTIARSLRGNFRAEHLFSLKQAVDLYEFYQHQIGECDRQILDQLASFDAADGPVNGPPANLEEALTRISGVDLTRMDGIDTNSALKIISEIGTDMSRWKTAKHFASWLGLCPGTKISGGKPLSTKSKRVVNRAATALRLAAQSLLRSKSALGAYLRRQRARLGAPKAITATAHKLARLVYSMLKHGSAYVDVGQKHYEERYRSRVIQNLKRKAQDLGYELVDVAGKQPKPLTVYLKHLSFLAISGGQVKF

SEQ ID NO: 312759 - protein, 351 aa, unidentified
MITVGLDLHKRYITACALDEAGAVLAEHRRLEPSLDALGRWLGGLAQPVVVAMEATLYWHWLERQLTARGFPVIVAHPYQVKLIWQARAKTDPIDARKLAELARVKLLPAIWIPDPATRALRQLLRGRVFLVRQRTVMRNRIHAYLTAENLRCPELDLYSKAGQAWLATIDLPAVVRGQVGLVLANHALLTTQIQALDRHIKATVRRDATARRLQTIPGIGPFGALLLQAEIGPIARFGSAQELAAYAGLVPSTRSSGDKTRHGHVGRGNPWLKWLLIEALQTLKLAPGPVGDHYRKLLRAKGKPKATVAAARKFCTYLYWMLKEEWSYTEWLRQHDRSEVRPVQPLGSAA

SEQ ID NO: 312760 - protein, 319 aa, unidentified
MSQVVIGVDIAKDKFDVARFCEGKYRHKQFVNTPQGFAAFLTWLEGFGDDPPGVCMEATGAYSIPLAEFLVERNCRVSVVNPAKIHAFAKSELSRAKTDKADAKLIARYGRVMQPDLWTPPPKATRELQALLRRVEHLLEMQQMERNRLDTADPLIAGSLKTVLDTLDKELDTVRRRIKSHIDSDPDLKQRRDLLESIPGVGPATAAWLLTLLSPHYAFVNAKQAVAHAGLAPKLQESGKWKGSTRLSKTGDPGLRKALYMPILSAWQHNPAIRAFCERLKASGMNGKAIACAAMRKLIHIAFAILKSGQPFDPNLKLA

SEQ ID NO: 312761 - protein, 420 aa, unidentified
MDVVHERCAGLDVHKRTVVACVLVPGEAGAAQPETETFSTMLGELERLAGWLAERGVTHVALEATGVYWKAVYNVLEGEDRWTVLVVNPEHVKAITGRKTDRADARRLAFLLRHDLLSGSFIPDRAQRELRELTRARTSLVRERARVVQRLEKTLEGTNIKLGAVVTELLGVSGQAMLDAALQGVTDPEELAGLAHRKLRPKRELLIEALAGRLTRPLRFLAQQHLDHWRELDARVAAFDAEIADLLRPFDAVIDRLDAIPGVGRRTAEVILAELGSDVAAFPSERHLAAWAGLSPGNRQSAGRRKPARTRHGNPWLKAALTEAAWAASRCKDGYLQAQYRRLAGRRGRKRAIVAVAHSLSTAIYFMLLHDVPFEDLGGDYFDQRDRDRREQRALATLRTLGYDVTLVQRPTPDPATEAA

SEQ ID NO: 312762 - protein, 405 aa, unidentified
MNMNAIGIDVSKRKSMVAILRPGGEVVAKPFEVSHLSKDLRSLIHRIRSLDGESRIVMECTGHYYETIAHELVSAGLFVSAVNPQLIRHYQDEDNSLRKVESDKADSLKIARYTLDRWSKLKQYGLMDELRNQLKTMNRQFGFYMKHKTAMKNNLIGLLDQTYPGVNTYFDSPAREDGSQKWVDFADCYWHADCVRKISVDAFVDHYQKWCHRKKYNFSKSKAEEIYETAKEPVSVLPKDVFTKRIIKQAVEQLNTASRTVEQLRSLMNETAAQLPEYSVVMAMKGVGPSLGPQLIAEIGDVSRFTHRNAITAFAGVDPGVNESGDYSQKSVHASKHGSPTLRKTLFQVMDVLIKTKPQDDPVYLFMDKKRAQGKAYYVYMIAGANKFLRIYYGRVKEYLASLPQ

SEQ ID NO: 312763 - protein, 355 aa, unidentified
MSTMAQVEVEVTAGVDTHKDSHTAAALDAAGRLLGSAQFPATAAGYAGLLAWLAGFGTVMLVGVEGTGVYGAGLARHLRAHGVAVVEVDRPDRKARRWQGKSDPVDAEAAARAALARRATGIPKDRDSRVEALRNLRVARRSAIRHRADAQRQIHALLITAPEPLRAQLSALRMAELLRHAATAVIDVDRADEPAVAVMIALQVLARRHQQLTVEITQLDGLVTPLVEKINPQLMALNGVGPDVAGQLLVTAGANPDRVRTEAAFAMLCGVAPLPASSGRTNRHRLNRGGDRQANAALWRITLCRLRWDPRAQAYAQRRTKEGMSKKEIIRCLKRYIAREIYTVLNPPQRYSPTS

SEQ ID NO: 312764 - protein, 364 aa, unidentified
MQQNRTSVGLDVHARSIVACGLDGQTGRLFERRLCPDHTEIISWVRSLPGPVAVTYEAGPTGFGLARFLTAEGIDCLVAAPSMLQRPAGDRVKTDVRDARHLARLLHLGEITAVAVPSVEQEAARDLVRAREDVRGDLMSARHRLSKLLLRHGIVYYGGRAWTGRHDQWLRAQRRSAVFAAPALGMAFDIAYDTVLAAVARRDRLDAAITAMAAASEHTPVVRRLCCLRGVATLTAFGLAVEIGDWHRLTGRGMGAYLGLVPSESSSGASRSQGSITKTGNGHARRLLIEAAWHHRTPLRPTVALRRRQDAAGPAARDRGQRANRRLHARWIAFDARRKQPAVANTAIAREPAGWCWSLAVLKD

SEQ ID NO: 312765 - protein, 391 aa, unidentified
MYVIGIDVSKYKHDCIIIDEDTRKVVRDVFSFNNSRTGFSQFLDVLKTLDPTQKKKIGFESTGHYQDNLRVFLEQSGLEFMELNALLVHKFRTSQTLRGVKTDKTDARLIVNYLLKVDFKPYPKISYHILALRSLCKRHFDLINERTKYLIRITNFLDRTFPEFKEFMNNNLKGKTANYILHNYGVPSKIANMNMNSYENIRKLSRGSFSVAKFMRLKDLAKTTIGFSYETDIFEINSLLKIYDSINKEISTVENEITTHLSKIDTKIPTIKGIGDVSAATIIAEIENISRFNSPEKLLAYAGLDPRIYQSGTSEFKGKMNKKGSVVLRRVLMNSSERLICYNPNFYTYYRKKRNEGKSHRVALSHLARKLVRLIYKIETEHIDFNLSNIK

SEQ ID NO: 312766 - protein, 338 aa, unidentified
MVSVGIDLHRRRSDLVGVDDLGSVVWKRRIPSSPADFLRVFGELEPGSFEVAFEATYGWGWLADLLQDVGIPAHMSHPLATRAIASARVKNDTIDATTLAQLLRTHLLPEAWIAPPEAREARRWVRSRAALVRIRSRLRCQIHAVLADHGITPEMSDLFGVAGRRLLAELELPPLSRHRIDGCLRLIDALTVEVESVDREMRVVFGQHSALPRLMRIPGIGFVGAATVIAEVWDVSRFRRADQLCSWAGLTPTERSSAEHTRRGHISKQGSRWLRWILVEAATNHTGRDPELRQFEARIARRRGLKIARLALARRLLCLCFYALRDPAGCAAYPLDAA

SEQ ID NO: 312767 - protein, 395 aa, unidentified
MFIVGIDIAKRSHEAIIITEDGQVVRKAFSFRNNCTGYNLLLEQVRRLTLVKSQIVFAMESTAHYWLALYARLLKDGYTVMVLNPIQSHSLRELYIRKAKTDARDSLIIADLVRFDRCKASNVPQDKILALRELCRSRAYLVDMAADLKRKLIALLDRIFPEYESLFDSVFSKASIAVLRKYSTPQKVKNANLRKLTDILMESSNGHFGEWKAHQLKEAACSSFGIDDSDGVYSTLLGMFLEQILSLTAQADSLEKQISVFFQEFNNPLTSIPGVRTVLAATSLSEIGDITRFSSADKLLAYAGLDPSVKQSGEFKSNQNRMSKRGSPYLRRAIWLASTVAVHRDPMFQTYNEKKLSEGLHYMNVIGHVSRKMTAVIFAVLRDGQPYQPILQSAG

SEQ ID NO: 312768 - protein, 346 aa, unidentified
MQHYVGLDVSLKQTAVCVVDQTGKIKREAMVASDPDAIARFMAAQAPDAVRIGLESGATSTWLWTELNKRGLPVVCIDARHAKAALKMQINKSDRNDAAGIARIMQCGWYKEVRVKDLDSHAIRALLSSRALLVELKRDLENQIRGLLKNLGLVIGRAKLNTFTTRAKELIDGQPALAAAVEPLLKAREALGRQIADLDRKVLRLARSEPQVRRFMTVPGVGPITALCYLATIDDPARFRKSRSVGAYVGLTTRRYASGETDRTGRISKCGDEMLRSYLYEAANVLLTRVARWSALKAWGMRIAKRRSLSKARVAVARKLAVILHRMWIDGTEFCWSSQEPATQAA

SEQ ID NO: 312769 - protein, 321 aa, unidentified
MNQAFLGIDISKKTFDVALLVKNNVKNKKFNNNKQGFNKLLAWINNKEIILSQSCMEATGPYGEALAEFLYNHNIPISVINPARIKGFSQSELARNKNDILDAKLIGRFCKLMKPKLWEPTPEKTRVLQQWVRRLDDLIAMQRMEENRLEVADNCLKADLRKHINSLKNQIKKAKEMIKDHINKHEDLKNKSVLLQSIPGIGDATIAQILAFIGDPSKFQNAKEVAAFIGLNPRQRQSGSSVNGRTRLSKTGDSALRKAFYMPAVVAMRHNPILKEFKDRLEKAGKCKMVIIGAIMRKLVHIVYGILKSGTVFNENILKLA

SEQ ID NO: 312770 - protein, 361 aa, unidentified
MKNSSQHLIAEVPHRRSRVEMTIGIDLGDVWSHYCTLNEDGEVVDRGRFRTSPKAVEKWFTDLPPARVAMEAGTHSIWISELLQELGHEVIVANVRELRAISHSDRKSDQVDAEKLARYARLDPEIPRPISHRTVEQQEALTLIRARDLMVRLRTVAVNAVRGLTKSCGHRMPASSTRCFAKRSVAVMPPGLAQALGPVLEQIAEMTLKIKQYDRQIQELGRTKYPETQALVKVPGVGHLTALTFVLTLGSKERFEQSRDVGCYLGLRPRRSQSGDRDPQLGITKAGNVYLRSLLIECAGHILRPQGKDSALRQWGLHLASRGGKQARNKAVVAVARKLAVLLHRIWITQEPYVPFYAKAA

SEQ ID NO: 312771 - protein, 412 aa, unidentified
MEGETVIAGVDTHKDVHVLCLLDGLGRKIRSGSFGADPEGYDRLAEAIGDPGSCMVVGVEGTASYGAGLTRRLVELGYNVVEVLRPKRDKVRPGEGKSDPLDAERAARKAASGKGCSVPKSQDGWVEAVRQLYVARRLAVATSTSCVACAKSMLTTAPSALRERFRGRERPKDLMPLLARGRKAGDALEESVLASLRSVAAVWKEARSQVESLDERIRALLEANAPALLGVEGCGTTTAAALVVAAGDNPGRLKGEAAFSMMCGASPIPASSGKTDRHRLNRGGNRQANWALYEIAIKRMAYDERTRRYVARRTSEGKSRREAVRCLKRYIAREVYHVLMDPNPDGAAPEGPELAKMRKAMRVTQKKAAAELGLSAATLGHLERGKRRSTKLERRYYELLCELERALPQTAS

SEQ ID NO: 312772 - protein, 343 aa, unidentified
MELHAIGIDLGKTLFHLVGVDSRGNIVVRKRCSRTQLLKYTANLRVQRIGMEACSGSHFLARALREQGHDARLIPAQYVKPYVKTNKSDYIDAEAIAEAVQRPTMRFVPIKTEEQLDLQAVHRVRERWVMRRTAVVNQVRGLLLERGLTLPKGRSHLEQALPEILTDPALRLAGSFRVLLGQLQLELEHLSARIEQMDAVIQQTVKENEACQRLTAIPGIGPVTATALVAAIGNGAGFRRGKDLAAWVGMVPREYSTGGKQKLLGISKRGNSYLRRLFVQGARVVMQYRTKQTPGLSCWLARLMARTHQNVAVVALANKLLRMAWAVLCKNEAYRIPALATTP

SEQ ID NO: 312773 - protein, 310 aa, unidentified
MKEHTSNERVVKVVGIDLAKRSFHVYGVDERGQRVISKTFTRARLREFVANLPACTVAMEACGSAHYWARTFRAYGHEVRLIAPQFVKPFVKSNKNDAVDAEAICEAAQRPTMRFVAVKSVEQQDIQAIHRMRSLVVERRTAQVNQIRGLLLEYGIEMPQGRAAVGRCLAEMLEDAANGLSDRFRAELRELAEELRHLDLRVDHDDAQIEAIAQSHPQARQLMAIPGLGAKGATALAAAVGEDPRLFKNGRGLAAWLGLVPRQHSTGGRERLLGISKRGDVYLRQLLIHGARAVLRWVERKDDATGCDSK

SEQ ID NO: 312774 - protein, 450 aa, unidentified
MIAAVVERCAGIDVGKKFLKVCVMAGPLNEEPYYEIRKIDCSHSGYEQLREWLKAEGVTRVVMESTGPYWVPVFNILETDVEVILANPVEVKNRKGHKTDATDAWWLAHLLRHGMIRPSFIPKKATRELRELTRRRKKLIGQVAQERNRVQKQLEYGNVKLGNELSDVFGLSGQLMLKALVDEERTPEQIAALAQGSLKKKKPQIAEAVRGQRLSETQKELVRSSMRHMVFLELKIEQLDALIAALIRSSQQQQPYELLQTIPGIKGEAAATLLAETGAEMKQFPDAGQLSSWGGVCPGNNESAGKHKSRHTTHGNPWFRATLIECAWAASRKKGSAFQLKYNRLKPQVGHKRALVAVAHALVKVIYYVLATGEVYRENLPQALTEVQRQRVIRHHTRRLRRLGCWLPAERLKPLQEWYVTGCIPSPDPPPAKRRGRKPKASATAGIPAL

SEQ ID NO: 312775 - protein, 326 aa, unidentified
MNLMPLGIDVAKQKFNVCLRFAHDKLKHKVFTNNQAGFTQLHRWLQQHAGDRVHACLEATGAYGEALALYLHEQGHLVSIVNPAAVKAFAASCLSRTKTDRVDAELIARFCLAQQPPAWEPAPAEVRELQALVRRLASLIEMRVAEENRLAAGPTVAQVQRSLEELLAHLQAQIKRTEKLIRSHLDQHPGLRQQRDLLTSIPGIAETTAALLLAELPHLKQYRSARQVAALAGLVPRERQSGSSVKGRVRLSKIGNARLRKALYFPAITALRCSPFMQRWANGLRERGKSKLSVVGAVMRKLLHLAFGVLKTNQPFDPEWTTRAAC

SEQ ID NO: 312776 - protein, 389 aa, unidentified
MPSTMPTPATALDHESTIITAVELSASSWLVRAQVPSVLRQCRQKLAPSAEALLEHLGRLRQRAERAGKRVSRVVVAYEAGRDGFWLARWLIAHGIEVYVIQPSSVPVDRRARRVKTDAVDVEMLLRTTLAWLRGEPRVCSMVPIPSEAEEDGRRPLRERQELIKERLAITNKIDGMMATLGIGGYRPLRRDRREQVEALRQPSGDPLPVHAKARLTRLLDRLELGLEQIKGLEKARDAVVAQDEVVSGGEADSMIRTLAGLKGIGPELATLLAWEAFVRPFRHRRALAGYAGLTGTPFASGGTQREQGIGKAGNRRLRAALVELAWLWLRYQPDSTLAAWFRDRTRAAGSRTRKVMIVALARKLFVALWRFCRDGVVPEGAAFKTAMA

SEQ ID NO: 312777 - protein, 427 aa, unidentified
MKNSTARKLEQIPTDYLIVGIDAHKKKHAAVIKTPDAFTRAKFKVENSRSGFEELLERVQTQVTNTGCKGAIFAIEAGSRYWRTVAYFLEERELPFRLISPFTLKRRREGEDIDRKKNDYRDADMAAELLRTGKFTETRLPQGNYADIRAAYHTYYRLGRERSRAVNLLDALLDSIFPEFHTVFKDISTKTALAALATYPCPHTIAGMTMEKFMDTMLAKYKGQHIMRKKLSEVYQAARRSVGIQAGAGVISFELSLLIERIRLLTEHRQKVEDLIVTLVEWIPESKYLLSVPGLGHLTVAGILGELGPLTHYRNAKQLIKMAGINPTQSDSADKKGSRTPMSKKGRPLLRYCLWEASLNLLNHNEEFRAWAKQLQQRPLHQNPLKRREARGAVCRRLLWLVFALFNKRCFYRKNYKVKTEVELVTA

SEQ ID NO: 312778 - protein, 346 aa, unidentified
MQSTTIGIDLAKSVFQVSIADPHHRIIKRQRLSRNQFQRFLAHTPPAKLVMEGCASAHHWGRLAQSHGHQVKILHAGYVRPYVRRNKTDAADADALIRADADPDLKPIPVKPTHQQALQSLHRIRVQWQKTRIARINEARGLLGEFGVILPSGTQDIARRLHDVADQLPELLQFTFTELIAEISECQDRLKRVDKTLGNIVTTDPVGQRLLTVSGVGPTITSAMLGGVSNIQGFKRGRAFASWLGLTPREYSSGSTRNLGRISRRGDNYLRTMLIHGARSALLAAKRARKRGNELTELQQWALSLQDRAGHNKATVALANKMARIIWAVWTKDRAFDGNHAARYHG

SEQ ID NO: 312779 - protein, 338 aa, unidentified
MNATTIGLDIAKSVFQLHGEDAEGRLVVQKRLSRRGMAEFFAKLAPCVVALEACGTSHYWGRTLRAMGHEVRLIPAAYVKPFVRRNKTDARDAAAICVAARRPDMRPVAIKSEEQQASRALERSRELLIKQRTQLMNSLRAMLAEFGIVAAQGARGFAELRARLASGDGLPKTLVTALRLVAAQLDGLTPAIESMEDKIKTIARADPTMRRLSRIPGVGFITAHAVVAAIGDGRQFVSSRCFAAWGGMTPRETSSAGKRRTKGLSRQGESRLRKLFALGAATLMRNARSRDDRASAWQRGILARRPMKVAVMAQAAKTARIAWAVLTSGKDYAPPAAA

SEQ ID NO: 312780 - protein, 416 aa, unidentified
MNNLLLSAFERYIAVDLHRKYVVVGGVNSRQEVVLPPRRVELDAWPRWAQANLRKTDVLVVESTSNAWDFYDQVEPLVGRAVVANPRLVKLIASARVKTDKVDTLALARLLAANLIPEVWVPPLIVRQVRGLLAHRRRLVETRTMSSNRLQSVLQRHNLPAPRGGPFSTANRTWWETLKISLTEKLRVRQDLDTLAHLDKHIAEIEDEVYRLSTTEPWAAQVAFIIQLPGFSVLLAMTILAAIGDISRFLHPKKLVGYSGLGAGIHSSGQTHRSGHITKTGRRELRWALVEAAWSAVRYSPHWQAEFKRLSSRMPENVAIVAIARKLLVVIWHVLTQQVADKHADQQRVAAKLMRWSWGLTQQQRGGLSTRLFVRRQLMRLQLAHDLTHFTYGGMPRRIASVDELLAACPAWAASG

SEQ ID NO: 312781 - protein, 482 aa, unidentified
MKKKNIYVNQSQELLTLFEEAGNSAEIMCVPIDYAKKDHVVMFCNGYGDILRKPFSVKNNPEGVSYLTEQVTRSCHNRSINPKHVFFGGEDVGSYAENFASTLRSGGWLVAGVNAHDAKKQRSNMQASTDRLDLMGIATMLLNRRCNCSPAQSGIYRNLRTLVRHRRRLVVMTTEVRNRIHAIVDRLFPGFLDERKSGIAPFSKSSLYLMENRFSAQQIRGRKRSALIEALRRLGTPKPDCAAAKLQQYAARVLNTPDEYVATLQLSLAQHVKHYRCLQENTDQLEKEIAVWLSQTQGAFLTTVRGIGIVLAAGVSAEIGDPFQQKPLNNLVSYAGIIPRIIQTGGPEGEIYTGKVARRSNRILKDYVVQSASHLGLHGPEDLMSDYKRRDAAGQHADFSIARRYLRMAMCLMRNSQVYLPPRLRKKDSKPEGRASYYLMTWPYLRDKWQKLDALKAAFAEDRPLGRWRNMVQGIYDIKLEL

SEQ ID NO: 312782 - protein, 416 aa, unidentified
MNKTPPASSEEGANIQYVCGIDIGSQSCAGCICRPDKSVVVKSITFANAREGWQIWEEKLNQLDAPPSQILIGMEATSRYGENLYHELEQRGYVLRLLHPGQTHHFHQQQGLRAKTDRLDAMTIARALLSGEARMGYVPDERVATYRELVRLHTQLSDTAASYQNEIQALIVVLFPEFTQVFADPCLPTALSVLKAFPSAQALVEAGVEPLFQLLRAQPVAHYGRPTAKKLVALANQSVSSGRAIAGRSVSLRILCDQLEHTQANLARLNAEIEQLLNTDPGVKGLQQVPEFGPKTLAVLRAELGDVQRFSRTDEVIAYGGMDIEIKESGLWKGKAKLSKRGSGLLRRMLYMTALRSIHREDSAFGVYYQRLVERGLKTGSALMAVMRKMLAVAAHLLRHEGEEYDPSKVCGSRAG

SEQ ID NO: 312783 - protein, 375 aa, unidentified
MLYVGIDQHRKQLTVNVRDEAGQIVLRRQVSTAWDRVTAFLDDLEQRSRDCDGYVAVVEICGFNAWLLKLLNTRAPACRQTIVVQPEFQSSHKTDRRDASGLSELLWVNRERLLAGRKVNGLRCVRTPSADDQADRQLTALRVTSGRELTRTVNRVKAILRRHNLEQECPTKGLGTRRARAWLTALPLSAVERLELNQLLLRWDQFAAQRQQLEALIGERQKQNRAAIILASIPGAAAYSSLALACRVGDVSRFPHPRSLANYWGLTPRSRNSGEATQRLGSITKEGSRIARFLLGQLVMHVLRRDGVMRDWYKRLKRRRGSKIARVAVMRRLATIIWHMLTKQERYRCGGPPRERLVNTTAAPVTTSPTPRRQP

SEQ ID NO: 312784 - protein, 415 aa, unidentified
MKPLYHRVAGLDVHRMLLVLTVLVELDDGSLSKHQRSFGSFKRDLRELVAWLQSLAVELVVMESTGVYWKSVYAALEAAGIKAHVVNAHHVKNVPGRKTDLADSEWLAQLGRFGLVKPSFIPPKDLRELRNVTRYRQKPGQACAAEKNRLHKILDDAGIKLGGVVADIDGVSARAMVRGLIEGRPVEELADLAKGVMRKKIETLELSLEGDLTPRHRFVLQGIEDHVQFLEAQLAKLDAYLVDAMAPYKEYWQLLQTIPGIDEVAAAQILVEIGTDLGAFADAKHLASWAGLCPGNHESAGKRKTGKTRKGNHAIRVTLCEAANAARRTQSDLHEKYQSLVGRRGPNKAIIAVAHTILRIIYILFTRREPYRDTGFDYEAAKVAKNAPRWIKALKKFGYWPKTKPVPKLVLAPAC

SEQ ID NO: 312785 - protein, 367 aa, unidentified
MASVVDVGLDVHKDSIVMGVAREGREPAEIWKTIPYDGTRLRKDLKSLVKNGERLRVCYEAGPTGFGLCRQLREAGIDCIVVAPSLVPSKPGDRVKTDHRDARKLAHFLRSGDLTEVYVLEEAVEAIRDLERARYGAKCAERVARHQLSKFLLRQDRRWEGTTWTQKHRDWIRSQRFAYPAQQRVLEDYLKAVEDLAERVERLTRQVEELAEETALAPLVKALQAFRGISVVSAVTIAAEVGDLRRFATPGQFMAYIGLVPSEDSTGKRRRQGAITRCGNAHLRRILVEAAWHYRHLPLMSKELRRRNQGLAEGVRRIAWEAQKRLNKRLYHLIHAGKSTPKAITAVARELAGFIWAVGQEPTWLEV

SEQ ID NO: 312786 - protein, 327 aa, unidentified
MRQHKSLTEKAKTTVAFDVCKAVLDVHIRVDGKAFQVPNTDEGFDRIAVMLADYDVSLILMESTGGYEDVAACCFQSLGYDVAVINPRHARNFAIAMGQLAKTDRLDAAILADFAAVIDSRPDRARFIKPPTDEERKYLSRMVARRRQVVDLLSTEKQRLSHADDYAKQSIDKMIIFIESQLEEINQDVSVYVKKNYADLSKMLSKVPGIGELSVGLLIGDVPELGNIGNRQLSAVIGVAPFNHDSGKRRGKRCISGGRQNVRNVLFMGVMAATRFNPVIKAFYERLINKGKPKRVAYIACVHKLLRIINAMVRDGTSFNPDLHTVI

SEQ ID NO: 312787 - protein, 356 aa, unidentified
MSIVAHIHPFVIGVDAHARSHALAILACPTGEVVDEAQFPATAAGLQRAIAWVARRTGADLDTLWVIEGVGTYGARLARAAADAGYSVAEAARMNARANRGVGKSDPLDARRIAQAVLPLEVSQLRWPRADDGVRAAVKILIASRDHMSGERTSSINALTALVRVADLGIDARGSLTARQIATIAAWRTREEKLAAGVARAEAIRLAKRVLAADQELAANTKQMTTLITSSPARGLLDHPGIGPVTAAVALAAWSHPGRVRSEAAFASLAGVNPIPASSGNTVRHRINRGGDRRLNRALHMAVVTRMRMDPDTRAYVEKRTAEGRTPREIRRCLKRYLARQIYRHLNAATATQSAA

SEQ ID NO: 312788 - protein, 458 aa, unidentified
MRNRSKQQVGAKVDWKALAVVHPDAAGIDIGSQEHWVAISPERDEQPVRCFACFTPEVERMADWLLGCGIRSVVMQSTGVYWMPVFEILQQRGMEVYLVNARHTKNLPGRKSDIAECQWLLKLHTFGLLNNSFQPSDAVRALRTLWRHRSGLVAQASSAIQRMQKALIEMNIQLSHVLSDLSGVSGMKILKAILAGERSPKELAALADPQVKASPSVIAKSLHGNWRPELLFVLNQEMEIYQRCQNQIAACDKQLQQQLKAMATKIDPKVQPLGPRPKGKRARGHAPKFDLRTELYRLTGVDWTQVDGIDVQIAQTVIAEVGTRLDAFPSEKHFANWLGLCPTNETSGGKVLKRRTPKVVNRAKVAFRQAASTLLRSHSYLGAQYRRLRTRLGAPKAITAMARKLACLFYRLLTKGQQYVDKGAAYYESRHRDQQVRSIIRRASQLGLKVVVPEGEPA

SEQ ID NO: 312789 - protein, 339 aa, unidentified
MSKVFKNFVGVDISKTWFDAALIRSADPSKIIHQQFSQTPDGYRKMLAWLHDHDVSLHDDTLFCMEYTGIYNTGLVTYLVEGQAQLWVEMPLRIKRAGGLERGSDDRSAACKIAWYALRYHHGAKLWKPADSSIEKIKHLITQRERIITSIKHLTVPVEELKQCGCLQDAKMMEKLQQPVIKALQKTKQGIEALITKTIKLDEALYNIVQLMQSVNGIGTVTATALLVYTKGFTAFSNAKELACYCGVVPFNKTSGSSVKYKPSVSPFANMKLKKLLHLCAMSAIQNDKEMKAYFERKTGEGKNKMSVINAVRNKLIHRVFAVVRDERMFEDNYVRQCA

SEQ ID NO: 312790 - protein, 432 aa, unidentified
MPTEFAALVAIDWADERHAWALQAGTSKVESGAIDHTPEAIDVWAAELRMRFGGQVVAVALEQSRGSLVFMLTKYEHLVIFPVHPTVLVNYRKSFRPSGAKDDPSDARLLLDILMLHRDKLRRFNPDTAETRTLQFLVEERRKFVHEKTRYSNRLTAHLKMYFPQVLDWFDEIGSNIAAGFLERWPSLEKLQRARPATIERFFIDHNSRDPDRIKERLEQIRKAVPATTDVAVVTSSSAAVLGWAAMLKQVLAAISAFDRQIDELAQAHPDYALVKSFPGAGPAMAPRLIAAVGSQRQRYQSAAEIQQYSGIAPVVASSGKLRWVHWRWACPKFLRQTFHEWALHSIAYSDWAREYYEQQRAKGKRRNTAIRSLAFKWIRILFRCWKSRIPYDEGIYQRALDARRAQQSPSQIVEPQWKNVTGFSKLGIANA

SEQ ID NO: 312791 - protein, 438 aa, unidentified
MEITYTHCAGLDVHKKTIVACGIVSSPGQKLVRKTQTFGTWTSDLLALSDWLSGQGITHVAMESTGEYWKPVYNLLEANFTLLVVNAQHIKNVPGRKTDVKDAEWIADLLRHGLVRGSLIPPLPQRDLRDLTRQRTKLVQEKAAVVNRLQKVLEWSNIKLASVVTDVTGVSARAMLKALVAGVEDVRKLADKAKGRLRSKRQQLEGALNGNVRSHHRFLLTHHLTHLDFLEAQIAIFDDQIQTQILAQTLSPQSNSNNSGDTIENNLSESDDSPLTGEQAIILLDTIPGVGQATGEMLLAEIGLDMSRFQSAAHLAKWAKLCPGNHESAGKRYSGRTGQANSWLRTGLVQAAHAAVKCKGTYLRAVYHRLVQRRGHKKAIIAIAHKILKAAYYILSKREPYQELGANYLHQHHSQQLLKRMCRRFSQLGYQVSLTPNP

SEQ ID NO: 312792 - protein, 416 aa, unidentified
MLFIGDDWAEDHHDVELQDETGRRLERVRLPEGMAGISRLHAMVGRHAGDAEDVQVVVGIETDRGMWVQALVAAGYQVYPVNPLQAARFRERLGVSGAKSDPGDAHTLADVVRTERHQLRPIAGDSDTAAAVKVAARAHKSLIWERTRHLARLRHALLDFFPAALAAFDDLDAPDVLELLGKASDPDAAARLSRAQVRAALKRARRRDVDAKTERILAVLRAPQLRQPAPVTAAYAASVRAQVAILTALNTQIQAMQAQVDAHFGQHPDVEIYRSQPGLGVILGARVLAEFGDDPDRYAEAKARKNYAGTSPITRQSGKMRLIRARYVHNDRLRPSTRPRGQSPRRAAPAGQPARRDPPRLPQDPHLLRRGHRLARAGHRRPTTGRVTAAATTSEPRPRQRGQRRAPSGTCILSPG

SEQ ID NO: 312793 - protein, 376 aa, unidentified
MGQIGTVRSRRFLGLDVHKATIAVAVAEDDDQQPQMWDTIPNEPGAVRSMVRKLSRGGVELKAAYEAGPTGYGLCRQLLGLGVDCMVVVPTLIERPRGRVKTDKRDAILLARLLRRGDLTPIWIPDEEHEALRALVRARYDAKEEHHRARQRMNKFLLQMGIRVPAGIKPWTKRYHQWLKEGVQLAQPPAQVVFEDNRRVEQQAEERVRHLEQELRTWSAENPRVALMIEALQILRGIGFLTAATIAIEVGDFRRFATAPGFMNFIGLTPSEHSSGESQHRGGITRAGNRYLRHVMVQSAHHSRHVPNVSRERGERMKEMPKELVEIALRAQGRLHYRYRTLSRRIGRPKSIVAVARELSGFVLEVGHHIEELRAA

SEQ ID NO: 312794 - protein, 354 aa, unidentified
MEKITTVGVDLAKQVMAVHGVGAEGRMLLRKVLRRDQLLSWSASLSPCVIAMEACGGAHYWARELTRQGHTVRIIAAEYVQPFRLGGKNDANDAEAICTAARQAHMRFVAIKSVEQQAALCVHRLRQGLVEERTALINRLRGLLTEFGVVAPLSPEKLRRECARCQDPDDPRLPLLVRQLVGEQVRALDQVEERMATYAEQIAAQARGSEVAKRLQTIVGVGPTTAAALVATVSAPQEFSNGRQFSAWLGLTPKQHSTGGKTRLGRITKRGDAYVRTLLILGAKSALQAALRKPPELRHQLQRWIVDTLDRIGYHKTLVAIANKHARIIWTLLVKGEDFDVQRMTLKVAVVAAA

SEQ ID NO: 312795 - protein, 322 aa, unidentified
MQTQNAVVYAGVDVAKATLQLHLQGQQSEFSNTPKGRHQLCAQLQKAPSVHVVCEATGGYERALVKALQQEQIPVSVTNPARVRAAAQAQGQRAKSDPIDARGLTDYGQRYQPEPTPPTSATQDQLVALTQWLKQLIHGRALAKTQAEHHQDPFVRRQHAKLMTHLQSQIEAVEKQIEALLEQDAALQQRVTCLDEIQGVGPRTAWMVLAHMPELGRLNRHEAAALAGLAPWTRDSGTMKGMRCIGGGRPEVRLALYMAALSAARCNPVLRALYQRLRAKGKLAKVALTAVMRRLLTYMNHRIKALLSETATAKAQELKIAA

SEQ ID NO: 312796 - protein, 344 aa, unidentified
MEYFAGIDVSLRSCALCIVDGKGTVLLERELPCEVRDIAEWLGTFPHPIERVGFEAGTMSQHLFFGLKAAGFDVVCMEAHQVNAALSAMRNKTDKNDARGIAQVLRTGWFSPVHMKSREAHGVRALLSTRKALLKKTMDLANEVRGLLKIFGIRLPMTVRHGSFDGVVRPLIEMDEVLVHALVPLLDARVVLYEHFLELDRRVKRAASQDEVCMRMMTVPGVGPIASLTFKAAVDDPTRFKRSRIVGAHFGLTPRRYQSGEHDNPGRISKAGDRDVRATLYAAANALLMRTMAGSQIKSWGMRLMRTKGRRRAVVAVARKLAVLLHRMWVDGTEFRQDQVGGEA

SEQ ID NO: 312797 - protein, 351 aa, unidentified
MKPEQTAQPKLYIGIDIHKRSWKIHCATDLFSGKSFTMPPVPEVLKNYVHAHFQDYEVSTAYEAGCCGYYAHRSFEGYGWRSLVVNPGDIHRKGKERFTKTDKIDAQLIARELKDGRLECIHIPEVEREQLRSLFRRRNDLVKDFRRVKSYIKMQLLYFGVSIPEAFDNDHWSHGFRAWIDAVVFNHPTARETLDSRMRSFRFIDKELRDVSTKLRAYCRKHYKKDYYLLRSIPGIGGIVACGIICELGDLRRFNSIKHLAGYVGLAPGVHQSGDNQRATGIAMRSHRLMRSYFIEASWQAIRTDPVMQAYYRKHVGKNAKSIIVKIARKLLGRTLAVIKTETPYTIGVIE

SEQ ID NO: 312798 - protein, 342 aa, unidentified
MSKHVVRGGDVAGLLERFAQLRKKTRTRTGKIFPFVVIQEAGLDGFWIDRVLQNEGIESYVVDPASIATSRRRRRAKTDRIDGEALVRALLAYKRGEPRVCAMVKAPTPEEEDRRRLCRERKVLIAERVRHVNRVKGLLFSQGISGYEPQRRDRRERLDTLQTGDGHLLPEHLKAQVRRELDRLELLLEQIKAVEAERDVLLAAQQVAAPATMLLDIKGIGPEFAAILWSEGLFRHFDNRRQVASYAGLAPTPWQSGSIDREQGVSRAGNPRLRTTLIQLAWLWLRHQPQSALALWFEERVRRNGGRHKKTTIVALARKLLVALWKYVTAGVVIEGAVMKVA

SEQ ID NO: 312799 - protein, 377 aa, unidentified
MDKDSRFVGLDVHAETIAVAVAEPGGEVRSLGTIPNTPEAVRRLVKKFGPPETLRVCYEAGPTGYVLYRQLSALGVPCAVIAPTLVPVKAGDRVKTDRRDAEKLARSYRSGDLTPVWVPDPGHEALRDLVRAREAAKKDQLRARHRLGKFLLRQGRRAPTGSKAWGVKHRAWLQTIRFAHAAQDATLLDYLTEIDHAADRIARLERAIATAADLAPAPVRAVIAGLQALRGIAKLSAVSVVTEVGALSRFAKPRQLMGYSGAVASEHSSGPHRRRGGITKTGNAHLRRIVIEAAWAYRHRPAIGGTLRTRQEGLSEEVKALAWKAQHRLHGRYARLLAKGKAPTQVVTAIARELLGFIWAIGVHIEQHTAGGAPAAA

SEQ ID NO: 312800 - protein, 465 aa, unidentified
MVAQQKPNKKKRPAATPTALPVVRPQVAGIDIGSTEHWVAGPVDADAAPNVRVFGTTTDALHALADWLVAQHVESVAMESTSVYWIPVYELLESRGVEVVLVNARQLHHVPGRKTDVSDCPWLQLLHSCGLLRGSFRPAEAIVRLRALQRQVATLVAERTRCVQWMQKALDQMNVQVHRAVADLTGTTGMAIVRAIVAGERDPATLAAHRDRRCRKSADEIARSLTGTWRDEQVFTLASALRLYDAFGAEIAAFETQLLADLAALEPPTRRAAPVPAHPNRAKEHGLRRRGDHAIRTALWRVAGVDLTRIDGISTRVAHVVVTEVGPNLAAFPSEDAFVSWLRLCPRTPISGGKPLKKRRNGLGANRIAAVLRMAATTVRRSQTALGASFRRLARRKGAAVAVFATARHLAKLIYRMLRFGQDYVDVGAQAYERRFQLRRLAGITQGAKSLGFTLVPQTAEPAPG

SEQ ID NO: 312801 - protein, 414 aa, unidentified
MDIVHTHCAGLDVHKKTVVAAIIVPDGKNGLLKETRTFGTMTCDLLALSDWLMGYGVTHVAMESTGEYWKPIFNILENNFEVLLVNAQHIKAVPGHKTDVKDSEWIADLLRHGLLKASFIPPLGQRELRELTRYRSTFVRERATLVNRVQKLLESANIKLASVATDVMGVSGRAMLEAIIQGHSSPAEMAELAQKRMRQKRVLLAKALEGRVKPHHRFVLTELLCQIDSLDETIERFNKQIEEYCRPFEEAVSLLDTIPGVGCEVAEIIVSEIGIDMSRFPSADALASWAGVAPGNNESAGKRRSGKTTKGNQALSIALNQAAHGASHTKDTYLSAQYRRLAARRGKKRAIMALMHSILVIAYHIIQRSEPYHDLGGDYFDKRHPEATAKHLVKRLEQLGYSVFLQQPAICPVA

SEQ ID NO: 312802 - protein, 356 aa, unidentified
MEPIKTDCVGCDAHRRYSVFVVMDERGHTGKETRVEHSRELYRHFLSTLPPGSPIALESIGNWYWMIEEMERAGHQPLLAHAKKAKLMMGLTNKTDKLDAHGLALLLRNGTLPSVWIPPGELRDQRELPRMRMVFARIRTMLKNRIQSTLAKYGIQIDEVSDLFGVTGRGLLQNRLNELPPETQRSIQEHLKLLDGVLEQIEGTEKRIKELIKETPQMQLLMSLPGVGPILAIVIILEIGDIERFPGAPQLASYAGTVPQVRSSGGKTYYGKVRPDVNRYLKWAFIEAANSIVVNQSRMPNRHVVQLYHRIMKRKGHPKAIVAVARHLAEATYWMLTKNEAYREPTSSRWISPTQK

SEQ ID NO: 312803 - protein, 361 aa, unidentified
MPEQRVSYTGERVYVGVDVPKETYTVTCVCRKQIVKTATVPAEPARLAASLLRWFPGATVASAYEAGFSAFVLHRALPQGGITNLVVNPASMAVAANEKVKTDRRDAKKLARDLADGRLQGISIPTEAEELARLLPRTRAQLVEPRATLARQIKAKLHQCGLITPKGQRMISHQYLQEIATWALPSELRVSLTLLAEQWRLTTRQLIEMRHLLREQAQAQGEMEKVSRSVPGMGAVVARTFATELGDMSRFANERALCSYTGLTPSEYSSGAAIRRGPISHQGSSRVRHLLVETAWRALPRDKVLQESFDRVAATRGKKRAIVAIARRLIGRIRACFREGTLYTYCIFRCNFRGGMYLRVR

SEQ ID NO: 312804 - protein, 425 aa, unidentified
MRAVGLDIHREFCEVAIMEAGELRSVGRVKTTPEDLELFAGSLGPDDWVAFEVSGNAAEIARILEGHVARVVVVSPSDTGIRQARAKTDRLDARTLARLLAAGSLEAVWMADERTRVMRRRLARRAQLVGARSRCKNEIHAVLIRRLITAPKVSDLFGQAGRVWLRELVLPLEERESLDASMRQIEFLEGEIGDVDRLIALDALGWPEVKRLMSVPGVNVICATSFLAAIGDIRRFKNPRKLVGYLGLDPKIRQSGPSPGTSGHISKQGSASARWALVEASWSTVRQPGPMRAFYQRVRARRGHQIAVVAAARKLACLFWCLLTRGEDYAYQQPSLTKKKLRRLEIAAGAPKYQGRSNIWSTNNAMRQAERALAEQAEHAYRNTVRDWHAAQAKKPAVKVGASATKGRASNKPTEGKAARQTTSP

SEQ ID NO: 312805 - protein, 344 aa, unidentified
MQIAVLGIDLGKNSCSVVGLDSAGAVIKRRRMRPESIAAFTQKLPACVVAMEACCGAHHFGRIMAGQGHEVRLMSPEYVRPYVKAQKNDDRDAEAIAEAASRPTMRFVELKNEAQLDVQTLHRVRDRLVGERTALINQLRAVLLERGITIPQGRRKLAEHLATMSASESDNSLSPRICRLIDDTRAEWLELDRRIAALDAEFAALARSDADARRLASIPGFGVLNATALLAAIGNGQTFARGRDLAAWLGLVPRQVTTGGKPRLVGITKRGNKYLRKLLIHGARSALPSLATSVTPLGGWLRALMQRVHKNAAVVALANKLARIVWVVLRRGEEFDAAAVRAAA

SEQ ID NO: 312806 - protein, 462 aa, unidentified
MKLYLGGDVSKGYADWVILSEKKQTVLGNFQLDDTYAGHCKLYSMIEAYVEKHPGSELYAAVESTGGYENNWLNTLKSYQKVFNLKVARINPAGVTFNRKAGMKRNVTDAISALSIAEFMIDHPENITYDQDDKWKSLCRHWNFVEMQKQQRVQTINQLETILYSANPTLMRFKKDNLPNWLLELIIQCPTAETLAKARPEKLAKIPYLSLARAKTLVAEAKQSIASATDKNAEILVSQIARQIKSFDLNIKSQMQLIERDLTCPEIEILKTFKGIDTISAIGLLLEIETIERFPTVKGFSCYFGLHPKFKQSGDKVIGVRMSKQGSKNMRKILFNIAKGAITYNPLILAVYEKKLSHGMKKMAAIGVCMHKILRIIYGMLKHKQEYNPLIDKLNCEKSKDKQQEKQQQENANIEKSRRYQEFDVKAPISRKQTKKRRKHDLSQCEITSQSTGSTCSSKTKL

SEQ ID NO: 312807 - protein, 342 aa, unidentified
MDISTLGIDLSKTTCHVIGFNARGEIVLRRKFSRRQLLQFTSNRQQLVIGMEACGGAHFLSRALQTQGHDARLMPAQFVKAFRKSNKNDYLDAEAIAEAVQRPTMRFVPIKTDDQLDLQALHRVRDRWVARRTAVMNQIRGFLMERGITIRKGPSHLTTQLQGILEDADSLLSGRLRLLILELKHEWDELDKRIENSNAELQRIAKQDDACHRLMEIPGFGPLVSTALVAAIGNGITFRKGRDLSAWLGLVPRQHSTGGKTRLLGISKRGNEYLRRMFLHGARSVVAQIGRNPSALGLWLSDLSARSHRNVTVVALANKMARTAWAILSRGTHYCAPSLAAA

SEQ ID NO: 312808 - protein, 411 aa, unidentified
MDMVVERCCGLDVHKDTVVACVRTPGKGGRREQETRTFGTMTADLLALRDWLVAMGVTLVGMESTGVYWKCVFYVLEDDIECWLLNARHLRNVPGKKTDVKDAEWICQLVEHGLVSPSFVPPKPIRELRDLTRYRKAQIEERGREAQRLDKVLQDAGIKLSSVATDILGKSGRDMLEALVSGTRDPEILAELARGRLRSKIPMLKRALEGRFSANHALIVSTILAKLDFLEEAISGLSEAIEVLIGPFEVEVALLDTIPGVDRRIAECLIAEIGVDMSRFGTSARLASWAGMCPGNNESGGRRRSGRTRKGSKWLAANLAEAAEAAGRSKNTYLGAQFQRLRGRLGHAKARKAVEHSMLVAAFHVIEKRTPYAELGADWFQKRRPDAHARRLAHQIEALGYRVTIEPAEAA

SEQ ID NO: 312809 - protein, 368 aa, unidentified
MVKIARIGIDTSKGSFQLHGVDAEEQVVLRKTLRRKQLLEYLAKQEVGEIGLEACGASHHWARALRQHGHRVVLVPPQYVKGYVARGKNDKNDAEAICEAMSRRRVRERLVPVKTLEQSAGQMMMKVRSSLIERRTQLTNSIRGHAAEFGLVAAKGMDKIGPLLERIAVDESLPARAREMFAMLGEDYAELAARIVRIDKRLLAFQRDNELARRLMEVPTIGPIGACLWVTKVVDPHAFRSGRSCAAWLGLTPKDRSTAGKQRLGGITRAGDESLRATLVLGATAYLRHVRSGRIAATPWLAGMLARKPPKLVAVALANKTARIAWKLMTSGERYDPAHQPTREGLDASQWGGLRAEPLTAGGVEAVA

SEQ ID NO: 312810 - protein, 352 aa, unidentified
MAATAQSAIAVIGIDIGKNSFHVVGLDGSGAIVLRQKWSRGQVEARFANMSPCLIGMEACVGAHHLSRKLKALGHDARLMPARYVRPYSKGQKNDFRDAEAIAEAVQRPTMKFVVTKTADQLDLQALHRVRERLVSQRTGIINQIRAFLLERGIAVRQGQRFLRVELPRILATPPDVLSPRMVRVIEGLASDWHRLDERIEGFSSEIEELAKRDAGCERLMSIPGIGPIISSAMVAAIGTGDSFSKGRDFAAWLGLVPRQISTGDRTILGKISKRGNRYLRVLFVQAAWVVLVKVKPTRWQGHGLRPWIEAAKKRLHHNVLAIALANKLARIAWSVLAHGRAFETNKLLAAA

SEQ ID NO: 312811 - protein, 337 aa, unidentified
MEREYVGIDLHRRRSVIIRKNADGELLSKVRIDNDPLALAEAVGAAGPEPEVVLEATFGWYWAADVLAELGAHVHLAHPLGNDWGNRRVKNDERDANDLVDLLRLGRLAEAWIAPPEVRELRELVRYRHKLVRLRSGLKAQVHAVMGKHGVLPSRVDMFGPGGTAQLDALDLPMGYSCRLESLRDLVGVYDRDILGLDRRIAAQLVNHQGYRAIQALKGVGPVLAAVFVAEIGDVTRFPSPDRLCSWAGMTPRHRESDTKVRRGSITKQGSRLVRWAAVEAVSKNHAGGDIKDAYQRIAARRGRNIARVAAARRLLTLVFYGLRDGEIRCLAQTKTG

SEQ ID NO: 312812 - protein, 322 aa, unidentified
MIGIDVSKATLAVTCLNPADQSVCWEMTVPNSIAGVHRILAKTPAATAWVVEPTGRYSLVVAHEAAKHQQPVLMAQPKRAKAFLSAVSPRAKTDTLDSHGLARYGLAVPLCPYPMKSQVVERVDQLLTARKGLSRALMSLRQQQAELPEAAPYLAEAIAALKAQLAALDAALPKAAKDLPDVERLDAVPGIGPVIATAVASCLAAKAFRTPAAFVAYIGLDTRVNESGTHRGKRTLSKQGDAELRRLLYLAAQANLRITDSPFRAQYDRECAKGLASTAALNAVARKLARLCWSLARHQTSYDPDLVHVQRNLLAQQTGATP

SEQ ID NO: 312813 - protein, 414 aa, unidentified
MARVFIGVDPHKLSVTIEVVDDRETVLTTGRFGTDKSGYAAMRRHVAAWPERAWAVEGSNGAGRPLAQRLLADGEHVVDVPAKLAARARLFDTGHNRKTDAHDAHAVAVVAVRTEGLRVLSYDVELEALRMLADRREELTRQRVQTVNRLQRQLSELTPGRAKKDITALQAKGILASVRPRDLAGKTRRRLAVEQLTELVAVDKKIKALTKELNAMVHARGSTLMDLPGVGPVVAARILADVADVARFADRNRFASWTGTAPLDASSGEQIRHRLSRAGNRKMNHMLHIAAATQIRLDTEGRVYYRRKLAEGKTRMEAMRCLKRRISDAVYRQLLADAQAAAIAAENQQADQSPTEVGTGPGGHCGASQESSAVDLPPHIDTSDQPLPGPATQTLQPTPPPRKTTGRTSLKRAG

SEQ ID NO: 312814 - protein, 381 aa, unidentified
MLTMTRERESSAATACLLLAFELGQRSWKLGFSAGVGQRPRVRQISAGAVGLIEKEIVAAKMRLGVSPEATVISCYEAGRDGFWVHRYLLAHGITNYVVDSASIEVNRRARRAKTDRLDLGGLLSLLARYVQGDRRVWRIVRVPTVADEDARQLPRTWETLAEDRTRLINRLKGLLATQGVQVPLDEDFLEHLQAARLWDGMPVPAGLQERLAQDWAQLRQVERQLRERKARASRPFAVTTSTGRAIERLQTLRAIGVTGAWVLATEIFGWRQIENRRQLGGLVGLVPAPYQSGETAYDQGITRAGNTHVRRVMVQLAWVWLQYQPDSALSQWYQRRFGGGGKRLRRIGIVALARKLLIALWRYLETGAVPDGAQLKPTEV

SEQ ID NO: 312815 - protein, 398 aa, unidentified
MFYLGIDIAKHKHYASIIDQTGKPITKPFPFQNHKEGGQALLNWMYQYIESPTEILIGMEATGHYWLAVYSFLLDHGFSVVVLNPIQTNAWRKGTEIRKRKTDAIDATMIADIIRFGRFVETPLVDEKMFALKQMSRFRNALVSNMSDLKRKALVVLDQTFPEYQSIFSDVFGKTSSQILLDYASPSDYEQISIDGLTQIIEQTSRNRLGKKTANKLMELASNSFGVTFCKDAFSFQLKMLMEQIRFIEDQIKECEEEMSQLLIDLDTPIMTVPGVGPILGATILSEIGDIHRFDKPSKLVAYAGIDASVSQSGQFEASGTSISKRGSSHLRRALFQAAITAHKHDPVLKAFYEKKRKQGKHYYVCIGAVARKLCYIIYAILKSNKPYEVPPHSPVET

SEQ ID NO: 312816 - protein, 320 aa, unidentified
MMAQNDLHVVGIDVAKDKVDACVRSSAQRQTFPSSAEGRRELIAWLRRHQVGKAVMEASGGYERDWAKALRIAGIEVRIVDPKRVRNFARSAGRLAKNDAIDAEMIAWFAETFGNAPNQVHDAERERLSQIVNARQGLLDVRTELQNRNEHSVPEVVQKMHARLLKKIAVEIAKLEAAIAAMIKATRHFSELAAIIESVPGLGEGTSAGLIATMPELGHVSNKVAAALLGVAPYDDDSGKRRGERQIKGGRRKCRNLFYMACLGAATRHNPALNAFYRRLIAKGKEKKVALVACMRKLIVILNTMIARGQKWDANLHLAS

SEQ ID NO: 312817 - protein, 336 aa, unidentified
MEFRFFIGIDVSKDTLDIGLLDAENSETVNHQQVSNNDSGITAMFRWLEEHNGFSIENSLFCLEHTGMYNYPLLQFFSKQGASVWVENPIQIKKSLGLQRGKNDKVDAVRIAQYAYRSRNQVKLWQPAREVVDRLKHLAALRERLVETKKRLLTPVKELFEIGNDSMAKVLEKAMRKTMKALDKDLEAIEAQMKDVIDKDDNLKSLYQLVTSVVGIGFVTAVNLIVCTNEFKLFSSHRQFACYSGIAPFEYRSGSSIRGRTKVSHMANKKMKKYLHMASLTGIKLDEGLKSYYNRKVEEGKNKMSVLNAIRNKLLARVFAVVNRGFAYQKNYLVLS

SEQ ID NO: 312818 - protein, 326 aa, unidentified
MNIIGIDVSKQKLDCLWLKDQATGKIKTKVFANTAKDHQALIAWAQKQSKQPIASIHFVMEATGIYHEALAYALVQAGAQVSVVNPAKIHNYAKSFGTRSKTDKRDSQILAHYGMTRCPRLWCPEPDNVRQLKALLARLDAVEKDIQREKNRLEKAEIVQVTDEIVRSIHTVLTHLTDEKKRLAALINDHMDQHPDLKQDRQLLESIPGVGPVVSRMMTAVIRSRSFDSAGQCAAYLGLIPVLQESGTSVRGRPRLSKAGDSRVRATLYMAAVVSIQHNPDIKRQYERLLKNGKSKMSALCAAMRKLVQICFGVLKHQQPYRAQCL

SEQ ID NO: 312819 - protein, 442 aa, unidentified
MTTEKIKNKVSPDEIVAWVGLDWADSEHRISMYDVATGQIEDSVLKQSGEALQQWLAELQKRYGGGRVAVILEQSRGGVVYGLMGYDFIVLYPVNPQSLAGYRKALYPSGAKDDPVDATLLREMVQKNPERFRQWVADDPETRSLRLLVEGRRKQVDEMTRLTNRLTSQLKSYYPQALEWAGELNSRQACDFLEEWPTLDAVKAARPARLRKFYSKHGRPRPETLDRRIESIRKATGLTRDPAAVIGGSMMVQAIVKQIRSLIIAVEDYDDEIKRLFHKHPDRLIFESLPGAGPVLAPRLLAAFGADRDRWSLAAEMEMLSGIAPVREKSGKQCWVHWRMACSKFLRQTFHEFAASSVRWCNWAKAYYDCLRERGKSHHAAVRALAFKWIRVIFACWKNRTPYDNQVFLDALAKRGSHLALRAASAVPPCRAHRTVMTVENL

SEQ ID NO: 312820 - protein, 343 aa, unidentified
MSEITVIGLDLAKHVFQVHGADPDGRPVLRKRLRRGQVLEFFASLSPCLIGMEACAGSHYWGRELQALGHEVRLMPPQDVKPYVKTNKNDATDAEAISEALTRPTMRFTAVKSAEQQSVLMLHRTRELLVRQRTMLVNALRGHCGEFGIVAAQGLSRAGDLIKRIEDPADTALPDLARQALQCLTSQIRAIQEQIALIEKKLLAWHSSCEASRRLAEIPGVGLITATAVVASVGNATQFRSARQFAAWLGLVPQQHSSGGKERLGHISKRGDGYIRRLLVHGARAHLSWSRRKKQIRSAWLTGLLARRPTNVVLLAMANKTARIAWAMLSRGERYQEMIAAAA

SEQ ID NO: 312821 - protein, 343 aa, unidentified
MKLMRIGVDLAKNVFQIHGVDCHELPVWRQRLPRDRWLQTVLEKIEPGCEIGMESCGGAHHWARQLQARGFRVRLIAPQFVKPYVKSNKNDANDAEAICEAMSRPSMRFVAVKTIEQQDIQATHRIRAGLIEQRTAKANQIRGLIAEYGLIAPKELLMLRRAIPCWLEDADNGLTARFRRLLNGLWSDLHTLDERVSELDGEISAIAASEPTAVRLQQLRGVGPMIATALVAAIGDASQFANGRQLAASLGLTPKQHSSGGKDRLLGISKRGDAYLRTLMIHGARSALRTAKSKDDRLSQWVVRLAERSHPNVAAIALANKTARMAWAMLRNGTDYQPDRAAA

SEQ ID NO: 312822 - protein, 404 aa, unidentified
MELTAIYRCVAALDVHQAKLTVCVMSENEQGEIVTEIREFGAFKRDRREMAAWVASFHPELVVMESTGIYWKSPYAALEWHGLNLAVVNARHVKQVPGRKTDINDAQWLAILARSGLLRGGFVPPRQFREYRLIARQLQKLTDIAAGEKNRLHKALTDAGIRLSVVVSDVYGKSAKTMIMGLLNGKTPEQLLGYADPRLKATPDELREALEGDLSDSHRFVIGELMAHIDELEARVARFRQTLLSDLSPYQAILNNLQTLPGIDELSAAMLLVEIGDDMSAFGSPAKLVSWAGVCPGQNESAGKRKSARARKGNPYLRRILCEAANAASRTRCSLQEKFKSLMIRRGRKRAIVAIAHKLLKTVFLLIQRGDYYRDAATDYEALTVQRNAPRWIKKLIQYGYITP

SEQ ID NO: 312823 - protein, 381 aa, unidentified
MKVFYLGVDVSKKKLDLCLRSNGKDILYDVIPNDLSSIKSWLTRTFEKFFLSEDSLVVCAEHTGQYTYPLVCATKSIGVYLCLEDAAKIKYCHGIPRGKNDKIDACRIAMYAERYNDCLQPYTASELIIQKLKNLSTERSMLVADRAKYQSQLKDQVDYMEHSIYIAKCNRVEGIINTFTDYIAQIDLEIKELINQAPVIAHQMDLLMSVDGVGERVALKMIMETDAFTSFTDPRKFCCHAGVVPFVYVSGSSQRSKNRVSNRADKSIKHLLHMAALSVSQVKNSPLKKYYDRKVEEGKNKMSVLNAVRAKLVTIMFAVIRTDAFFSRNYQNSLALMRSNIIVCIYGIGYTFIQLFKAVICTVKKPPILDRVIHPFSQSIM

SEQ ID NO: 312824 - protein, 402 aa, unidentified
MGEAVVGYDSVDVFVGVDVGKGEHHAVALDKAGQRLFDKALPNDEKKLRELIGGLKRHGTVLFVVDQPKTIGALPVAVAYDEGVLVGYLPGLSMRRIADLHAGEAKTDARDAVIIAEAARSMPHALRSLSLVDEQVSELSALCGFDDDLATQITAASNRIRGFLTQIHPALERVLGPQLGHPAVVDLLQRYPSPAALHAAGETRIASRLVKLAPRLGRRLATEIMAALAEQTVVVPGTSAAATVLAKLCEQLITLRRQRDEVALEVERLLEAHPLYQVLTSMPGVGVRTCARLITELSGKDFASAAHLAAYAGLAPVTRRSGSSIRGEHSSHRGNKMLKRTLYLSAFAALNDAHSRAYYDRKRAQGKRHNQALIALARRRCDVLYAMMRDGTLYQSPLENAA

SEQ ID NO: 312825 - protein, 324 aa, unidentified
MSTRSTKTSRRSFIGIDVSKQFLEVAVHKNEYHFRCPNDPKKFPTLIAELIALRPARIVLEATGGLERPLLHALRRAGLPVVLINPRQVRDFAKALGLLAKTDRLDARVLAHFAAAIQPPLRPIKTAEDTELDALMGRRNQVSDMLAAEKNRRGSAATEAARADIDAHIEWLEQRLKALDKQLKGQLKRSVAWQQKDKILQSVKGIGFVTSVSLLADCPELGQLNRHQIAKLAGVAPLNRDSGKQRGTRHIFAGRAPVRAKLYMATLTAIRCNPVIKAFYQQLIARNKLKKVAIVACMRKLLTIINVMVRDNKVWTVKAQPVSA

SEQ ID NO: 312826 - protein, 354 aa, unidentified
MRKMQDFIVKGKQIFVGLEDSKRTWKLCVRSGGMIVAETSMPTQYDNLRNYLRGKYPECKIKVMYEAGFGGFWLHDLLRRDEIECIVTPAHTVTQAKVSRVKTDKVDARRLAQNLENKDYKSCHVPDKERREDRQIVRTQTQMQDKITATKNQIRKLLDWHGLNGDLPSGAWRESDYRKLQSMKLPSLSLQACLDAYFKVIECLEQISLGLLEQLKEISQKDPYRESVKLKQSCPGIGWLSAIRFTLEWGDLTRFANGGYLASFIGLTSSEHSSGETVHHGRITRQGSGKVRAWLIQCAWRAIKLDPVLLDKFERVWKNSGSKKKAIVAVARKLAVRIRALEISKQPYMIGMLE

SEQ ID NO: 312827 - protein, 425 aa, unidentified
MNYKQNEKINQVKESTLVVGIDIGSTTQYARAFDWRGIELGKVFPFSNSREGFEAFKAWMQHLQDKYRKSDVIVGIEPTGHYWFDLGAYLEDEGILLVMVNPYAVKQTKELDDNSQSKNDRKDPKVIAKLVTEGRYSAPYTPDGVYADLRIMVANRKRLIREMTQIKNRFARWFAIYFPEYTDVFGDYEAQSSMLLLKKVCTPEAIVELGAEKINQIWRDAKLRAVGMKRATTLCETAKRSIGLKKGSSAAQYEMKLLLEDYEYKKAQLDAVMEEIEKLCRKIPESEQMLAIKGIGVITVAGFLAEVGDVRRFESPRQIQKLAGLSLRENSSGKHKGQTTISKRGRSKLRAVLFNAAIPLIAKNPEFKSLHEYYTTRANNPLKKKQSVIAISCKLIRVFYAILAKGVTYDAQKLISDIHRQPQVA

SEQ ID NO: 312828 - protein, 397 aa, unidentified
MIAVGIDISKAKSTVAVIDSDGTVLASPFTMAHTQPEMEAFVTYLKGLGEPTTILMEYTGHYHYPVLKKLQDEGFPVCIVNPYQMKKYGDVEIHKEKTDKKDALRIAAYALEKSYKLVPYSSMEQKYEDLKFLSRQYSQRITYVAKLKVQLIALLDQTMPGITRILPLNSRNPEKCALLLFIKRFKSFDEIQRIGKARFLASYDVLAKKASERSASSKGLSIYELAVDSITTRGEDPYIWLSQNQCVDLLSATQNAADEIISQMRNIAETIPEYTVLRAMHGVGDRLGPIILAEIGDVHRFHSGKALNSYAGNDAPPYQSGQFESRNRHISKRGSSALRKACYEVMQALKLTKPQDDPVHLFMLKKEQEGKPFNVAKMAGVNKFLRIYYARAMELYK

SEQ ID NO: 312829 - protein, 438 aa, unidentified
MSNKVIFNLDELFISVGIDVGADFSWMSIALPNQQFVGKPYKILHNSIDSLTTAVSKIKEAEELYSLESRIFLESTGIYHYPLFCYLRDKGFNCSVINPIITKNSTNINIRKVHNDRFDSKKAALVGLKPDLKVSLMPSDLALNCRNLCREYYDLMDNRSAYVNKLQGELRMAFPQYLGIFSKVTINTSLTLLETYTSPSAFLKADKQEIIDIIKSTARFGLTYAQNKYNAIIQAATDANQFGYIIDSNIKRIRLYISFIRKYDEEINSILESLHELVDANKDTDFVKQIHLIETFKGAGFLSAVSIMGEIGEFSAFSKPKQLFAYFGLDPAVKQSGKFEGTKVQMSKRGSAIARRVIHTLTLQSISISRNGEAKNSVLREYYIKKCDSKPKLVAMGAVSHKVCNMIFAILRDNKPFKIIAPQEHIKQYNAVKCDIAA

SEQ ID NO: 312830 - protein, 379 aa, unidentified
MQVIRLAVIITAKTNVKGTTVKKTLSKKQRFFNKINLTTDDEVYVGIDVHKKNCHIAVRLNGALALTFVAPSDNIAIARMMCKLNPAVKKIVYEAGPTGFSLARVLEKASLPVAVIAPSKIPRPSAQQAKSDQIDCRKLAEFAEKDLLVEVAVPDSRQESDRQVVRLHNQLRDKRKRIKHQIKSLLLQHNIPEPQGLDDWTKRSIVQLRNIELCPQLRFTLEVMLDELNYLQTQIKRVELELKNIYSKERHSKQMEILQSHPGVGPITARQFRAEVFNPERFDKATQLTRYLGLCPHVSQSGQKRIDGRLMKAGQVKLRADLVEASWVWIRFDPAAKKVFLRLLANTGEPNKAIAAMARRLAIHLWKMLCDEQPYRKTA

SEQ ID NO: 312831 - protein, 355 aa, unidentified
MTASYDYHIGVDYHKSYSHLVVQDSTGKTLRSGRVKNDRQSLGGFLERYRENSHAVVEATRNWVVMYDWLDDICDDVVLAHPLKVKAIADAKIKTDKIDATVLAHLLRADLVPEAWAPSDSARELRAALRERMFYVRLRTMTKNRIVTVFDRYPEQTAKLKKLGDLFGRAGRVQLAEVNVSEIDRVQINRGLDFIGDIDGRIKQSEATIRAMTKANANVKLLKTIPGIGEFFARLIDAEIDDISRFRNPKKLAAYAGLVPSTYSSGGKTFHGKIIKQGNKWLRWAFVEAVTPAIASDAQLRAQYEHLKIRGVNKARVAIARKLLTIAFQILRDQRAYEPRGSSTAEAASTISRLS

SEQ ID NO: 312832 - protein, 522 aa, unidentified
MATTRKSATTRTRRRKPQFVQKARGAFHPRVQKVGPEHFGLVCVDCAKARSKFLVTDFYGNILIAPTLLEHNRPELEAAITRIRAAFAEQAIHDCLVAIERTGRYHHVIKQAFSAAAFDTRVVHPFATKQHRLPADPGNKTDDTDLFAIQRAAVNGFALREADWDVSWRNLQLLVRHRRGLVQKSSALCCQIREHLDATLPGLAKCFDDRLWDSAVAWHLIRHFPSACALQQAGRDGLADSLRQAGIRFQRRTLDTVLAWAAQAAPAEPTADINHQLVLALNADRLQKTLEIKSLERRIAHALVATPYVLLLSIPGVNVVSAAEFAAEMGPIEHYANARAITGRAGLYPARYQSDEVDKANGPLIRCANRRLRATLLFVADNLILCNQYFRARAAHWRLAGCNAGNIHVKVAQRFCRIAYQMVAGRQVFRHPCLQQRSYILEKLNAFHAEHDTPIADLMTDLRQAIEQIPAKEHAAEAKPLQESLNDRQRGPQQLRDIVPILLARLGVGRVQSTESGEADLN

SEQ ID NO: 312833 - protein, 354 aa, unidentified
MKEPIVSDFAVLIGIDWADKKHDVCELNNGTSKYKHSVISCKSAALNEWALSLKQRFPDQQIAVACELKKGPLINALSRHSHITIFPVNPATVSKYRKAFSNSGAKNDPMDASIITEILSLHMHKLTAIKPESADIRALTQLVEYRRKLVQDRVDLSNRITATLKNYYPQVLDWFKEKDTVIFCDFISKWSSLPAVKAARKSSLQRFFNLHNSRYPATNEKRLKEIKSAMALTDDSGVIEPNTIMIEILVPQLKLLIESIMRMDSVIKKIYKQQDDRVIFDSLPGAGPQLAPRLLAAFGINRDKYNSAAELQKYAGVAPVIEQSGQKSWTHWRYSCTKFLRQTFVECKRPTNHT

SEQ ID NO: 312834 - protein, 456 aa, unidentified
MPQNRKAKPVPNSDWVKLHPDAAGLDIGASEIWVCVPDDRDPNPVRAFGTFTPDLEALVDWLTACRVTSVAMESTGVYWIPIFELLEARGFEVFLVNAQHIKNVPGRKSDVQDCQWTQRLHSFGLLSASFRPEAEMVVLRAYLRQRAMLIEHRAPHIQHMQKALHQMNVQLTQVLSDIVGVTGMAIIRAIVAGDRDPVTLAQKANPRCHSSQDDIAKALTGNYRAERDFALKQAVALYDAYSEQLAECDRQLEAQYAAIKPRYDPDDPQQPLGPDPKPNAHAKNGPDFDVRTPLFKLVGVDLKAIDGFNESTAQTLLSEIGTQMSRWPTVKHFCSWLGLAPHNDITGGKVIRRHTLETHNRAAQALRMAAQSAGNSQTALGDYFRRLRARLGPKAAVTATAHKLARIVYHMLKHRQPYNPLTPEAYNDQLRQRELKYLKYRAAKLGLTLQPQPAGG

SEQ ID NO: 312835 - protein, 407 aa, unidentified
MKHVVALDVSKGKSIVAIYDGYRQCEFEGELNHTRVDFERLHKRMEDIKLLDGQAPDIVFEATGVYSKPVEAFFKDYGYAYCRMNPLEANLQMAKMRRNKTDLSDAHELAKTHFKMERENTYIQDDYYEQMRAMTRYYDEIEEEIILLKSRMHAILHLSFPELEKVITPSSALFLNIVQLYPHPALLLAHSKTIIKNRLKANTRKNLSLVRAEAKATILLEVAQNSYPAVKVNDIRCDQVRDYAARIGDLLEKKNSLVKQMAKLSEGRKEYVVYRSIPGIGDSTACRLIGEIGDIRRFQNAKQLNAYAGIDIMRYQSGNTHYRDRINKRGNKHLRKILYFMVCAMLMAKGKPNHFVDYYYKLKKQPQRKPHKVAIIACINKFLKVTFQLLTRGILYDYESALPAQKS

SEQ ID NO: 312836 - protein, 319 aa, unidentified
MAQNEVIVVGIDVAKDKVDACIRSLSQRQTFPSTVEGRRAFIRWLRKHKVGRAVMEASGGYERDWATALRKGSIEVRIVDPKRVRSFAQSAGRLAKNDTIDAEMIAWFAETFDEARGQAYDAAREELVQIVNARQALLEQQTQMQNRCEHTVPVAVRKMHQRLLKAIALEVTKLEAVIAALTKASPHFAETAEIIESVPGLGKITSAGLIAAMPELGQVSNEAISALLGVAPYDDDSGKRRGERQIKGGRRKVRNLFYMACMGAATQHNSVLKAFYHRLIAKGKKPKVALVACMRKLIVILNIMIARREKWDASRYAMG

SEQ ID NO: 312837 - protein, 391 aa, unidentified
MVCVGIDVAKDKHDCCILDSDGMVRADCFTIPNNMDGFKQLLQTIRNCTKKSDKIKVGLEATGHYSYNILGFLLDNDLAVYVMNPLHTNLYRKSLSLRKTKTDRVDARTIATMLLSDVDLKSYTDTAYHNEELKSLTRYRFDKVRERAKLKQSVSRLVTILFPELEKLVPSLHIASVYALLSEYPGAKQVSEVHLTKLTNLLTTASKGRYEKDKAIQIRDAARTSIGSVMPAKSLELKHTIKLIRELTSEIDEIEDSIQQIMDELHPPILSIPGVGIQSAAMILAEIGDFSNFESPDKILAYAGCSPSTYQSGKLTNCYAHMEKRGSRYLRYALYNATKYVCHWNPVFAKYLAKKRAEGKHYNVALSHATKKLVRLIYALQKSGKAYLTAA

SEQ ID NO: 312838 - protein, 436 aa, unidentified
MDIVHPRVAGIDVHKKVIWVAVRLPGKAPGHREVTVRRFKTFWRSLQEMAAWLAELGVTDAAMESTGVYWWPVYHALAGAGIEVCVCNAAHMRNVPGRKTDLRDCQWIAELHEYGLLRASFIPAAEVAALRQRTRYRKKLIGQRSSELQRLSKVLEDGGVKIDSVASTLTTASARDMIEALIAGQRDPAVLAQLARGVMRKKIPELQMACDGRFTDSHAQMCRLHLDAYDHLAAKIAELDLLVAKAAEPFAAVITHLITIPGIGQRTAQVIVAETGADMARFASPARLAAWAGLAPGDNESAGKRKKAAARQGDRHLRAAMVEAAWTVSRTATRPGARFRRLARRFGRGNEKKAAVAVAHTLTCIAWAVMRYDSDYAEAGADYYDHRDARNRDHLVRHYQQALARLGYQVTLTPPGDGHSPPGATTTPTTTPGQAA

SEQ ID NO: 312839 - protein, 336 aa, unidentified
MWHVGVDLHRKTVVIAAVHDSGEVRPPVRCQNSETERIKETFRAFGTFRAVVEATGTYRWFYKLVSPLGTVLLAHPGKLRIMVQRRCKTDALDSQLLANLLRINQIPLAYVPPDEYQLLRDITRYRARLVRGLGSVKNSLRALLARYNMEPIFKYPWGPRGLCWFSKQQFGLVDNAVRDELIARFRHYKLEIEAVNERLESLQLLYPQIEALTELRGVGLYTAMVVIGELGDVKRFRRAKQVASYAGLTARVNQSGEHCYHGHISKQGSPWLRWLLIEAAMKLVQQDVALANFYQRIRKRSSAKIARVAAARKLAEICWKRLIAWERQHNPEKAVA

SEQ ID NO: 312840 - protein, 344 aa, unidentified
MEHFAGFDVSVKDTSVCIVDDTGRIVREVTVASEPEALLAVLKNPAYHFKRIGLEAGPLSQWLFSALAEAGFPVICVETRHMRAVLKAQINKTDRNDARGMAQMMRVGLYRPVHVKTLRSQKLRMLLTHRKLLQSKAIAIDNDLRGTLRNFGLKVGMVGTVRFEARIRELVENLPDLAALVEPLLVVRRTLREQFCILHRRLLVIVRDDEVCRRLMTTPGVGPVVSLTYRATVDVPARFHKSKSVGAVFGLTCAKYQSGEVDWSGRISRCGDEMMRVMLYEAAQAMMRSKKWSWLKAWAMQIARRRGMKKAIVALARRLAVIMHRMWVDGTEFCWTREQAAAAA

SEQ ID NO: 312841 - protein, 323 aa, unidentified
MSTKATKKRRSFIGIDVSKKLLEVGVHQSDYHFRCPNDPKNFPALITELISLRPARILLEATGGLERALLQALHAAGLPVVVVNPRQVRDFAKALGLLAKTDRLDARVLAHFAAATQPAIRPVKAQQETELDALMGRRTQLSDMLAQEKNRRGSAATKDTRDDIEAHIEWLEERIQELDEKLKEQLKCSAVWQQKDQILQSVKGIGFVTSLSLLADCPELGQLNRHQIAKLVGVAPLNRDSGQQRGARHIWGGRAQVRGKLYMATVAAIRFNPVLKSFYERLIAKHKPKKVAMIACMRKLLTIINVMIRENKLWNVDTQQLSA

SEQ ID NO: 312842 - protein, 423 aa, unidentified
MKEWKEITHYAGFDWARDHHVVVVVDRQGQIVADFQFDHSVEGWKRFRQKTAALESVAVAIETSQGAVVDQLLQYEYTLYPVNPAAAASYRQRKAPSGTKTDHLDAWSLADALRVDGHGWKALAPMDELSAQLRLLCRDEVALIEQRTALVNQLQQALLEYYPAALEAFEDWTMPSTWDFILQFSTPEALVKAGKRRWEKFLHTHRLWRAQTLEKRLALFAQADQFKAGAAITRAKSQLALSLCKLLRTLQEQLDQYRKQIEALFENHPDHHLFGSLPGAREKLAPRLLAAIGSDPKRYGSFQVLQSFAGTAPISFQSGQLRRAKVRWACDKFLRHTVHLWADCFRKASAWGQAYYRKKRQDGKSHACALRCLGQRLLKILFRMLTERKPYDAELHARNQQKHGSWVLALMPNPTPHISEQLP

SEQ ID NO: 312843 - protein, 347 aa, unidentified
MIIIGCDFHSRLQQIAMLDTETGEWVERRLEHESGEARRFYAGLKSPARVGIETTGYTRWFAEMLSELGHELVVGEAGKIRAKDPRKQKHDRRDAALILDLLVRGDFPKIWLPSAEERDVRVLLEHRHQLVELRTRAKNGLQAMALNYGLRRRGRLWSERGQEELKKLPLRAGMERRREDLLRLLGQLNTWVKELDQRIEAEVERREDAQRLMTHPGVGPLTALATVLVLGPVERFPDSRHLTSYLGLIPQEESSGPRQRFGHLTKQGNRLMRFLLVEAAGIASRYDPGLRRMYRRLAFRKGAAIAKVAVARKLAIRLYVMLRDQIDYSEFCRRGSHAGMLGDVALA

SEQ ID NO: 312844 - protein, 406 aa, unidentified
MSVYIGIDWSEKKHDVLFMNPAGAALAKLVIAHTPDGFAKFDQQCRNLGFQPADCQIALETAHNLLIDFLWSHGYQQVYVVPPSQVRANRGRYSASQAHDDPRDALLLADILRTDRSRLQPWQPDGLLVRQLRAKISLHRHLLSQEQRLANRLRAVLLCYYPAAITVFSELTAQIALQFVCRYPTPAAAQALSYAEFTHFAQEHSYSHPKQLPTCYARLQVKQPTPAPDTVLVYQAEAVQLAELLLPIGEAKRANLRAVDKLFTQHPDAPIFTSLPGTGDYLAPGLLAKFGDHRERFPTAASVQALAGTCPVTEQSGKHRAVYFRTGCDHEFRHIAQQWALASLEQSPWAASYWQEVRPHCQSASHATRCLANRWLAVAWKLWHSHQLYDEAYHTQQRQARRQPRA

SEQ ID NO: 312845 - protein, 411 aa, unidentified
MNDKANVVERVIGFDSHPDSFTAAILRGPTPATAVEEKVFNKVPMAQLTSWAQKHTTAQDLIVLEASGNSFQVVRTLAAAGRRAKVLESCQMGKLKEAHANNDKISAVRIGKAYLAGTAKEVWVPDPKTQEWRDWFHAYHKAVKRNTQIRARLRSYLSDNGVRLKASTRLTEPEQAEAQLRQARSWSERQWQVIQILLADLRHADQQRRHWHSLMAQEVLAEPVLLSLVRLCGIREIIAFALGAFIGDIKRFASPKKLVKYVGLNPAFDDSGNSEWHGGIGGHGHKLLRSLLIEGAQAILRCSQTPLARWGRKLLATKGSVNLAVAAIARKLTVALWYLMMGRWTALEELDARLLRKVSSLISSVGEPGLKALGKTRKLYREEICQRLKDGRTYVLDPNKNYVPQPAANPA

SEQ ID NO: 312846 - protein, 340 aa, unidentified
MHSTTVAVDLAKNVFELAVTDCKGEIGERLRLNRARFAAFFVQRPPCRVLMEACGSAHYWARRISAHGHRVELLPAQYVRRYVRRSKTDRADAAALIEAARCTEIRAVPVKTLEQQQVLGLHRLRAQWMSTRHRYLNTLRGLLREFGVAIPQGAHIGRAQIARQLRQPSQELPAALRPLLSEMLADLDQLEQRVEQVERELASITRADPIVQRLREIPGIGPLTSTALRASVGDIGRFPCARRFASWLGLTPREYSSGERRRLGSISKQGDVYVRTLLVHGARAALLAAHRLQRTGHPPDRLRLWALKCQRQRGHNIATVALANRFSAHRVGHLEARAAL

SEQ ID NO: 312847 - protein, 449 aa, unidentified
MAKGGSRQAGLPVVHERAAGIDIGSRFHVVAIAPALSSDPVQTFQAFTADLQRMADWLVAVGIKTVVMESTGVYWVPVFEILESRGIDVILANAREAKAVPGRKSDVNDAQWLQRLHSCGLLRASFRPARDVAALRVYLRLRERLLDYAASHIQHMQKALVYMNLQLHHVVTDVTGVTGLKIIRAIVGGQRDPRELAKMRDVRCKASTETVEASLVGNYQPEHVFALAQALALYDFYQARVDECDAQIEGVLTVLNADKPVPATPLPKARHRTKQPNEVNFDVRSVLYQLTGRDLTQIHGIGPHLALRMIAECGTDLSRWRTAKHFTSWLTLSPGCKISGGRVLSAHTMKTTNRVTAHLRLAAVTVGRTNTALGAFYRRLAARIGKAKAVTATARKIAVLFYNVMRYGMDYQDPGAEHYDKKYRERVIKNLHRRAAEFGYTLQQTGCVS

SEQ ID NO: 312848 - protein, 354 aa, unidentified
MTSTKYIGMDVHKESISIAVLDLAGKVVMECVVETKASTILQFIHGLCGDLRVTFEEGTWASWLYDLLKPHVTELVVCNPRKIALLKDGSKSDRIDAHKLAELLYLNKLKPVYHGDHGLRMLKELSRSYLTISKDLGRVMNRLKALYRSWAIPCAGTQVYAPHYRSEWLSKIKEVGVHRRAELYYQQLDALRLVRQQARKELLAEARKHRATKLLRQIPGIGPLRAAHLVALMQTPHRFRTKRQLWTYSGLALETHDSAQYRVVEGQLQRSKKSVTLRGLNTNHNHDLKDIFKGAAMRASTAPGPLRAFYEALLAKGRKPTMARLTLARKIAAITLIVWKKEVRFDANYLKQAA

SEQ ID NO: 312849 - protein, 413 aa, unidentified
MDILHERCAGLDVHKKTIWACRIIPQDEVWQKEIRSFDAMTDGLLALADWLREGDVTHVAMESTGVYWKPVFNILEGEFEVLVVNAYHIKNVPGRKTDVRDAEWIAKLLQHGLLRASFIPEAPQRELRELVRYRTHLIQERTREVNRVHKALQDANIKLSSVATDIMGKSGRSMMEALIAGVDDPEQLADLALYRMRAKLPELERALEGRVKGSHRVLLHLHLQHIDHINVQLERLEAEIEKLLSPFDQDDLLDRLDTIPGVDRRVAQTIIAEIGTDMSRFTNAGHLASWAGLAPGKNESAGRNRSAKTRKANRYLRPALVQAAQAVGRSKGNYLAARFRRLAARRGKKRAAVAVAHKILVIAYHIIRDGTVYQDLGANYYDERDADKVQRRLVKRLEKLGFKVSLEPLEAAA

SEQ ID NO: 312850 - protein, 392 aa, unidentified
MIIVGIDAHKQLHKALALNDAGTILDQWQGPNSPEGWHSLHQWATTFAGPRQWGIEGAWNYGRGLAQYLVAEGETVYEINPRWTAERRRKARKPGKSDKLDALAVAQLVREDSSTLPQVTADDETAILDLLVTEREGALTEATRLRNQIHQLLLQIDPEYKAHLPGLKTQAGLRMVTSYTTTSQHALDQQRAAVIRRTAERLELALRQAKDLADQIRKSAQLHYTPLTQLRGVDLLTAGALAGILGPGRRFLTDAQLAAHAGVAPLEASSASRVRHRLNPGGNRRLNAILYRIALTQARCCPAAQIYLARRQSEGKTRREAIRALKRYLVRAVWRLWQECNPKSAHHACLKRAQVPTYEQAAWSGAGAGGPPAPAPLQAKKAARHHSLAGGS

SEQ ID NO: 312851 - protein, 420 aa, unidentified
MPATFSIPRTNDLERAMTAVMIGVDPHKGSHTAVVISPAEEPLGEIRVRASAAQAGKLAEWASAWPERTWAVEGAAGLGRLLAQQLVAAGERVLDVQPKLASRVRLLQAGDTNKNDPNDALSVAIAALRSRTCREVAAEDHPAVLKVWSKRHRDLARLRNQVACRLHAVLCDLVPGGIAKEISAAQAARILGQATPSGAVEVARAELAAEFLEDMRRLDAQLRGTRKKLAAAVKVSGTTLTQVFGVGPVIAGTIIGDIADVSRFPGRDHFASYNGTAPVEVSSGNRKIHRLSLRGNRRINHAIHMAAITQLRHKHSEGRAYYEKKLAEGKTHKEALRSLKRKISDAIFARLQADARQAAATQAKGPGGHPGNDSASSAAGSHPARQLFGQATPGPGTSLRPATPAGTLSKPVPRKTQATT

SEQ ID NO: 312852 - protein, 338 aa, unidentified
MSIVRIGIDLSKSTFHVHAVDNEEGVVVQRMMSRAQLRHFLAMTPPCEVATESCGSAFHWARYAKQCGHLTKIIASQFVKPYVKSNKNDFNDAAAICEAASRPSMRFVPTKSIEQQDIQALHRVRTRRVAERTALGNQIRGLLLEYGVPIGLSLVTLRQRLPVVLEDEQNELTPRSRALFRELYAELLDLEGKIAYVERKINQIFKASEQCQRLAQIQGVGPLTSTALVAAVGDARVFKNGRHMAAWLGLVPRQQSTGGKARLLGISKHGDRYLRTLLILGARSALRVMGRKSDRRSLWAIDVERRRGANIATVALANKTARIAWAMLAHDEDYRAAV

SEQ ID NO: 312853 - protein, 414 aa, unidentified
MSYKIAGIDVHKKVLMVVVIEASTPEEKPERRRFTTMPSDLHRLSIWLREQGVEEAVMESTAQYWRSVWLELEPHMRLQLAQAFSNRAPRGRKHDFKDAEGLVRRLIADELILSFVPDGEQRSWRNMTRMKTQLRRDRVRLQSQMECLLEEMRIKLSSVVSDLLGASGLRILRALAQGETDPKKLALLGDDQLKCSEEQLVDALTGRPQPMHREMLRLQLERLQLIDRQIEELNGLIAQAMKPHQEAVIRLAEVPGLGVDSAQQVIAEVGVQASTFPSAAELTSWVGTCPGKDESAEENHSSRSAKGNKYLRRLLNQSAHAAVKKKGSHFQAVFRRLLPRLGYKSAIWAIAHRLCRLIWKILHDRVRYIEQGSESDPKLREKRARTLARALRKLGYDVAITPINPSTAQKAMQT

SEQ ID NO: 312854 - protein, 338 aa, unidentified
MKITTIGLDIAKTIFHLYAVNKVGRFVKKKQLKRKQVLAYATKLEPCLIVMEACGGANYWAREFIALGHQVKLIAPQYVKPYVKGNKNDYNDAEGIAEAAQRPNMRFVPIKSVEQQDIQNFHRQRERIKKERTALGNQIRGLLAEYGIVIRKGIGAVRERLPQILEDAENGLTPLTRELLAELLDELREIDQRFNQCDQRIESLSQSNEVCQRLDEVLGIGPITASATYAAAGNGKDFVNGRHFSAWLGLVPGQHSTGGKTVLLGISKRGNAYLRTMYIHGARAVLRHSANKTDRFSLWAQGVLARRGYNKACVAVANKMARIAWVIMAKGETYRVTT

SEQ ID NO: 312855 - protein, 428 aa, unidentified
MTVVETFAAFIGIDWADREHAVCLASPETLLVEHRSLTQQAEELDQWATELRHRFGGRPVAVCLEQSRGPLAYALMKYEFLVLFPINPKQLAKYRQAFTPSGAKDDPTDAELLCRFVKEHHQHLRCWKPDDAQTRGLRLLTEARRQCVEQRKAYGNRLLQELKESYPLALTLKGKNIYADRFLTLLAKYPTQRELQRASPRQLVKLLSRRRLATDDLPTDPKQDPRVLAIRAAHALVNDAMILQAARLAVVHLVALLQQFNKTIETYDRQIAALLAQHAEANLFAGLPGAAAAIQPRLVAAFGTDRQRYASAEELQTLSGVAPISVKSGKSRVVKRRRACPHFLRQTFHEFARCSRLKSAWAQAYYQLLRARGFRFHAAIRALAFKWIRILFRCWQERQPYEEERYLEQLRKKNSPLIAYLKTNTINN

SEQ ID NO: 312856 - protein, 336 aa, unidentified
MQKLFIGVDVSKNDLDVAYYHNGQSFFIGKYPNNQTGFDNIAKDLESKKQKTNSASIFVVMEPTGGYEQHIAHFVFQNKWEVSLPNPGQFRNWVKGTGKRAKTDKQDAMMLAKYGAVVNPPTWKPLPPEVAQLESMLNRLDDLKEILGSENNRLEAYQNRVKSDDIVIGSVRQSISSLEHQIETLEKAIKDHFDKHTELKEQNIRLKTVPGVGEKISPHLLVSMHRFSQLTESKGTSRGVTAYFGLDPKPHESGISVYKRSSISRQGNRSIRHYLFMGALGGVRGNNPLRVFYHRLLSRNKAKMVALVASARKIIVWCWAVFRNGKAFDPTRFETA

SEQ ID NO: 312857 - protein, 343 aa, unidentified
MEKVYYIGLDIHKKTISYCIKLQDGTKVRQGVMAAERKALGQWLAEIPGHWKGAMEATMFTGWVYDFLKPHALELKVAHPEMLKAITSAKKKNDRADSEKISDLLRVNLLPECYMAPEDIRELRRILRYRNMIVRTAVKMKNKISGLLMEVGASYNKKRLHGKRYFNNLLETVEDVPPSVNELLNLSRAGLEMFQGVQRRLLDTLHDNTLIRERIERLMTIKGIGEVTALTWVLEIGDPMRFTSVRQAISYCGLCSAQKESAGKEQRGPISKKRNKHLQTVLIEAAKLAPRWNQQLAAIHAKELERGHRNRATLAVARKLVAYMLAVDKRQTGFEPLSIAKVA

SEQ ID NO: 312858 - protein, 320 aa, unidentified
MTILTSQTVVGVDVAKAEVLVYRADLQTTQAIPNNRAALKRWLKTLPAQSGIAVEATNIYHLDTVELAHELGHQVYVVDGYRLSHYRRGVGQRAKNDPCDARLLARYLAHEQGGLRAWSPPPKAYKALQSLLHRRAALIKARVSLAQSWADEPRLEEELKCLMETFKHSDLAIQKKLRDLSKEAGVAENIERCKAIEGVGVLTATGFATAFLRGEFKDSNAFIAFLGMDLRVDDSGKKTGSRRLTKKGDPEIRRLAHNSAMAACRSATWKPFYEGYLARGFKKTQALVILARKLARVAFALMKNQSEYQPNRPLQGCPAT

SEQ ID NO: 312859 - protein, 407 aa, unidentified
MEVVYPQCAGLDVHQHTVVACARVGAGSAVTRDVRTFGTTTQELLALSDWLTAHGCTHVAMESTGVYWKPVWHVLEESVELILANAMHIRHIPGRKSDVNDATWIADLLAHGLLRGSFVPPAPIQELRDLTRTRKQLVREITQHTLRIQKTLETANLKLTGVLTDILGVSGRAILQALVAGETNPDRLAELARGRLKASRADLAAALHGRVTAHHRFLLQLHLAQIDALEGAVRAVEARLGDALAPFRAAVDRLITMPGVSETVARVLVAEIGVDMTRFPTAGHLVSWAGLCPRLDESAGKRHSTRTRPSNPWLKTTLVQAAWAAARKHDSYLRAQFLRLKSRRGPKKAIIAVAASMLTAAYYMLRDGVDYRDLGAAHFDRRDKAKLATRLLARLHDLGFNVELRAA

SEQ ID NO: 312860 - protein, 348 aa, unidentified
MHKQIAVDLAKSVYQVAESVRAGQVSQRKRLNREAFRRYIQEQAEPVEWLMEACGTAHYWGRFAQSLGHKVTLLHARYVRPYRRRNKTDRNDCDAILEAARCTGIQPVPVKTHEQQQLQQLHGLRETWKKSRTQRINLLRGIFREMGIEAPVATAAFLRAAHELVERPEVAALRGQLQIVLAEINLYEQCMAECEQQLQRWHADDAIVRKLDEVSGIGVLTASALKTAVGQPERFASGRQLSAWLGMTPREFSSGDRRKLGHISRQGNTYVRTLLIHGARAALLAAQRCQANAPERLTRLQRWAVETAARIGHNKAAVALANKLVRICWAVWCHERRFSGDWQSSQPT

SEQ ID NO: 312861 - protein, 412 aa, unidentified
MEVLYERCCGIDVHKSSVAACILLERGHKPQKHLRRFGCTTRDLRELAEWLRSFDVRHVAMESTGVYWKPVWNVLEQHFHMVLANAQHIKAVPGRKTDMMDCQWIAELLRHGLLRGSYVPPLVIRDLRDLTRTRATLSQEQSGISSRIQKLLESANIKLASTVTHTMGKSGQAILDAIVSGEDNPARLADLALGKLRSKIPQLQLALDGRIRDHHRCLLDSLLRQYRFLEAEIQALDARLEQLGEQHQELADAVARWITVPGVERVAAWSLVAEIGSDMTAFPSAAHLASWAGLCPGNHESAGKRLSGKSRKGSPWLRRMACQSAWAAVRTKNCYLSAQFKRLAARRGSKRALIAIAHSLLVIGYHLQSKGCVYQELGGDYFDQLHAERLKRHLVKRLESLGVSVTLQPQAG

SEQ ID NO: 312862 - protein, 405 aa, unidentified
MATIVALDVSKGKSFYVMYQEMTCLYEGEITHTKSGFQELHALIKNLPEVPEIVFESTGIYSRPVETFCQKNQLIYYVLNPLQAKQQMEKESLRKWKTDKRDAHRLAQTHWNNSRTKSVSAEPLYKELRDLSRFYQEIMDEIGRMRMHLHNAIQLTFPELEQVLSNRLTPYGLTMIAQYPHPSFVLKQSRTIIKNRLMASTAKKISENRARNKADELIAYAKDSYPAVSETAIPVAKTRYYAEQLQALLNQKERLANQMIETAKQLEEFSVIASFPGIGELSAAQFIGELGDLRRFSDPRKANAYIGIDIRRYQSGNYLAQDHINKRGNPKGRKILFFIVKNMIKAQHAAPNHIVDYYYKLKKQPLPKKEKVAIVACMNKLLKCLHAMIRNGTKYDYSYTVSTDH

SEQ ID NO: 312863 - protein, 312 aa, unidentified
MVEHCYGGIDVSKDRLDVQVLPQGRCFSVANTSAGWSQLVDRLRGLSIAALGIEPSGGYERGVIRALLAAGLSVRRINPNKLRQFARARGVLAKNDRLDARLIAEYVAIMPTRVVHRDPAAEQLAAVVTMRRQLSDEHVAVENQAAHIEDAMLRRLNKRRLARLEADILLLDKRMAEIVASNANLARRYDLLTSMRGVGPTLAFTLIALLPELGQMSRKQIAALVGLAPYDFDSGKLKGHRCIYGGRIPVRNVLYMAALSAARYNPALKTFHNRLAAANKKPKVVIVAVMRKMITILNAMLRDNVAWQPKSA

SEQ ID NO: 312864 - protein, 386 aa, unidentified
MQASTVGTPTASHYGTIFITIELSQKSWLVTLHSPDQDKLSRHQLAGGDHAGLLALIGRIRDRAARALGGVPAVASCYEAGYDGFWLHRLLLAAGITNYVFDPASIAVDQRARRVKTDRIDGETMLRTLMAFLRGEPRVVRIVRVPSAEQEDARRASRERDRLVREQTAHTNRIKALLRLLGMAIGNPRRRDWLSWLATQRDWQGQAVPPQMLGEIRHEHARLMLVRERLDALAKTPAQADPTPAAAQMTERSELLLRLKCLGPAFATTLTNEVFYKDFRNRREVASYFGLTPSPWRSGGIDRDQGISKAGNPRARCAAIELAWLWLRHQPNSKLTLEYRKRTLDAGKRIKRVAIVALARKLVVALWRYLTTGLVPEGAVLKTVKV

SEQ ID NO: 312865 - protein, 343 aa, unidentified
MGEVSTIGLDIAKSVFQVHGVDVDGAVVIRKRISRAKLLEFFATLPACLVGVEACPSAHYWSRRLQGLGHTVRLMPPSYVKAYVKRSKNDANDAAAICEAVTRPSMRFVATKSEEQQSGLMLHRSRQLLVCQRTMLSNAIRGHMAELGIISAKGRSGTAELLKIIADEQDDRIPAAARFSLNVLARQYAAIREETVAIERRIHAWHRSSEESRRLEEIPGVGPIVATALMAEVGDWKTFSSGRSLAAWIGLVPRQHSTGGKERLGRISKQGNRHLRWLLVTGAMAVIRYARQHGTKRPWLARLMDRRPIKVAAVALANKIARMAWAMMVRGERFKEPKLLPAA

SEQ ID NO: 312866 - protein, 404 aa, unidentified
MEHATTRYGSVDWASEKHAACVVDAAGSALDEFEVPHTGPGLGELCRRFQRAGVARVAIERPDGPVVDALMEAGLEVVVVSTRTVKALRERYGLAGNKDDRGDAFVLADCLRTDGHRWPALQPDSPQTVALRAAVRARKDLVAARVAATNQLRAHLELVFPGAVGLFADLASPIALTFLERFPTAAKAAWLTEKRMAAWLRANEYCGRTSAAELIRRLITASGGHRGGTAIAHAAVTLSLVRVLRVLVAETAALQAQIAEQLDNHPDGFIFQSLPRSGTVRAAAMLAEIGDCRARFPTPDSLAALAGAVPSTRRSGKLHVVTFRWSCDKKLRDALVDFAQDTPRANAWADRLYRKHRAARKTHPHAARILTRAWIDVIWRCWQDRTAYDPARHRALQEVLNAAA

SEQ ID NO: 312867 - protein, 345 aa, unidentified
MSIVGGLDIHRKQLTFDYLDTVSGEVRRGQVAPADREHLRAWLARFAGRGEVAFAMEGCTGWRYVAEELAAAGVVTHLAEPADTALARGRKRHAKTDKTDSRHLRTLLAEGRLPECWIPPAQILEYRALLETYHDLRREHTAWVQRIHAVFFHQGAPPLSEGALRTEQGLAALQAAAAAHLSPAGQLQVATALEMIAALEARLHTLRRQLREAAAHLTGAKVLAARLYGVGPVTALAMTCWLAGAGRFSSSRKAVRFTGLDITVWSSDRKGPPGRLSRQGPPVLRWAVYEAGKTHARAAAPDHAYYAAVKDRKNSKRAALSEARKIVRQACHILTELGDDALTAA

SEQ ID NO: 312868 - protein, 392 aa, unidentified
MVVSVGVDVSKDKHDCFILSSEGEVLADVFTIPNNLDGFRFLLRRIRDCTHAQDKIKVGLEATGHYSYNLLGFFLDNGLPTYVLNPLRTNLYRKSLSLRKTKTDRVDARTIAAMLLSDAGLKPYTNTAYHNEELKSLTRYRFDKVKERAKLKSSIARLVCILFPELEKLVPSLHIASVYALLEEFPGAKQIAAAHLTRLKALLETASKGRYKRDMALEIRDAARNSIGSWMPAKSLELQHTIRLIRELDVEIAEIEEQIQSIMDELHSPITTIPGVGFRMAAMILAEVGDFTRFDSPDKLLAYAGMSPSTYQSGQLKNCYPHMEKRGSRYLRYALYNAAKYVCHWDPTFAAYLAKKRAEGKHYNVALSHAAKKLVRLIFAMEKSRQPYCSAA

SEQ ID NO: 312869 - protein, 350 aa, unidentified
MIIIGCDYHPGFQQIALVDTETGELKERRLGHREEAEQFYRDLKVRGVSVRVGMEASGHARWFERLLMELQFELWIGDAAEIRTKRVRKQKTDRQDAALLLRLLIEDRFPRIWVPDGENRDLRQLLWHRHRLVQMRTRVMNQLHVVALNEGVRLKKALWRPAGREQLEKLKLPCWSSRRRQDLLDLLDQLTPKIHELTRALEQEVEKRPIVRRLMTHPGVGVLTALAFELVIGTPERFGCGKQIASYVGLVPTEESSGDRRRLGHISKQGNALLRFLLVEAAQVTVRSQPQWRSKFFHLAMRRGRKIAKVAMARKLAVHLYWMWRQGLDYGQFEKLGSHAGQPGNRQGVQ

SEQ ID NO: 312870 - protein, 340 aa, unidentified
MTLVGCDLHTRMQQVAVLDTRTGEVSERQLAHDGSAIEEFYAALPGPVTIGIESTGYAVWFHTLMQRLGHTVLVGDAAKIRAMVVRKTKTDRRDALHLLDLLRHDRFPTIWIPDPATRDLRALLTHRMRLVRIRTMVKNGLHAIALNYRLARGSTLLRQAGLAQLHALALPPYTAQRRDQSLELLAGLTTQIRELDDAITTAALAHPDAPRLITHPGVGALTALATVVVLGPVARFHDSKHVVSYVGLAPALNASADKYHLGHITKQGSPLLRFALGQAASHAARMDADLKRTYCTLVHRRGRPKAKVAVARKLLVRLFIMLRDQIDDDEFRRRGRLAPA

SEQ ID NO: 312871 - protein, 326 aa, unidentified
MDKDKQIYGVDISKDVYDVCTPEGDLYQFKNSVSGFKAFAKVLSTKAHCVMEATGYYHFQLAYFLNNKGIAVSIINPLKIKRFIQMNLSKVKTDKSDAIWIMKYGKSQSLALWKGDSELMQENLQLTRLLSLYTKQSTQLKNKIHGESTLGNPSKIVVSSLKGQLKSLSKEIEKLESKLHENVKSAHQKSLTLLKSIPGIGEKTAISLIVLTDDFTRFNSYKGLCSYAGITPIIRESGSSVKGRPKISKMGNAKLRKLLFMCSFNACKYNKACRDIYDRIVAKGKSKKLALIAVCNKLLKQAFAIAKSGRPYDETYVSILPSINIK

SEQ ID NO: 312872 - protein, 372 aa, unidentified
MIIIGVDFHPEFQQIASVDTDTGEFQEKRLTHREEAEKIYRALACAGQKVRVGMEASGHARWFERLLAELQIELLIGDAAEIRTKRVRKQKTDRQDAQLILSLLLEDRFPRIWVPSWENRDLRQLLWHRHRMVQARTRIMNQLQAVALNEGLRCKKKLWRERGREQLESFRLAPWASRRRRDLLELLDRLNPTITELSQAIQQEVEKCPEARRLMTHPGVGPLTALAFVLIIGEADRFQCGKQVASYLGLVPLEDSSGNRRRLGHITKQGSSMLRFLLVEAAQVTARSLPQWRSKYLHLMMRRGRKTAKVAMARRLAVHLYWMMRQGWDYQQWIKFGSHAGQLGNRCSLKCARKVLDTADIVREAILRQQPF

SEQ ID NO: 312873 - protein, 363 aa, unidentified
MFTERTSVGLDVHARSVAAAAIDGVTGEVKQTKLTPSHEHIRSWIEELPGPVAVTYEAGPTGFGLSRVLNGAGVRCVVAAPSKLQRPSGDRVKTDAKDAVHLAKLLRLDEVTAVAVPSEGQEAARDLVRAREDCRGDLMRARHRLSKLLLRHGQVYTGGAAWTGPHDAWLRRVGRDQLAGPGTRVAFESDYDAVLATRARRDRLDTEITAMAADSEYTAVVARLGCLRGVATLTGFALAVEIGDWDRFDGNTIGSFVGLVPSERSSGTTRSQGSITKTGNSHARRLLVEAAWHHRARYVAGKTMRDRWDLAGPAARARGDAGNRRLHARWARFTDRRKRPVIANVAVARELAGWCWSLAVLEE

SEQ ID NO: 312874 - protein, 330 aa, unidentified
MPTYYLGLDVHKVRTQYCLMDPAGEILAEGSLPTEEVATVVPADCAVVLEATGSWHHTYDALCACAEVVKLAHPSRIKAIASARVKTDRIDARILAHLLRTDLIPEAWAPPQEVRDLRDLVRLRWRFVAQRTTAKNRISNLLARQCLRFEGTDLFGRGGRAWLAELPLDPHTRALVELLLAAIAEADGHVVALTALLRERLRGAPEVALLETIPGVGFLTAATLIAELGDWRRFASAKQVSAYFGLVPSVRASANVAHYGRITRAGSPHARRALVEAAHVAVRLPGPLRDRYLRRAHRRGKKVALVAAARELLELSWILLSRGEVFRAAA

SEQ ID NO: 312875 - protein, 412 aa, unidentified
MRSFGTFTTDLHRLVEWLKECGVETVVMESTSVYWIPIFELLDAHGFTVFLVNARDAKHVPGRKTDVSDAQWLQRLHSYGLLRASFRPKGQIAELRAYVRQRERLLEYAASHIQRALTEMNLQLHHVVAEITGATGLRIIRAILAGEHDPKVLALLRDYRCHASADTIEKALTGSYRAEHLFALEQALALYDAYHEKVSACDARIEAVLKELSIGRGRRSDSSLSPRRPRTDQVNGLAFDVRAALFALLGKDLTQIDGLGPYLSHKLIAECGDDLSAWASAKHFTSWLGLAPSNKISGGKVLSSRTRRCGSRAAALLRLAAVTVGRTNTALGAFYRRLSARIGKAKAVTATARKIAVLFYNAVRHGMEYVDPGASFYETRYRARVIDNLHRRAKVFGFVLQPMDPAPGVVVS

SEQ ID NO: 312876 - protein, 376 aa, unidentified
MERGSLMLNTTTFVGLDVHARSIKAVALDAMTGEVRSATFAYDAAAVAEWVGSLDPAAKCVYESGVTGFDLQKRLAALGVDCVVGAVSKMIKPSADRKRKNDRNDAEFLARMLSVGNVVEVWVPDDGCEAARDLVRALDDAREDLKRCKQRLSKFLMRHGYAFSETTPTGRRKGNWTAAHWAWIRSIEFPEKADDDVLAYYIDATRQAMEDKKRLEKLVEAEASKPRWKKRVDSLRCLKGVDAMTAADIVFEAGEFSRFKNARSFAAWLGLTPSEHSSGESVRQGGITKAGNKHLRRVLVEAAWHYISASPHPKDLAKGQAPDPAARRHAAKGIRRLVKRREEMLGRGVHKNKANVATARELACWCWAIGRMVENG

SEQ ID NO: 312877 - protein, 411 aa, unidentified
MRIVGLDVSRSVAEIAYLEDGTLHAGGRTGLRRDELERFAAKLRATDHVVLESTGNTTAIVNVLRAHVARVAIANPLQVRLISEARVKTDKIDAAVLAQLYASGFLPEVWMPDERTLALRRQIARRSQLVRQRTRLKNEIHAVLIAHLIERCPAPDLFGKKGRAWLGVQPLPLDERLGVEQRLRELDRLGDDLREVEQALAQATIDDARLRVMLTITGVNTTVAIGLLSAIGDIARFPNPEKLVSYFGLNPSVYQSGPAPARHGHITKRGRSYARAILVEAAWGATQAPGPLRAFFLRVRDRRGQQIAAVATARKLAVIVLYVLTRDEPFAWDRPALTAHKLRALELQAGMPAQHGSRKGSAAAYSLKSVRQQERAVAEQSERTYQRLFNRWKQSRPKSDSAPIRWPEART

SEQ ID NO: 312878 - protein, 424 aa, unidentified
MKVTYQTCCGVDVHKSFLVATIVKTTGGIEPSYQKKRFSTFNNSILEFKQWLLDNDCHDVCMESTGKYWVPVFNLLEDDINVVIANPKWVKAVKGNKDDTKDSKWIGDLFRLGLVKGSYIPCKKVRILREYTRYRYKLVSCRSSEKNRYQNALTVCNAALDSVVSDIFGKSSTSIIDYLLEQSGSSINHEEIASKLLRSLKSKEDAVIESVEGYQMTDAQKYRMRLVRAHMDYITAEINDVDKMIENMISSNTDFENAVQFLCTIPGVKRDSAITIISEIGTDMSQFSSSKRLCCWAGLTPGSNESAGKKKSVRITRAGVYLKPALVQCAHAAVKSDKSPYYKKKYESLVKRRGKKRAIIAIARMILTAIYQMLSTGEQWNPSNLYKIDMPVALVEKQKAKAIKQAKKLLQREGLLPPDEPLAS

SEQ ID NO: 312879 - protein, 310 aa, unidentified
MGTIGIDVSKDHLDWADGPEASVSHCANDGRGIAQLVRRVRRLDPERIVIESTGGYERPLLHALADAGLPVVLVNPWRVRRFGGALGILAKTDPIDARLLSRYGAVAAPPVTPVRRGIHRALADLVARRRQLIAMMAAEKNRLSIAPKALRREIAGLIAILQQRIDQLDRRVDAALAQDPERGQVGKLLQTAPAVGPAVARTLLVDLPELGTLSRRQISSLVGIAPFARDSGKHRGQRRIRGGRASVRTALYLAAVTGARFNPVLRALYQRLRNHGKPAKVAFVALARKLLTILNGMVRDGTAWREADAT

SEQ ID NO: 312880 - protein, 361 aa, unidentified
MKKVSKVVGQKKAVEKKPAITVGLDLGDRYSRYCVLNEECEVIEEGRIQSTEAAFRRHFDGEPRQRIALECGTHSPWVSRLLSELGHQVVVANARKIAMITASTSKNDRNDAEQLARLAAYDPRLLSPLRHRSQQRQQDLNLIQVRATLVRARTMLINALRGLVKSAGSRLPSCSTESLAVRAPAHIPSALAAAGRPLLEQIVALNGQIAGLDREIEKLREKYPEIGVLRTVPGVGPVVAAAYVLTLDRCDQAGNRAAGAWLGLRPRQNQSGDSDPHMRISKEGDRYLRSLLVQSAQYILGRFGPDSALRRWGMKLAQSGGKRGKKRALVAVARKLAVLLHSMWRSGKRFEPFPQPAAAAA

SEQ ID NO: 312881 - protein, 333 aa, unidentified
MNKKWFIGIDISKLSLDVAIYSDDGDLRENHIKVANDIPGFKKLLEWLKGKKVDYKQSMFCMEHTGLYGLEIQFFLAKKEITYCMESPLQIKRSLGLVRGKNDKVDAQRIAWYAYTFRDRIKASHLPQEALRILQRLLAERKHYVKQIASFRQQKSDVIKYETKQASRRKKKMLEYLDDMLLQVESQMMEIITADSKINNNYNLLLSIPGIGIINAITTIVNTQNFTAFANARQYACYIGIAPFEHTSGTSINGRTRVSKLGNRQAKVELTQAARSAVVYDPGIRSYFQRKYTEKGATRDAYGIVLNAVKFKLLLRIFAVVKRGSNYVKLAYA

SEQ ID NO: 312882 - protein, 357 aa, unidentified
MGKSIIDTSSVTHVGLDLAKRVFRIHAVDTTGSVVIARSVNRRTLLKFFDALPRCVVAMEACSSAHHWGRQLLELGFAVRLIPPAHVKPYVRRNKNDAADAAAICEAAGRPGQRFVPVRSVENQAALMRHRARELMVEQRTAALNALRGHLSEIGVVAAQGAPSAYALKELVDGGVDENGEIVVPDCVRLALAPLVRQIDALDEAIEAIDRELEASARTDETARRLMTIPGIGPVTAMALLATIQDFAAFSSGREFAAFLGLTPREHSSGGKPRLGRITKMGDRYLRKLLVVGACSALAARKGHNDALRRWASGMLERKTVKYKFKLTAVALANKLARIVYALATKGGDYDDRPVAA

SEQ ID NO: 312883 - protein, 465 aa, unidentified
MRTDKKLWRNRKAKKELARRLQSENPGLEVVHAHAAGIDVGNSAHYVAVRPDCDPQPVRRFECFTADLYRLADWLHSCAVKTVALQSTGVYWIPLYDILEERGFEVYLVNARHTKNLPGRKSDVQESQWLLKLHTYGLLNNSFQPASKIRILRTYWRQRLQHVTGAATCVQRMQKALTQMNIQLANVISDLSGVTGQLIVRAIVGGERDPLKLAELSHPRIQASRGEIAKSLEGNWRQELIFVLQQEIEMYDTYQRRVAECDQQLQKHLTSFADTVPPPVNEALPPKKKKKQNKNNPHFHLADELQRITGVDLTRIDGVDVIVAQTLVSEVGLDMSRWKTEAHFASWLGLCPDNRISGDKVLARGTRHVLNRAANALRLGASTLLRSQTYLGAQYRRLRSKLGAPKAITAMAHRLARLVYRMLKYGQHYVDKGAEYYEQRNRQQQIDFLKKKAAKLGLQVTPAHA

SEQ ID NO: 312884 - protein, 376 aa, unidentified
MSKIRFLGLDVHADTIAVSVAEPDGEVRPQGIIPNRLESVRKMLTKLGPVDQLKACYEAGPTGYVLYWQLSSLGVACEVVAPSLVPVKAGDRVKTDRRDASKLARSYRAGDLTPVWVPDAAHEALRDLVRAREDAREDQQRARQRLGKFLLRHGRQRPQEVKQNWTNQHMDWIKRQVRFDQPASQAAFLDYVHQVEHAADRLQQLERAIDDAIAAAPAEIQEVVQALQALRGVGKIVAVSVVAEVGSLSRFRNPRQLMGYSGLVSSEYSSGKHIQRGGITKTGNAHLRRVIVEAAWAYQHKPWIGGWLAKRQQGLDEETKAIAWKAQWRLCTRYKKLAARGKNKPQIITAIGRELLGFIWAIAVRTEARVACATAA

SEQ ID NO: 312885 - protein, 341 aa, unidentified
MMIIGCDFHPRFQQIAFVDQETGEYGERRLSHPEEAEQFYRSLAGRQVRIGAEATGNFRWFRHLMRKLGHEFLLGDAATIRAACPRRQKTDKRDARHILNMLVEDRFPAVWQPSEQNDEMRQLLLHRCRMVRLRARVKNQLDSMAKNEGLLSSQVWRPKRREEIEALPLPNWYALRRSDLLGVLDELNRRIKPLDEAVHAAAESNPEACLLMTHPGVGPVVSLAYVLTIGDWRRFPRGKQIGSYLGLIPEEESSGSTRRLGHISKQGNTLLRWLLVEAASKAHRYDPSWHRQYLRLSMNKHHGVAKVAIAHKLAVRLYWMLRSGQDFKQVMERGSHVGQSA

SEQ ID NO: 312886 - protein, 514 aa, unidentified
MSEGTAVSPFSRLSPRLLRKHSAWHIRHIPLTQNFHPQPLAPARKADWVHAHCARFRSPYAAQDKPFASGFTNPDQNGGDIMLKINYMSTLFVGIDVSSKTNAVYAMDFEENKYISSSFGNNQPGADQLVTMIAECMHKHKNLDTILIVLESTSVYSVHISNFLSTSEVLMPYKPYVFCVNPKATSNYRKSYIGMEKTDPTDAYLIADFGRVGRTKKLEPWRGGQFIALKRLTRHRMHLSECITREKTYMVSNLYLKFSELQLLEGDDKPFGSLYGATSSAVLTEFLSPQEIIDMPEEDLLTFLAQKSRNRISDISKTSDLLRKAARDSYRLDKCMYEPLNISLASSFNCIHAYQKEIKLIEQAIEKCINGMNPNALLILQSIPGIGPIWASGILSEIGDITVFHSSDALAKYAGLYWPKGDSGDFTSEDNKMSKAGNPYLRCYLGEAANSVRKHIPEYADFYARKYAEVTKHQHKRALALTSRKFVRLVFGLLAKNQLYTGEKLDTEHNIESN

SEQ ID NO: 312887 - protein, 325 aa, unidentified
MEKLYGGIDIHKEKLAGCIMDRDGNITREHCFPSSKKAIEQFFCNISNSEIIIAIEACGMWRGPYKILTDMGYTVKLSNPKKTHDIACKKKTDKVDAKILADLLRTKYLPEVWIPDEQTLRFRDLTRHKANLTRLRTQVQNKIKSYLLRKGEKYRKVWNENTLSAIAKEDSDIHNLINVYHSLKKEEKEVMKRIKQVARNRKETTLLMSMPGIAEFSSLMILAEIGDIQRFRSPKELVSYAGLCRGIYQSASTERSVPNTAVNKWLKWIIYECSGRALMLDQRFQHYFYPIQKRKGANTARRATARKMLTIIWYMLTNKEPYKAS

SEQ ID NO: 312888 - protein, 332 aa, unidentified
MQAVLSLIEQHRQKWALPAEVRIVVSYEAGQDAFWIYRALQARGIECYVVDPASIPVERQKRRAKTDRLDVIRLVINLRAWLHGERDRMRAIRVPSLQDEASRHVIRDRGQLQKEVLQHRDRMRKLLVTLGCWGEVDSRKFAERLARGDVRCHDGTPLPLELQQRLLRECERLALVEQQLATLEKARLESLPESARERIDRLTRLSGIGAVGGSRLALELFWRQFSNRRQVGACVGLAPQPYDSGESQVDQGISKQGNRRVRALLIEMAWSWIRYQPESVLTHWFSQRTSGTGPNRRARRIAIVAVARRLVIALWRYLKDGVIPEGARLKAA

SEQ ID NO: 312889 - protein, 355 aa, unidentified
MDSKKYIGMDVHQATISVAVMDADGKVVMDCVIETKAAIILEFIQGMRGTLWVTFEEGTSAAWLYDLLKPHVAKVVVCDPRKNALLKAGNKNDRIDARKLAELLRSGLLSPVYHGGAGVRTLRELARSYLTITKDLTRVRNRIKGLYRSWAIPCSGQKVYSPRYRSAWLKKLTEAGVRRRAEWLYQQLDDLQPLRREARRELLAESHKHPANTVLRQVPWLGPIRVALLIALIQTPHRFRTKRQLWAYSGLALQTRASSEYRVSGGQLHRAKRQPSLRGLNENHNHELKAVFKSTATRASTSAGPFGDFYAALLATGMRPTMARLTVARKIAAIVLTIWKRGERFDPEHLKRQAA

SEQ ID NO: 312890 - protein, 351 aa, unidentified
MSMNYVGLDIHKKTISYCVRQCDGAIVDEGTLAATRAALDAWVSKLPLPWMVGMEATLFTGWIYDHLSKYQVTIKVAHSAMLKAICAGKRKNDRVDAQKLSDLLRCDYFPECHIAPAVLRDRRRVLRYRNMLVRQSTQTKNRIGALLMETGVPYNKEKLHQKRYFNQLLGDQKSVMPENLPSLLRLGRNVVDALGQMDRQLIKALHSDHVLADRVARLRSVPGVGPILALTWALEMGDIKRFPSIKAAVSYCGLCGAEKNSAGKQQRTPISKQRNKHLQTTLIEAAKVAPRWHPEFAALYNREKDKGNRNRATLAVARKLVAYLLAIDRSERPFAQTALQTGVAAGVGAIH

SEQ ID NO: 312891 - protein, 429 aa, unidentified
MAAGQAVMCPGRTLLVLESSHAAVVAAADPVFVGVDWGNSHHQLCIVDAAGGIVDQGRFAHDVAGLHLLEGRLRRHADIVGVSIERSEGLLVDAPQQQGYRLFCVSPKMSARARERYRLAPVKSDAFDAFVLADSLRYEHRHWRSLAVPSPLLAELRALTRDRERLIWNQRDVENQLRAVVQAYHPTVLHLFSSLDRDISLAFLRDYPTPAHAGRVGPARMAAFCARHGYSGRTKPEVLVERLRDNLLSASSGTTAGKALSAVLFVDQLDLLNSQVRTMSKRIRERLTAHPDAQIFLSFPGMGKITAATMLAVMGEDRMRFPTADVLLAEAGAAPVTQASGRTRRVRFRYAANKRMRHAIDWWTFVSVRENDWAREAYRQARARGQQHNRALRGIGARWTRILWRCWTDHSRYNPELHLNKQPTRPVSG

SEQ ID NO: 312892 - protein, 369 aa, unidentified
MDVHTENFTFASYEYGKEDVFAVNQVIGATWKDAIKYMKTLQKQRSEEEIHFVCGYEAGCFGYSLYNELMSAAITEKGLSLQCVILAPTTMAIQGNAPKTDRRDARMIAKNLAYGTYSSVYVVSEEDNGVRDFLRMRDDTKKKIKSTKQQINALCLRHGKNYTANKWTGAHYNWLQKLELGDIYSNITLKEYLHQLTQLEENISRYDKEIEEIAKRERYATAVAKLRCLKGIETVTALALVAEIGDYSRFPTAEKFAAFLGLVPGERSSGGTINRTGITKRGNSFLRRLLTEAAQGYSKGTPYTKSKRLKARQVGQDKEILDYCDRARLYLGKKYIRLKEKGKNGNVCKTAVARSLACFIWGLMTDNIA

SEQ ID NO: 312893 - protein, 351 aa, unidentified
MERYIGLDAHASSCTLGVVGPSGKRLGSHVVETNARALIEVLRGIPRNRHVCVEEGTLSGWLWEVLEPHVEELVVAGVRESRGPKSDKRDAFALAEQLRIGSLETVVYKDRGRFRRLGQLARAHGFVVRDAARVKNRLKSVYRSRGVGYGAGRSVYGKREREGWLAKLPEASRTLAEVLYAEHDALVVLNAKAEKALLAEARKHREWHVVKTCPGLGPIRTAELLPVVVTPHRFQSRSGFWAYCGLGIVMRSSSDWVRTPTGAWIKTAVQRTRGLNRNFNHRLKGVFKGAATTVIGRADDEPLYHHYERLLEGGTKPNLAKLTLARQIASIALALWRTGEAYDPTRLEVTK

SEQ ID NO: 312894 - protein, 414 aa, unidentified
MEGAINKSCGLDIHKQFLIATILSRSGEKQQQRFTRDDDGILELKNWVTSEKCDVVACESTSDFWVQIYDSLISHLPVIVGNARDMKAFTHKKTDKIDSEVIAKLALNQMVQPSRVFPKNHREFRSFVRLRLALVRKRTDIKNEAHAILSSEMLHLGNVLKDIFGKNGRSILSGISSGKTVDQIIELLSPNVRKKSTQIREILDREISQTAAIRLQICLNLIRHFDDEIKLLEREIFNYAYGKHKDKMEILMSVPGIGELGAATLIAEINDFNDFSSGDKLASWLGLVPSVYQSADKYHNGRITKRGSKVARWILTQIAQAAARKKNSKLKEFFSRKKKSIGHSKAVIALARKIVTIIWHLIKNNEMYEDETGYEKGEVHKRKIIETDIFSVDERIRIISGIFAIMGKEDREST

SEQ ID NO: 312895 - protein, 360 aa, unidentified
MVVQRTNVGLDVHARSVVACGLDRQTGEVFEQRLTPSHEEIAAWIRSLPGPAAAVYEAGPTGFGLARSLRAVGIDCEVAAPSKLMRPSGDRVKTDTRDARHLARLLMLGNVTAVAIPSREQEAARDLVRAREDCRGDLMSTRHRLSKLLLRQGIVYSGGKAWTGKHELWLRCQRFDDPALQLAYDTSFEAMLATIARRDRLDRAIEQMAADSEFTAVVSRLCCVRGVATLTAFGLAVEIGHWHRLTGRSIGAYLGLVPTEYSSGASRVQGGVTRTGNGHARRLLIEAAWHHRARYRPGATLRRRWDAASAPARARGQLANQRLHARWQTFDARKKRAVVANTAIARELAGWCWSLAVLDG

SEQ ID NO: 312896 - protein, 385 aa, unidentified
MKNNSSSEKKQKTAKDMKEFGEQRLFAMGAVGKGGSGRLTIGLDLGDRSSWWCALAGDGEVIARGEVISEPQPLELFFSRIPASLVALEVGSHSPWISRLLEKQGHEVVVANARRVKLISESSRKNDAVDAELLARLVRADRHLLSPVKHRGAEAQGDLMGIRVRAQLVELRTQAVNAVRGLVKPFGQRLPSCDAASLKRSDAGHLDAAIRGHAERLLGVVEELTRQIEDCDRELQRMAKDRYEQETAQLRQVPGVGPITALTFVLTLDDPARFAKSRDVGPFLGLRPKSRQSGASEPEMRISKEGDGYLRTLLVQCAQYILSRRGPDTDLKRWGLAIAARGKKKAKKRAVVAVARKLAVLLHRLWVSGEVYERRRQLREIKAAA

SEQ ID NO: 312897 - protein, 366 aa, unidentified
MESYVGLDVHSKRSVFVIEAQDGRVVGRGDIPTTSEGFRQLRRQHKLPAETPVALETGTVAFYAARELAGVGLRPVVIDAHEVRVKAHRPRQKSDRRDAFELCEGLRRGQYRTVVHVPPAPIGALRETLSRRRHFVAVRVAEVNAVKRLLRAAGLGQLSKSLGTDAAWAKLLAALAPEPALRTYVAQHHALWHCAQEQIAALEETLAAQPATITKVAARLQTVPGVGPLVSLTAVAVFSDVHRFPSAKHAASYAGLVPSTDQSGDRDTHGHITKRGSAALRTLLCEAGHHAQRPSHPLHPYFARLCAQRGYKMAVVAVAHRLCRILFALLRDGAEFDVAKLAVEEGPFRRTTVHRYRLKRGTTSRA

SEQ ID NO: 312898 - protein, 390 aa, unidentified
MIYVGIDIAKLNHFASAISSDGEVLIEPFKFTNDGDGFQMLVSKLDSLDAEPDSIIIGLESTAHYGDNLVRYLVAENFQVCVLNPIKTSTMRKNNIRKTKTDKVDTYIIAKTLMMQDSYRFITFYDLDLMDLKAMGRFYQKTIKQRTRLKIQLTAYVDEVFPELQYFFKSGLHQKSVYALLKEAPTPEAIASMHMTHLASLLVKTSHGHFTKEKAKELRVLARKSVGASDSALSIQITHTIAQIELLDSQLNKIEEEMTEIMKFNDSVIMTIPGIGYINGGMILGEIGDIHRFSSPGKLLAFAGLDPSVYQSGNFQARRTKMSKRGSKVLRYALINAAHNVVKNNATFKAYYDAKMAEGRTHYNALGHCAGKLVRVIWKMMTDDLEFNLD

SEQ ID NO: 312899 - protein, 429 aa, unidentified
MNYNTQNAKIASITEKTLIIGIDVGSETHYARAFSWRNYEYSKKPFAFSNDEAGFAAFKEWMDDIVEKHGMEVIIPGMEPTGHYWLNLGAYLQEQGMKPVHVNPHHVKKSKELDDNNPSKNDRKDPKTIAGLVNEGRFSYPYIPTGIYAEIRNLSNLRIQTQEEITRIKNRMARWFSIYFPEIKDVYRNPDAVSGLMVIKQASLPCDIRELGVEGVNKIWRDARLKGAGIKRATTLVTAAEHSIGNTEAPRSVRKEIRNLLEDYEGYKKRMDELMEEIEKTLSEIPYIDKLMEINGIGIKTVSCFIAEVGDIGRFDNPKQVQKLAGYAIVADSSGKHNGESRISHRGRKRSRYALYESAISVIGKNKEFKEIHSYYRTREKNPLKKMQSVIAVACKLIRIFYTILTKGVDYDGQKMLNDIVRPEIQPAA

SEQ ID NO: 312900 - protein, 523 aa, unidentified
MAKVVSARKSKPVKHERTKLLHSASELAARVRQVGVERFAFVCVDPAKHRSRWRMADFLGKLLLPEATVEHTAGPLRAAVASVRHKMQQDDIRVVWVIVERTGQYHLPVQRAFAEAGFETRILHPCATKQYRKAVSPDIKTDDIDLVAQHLAAVAGFGLVELPLDETYRELRLLARHRRDLVEKASALCSQIREHMHLLMPGYAQCFEDLWLSAAALPIARHTGTPQAVLNMGLARLARKLQQDGLRVQERTLERVIAWARQASPPAPDAALHQRVWTALDDDRLSKRREIEGLERDLASALVRTPSVLLMAFPGINVVSAAELAGEMGPIAHYGNSNAITGRAGLYPRRYQSDTVDLADGRLAHRANRRLRAALMRIADNLVANNHYFRSQADVQRKQKADERVIRVRVAKKFTRLAYVVLAGRQVLRHACCQPGDSILLKLSEFHRLHHTGARQLLVDLQAVVDQLPKKAYTHEAQSLSEELNTATGRRRVPTLLGELLPAVLARLTAKTTEEPSEAQASR

SEQ ID NO: 312901 - protein, 519 aa, unidentified
MANSSIYQRQCPQVAAIFTAAKNSDKVLIVPLDFAKDKHVCLLCNGNGDQLLKPFTVKNNRDGLYFLLERIQTTCKRHAINPKHVILGGEDCPSYVINLLWALHQHKEICVVRVNAWKAKKQRENVQASTDKLDLLGVAKTLINRDAYPVFDDDPRISEENVNYEAMRELSRTRDALVEIQTAISNRIHSIVKVLFPGFLDSSKTNPVTPFSNTSLALMERKDFNAGAYARKKPAYLAKLLTRQGVRDPSEKAFQVIERARQVLPPDPQTIPYRQECLSALIASYRHLQTQCRQLEEQEAQVLAATPAAVLTTVAGIGIVTCAAIAGEQGHVERLGSLHNLSSYAGIIPGTDQTGGPDNPGKSTKVKPRCNRKLKKHLVAAVSRMGNSVGTPEFRLEYARLKNNGQHADFVMARRFLRVSKTLMLNKTIYLPPELRSDAFNRESLFEYLRVFWPKLKTKWHGLKAVDAAFASNAPLGIWREMIQKVYRIELPLDRSSEVRLLLDGEDGRLPEFVKKLNR

SEQ ID NO: 312902 - protein, 346 aa, unidentified
MKILALDLGKYKTVGCAYEAESGRHQFQRSFTTPAGLRKMVQEIKPDRVVIEVCNIAGWVCDLLWGLGIEVQVANTSDDAWRWRKVKQKDDRRDALKSARLSAVNQIREVYIPALEVRQWRALITYRQQLVGRRTKIKNHIRDLLLREGQLLGRGRSCWSQLGLKQLEEQARAFSECGPAELWRGELQVELEQLKEIQRQLAVVTKQLDKLGAEDARVQLLRTAPGVGPRLAEAIVALLDQPQRFRKASQVSGYIGMVPKALDSGETERRGHITRQGSRLVRSLLVEVAWAGLRHNAWVRQTYQRLSGGKKARKKIAIVAVGRKLLVKCWAMLRDQRAWDWQPQIT

SEQ ID NO: 312903 - protein, 310 aa, unidentified
MDCYIGIDVSKATLDIASLPDGESWTVTNDEHGLADLMPRLVALAPMLVVMEATGGFEMLTAITLAKAGLPVAVVNPRQVRDFARAMGQLAKTDALDAGMLADFAQRVRPEPRPLPDEAAQLLESLLTRRRQIVEMLTAEKNRLGFARGPVKRDISQHIRWLEKRLTDVDGDLQDAVAASPLYQAKSDLLRSVPGVGPVTALTLLATLPELGHLSRHQIAALVGVAPMNRDSGTMRGKRMVWGGRAPVRAVLYMAALVGLKHNAVLRVFYERLRAAGKPFKVAATACMRKLLTILNAMLHQNRRWDPQHA

SEQ ID NO: 312904 - protein, 409 aa, unidentified
MQVMHERCAGLDVHKKSVYACAIWPGEKGEKEQEVRSFGTFTADLLKLADWLRGHGVSYVAMEATGVFWRPVWAVLEGEFELLLVNPQHIKAVPGRKTDTRDCEWIADLLQHGLLRGSFVPPCEIQDLRDLTRYRAELTQAQNKVDNRIQKLLEQCNIKLSSVASNTLGVSGQLMLEAIIEGEDDPAQLADLAQRKLREKIPQLRLALAGKVRDHHRFLLKEYLQEWKALRGRIARVEQEIEHRMGPFDQVVALWESMPGVDHITACNLVAEVGVDMTQFPSGQHLASWAGLCPGNNESAGKRMSGTMRDGNKWLRRALCQAAWAVTRKKDCYLSAQFRRLAARRGMKRAVMAVAHSMLIIGYTMLKTGQSYHELGGTYFDQINKDQLQKYFVKRLEKLGLTVSVVTAA

SEQ ID NO: 312905 - protein, 338 aa, unidentified
MSIKTLGVDLGKLSCHIIGQDQHGKVVEKRKILISKFAEYLANLPPCAVFFEACGGAHHWCRKVRSLGHRADMIPANFVKPFVKSNKNDFNDAEAICEAAQRPTMRFAHVRSEEQQAFGCLLKLREQLVEERTAVSNQAHAFLLEFGIQQKKGRAFIGTVADMTENPDINLPEALRLTLFRLVERYKAVDKEISELERDITAINSQNENCKRMQSIPGVGLITSSFIESWAGSCNQFKSARDFAAWAGLVPKQHSTGGVSNLLGISKRGNSTLRKYLIHGARSVIQWKLEENHAWSPWIKKLLCSKKKTVAVVAMANKLARIIWAVLTKEQNYAAVAA

SEQ ID NO: 312906 - protein, 374 aa, unidentified
MFSAVAWLERGESTSTRIRLARCGSGCRQKGYAMVMIGIDPHKGSHTAVVVDRDERVVDEVRVRTSNGQTGELCEWALAYDDRCWAVESARGLGYLVSQQLVAAGERVIDVPAMMASRVRLLGSGKSQKTDPNDARSVAIAALRHSGLAMVQTDDHVRVLGLLAKRHRDVARFKNKVACRLHALLMELAPGGLASEMTVNKAISLLEHVDVADQVTRQRVVIATELIDDMGRLEAQMKASKKRIRAAVEASGTTLCDIRGIGPIGAAMILGSVGDIGRFPTAGHFASYNATAPIEASSGDRRRHRLNPRGNRKLNHVLHIAAVTQLRYPSQGRDYYQKKLAEGKTSKEAIRALKRRISDVVYRRLLADARRSNN

SEQ ID NO: 312907 - protein, 350 aa, unidentified
MENENRLPPPVWAGFDVAKKTFDAALYLPVDPGQQPREIKDLPKKSFSRTPEGVREFHHWSFQVREKAGIEGGSLRIVMEATGRYSSELTGWLNNEISFTKPAIENPKTVNAFINSLKIRNKTDPIDAGALARYGAERMPEAFEKLPEDYQYLREIVRQRIAIKDQLTAARLRMNEMSSFKKLAKIQQSVIDSLEKAVEKLELEIKSCVNNSEELKKSMEKAITIPGVALITAATVLGECGPLYHYKSRQLGSYSGLAPQIKQSGTSVRGCHISKFGPGNLRRVLYMASLVAMENNPRMKSLYTRLISNGKKPLQARCAVMHKLLILIRAVVVNGMEYNENYSQNPILNS

SEQ ID NO: 312908 - protein, 387 aa, unidentified
MAQVNDLSRSLTVFDPISTLVVVVEMSKASWLVSGVVPGVERQPLKKLEPDATALLRLIERWRNEAVRAGQPISRITLAYEAGRDGFWLARWLIARGIEAHVIHSASVAVSRERKRAKTDRLDAAMLMRVFLGWLRGERGHCGMVAIPTMEEEDARRPGRERESLVDERSRITNRMKSALARLGIRGFKPHLRKAPERLAGLRTAEGTELPANTIEELRRDMARLALVREQISSIEKTRAERLERAPDTGPHAMVRLLARVIGIGIETADMLVQEILSRKLRDRRAVARYAGLTGSPDESGLKRREKGLAKAGNARVRRGLIQLAWRFLMFQKDSALAQWYRTRTEGPSGARKTTMIVALARKLLIALWRLVTTGEVPDGVELRPAA

SEQ ID NO: 312909 - protein, 437 aa, unidentified
MEEVTDEPLYRDRVCGIDIGKAGLEATIRVPSDKDPARRAQETRSFGTTRREVLALADWLRCWQVPAVVMEATGDYWKGPFYRLEAEGFECVLADAKQVRHLPGRPKTDKSGSRWLAACFERGAITPCFVATPEFRVIRLHTRYRRDLTEERGREKQRAEKLLESAAIKLSSVVTDLHGVTGRDIMDHLIAGQRDPRALAQLARARARRKISQLEEALEGAEFFTEQHAALLKVMLARVDRVNAEIDELTEVIERLLAPYEEQLAQAESMPGWGRRSAQDAVAETGAGMTRFRTGPHLASWAGRTPLDNQSGKRTGRSKSKKGNRYLAAITGETAIAAGKTQTREGARYRRLARRRGKPKAQVAVGNTQLKVYHKLLSNPGMRYEDLGADYYERQRDVRRQIAHHVGKLGALGFEVTLCRIPEPDPEPSGSGNTQAV

SEQ ID NO: 312910 - protein, 317 aa, unidentified
MTSPRTFVGIDIAKANFVVACRPDGTSWTASNDPKGIAATVDRLCAVAPSLIVLEATGGYETALVAALAAATLPLVVANPRQVRDFGKATGQLAKTDRLDAHLLALFADRVHPTPRPLPDAAMQQLEALMTRRRQLLDMLTAEGNRLEHAVAPIRREITRHIRWLERRVAAVDRDLDDTIQKSPVWRVKENLLRTAPGVGPVVSRTLLADLPELGQLNRKQIAALVGVAPLARDSGALRGKRVVWGGRAPVRAVLYMGALVAARRNPVIRAFYRRLIAAGKPKKVALVACMRKLLTILNAMMRTNTTWQQINRPETA

SEQ ID NO: 312911 - protein, 360 aa, unidentified
MFTERTSVGLDVHARSVVAHALDTITGEVLRARLCPDPVEVTRWVKGLPGPAAVIYEAGPTGYGLARVLGSEQIRTVVAAPSKLQRPAGDRVKTDAHDAEHLATLLRLDAFTAVTVPDEATEAARDLVRAREDCRADLMRARHRLSKLLLRHGIVYSGGKAWTGTHQAWLRRQRFDSVLTQAAFDEAYDTVASITARRDRLEQRINVLAGDSQYTTVVRRLGCLRGISTLTGLGLAVEIGDWTRFSGNSIGAYVGLIPSESSSGQSRSQGPITKTGNSHVRRLLVEAAWHHRVRYVPGKTMQDRWDLASPAARARGDLGNRRLHQRWEQFQARKKRPTVANTAIARELAGWCWSLAVLDP

SEQ ID NO: 312912 - protein, 330 aa, unidentified
MTTHTSQSNLKTTPETTSAPSWIGIDVSKSELQICSRDPSLKLPAKLPYHAAGIKLLISKLLPLSHPHIVFEATGSYDKPLLKALQSHGIHCSRINPRHARSFARAKGRLAKTDAIDASVLAEYGAVMQPEITPPADPRLEELNALITYRRHLLEELAREQMQLEHPKPSAITTIIKSRLRTLKAQIEKFNRLIASYVAAHPSLKRAVDALSAVKGVGPLTAAGLLAALPELGTLNRHQAAALAGLAPVNRDSGTLRGKRCIQGGRREVRHALYMSALVASRYNSVLSKAYQAMVSRGKVRKVALVAIMRRLLIHLNSIMANVLKETVTP

SEQ ID NO: 312913 - protein, 345 aa, unidentified
MNITAVGIDLAKNVFQVHAVDARGKVMLRKQLRRAQVVGFFSNMPPCLIGMEACASAHHWGRTFERFGHTVRLMASQFVKPYVKTNKNDVADAEAICEAVGRHSMRFVPIKSVEQQAILSVHRVRQGFVKARTAQANQIRGLLGEFGLVIPQGIYNVAKRVPELLEDASNELPVPFRHLIERLTQHLKELDRQVKEFEKEIIEWHRSSELSRKLEAIPGIGPLAASALVASIADPHSFDNGRQVSAWLGLVPRQSSSGGKPTLLGMSKRGDAYLRTLLIHGARSAILAAKNKVDNTQGWLTDLLKRRHPNIAAVALANKNVRTVWALLAHGREFQADYMPTRMAG

SEQ ID NO: 312914 - protein, 309 aa, unidentified
MGKVYVGIDISKDSLDVAIHASEKQWRFANDRAGITRLCQVLAKLEPALVVFEATGGYEMPLYLSLDGAGLPAAPVNARQIRDFARSTGKLAKTDSLDARTIAHFGFAIKPIARPIPDTQELKIIQARRTQLLEMITAETNRLRGAPKALKRRIEAHIAWLEQELADTDRELREMIENDPVWREKDNLLQSTPGVGPTLSATLIAQLPELGTLDRRQIAALVGVAPLNRDSGMMHGRRTVWGGRANVRAVLYMATLVATRYNPSIRRFYEHLCAVGKSKKVALTACMRKLLTILNAMLKHRVPWSYSPC

SEQ ID NO: 312915 - protein, 341 aa, unidentified
MKNLFIGIDFSKEKLDVAVITAVGLSETAQRECYEFKNSVSGFRQLVKWVERNSNGIATSSWLFCGENTGDYSKPLCNFLYGKGYDIWLENAKSIKDASGIRRLKSDRADALMIAEYAMRNYDKAFMYEPLSASLSQLRELFLYRQMVIRHRCSFQVRRGEKRLAMEKSPVKTIISQSGRHIVSELNKEIEKIDKRIAELIDSEEELKEIYHIVTSVPGIGCQNAVCLMVYTDNFRRFNYDARKIACYYGIAPFGKNSGASVHTDPHVHYLANRQIKAMLTQAALAAINHNPVLSQYYLRLVERGKKKQVAMNNVKNKLIHLVTAMVRNRQVFSPEYKISA

SEQ ID NO: 312916 - protein, 305 aa, unidentified
MISNERQEIEQRVPQWLSEHDAQSSATLMCAEHTGHFGMKLIEISLKLGWNLWMESPYKIVHSQGLIREKNDKIDARRIARYANRYQDLATLVAVSNKSVQILSHLNAEREILVKDRAKYEGQIKQEEGFLDAIYFKSKKKRVEKAIQWLTKAIKEVEAEMDKIINSDPEIKKNFQAITSINGIGPQTAIATILATDNFNKFDDARKFACHAGCAPFKYSSGTSKNSKHKVSHKANKNLKRLFHMAAVSSLRMKGEMKEYYDRKVGEGKNKMSVLNAIRAKLIARIFALVKSGRKYEKNYNAMLV

SEQ ID NO: 312917 - protein, 386 aa, unidentified
MHVVADRSAAPAAIRTDLGAIFASLELSKSTWLITSLSPSSGEKMSKHAVRGGDITGLLARFAQLQDKAQARTGRHFALVVIQEAGLDGFWIHRVLEAEGIESHVVDAASIATSRRRRRAKTDKIDGEALVRALLAYKRGEPRVCAMVRVPSVSDEDHRRIGRERKVLVGERTCHVNRIKGLLFAQGITGYEPLRRDRRHRLEELRTGDGRALPEHLKGQIRRELDRLEVVIAQIKEVQAERDALLAIEVAETPAATLLDLKGIGPECAAILYAEGLFRHFDNRRQVAAYAGLAPTPWQSGSVQHEQGVSKAGNPRLRTTMIELAWLWLRNQPGSALTRWFHERVIRNQGRLKKTTVVALARKLLVALWKYVTAGVVIEGAVMKAV

SEQ ID NO: 312918 - protein, 354 aa, unidentified
MKYIAFDSHKRYTYAVVEEKEKGRVMEKRIEHRRGEIGAFLSQCEVGSPVALETIGSWYWIVDEIEAAGMLPKLVNARKAKMMIASSKKTDRLDAKGLNTLQRTGTLPTVWIPSSELRDIRELYRTRMMLTQMVIRLKNRILSCFSKYGISFDETSDAFNIKGRASLEAALEILPTQTCFALKELLRQLDLLQEAVKEFEARMLQVQSNDPEIKLLQTIPRVGPILSYVIAYETGDIHRFPSASCFASYAGTTPSVHASGGKVRYGHTPSSVNHYLHWAFIEAANVISMRHEVLRFRHTARLYERLRQAKGHGIAVGAVARHLAEATYWILTTKIAYREPNQNKQVVVVSSKEG

SEQ ID NO: 312919 - protein, 358 aa, unidentified
MRIIGVDLHTRQQTIAMLDTETGELAEKTLQHDGDEVRKFYSALPGQVLVGIEATGSMHWFLELLEKLGIDHQVGHPSEIRKAETRKQKHDRRDAALLLKLQIENRFPSIWMPSTELRDLRTLLMHRHQWVRMRTRVQNTLQAIAISRGLRRGKALWTQTGQHAIESLPLPPHTAYRRTALQDWYHKLHAQIDELDKRVGDQALQRPGAKLLMSHPGVGPVTALATDVFLGDPTRFADGKAVVSYVGMIPSEYSSGGQQRLGGLSKQGNPFLRFLWCEAAVHAVRRDPELQRFYRRKLAQKGLGKARVAAARKLGIRLWIMLRDQIDYQEFCRRGQMRQKNGGACAGMPEVGHSPAKQ

SEQ ID NO: 312920 - protein, 377 aa, unidentified
MGDYSEAFIGIDTSKLRNAVAIADAGRGGEVRFLGEIENTTAATAKLVRKLAAKYERLTFCYEAGPTGYGLHRQIKGLGFECAVVAPSLIPKRRGDRVKTNRRDALSLAKLLRADELTAVWVPDGDHEAMRDLTRARETAMLDLRTKRQHVSAFLLRLGRPYPESKKTWSKAHVSWIASQKLEHPQQRLVLEEMMLAIRQAQDRLARLEQAIAAAVPEWSLAPLVTALMAMRGMDLIAATTLLAEIGDLSRFQTPTELMAYLGLVPSEDSTGDTVKRGAITKAGNRRARRMLVECSWSYQHPPRVGQAKQPKVDAAPLAVREIAWKAQCRLYRRYRMLIRKGKLKTVAIVAIARELAGFIWAVARAVSTTRIAAAAT

SEQ ID NO: 312921 - protein, 337 aa, unidentified
MKSYLFIGIDISKATLDVCILSASGSMEIHYHEFSNSLKGFIQLLKWLKEKSEGIAIEDWRVCMENTGIYSLELNCFLHEKGIWQSMENALQIKRSMGVVRGKTDKADCKTIALYAYRFYDKLKPYVLPSKTLLRLRALFSQRERLVSIHSQLLVANQSMKGYARELVKDIQNQNETLLKNLAEQIKTIDKSLKECLQQDEELQRKAKLIQSVPGIGQQTASYLLIVSRGMQSFATAREFACYSGCAPFAHTSGTSIRGKTKVHFIANKKMKMLLHMAAMNAITFNEEIKAYYQRKVAEGKNPMSVLNAVRFKLICRIFSVVKRNEEYQKDYKKIAA

SEQ ID NO: 312922 - protein, 428 aa, unidentified
MTPTSHDTFAAFIGIDWADAKHDLCLQAAGTAKRERFQLEHTPEAIDAWVTTLRTRFNGQPVAVCLELDKGPLVSALRKYDFLVLFPINPLTLARYREAFTPSRAKDDPTDAELQLELLLTHRDKLQPLQPQSPTMCALAQLVEHRRRVVGDKVRTTNRLTSTLKNYFPQVLQWFQDKDTRIFCDFLSRWPTLKAAQLARRSTLETFFRDHHVRTADVLATRMHAIKTATPLTTDEGVIAPNALLVQTLVSQLRVTLDAIEAFDHAIAQRAQGHPDFPLFQALPGAGPVFASRLLVAFGEQRERYTSAAALQKYAGVAPVTERSGKKAWVHWRLQCPKFLRQTFVEWAAESIRHSFWAQVYYQQQRDKGNTHQAAVRALAFKWLRLLYRCWQERTPYEESVYLQALTRRGSSLLQHLTKASCIAVQKP

SEQ ID NO: 312923 - protein, 389 aa, unidentified
MRTAKKRGPGPSHVLLTPDHAGNVVGIDPHKRTLTATVLDARGGTLASEHFRVSGEGHRELEVWARQFGQIARWGVEGSASWGRHTAMFLVGRGCDVRDVCANRTPRSDRARQRGKSDTLDSERIAREVLAHPLLPTAFKRAGQEQGLDEQQQLLALWHNRRRSILTSRQHLVGEAEHLLCDLPLQMRDELPDSTAVRPRLAALASRNRRRRYDAPTTLRLRMLDAYRAQIGALDREEKEVVAQLRELVQANGSTLSELCGLDTRSVAELLVEVGDPRRFTEGGFARFNASAPLAASTAEGPGEPVRHRYNPGGNRRVNAILHRMAVTQLRCEPRAQAIYANARARGHTKKEARRILKRHLSDVIYRRMIRDLNARDRAAHLAQPLLAA

SEQ ID NO: 312924 - protein, 392 aa, unidentified
MIYVGIDVAKSKHDCCILGMEGQILFDSFTFPNSKSGFQELTSSIQACLLNANEKEVRVGLEATGHYSTNLVAFLRNSGIEPVLFNPLSTNLFRKSQTLRKTKTDKVDARCIASMLRSANPAPHVSVSYHTDELKALTRSRYRLIGYRSKLKISLNRLLDIVFPELAGLVWSTNQKSVYALLLELPNTNAISHCRMDKLTRILHDSSKGKYGREKALLIRQAAMDSIGSNSPALALEIRQTIHLIQNVQVEVDQLEQVIENEVKSTNTPLLTIPGIGYTLASIILAEIGDIDRFDSPEQLLAFAGLEPSTHQSGNYSANHTPMVKRGSTYLRWAILQAARLVAMRDSTFKAYLKKKRHEGKHFLVALSHTGKKLVRVIFHMLKTNRVFVPQS

SEQ ID NO: 312925 - protein, 376 aa, unidentified
MNEKLRFLGLDVHAETIAVAVAEPNGEVRSLGMIANREDSIRKFIRKLGSPEHLRACYEAGPTGFVLYWQLTQLGVKCDVVAPSLVPKKPGDRVKTDRRDALKLARSHRSDDLTAVWVPDEGSEALRDLVRAREAAKQDQLRAKHRLTKFLLRTGQRPPLGVKAWTEKYVEWVQQVRYTHPAQEATLLDCLNEVQHMEERVKRLEQSIVEVIQLAPAPMQEVVRGLQALRGIAHISAVTIVVELGNITSRFESARDLMGYSGAFPSEDSTGKRIRRGGITKSGNAHLRRIVVESAWSYRHRPAIGARLRRRQEGLPAEITEIAWKAQNRLHKRYMTLMARGKEQRKTMTAIARELLGFIWAIGIKAEAACKQPMTA

SEQ ID NO: 312926 - protein, 348 aa, unidentified
MLIIGCDYHPGFQQIAFVDTDTGEAAERRLTHRDEAEQFYRTLEARRVRIGMEASGHGRWFERLLNELQFELWIGDAAEIRTKRVRKQKTDRQDAQLLLKLLMEDRFPRIWVPDAENRDLRQLLWHRHRLVQMRTRIMNQLHVVALNEGVRRKKALWRPAGRSELESLALAPWALRRRRDLLDLFDQLTPKIHDLTRALEEEVEKRPIARRLMTHPGVGPLTALAFELVIGTPERFHCGKQIASYVGLVPSEESSGDRRRLGHISKQGNALLRFLLVEAAQVTVRSQPQWRSKFFHLAMRRGRKIAKVAMARKLAVHLYWMWRQGLDYGQFEKLGSHAGEPGNRHGVR

SEQ ID NO: 312927 - protein, 347 aa, unidentified
MTEAYDGRQVVGIDLHRQRSVIVRMTEDGRKLETVRITNSPAALRREIAKAGKNPKVVIEATYGWYWAVDVLEEAGAEVHLAHPLGVKAFSYRRVKNDERDAADLADLLRMGRLPEAWIAPAEIRELRELTRYRHQLVKARTSVKDQVHGVLAKLGIPVTHTDIFGVHGQAWLDELPMPQPYAGKVASLRQLAGGLTAEIGLLEQVLGDLLAGHEGYAAIQQLPGIGPVLAAVIVAEIGDIRRFPGPGQLGSWAGLTPRHYESDTKVIRGHVTKQGSRMLRWAVVEAIQRQPAGTRPRQVKDGIIARRGKEAKNIAKVAAARELLTLVFYGMRDGHVRRALQRGQAA

SEQ ID NO: 312928 - protein, 334 aa, unidentified
MSNVTTVGIDLAKNVFSLHAVDGRGVVVLRKTVSRARLAAVVAQLPPSLIGLEACSGAHEWARRFMQLGHTVKLMAPKFVAPYRKSGKNDGNDAEAICEAVSRPSMRFVPVKSVEQQAMLTLHRVRLGFVEERTATINRIRGLLAEFGVVLPQRVVQVRRGAAAALAQLPALAQRALTDLLAHVRVLDERIAEYERELEHHARSDERAKRIQALSGVGPISASAIASSVADAHEFKNGRQFAAWLGLTPKQYSTGGKTRLGRITAHGDPYLRTLLIMGARSMLQTALRRTDRLARWALGVRARRGYHRACVAIAAKHARIVWAMLAKNEPLKLA

SEQ ID NO: 312929 - protein, 420 aa, unidentified
MQDKQNQLIERISDTHLIVGVDIAQQLHVARAVNFRGIVVGDPITFENNEEGFFKLLNWIQDLKGLKKLDAAIVGMEPTGHYWINLSKWLFNQKIEVVTVNPHLVKRNKENRDNTQSKSDKKDALVIADMVKNGYYSFIRPSSESFEKLRVLMSNRDVIVKRLVMSLNQINRWVDIVFPELRQVFNDVSCKGAIATLRLFPTPDEISSMESLDVQRGWKLLMKRQPGPKKAQLLINLAKTSIGTGQALDAYKFHLEQLLEEYDLAIKQLERVEQQVKEVLNKIPFAKKLLMIKGISEISLAGILGESGDLSGFSHGNSLLRHAGLHLAEASSGKWKGQIVISKRGRSRLRRFLYLATMSLVMNNPEFKAMHSHNVKVKKLKKMKSIMKLIGKLARIFVGIARRNESYCPNKIIELIPLAA

SEQ ID NO: 312930 - protein, 404 aa, unidentified
MLFVGDDWAEDHHDVELMNESGSTLARARLPEGIEGIEKLHAMIGSHIAGDDQSVLVGIETDRGPWVLALTAAGYQVFGVNPLQASRFRERRSVSGAKSDATDAHSLADMVRTDHHQLRPAAGDTDRAQAVKVITRAHKTLIWERTRHTQRLRQSLREYFPAALDAFDDLDAADALELLEKAPDPDSAAKLTTGQIKAALKHAHRHNIDDKAKTIAVALRGKHLRQLDQVTVAYAATTKATIGVLRAIVDEVDALRTEVEAHFGEHPDADIITSLPGLGVVLGARVLAEFGDDRDRYSDARARKNYAGTSPITRASGKKKIVAARFVRNDRLADALMAQAFACLTCSPGARDYYDKCRQRGNAHNDALRRVSNRFVGILHGCLKTRTRYNETIAWQHEVTVAVD

SEQ ID NO: 312931 - protein, 344 aa, unidentified
MDYYVGLDVSLRSVAVCVIDGDGRALLERSISCEIEDITGCLAHLSAFDLRIGFEAGAMSQHLFFGLRAAGFDVVCMEARQVNAALSAMRNKTDKTDARGIANVLRSGWFSPVHMKSREAHAVRALLSSRKAVQRKCIDLANEIRGLFRIFGLRLPSRIDQSSFDEQVRSIIEADPDLSHALLPLLDARAVLFTTYRELDRRVKRAASHDETCLRFMAIPGVGPIAALTFKAAVDDPSRFTSSRTVAAHFGLTPRRYQSGEMDNPGRISKAGDADVRSALYAAANAMMMRSVASSEIKSWGLRLMRRKGRRRAVVAVARKLAVVMHRMWADNTEFRQRPLEGAA

SEQ ID NO: 312932 - protein, 341 aa, unidentified
METQRHIGIDLHRNKFTCCVRLENGRNYLTDWKLEDLARFTKKLRPSDEVAVEVTGNTRLFYEAVAPHVSRVVAVDPNQFRVISHSVKKTDPNDARNLALYLEKDLLPEVRMKDKTQAQLASLTQTRDTLVKLRTSLKNKINNILSAHGINLEKEALSSEKKLNEVLAMKFDPMIRIELKVMVEQIRSLKRSIAELEKTIADEGSKLEGHKNLTSIKGIGPLTGSILLSVIGDINDFADEGKLAAYLGIVPRVSNSNETEHSGRITKRGSKLGRTALVQCALIAQRYSPYLKRHYEKIRARRGTGKAIIALARKLLGIIYRTLKNKWVFEDFPNFVLAEAA

SEQ ID NO: 312933 - protein, 350 aa, unidentified
MAIRNKPHDAAVFGIDLGKNLFHDCGLDAAGTPVQRATFRRETLVQFFERAAPTVVGMEACAGSQWLARKLQAIGHTVRIVPAKFVKPYIKSNKNDQIDAEAIAEAVSRPTMRFVEVKSPEQVDLQALHRVRDRLVAQRTRVICQMRAFCLEYGIAMHQGAGRFKSDFPAVLADESNDLTPAMRRLLASLFEDVRGLEARIAEVTREIEDVAATDDTARRLMTIPGIGPLAATGLLAAAGKGTQFRKGRHMAAWLGLVPREYSTGGKTTMLGISKRGSSYLRRLFVHGARSCLLHLDRTRDRLGGWLDGLQKRMHNNKAVVALAAKMARVAWVVITKPGTIYERRAPASA

SEQ ID NO: 312934 - protein, 406 aa, unidentified
MTYRVFVGIDWGSQEHAVAVLTRDGTGAQERKVAHTGMAIAALVDALITLADGAPESVAVALEVPRGSLVEACLERGFHVYALNPKQLDRFRDRYTVAGAKDDRRDARVLASALITDVGAFRRLDPEDDRLVQLRELTRLEEDLDTERRRLSNRLREQLYRVAPGLLTLCPGADEPWLWTLLTRASTPAGAAHLPRAAVARVLHQHRIRRLTPDDLLAVLRAPRVPAAPGVLRAVEDHLAVLLPRLRLAAEQQQTCATRLEQLLDELGQTQEHRDVAILRSLPGVGRKISATMLAEASRPLAARDYHALRTQAGSAPVTKQSGQRRRVTMRRGCNPRLRNAVHYWAQVSAGHDAVSAALYARLRARGCSHGRALRGVADRLLAVLVAMLRHQTLYDPERRRISAAA

SEQ ID NO: 312935 - protein, 379 aa, unidentified
MKKITSPRPARKRVPSESVQTLAAVRPAAEECNAVMGLDVGDKETHFCMLDPGGEFVTEGAVVTSEKGLRSLLAGRPRLRVVLEAGTHSGWIGRLAQALGHELIVANPRNLRLISRSDSKNDRNDARMLAHIATAGPELLSPVQPRSAKTQQDLAWVRAREVAVEARTKIVNAVRGIVKTSGARLPKCSTVAFAARARELCPEALKEALSPLLRIVEELTREIQLYDKLVAKKAKEEYPETAAIETIDGVGPLTALTFVLVLDNDRTRFRRSRDVGCFIGLRPKQRDSGMHSPALGITKAGDPLLRRLATQCAQYILGPFGRDSALRRWGLGLITRGGKRAKQRAVVAVARKLVILMHRLWVRQESYDPLHGVPAVAAA

SEQ ID NO: 312936 - protein, 402 aa, unidentified
MYFVGIDWSDLHHDVAVLDEKGQELKYFTIPHNRKGMELLKERLLSIDPELENFACLLETKNGLLVQFLLEAGFPVYPLNPKVVDYRRKPSGAKSDPIDARLLANIGRSDLAQLKRLKPDTELIAELKMLTRDQDSLIQESTRLTNKLIACLKEYYPVALELFSKPTLPVALEFFKLYPTPDLVREATVPEMAAFLKKHKHPRPNQTAISIWQKAHEPQLQASAPTVRAKCRLMLALVRQLEVIQEQIAAYDEEINRLFQQHSDSRIFASLPGAAERLAPRLLAEWGDDRERYENAAVVQALAGTSPVLFQSGKYRFARQRRSCVKPFRRAMHLFAFQSIRQVSWAREYYDTKRNQGKTHHEALRALANIWVRIIFAMWKNRTCYDEATFMTARTRYLSRVA

SEQ ID NO: 312937 - protein, 401 aa, unidentified
MWCLQAAGSEKRESGELEHTPEAVEAWVGQLCQRFGNRPIAVAVEQSRGALVFMLAKYEPLHLFPVPSTMAANMREALYPSGAKDDPRDADLLLDLLLQHRDKLRGLSPDTEATRRVQNLVEERRKLVDEKTAQINRLTSHLKIYFPQILDWFEHLDTELVCALLEHWPTLEELQKVPPPKLRTFFRKQQCRDQELIERRILAIRQAIPAIRDRAVIEAKSTVVKVIVQLIRSLVKGIADLDEKIEEAAAAHPDFFIFESLPGAGAVIAPRLLAAFGSQRERYGNAGEVQSYSGIAPVTERSGKKKWVHFRWACPKFLRQSFHEWAGHSIAYSVWARSYYQQQRSQGQDHHAAVRALAFKWIRIVFRCWKDGVAYDESKYLASLARRGSPLAALAATAKTL

SEQ ID NO: 312938 - protein, 377 aa, unidentified
MDVYCGIDWAEDHHDIALADRDGNLLARRRISDDAAGLAALLALLAEHGDTPDDPIPVAIETPRGLLTACLRATGRQVYPINPMSVARYRDRHSVAGRKSDRGDSFVLASVLRTDMHAHRPLPADTELAQAIAVLARAQQDAVWDRTTAHNKLRSHLREYYPGFLTAFADARGGIMRPEARAVLAAAPTPAGAATLTLTQLRALLRKAGRTRNIDAEATRLREAFRAPQMRQLPLVETAMGRQALALLGQLDAACAAADDLERAAVESFNLHPDAGIITSFPGLGALTGARVLAETGDDRSRFQDAKGLKAYAGAAPVTRASGKTRSVTRRHIKNNRLNAAGYELAAKNTPQEFSAFIADDTAKWADLVAKTHMKSN

SEQ ID NO: 312939 - protein, 339 aa, unidentified
MKPTPVGIDIAKMVFQVHYVDEETGEIVNRPIKRQKFLEHFVNRSPCLIGIEACGGAHHWARELTKMGHQVKLMPAKYVKAFNIRNKNDAADARAIWLAVQQPGKPVAVKTEMQQAMLALHRMRQQLVKFRTMQINSLRGLLTEYGEVMSKGRAALDGAIPNVLARISERLPAVLVDTLREQWNGLAKLDEQIAAIERRMREWVKQDPAVKAISEIPGVGLLTATAAVATMGDAKVFRSGREFAAWAGLVPRQSGSGGKVNLHGISKRGDTYLRTLLIHGARAVLSHAKDAGPWIEEMRRRRPANVVIVALANKMARMIWAILAHDRPYQRDYVSRKPA

SEQ ID NO: 312940 - protein, 364 aa, unidentified
MKSLLMRFIGIDLGKRSMEVHFIDSQDRHSTWSCQTDVSGRLRLLSKLKSTDTIAMEACPLAFILYSMIKESLGAKVLVLNPLGLAMIYKSTKKTDREDAAKLAWVIQRLPEQELPVVTVPTKEEQNLRYLVAEQVELTQNRTREINRLHALFTQDGITTITKKNLVNSKSREVQYPLLSASLKERALRYEKIICVLEENLEDVEAQIIKEVSGHERTPFLLSIPGVGPNLIAAYLGYLGTGERFTADTITAYAGLVPRIDCSGDSNRYGPITKRGCPILRRAIVQAAWALVRAKNGGCLQEKYFALKTRKGYSKALVATARKLLKTMWIVSTRKAMYLNYDPVKYRAKLEKYDVEFVGVVGAA

SEQ ID NO: 312941 - protein, 364 aa, unidentified
MEKVITHAGLDVHMERIVIATLKGQAREGTILDIPNDSKVIRRTFKRLAAEAYELRCCYEAGPCGYEVYRQLAAMGIACEVIAPALIPVRAGDRIKTDRRDASKLARLHRAGELTAITVPTEDQEAVRDLVRARDDVRKDLTAARHRLGKFLLRHGRAFHDGKNWTQRFWAWVGGQKFERVCERLTFDHYITEVKHLLSRREELDREIEQVAQTKPYAVSVGKLTCLRGLSTLSAMALLSEIGDFRRFDHPRQLMAFVGLVPSEYSSGGKEKRGRITKTGNSHVRRILVEASWTYRHRPAVSPGARKAHTGQPATLVEYTKRAHHRLHRRYARLIGKGKKPQLAVTAVARELCGFVWGVMTMAA

SEQ ID NO: 312942 - protein, 324 aa, unidentified
MNDTVVGIDVSKKTLDTSYAQGQRKQARIFENSSDGWKQMLSWLKAKGSQPAHVGMEATGRYSLGAALMRHDAGHTVSIINPAQIRDFARSKLGRNKTDKADAALIREYTTLFRPQPWTPPSPAMRRLCELQTVRAGLVANRTEWKNRLGSGLGDSTAIQVAKAVIDALSSQLKVIDQAIAETIEQDGDLRGRRDLLLSVIGVGDTLAALLLAEMPEPGVLRHSAEMIAYAGLNPSHHRSGTSIDRPTRISKIGNATLRSALYMPALSAMRFNPVVAALAARLKSAGRLKPKQIVVAAMRKLLVLCFGVLKTGTPFDPAIAMPT

SEQ ID NO: 312943 - protein, 465 aa, unidentified
MARKTKNVKSKDRQRLPRSLKTIYANAAGIDLGSREHWVCGPPREDGTPNVQRFGTTTPELFRLADWLKEQGVKTVAMESTGVYWIPLFEILDNRGLEVLLVNARHISNVPGRKTDMLDCQWIQLLHSCGLLRGSFRPSDDICRLRALIRERNTMVEQRSDWVRRMQKALDQMNVCVHHAVSDITGVTGMAILRAIVEGERDPFALARLRDARCRKSEKQIAEELTGNWRPEHLFNLRQALKMYDQLCAVIEDYDTEILTYITKHQPEQAASPLAPAHSSKSKARTLAKRGQEPLRQALYAFSGFDLTTIDGIGVDTASVILSELGLDFSMFPDETHFVSYLRLAPNLSISAGKKVPSKFKPTTCTRVSNALRMAALTLRNSKSALGGLYRRIAWRKGASVAIFATARKLAQLIYRLVRYGQAYVDTGTEAYDARFNQRRLKFYTKALKQMGYSLHPLTENTLTA

SEQ ID NO: 312944 - protein, 345 aa, unidentified
MERVECIMTTGLAAGTYELFVGIDIAATTAEVSTQRPGAKAGRSFKIDQTPEGFHRLVHTLQATDNEPSHVLVVMEATGSYWMSLATRLVHEGFRVSVINPSQAHHFAKALLKRAKTDAIDAQTLAQLAMVLQPEPWMPPPQIYYALQQRLAQRDDLLNLRQQVRNQLHALDQHPEVIASVRTRMESLLLLFQSQIDEVEGEIAAALNQDSAWAAAAERLQSIKGVGWVTAAWTLVTTLNFTTCDTVDALTAYAGLAPMPRQSGSSVWHRPSIGHSGNGRLRTAFYMATLTAARFNPAIKAFYNRLLAAGKPEKVARCAAARKLLHMAWAVVKKDQPFDPNYAQG

SEQ ID NO: 312945 - protein, 363 aa, unidentified
MIVIGADTHKNTHALAAIDAGTGEVRGEREIAANDDGHRTALQWAHTLDPEIVWAIEDCRHVSHHLENALVTAGERVLRVPPKLMGASRRGEREAGKSDQIDARSVARAVLREGIDRFPGAFLDETAMEIRLLCDHREAHVHEITRLTNKLRWNLVILDPALEASIPARKMDFPGQLDRVARRLRTIEPSARVRIAKEQVRRIRELSRQATLLKRELHALVTAHRPELLAETGCSTITAAILIGQTAGAERFPTDSHFARMAGVSPIPVSSDRSDRHRLHRGGNRRINRALHVIAITRGRWDPATRAYLQRKQAEGKTRMEALRCLKRLLARHFYRLLQRPPEPRTAKPAIILNAAISVPCLT

SEQ ID NO: 312946 - protein, 466 aa, unidentified
MDSRAFLGAVKAHPERYFIIHYSSQSLYDDDQQGLSPRITSIVVRHLATGQTVSFAMHAVAEELGIARDNIAGEYDRIETELLERFYAFARDRRVQNCWGGRPRRHRVCQIEVVGDPQTREPSMGKLTRIGLDTSKNVFQLHGVDDAEQPALKRKLRRQDLNKFFGSVPRLRIGMEACGASHHWARELQALGHEVVLIPPQYTKPYVDRGKNDAADAAAICEAMSRPKVQRRFVPVKTLDQQALQMLMGVRNGLVKRRTQVSNAIRGHAAEFGIVSAKGLYRVEELLAKIEQSQVMPELARQMFKVLAGQYRNAEAQIQEIEATLMAQHRSNEVSQRLAAIPSVGPIGALSMAAKIGDARRFRSGRDFAAFIGLTPKDHSTAGRKKLGGITRAGDEMLRSHLVCGATAVIRQLKHGRGLNSLWLKELVARKPEKLAAVAFANKTARIAWKLMISGEHYRSNYAEAA

SEQ ID NO: 312947 - protein, 402 aa, unidentified
MNAVGIDVSKGKSMVAIMRPFGEIVSAPFEIKHTASDIHSLVELINSVEGESRIVMEHTGRYYEVLAHQLSKANLFVSAINPKLIKDFDNDSLRKVKSDKADSVKIARYALDKWQNLKQYNVMDELRNQLKTMNRQFGFYMKHKTAMKNNLIGILDQTYPGVNTYFDSPARSDGSQKWVDFASTYWHVDCVRKMSLNAFIDHYQNWCKRKKYNFSQSKAEEIYGKAKELVPVLSKDAITKLIIKQAVDQLNSASTTVESLRTLMNETASKLPEYPIVMAMKGVGASLGPQLMAEIGDVSRFTHKGAITAFAGVDPGVNESGSYEQKSVPTSKRGSSDLRKTLFQVMDVLIKTHPQDDPVYQFIDKKRAQGKPYYVYMTAGANKFLRIYYGRVKEYLSSLPES

SEQ ID NO: 312948 - protein, 386 aa, unidentified
MDVHKHSVYVTEMEENGEVKEQYEMDNREESWETFRSRYSTSGNEIALEVSTTGKFIARKLRDLGFLVHLADPSKLALIFNTAKKNDREDSYKLAKLLRLGELPEVHPPSRKSEELRSITRYRKSIGEETTMLKNRIHAILSSQGVSIDATDIFGKKGISEIEKASKILSDTDRFILSSIIDRISHLSEEMRSVEDQMARMIMGNKNVERLMTIPGINVYSAAVIMSEIDDISRFATKEKLASYAGLVPRQNQSGNRDIRGHITKHGPSMLRFILVNAAHLVIRYSKKMKSKYLSIVRRLGKNRAIVAIARNLLEIIYTMLKKGEDFVDNMDGLTERKIKSMQARSMNPGPVRKLEDLLDSVKKRKDGTKFKKKKMMGGTPKELFS

SEQ ID NO: 312949 - protein, 373 aa, unidentified
MTTIGAGRPETTEVAVILGVDTHLDLHTAVALDHLGRRLGQASVPTTAKGYEELLRWAEGFGPLRCAGIEGTSSYGAGLTRHLRARGIEVLEVERPKHRRSNLQKSDPSDAEAAARAVLAGEASGVPKSADGTVEMIRTLRAARRSAVKARTQAANQLQALRVTAPEQLRRHLRGLSTKELVSVAARFRLADDPRDVQAATKFALRSVARRYEALSEEISELEAHLERLVGQVAPELVSLPGIGTDNAATLLVVAGDNPQRLRSEASFANLCGVAPIEASSGKVVRHRLNRGGNREANRALYMTCLARMRRDLRTQEYVARRTQEGKSKREIIRCLKRYVAREVYRVLISCGARSSPTGPKEEAQIAAGSNAA

SEQ ID NO: 312950 - protein, 381 aa, unidentified
MNAVGIDVSKGKSMVAIMRPFGEIVSTPFEIKHTSSDINSLVKLIKSIEGESRIVMEHTGRYYEVLAHQLSEANLFVSAINPKLIKDFDNDSLRKVKTDKADSVKIARYALDKWQNLKQYSVMDELRNQLKTMNRQFGFYMKHKTAMKNNLIGILDQTYPGVNTYFDSPARSDGSQKWVDFASTYWHVDCVRKMSINAFIDHYENWCKRKKYNFSKSKAEEIYGKAKELVPVLPKDDITKLIIKQAVDQLNSASITVESLRTLMNETASKLPEYPVVMAMKGVGTSLGPQLMAEIGDVSRFTHKGAITAFAGVDPGVNESGSYEQKSVPTSKRGSSDLRKTLFQVMDVLIKTHPQDDPVYQFLDKKRATKETVLCLYDCRC

SEQ ID NO: 312951 - protein, 381 aa, unidentified
MTKNIRYVGLDVHRDTIAVAVADSGRAGAESLGTIPHREEAVARLMRRLGPARTLRVCYEAGPCGYGLYWQLAGLGIACAVVAPTLVPVRTGDRVKTDRRDAVKLAQCHRHGALTPVWVPSPAQEALRDLVRAREVAKQDQLRARHRLGKFLLRHGRRDPQPGRAWTALHLAWVRAQTFELLAQETAFLDYLHEVDHAADRVRRLDQALDQAVATADPRQRAVIAALQALRGVSQVVAVTIVAEVGVLSRFARPKQLMGYSGMVSREDSSGPRVRRGAITKTGNAHLRRVVGEAAWAARYHPARSPALQRRQAALPAEVVAMAWQAHVRLHTRYRRLLGRGKVKQQVITAVGRELLGFIWAIGVWTERQQTTASAVPARAA

SEQ ID NO: 312952 - protein, 371 aa, unidentified
MISKEYYIGMDVHKDFVQIAVFEGTGEEPVCERRLNNDTELLVKEVKRFAGKGKTETAYEAGCLGYVIQRAMEKEGIVCYVLPADKVAKRRGDRIKTDKRDARLIGRELRGKSVRAISVPDAADEAARDLLRCREDANEDLRRVKQRLSKFLLRHGHIFTEGKSHWTKKHWGWMDRIKFGQEHERIVYEEYRSQIKALEERLTRLEKRITETAESSRYRAGVGKLRAFKGIDYIIALSVICEIGDFRRFANAKAFMSYLGFVPSENSSGGKRKQGGITKAGNGHLRRLLVEGAWHYTTNARVGKRLEQRRQGCLAGVIDIADRALHRLHKKYFRLVLGGKHKNVAVTAVARELAGFIWAVQVSATGKPGAA

SEQ ID NO: 312953 - protein, 350 aa, unidentified
MLIVGCDYHPGFQQIAFVDTETGELQERRLAHREEAEKFYRELGASGVQLRVGMEASGHARWFERLLAELHFELWMGDAAAIRAKRVRKQRTDRQDAEHMLNLLLENRFPRIWVASWENRDLRQLLWHRQRMVQMRTRIMNQLQAAAINEGLRCKKRLWRERGRKQLEAFPLAPWASRRRRDLLELLDRLNPTIAELSQAIEQEVEKFPEAQRLMTHPGVGALTALAFVLIIGDAERFRCGKQVASYVGLVPSEESSGERRRLGHISKQGSTLLRFFLVEAAQVTVRSDPEWRSKYFHLAMRRGRKIAKVAMARRLAVRLFWMWRKQWDYQQWKAFGPHVGQPGTGVGVQ

SEQ ID NO: 312954 - protein, 388 aa, unidentified
MIFIGIDVAKDKHDCCILSSNGSFLCQPFTITNNIEGFETLYAKIISCNDPEMKVGLEATGHYSYNILGFLLRKSLTTFVLNPLHVNLFRKSLTLRKTKTDTVDSRAIATLLASEPNLKPFTLTSYHNAELKSLTRYRFDKVRDRAKLKQSVSRLVNILFPELEDIFPTLHLKSVYAMLKEFPGATSLKDANIEKLENVLKKVSRGHYNQDKALATKELAKVSIGSDMPAKAMELKHTICLIEVLDDEINEIEERIKTIMDEIKSPILTVPGISYRMGAMIIAEIGDFSQFASPDKILAFAGMSPSTYQSGKLTSSHAKMEKRGSKYLRYALHNATKYACLWCPVLSKYLQKKIAEGKHYYVAMSHATKKLVRILFHLVIAKEAYSAV

SEQ ID NO: 312955 - protein, 452 aa, unidentified
MNAKKHRGSEPICSPVPPPPTPELPIGEFAALIGLDFGDRKHAIALSPRETNKIEQLEIEHSAENLHRWIQGLAERFGGRPVAFAIESTKGAVVSALLEYPWVIIYPIHPATSHRFSTAFSPSGAKGDGPDARVLLDILRCHRDRLRALLPHDAETRRLSQLVETRRSRVNLRTMFTNKVVSLLKGYYPQAPKFFGANRFAPMALDFLDRYPDLQSLQAARPQTLRSFYYSHHVRSKQRVEERIQFAREAQPLTTDPAIIEVSVSQLKFLVTHIRLLNKEIASIEKTIESAFANHPEAAFFNGLPGAGEVMAPRLTILFGVDRDRWANAAEMQKYFGVAPVIEASGKMKWTHWRWNAPLFSRQTLVEWSGISVQHSRWAAAYYQQQDKRGKAHSTIIRSLAFKWLRILWRCWKDHTPYNEDLYLSRLEKRNPCFFALIKELPKNFTKKTCPA

SEQ ID NO: 312956 - protein, 341 aa, unidentified
MQITTIGLDIAKNVFQVHGIDAAEKVVVRKQLRRGQVMKFFEALSPCLIGLEACATAHYWARELRKLGHQVRLMPAKDVKAYVKRNKNDAADAEAICEAVRRPTMRFVEVKSAEQQGRLMQHRTRDLLLRQRTQVINALRAHLAELGIVAAQGREGLKELLAVIADEKDDRLPVDARASLIVLAAQLQALQTLIGSIEKRIIAQHRASEESKRVATVPGIGTLGASAITATVTDPSAFRSGRDFAAWIGLVPRQDSTGGKQKLGPISKQGDRYLRRLLVVGAHSVLRRAKQNPEKYPWLTQLLARRPFKVVAIALANKMARIAWALLAKGGTYRAPVLAAA

SEQ ID NO: 312957 - protein, 372 aa, unidentified
MNNTTVYVGMDVHKESFTLCAYLIETEKASYIRRTPADYKEVLKYLEFLRTIYGNDTIFICGYEAGCLGYTLYHQLTDRNVNCVILAPTTMLETRSGKRIKTDKRDAALIGKCLAQHNYSPVHVPTATDEETKEFLRMRDDHKLALKKVKQQILSFCLRHNYRYDGKTHWTIAHLNWLKSLKPEALYKEILDEYLLTYKTLSDKLERLDKRIEELASKDEYKESVKKLCCFIGVQTHTALSVLVEVGDFKRFATADKFASYLGLVPGEDSSGDEKTRLGITKAGNRHVRQLLTESSQTYSRGQIGHKSKALKARQAGNLPQVIAYADKANERLRRKYYKMVLGKSKKHNVAKTAIARELACFMWGMMTDKIA

SEQ ID NO: 312958 - protein, 320 aa, unidentified
MENIIGIDMSKNFFDSNVKNKIVHTDNNEKGIAKYVESLPENSKCVMESTSTYGDKLANALIKAGHIVYIVNPLQIKHFAKMKLSKVKTDAHDAKLITEFAKANLNDLRPYQLPSESIQDAKQLETVLAQLIKQRTALLNEVEALKQYQSISKVAMKSLTTTIDFLDKQIEIIEKQIKEKIDAEHKQQRILITSIKGIGDKTACLLIALTCGFNNFLNAKQLSSYFGCCPLVCISGSSVRGSNSISKIGLKDVRTALYMCSLSAVRFNNACKALYERLIAEGKKPLVARMATVNLLIRQVWAVISKNEKFDNNYQNKFAF

SEQ ID NO: 312959 - protein, 322 aa, unidentified
MSEPVLGIDIAKQKFDAALLIGGKLKHKSCKNSTEGFELLSQWLRKQGVARLHACLEATGSYGDELALYLHEAGHTVSIVNPARIKGFAQSEMIRTKTDKIDSGIIARFCLAMKPGFWIPPSPEVRALRALVRRAESLIDMLTQEKNRLGTAHESVIPLIKEHIDYLKKEIEEVRRQIADMIDRDPNLKRKKDLLASIPAIGKVTIASILAEVDDLERFTHVRELVAFIGLAPKETLSGSSIKGKPRLCKTGHPRLRRALYMPALVSLQCNPLMIAFYRRLKEKGKNGKVIVCAIMRKLVHVIFGVLKSNKMYDPNYRPAFA

SEQ ID NO: 312960 - protein, 419 aa, unidentified
MKPLSDEFTAFIGIDWADRKHDICLQGAHGERREFSRIEHKVDAIDQWAISMRQRFGGPIAVALELTKGPLVYALQKYDFFVLFPINPATLAKYREAFKPSRAKDDPTDAELALELLMHHRDRLTALNPQSVPMRTLLHLVEQRRRVVDDKTRFTNRLGYALKQYFPQALDWFDHTDTILFCDFLTRWPTLLQVKRARATSVKAFFWSHNVRHVNVIDERIQAIKVARPLTQDVAVITAYRLQALVLVDQLRVTLQAIDRFDAQIAEIAPTLPDYALFKSLPGAGMQLTPRLLVAFGEQRERFAGAAEIQKYSGVAPVTERSGNKCWIHWRWQCPTFLRQTFVEWAAQTINKSFWAGAFYHQQRDKGSSHQAAVRALAFKWLRILYRCWQTRTPYDESTYLNALKKRGSPLLNQLGMQT

SEQ ID NO: 312961 - protein, 350 aa, unidentified
MTIVENHLLTVTGGIDTHLDFHVAAAVDSNGGVLGVETFDTTTGGYRHLVAWLAGFGTISLIGVEGTGSYGAGITRHLTDKGIRVVEVDRPNRQARHRAGKTDAIDAIAAARAALTGTATGVPKSRTGNIEAIRVLTVARRSAANEWIAVVNQIRHVTFTAPDEIRARFVGLSPITLVRTTAALKPRGTDPDVVRFTTLSTLRELGRRALFLREQKMRLNTQMRPLIREVAPSLLEVHGVGFDVAAKLLIAAGDNPHRIRSEAAWAHLCGVAPIPASSGKIQRHRLNRGGNRQANSALYRIVLVRMASDQRTKTYVAKRTADGKTMGEVTRILKRYVAREIYPHLPPTIG

SEQ ID NO: 312962 - protein, 404 aa, unidentified
MSVHAAPVTSSTIVVAVDVGKTSAMFSATDSARKRLVGPVEFAMTRSGLAAATHRVIAVVPPSAQVKVGVEAAGHYHRPVLDYRWPAGWEVLEFNPAHVAEQRRVAGRRRVKTDAIDLEAITDLALAGRGQVITDREIRIGELAAWANHRSRRVATRTATKNQLLGQLDRAFPGLTLALPDVLGTKIGRLVVAEFTDPARLSALGVNRLIRFAAARDIQLRRLVAERLVAAARDVLPTRDAVVARRVLATELGLLTDLDAQIEDAETELAALLPLSPFATLTSVPGWGVVRASNYAAALGDPLRWPGPRQIYRASGLSPMQYESAGKRRDGSISREGSVALRRALIDLGIGLWLTDPAARTYARGLKDRGKRGGIIACALAHRATRIAHALTRDHTDYDPTRWS

SEQ ID NO: 312963 - protein, 316 aa, unidentified
MEISPIFIGIDVSKARLDVAVRPSGESESASNDEDGIKALVKRLGEIQPALIVLEATGGVERLVARALSSAELPVVVVNPRQVRDFAKATGQLAKTDSIDAGVLARFGEAVRPALRPFPDEVTLELRALIARRRQITEMIVAERNRLSGASKSVRKRIAAHIRWLEAELVRADKDLDQSIRQSPIWRENEDLLRSVPSIGPVVSRTLLAELPELGRLNRKQIAALVGIAPLNRDSGTLRGRRAIWGGRASVRAALYMAALVASRRNAAIRAFYKRLRHAGKAPKVALVACMRKLLTILNSMIKHKTRWSEITLQTT

SEQ ID NO: 312964 - protein, 429 aa, unidentified
MSEQKAIELRVSVDVGYRRHSVAIGLSSGEVLEEFEIEHRPEGFQEFFSRIEKHHKTKSSPVAVAMEGYNGYARPLDSLVRGRGYRLYNLNNLKFARFKEIFPGAAKSDRIDARKGLELFQLRDHLPLAKEVLQEVKGTPAENEVLKRLTRRRRRLVNERVRVVNNLQADLQAVCPGLLEITNDASNQWFLNFLVSAESLSQVARLRRSTLLKIPAVGVKTAAIIAGWQKRSHFSEEVEWVGEMIQEDARRCLELDEKVKWLEGKIAALAANSKIAKIIRSVPGFGAVCSSELAGEIGTIERFSKEGSLALYLGMATLDNRSGKYQGTKAPKQVNTRAKAAMMIGVDRHRKKVVQSQRYYEKKRAEGKKHNQAIRALGRHLTRIIYKLLKEEREYEIRPEKGNTKTKVGPTACVKTQIRRPKISGKTKK

SEQ ID NO: 312965 - protein, 421 aa, unidentified
MKPQVSEAFAAFVGLDWADAKHAICLQAAGTVQREFLSITHSPETVHTWVQTLRTRFHGQPVAVCLELNKGPIVSALRHYDCLVLFPVNPLTVAKYREAFTPSRAKDDPTDAELLVDILLKHRDKLAPLNPQSPAMRALAQLVEHRRRLVGDKVRLTNRLTSALKNYFPQVLQWFAEKDTAIFCDFLSRWPTLKAAQLARRTALEGFFRTHHVRSTDLIATRIEAIKSARALTTDDGVITPNAILVHALVAQLRVTLQGIADFDRVIVQRAQDHPDFPLFDALPGAGAVFAPRLLVAFGEQRERFTSAEDLQKYAGIAPVTERSGKKAWVHWRLQCPKFLRQTFVEWAAESTRHSFWAQVYYQQQRDKGKAHQAAVRALAFKWIRILYRCWQERTPYDEAIYLQALKRRNAPLLHNLADMS

SEQ ID NO: 312966 - protein, 309 aa, unidentified
MDATYVGIDVSKDRLDVHVLPSGDAFAVARDGKGVNELAERLAGLKVTAVVVEATGGFETVVAAGLGGAGLPVVVVNPAQVRAFARALGKRAKTDPIDAAVIARFAEATKPVMRPLPDAETERLADLVARRRQIIEMIGAERQREKRASARTRKSISRVVGMLEKELSDLDQDIDDAVRGSPAWREKEDLLKSVPGVGNVTARTLIAEMPELGSLDRRQVAALAGLAPWTRQSGQWRGKSFIGGGRATVRSALFMAAMVAARYNPVLKAFHQRLVTAGKPKMAALVAVARKLLTILNAIVRDKKTWQPA

SEQ ID NO: 312967 - protein, 367 aa, unidentified
MKKIITFVGLDVHKNSINVAIAEAGRNAEVRYYGAIGGTLDDLFRVVKKIATPERDLRFVYEAGPCGYDIFRALTEKGFDCAVVSPAHIPKSPADRVKTDRRDAMTLARLHRAGELTYVFVPRPEDEAMRDLTRAREDAKKAERVARQQLGGMLLRLGFRYQGGDLWTKKHFLWLSDQKMPLPAQQVVFQECINAITEATARVERLTQQIGSLLPNWRMAPVVVALQALRGVSLIVAVTTTAELGDLARFEHPKQLMAFLGLVPSEHSSGEKKRQGTITKTGNGHVRKVLVEGAHGYMHPARVTRLLLKRQEGLSKEVRDIAWKCQVRLCARFRRLVAKGKSHNAVVTAIARELAAFMWAIAKVTPI

SEQ ID NO: 312968 - protein, 385 aa, unidentified
MKGRRPLSGGCREKTLNNRHQRRRVDPERSVLMKRDKYMGLDVHQATTVVAVIDAEGKMVLETIVATSAAAIRRLIESLSGPVHVTLEETTQAEWLHEVLQGIVTEVVVCDPRRNKLLKEGSKGDKADARKLAELLRTGMVRSVWHGRQTTRGLKEVVRAYETFAIDTRRTMLRIKALYRSRGIATTGSGVYQVKQREQWLKQLTELGMRQRASWLYQQLDHVRELRKQAKAAVLVEGQQHRAVKLLRTIPQVGPVRAAQIVATAGTPHRFRTKRQFWSYSGLAVVTPTSAEYEMRAGRVVRRYKPVATRGLNPNCNRRITSVFISAATAGGIHHPWQPYLDGLEQKGIRADMARLTLARKIAALALTIWKKGETFDPKKLNWTT

SEQ ID NO: 312969 - protein, 343 aa, unidentified
MEGSQGLVVGVDTHKDTHSAALVDELGGVVASTDVAATQRGYVQLLEWARCHSPHPTWVVEGTGSYGAGLTSFLAGCGEVVYEGDRPQRRKRGAGGKSDQLDAIKVAREALAREHHAVPRQRGNREAIRVLLSTREGAVSAYRQALNQLYALVVTAPEPIHERLIRLKGDQLVNACVRLRSTTGDIETSVTKRVLQQVAKRIQTLQAEAASHEALLEKLVVETVPALLAEPGVGAITAAQLLVSWSHAGRIRNENAFAAMAGVAPVPASSGRVVRHRLNRQGDRRLNRALHVVAVGRSRFHGPTRDYIARRTVEGKSSREIRRCLKRYLARRFFRLLQGLDNP

SEQ ID NO: 312970 - protein, 391 aa, unidentified
MICVGIDVAKDKHDCFILNSEGVVLADAFTIPNNLEGFQTLLDKLQDCTTPQDSIKVGLEATGHYSYNILGFLLDNGLVTYVLNPLRTNLYRKSLSLRKTKTDRVDARTIAAMLLSDAGLKPYTNTAYHNEELKSLTRYRFDKVNERAQLKQSVSRLVCILFPELEKLVSSLHTASVYALLEEFPDARQIAAAHLTRLKTLLAEASRGRYGRDMAVEIRNVARCSVGSRMPAKSLELQHTIRRIRELDIEIEEIETAIQAIMDELHSPITTIPGIGCRMGAMILAEVGDFSRFDSPDKLLAYAGMSPSTYQSGQLKNCYPHMEKRGSRYLRYALYNAAKYVCLWDPAFAAYLAKKRAEGKHYNVALSHAAKKLVRLIFALEKSGQPYCPVI

SEQ ID NO: 312971 - protein, 360 aa, unidentified
MRIIGCDLHARQQTLAMFDTVTGEVVTRTLIHEGHEVREFYSQLPRPVLVGIEAIGPMQWFLDLLEELGIECQVGDAAKIRAAEPRKQKHDRRDAELILKLLVEKRFPAIWRPSKEQLDLRALLLHRHHWVRLRTQVQNALQAIALAHGLRRGPGLWSQDGQAKIAFLPLPPHASYRRSALQAMYRSMAEEIKNLTEQIAEQAEQRGGARLLLTHPGVGPVTALATEVFLGDPRRFADGKALASYVGMIPREYSSGERQRLGGLTKQGSPLLRFLWGEAGAHAARRDPELQHFYRRKLVQKGLGKARVAVARKLGIRLWIMLRDQIDYQEFCRRGQKHSGAACAGMLETRFGASRHRPVD

SEQ ID NO: 312972 - protein, 329 aa, unidentified
MKVIRVGVDLAKNVFQVHGVERNEKAVWRRKLTRESWLKVLLETVEPGCEIGMESCGGAHHWARKLQAHGFRVRLIAPQFVKPYVKSNKNDAKDAEAICEAMSRPHMRFVSVKTVAQQDIQAVHRVRAELTKQRTAKANQIRGLVAEYVPCWLEDAENGLSDRFRRLLNGLWGDLRTLDARMAELDREITVIAQSDPAAKRLQQLRGVGPIIATALVAAVGNGEQFANGRQMSAAFGLTPRQHSSGGKERLLGISKRGDAYLRVLLIHGARSVIHHSKDKDDRLSQWVTRLAARRHTNVAAVAMANKTTRMAWAMLKKGADYQPAMAAS

SEQ ID NO: 312973 - protein, 362 aa, unidentified
MPTIAQLEPGQVVGGVDTHKHTHVAAVANHLGKVLDTEAFPATRAGYRRLLTWLKAHGDVVAVGVEGCGSWGAGLARHLTSEAVVVLEVNRPNRQNRRRRGKSDPVDAEAAARAVLSGEANVTPKAGDGPVEALRQLRVARTGAMKARTAAANQFHSLGDTAPEPVRATLRPFTFRQRIATAERWRPRPGASVEANARRALASVARRWRALDDEARRLDDDIKAILDELAPRLLARHGVGYETAGQLLVAAGDNPDRLANERSFAALCGASPVEASSGRTTRHRLNRGGDRQANSALWTIARVRMANHPPTKAYVERRTTDGLSKREIMRCLKRYIARELFRDIETIITPLAAGAEGPARAA

SEQ ID NO: 312974 - protein, 344 aa, unidentified
MDYFAGLDVSVKETSVCIVDDTGKIVRELKVASEPEALLAVLTNPAYRFKRIGLEAGPLSQWLYSALAEADLPVVCVETRHMQAILKAQINKTDRNDARGIAQMMRVGVYRPVHVKTLRSQKLRMLLTHRKLLQSKAIAIENDLRGTLRNFGLKVGIAGTAKFEVRIKELVENLPDLAILVEPLLIVRRVLREQIVVLHRRLLTIVRDDGVCRRLMTTPGVGPVVALTYRATVDVPARFRKSKSVGAVFGLTCSKYQSGEIDRSGRISRCGDEMMRVMLYEAAQSMLRSKKWSWLKAWAMQIARRRGMKKAIVALARRLAVIMHRIWVDGTEFRWTREQAAAAA

SEQ ID NO: 312975 - protein, 368 aa, unidentified
MSKSLRFIGLDVHKDSIVIAVAESGQEPAYVHGEIPNDWAMLRKTLKRLASGHLLRCCYEAGPCGYGLYRRMKEAQIECIVVAPSLIPVQAGKRIKTDRRDAKKLAHFLRSGDLTEVFVPDEEAEAIRDLERAREDAKKAQRVARQQLGNFLLRHGRRWPDSNWTRKHLDWIRQQKFQHQAQQRVLVDYIKTFEEATEREEQLVKDLAELVRHTKLYPLIRALQAFRGIRLITAVTIAAELVDLRRFGSPRQLMAFLGLVPSEHSSGATQHRGKITRTGNTHVRRILVEAAWSYHYQPRMSKAIRARNEGVSPGVQRIAWKAQKRLHGRLYHLLHKGKSAQKAITAVARELAGFIWAVGQEPALLVEE

SEQ ID NO: 312976 - protein, 360 aa, unidentified
MDKDKYVGMDVHKAMTVVAVLDGSGRLVAEAIIETRSETIKDFVRGLSGKIHLTFEEGTQSAWLYELIKPLVAELIVCDARHNKLMAVGNKSDKVDAKKLAELLRCGSLSGVYHGDAGTKKLKEVVRLYLTLMSDAIRVMNRIKAIYRGRGIATTGASVYRADTRLAWIAQILDEGSRVRLEALYRQLDFLSEQRKHARREVVTEVRRHAAYRILNQIPSLGPIRIAIIIAVVVSPHRFRTKRQFWPYCGFAVVTVTSSEYISINGKICRSKKPVGTRGLNRNYNRHLKAVFKDAAQYASRKPPFKQHYDRLIAKNMRKQMAMLTLARKISAITLAVWKAEDCFDSGRLSDPDKVKEVVA

SEQ ID NO: 312977 - protein, 415 aa, unidentified
MAETKRTNHRGDALFYVGIDTHTDTHTIAVINAAQHTELTGTYPTTPKGLSAIVKELGQFGDPEGLVIGIEGTNSYGASLNRRLQADGYTTFEVLRPPRQVRHMDGKSDPIDALEAARTVMSGKGVSIPKLGQGPAEALRYLHIVRGKYVSTMTGLLNMIISLLITAPTPLRQKYTKTSTSKTLKTLLASRPGSADPSSVDFHVMTALKSMAQTHATIKESADRLERQMQVILQEHYPALLRVFGVGTITAASLAITAGDNPRRIRNEAAFAKLCGACPIPASSGKTNRHRVNHGGDRQGDQALHQIALVRMSCHQPTRDYVEKQMKRGRTKKEILRQLKRALCREIYRVLTRPQIIEDEINLRELRVSKGISQTQAAQALDTYPARISEIETGRRPQPALKDRYKQWLQTIDTP

SEQ ID NO: 312978 - protein, 330 aa, unidentified
MELYAGLDLHSRNTYIGIMDKTFNRVFKKRVPNHLELILQTLDPFRDQIKGFVVESTYNWYWLVDGLMDAGYSSAHLANPSAIKQYEGLKHSDDQHDAFFLAQLLILGILPQGYIYPKKGRPVRDLARKRMFLVQHKTAHILSLQSFLQRCCAIKVRANDMRHLTVEELEMWLEEEHLVLSAQANLDSINFLKQKIKQLEKAIIQKVKLDKAFEYLLTVPGIGNILAMTIMLEVGNINRFPKVGNFTSYCRCVPSRRLSDGKSKGQGNRKNGNRYLSWAFTEAAQLGRRHNERFRKYYNRKVAQANTSLATKALGNKLARICYYLNLARK

SEQ ID NO: 312979 - protein, 346 aa, unidentified
MLIIGCDYHPSWQQICWLDTLTGETEERKLDHASGEAEKFYRGLRGPVLIGMESTGNCQWFVEMATTAGHQVWIGDAAKIRASEVRQQKTDRRDAALILKLLLEGRFPRIWTPSGEEKDLRQLLLHRHKLVRIRAQVKNELQHLAMNQGVTKKGKLWSKAGEKVLRQLPLKPWASRRREDLFKVREMLNGQVDLLDRAVVEVAEKNEKARLLMTQPGVGPITSMAFVLTMGDVSRFPRGKQVASYLGLIPREYSSGGQQRFGSISKQGNGFMRMLLVEAAQVAVRCDPQMRQEYLHRCHKKAKGVAKVAAARKLAIRLYWMLRTNRGYPEVVRVESSSRVPLVSAS

SEQ ID NO: 312980 - protein, 424 aa, unidentified
MKVSYQTCCGVDVHKSFLVATIVKTTGGIEPSYQKERFSTFNNSILEFKQWLLDNDCHDVCMESTGKYWVPVFNLLEDDINVVIANPKWVKAVKGNKDDTKDSKWIGDLFRLGLVKGSYIPCKKIRILKEYTRYRYKLVSCRSSEKNRYQNALTVCNVALDSVVSDIFGKSSTSIIDYLLEQSGTSINHEEIASKLLRSLKSKEDAVIESVEGYQMTDAQKYRMRLVRAHMDYITAEINDVDKMIENMISSNTDFENAVQFLCTIQGVKRDSAITIISEIGTDMSQFSSSRRLCCWAGLTPGSNESAGKRKSVRFTRAGVYLKPALVQCAHAAVKSDKSPYYKKKYESLVKRRGKKRAIIAIARMILTAIYQMLSTGEQWNPSDLYKIDMPVALVEKQKAKAIKQARKLLQREGLLPPDEPFAS

SEQ ID NO: 312981 - protein, 340 aa, unidentified
MNATTYGLDIAKRVFQLYWVDTQTGEIANRKFGRDDLITFLAQRPAGRIALEACGSAHWWARKIRALGHEVVLLHAQFIRPFVQTNKTDAADARAIWTAVQQPGMRTVAAKTEDQQVMLSLHRMRSLLVKFRTMQINQLRGLLYEFGVTFRAGRVAGLDEIRERMAELEDTLPRSIVLNLLEQLRRINLFEEDINQLEKRIGAWQKQEAACRAISEVPGIGRLTATALVATIGDAKAFKSGREFAAFLGLVPRQNGTGGKIRLGSISRRGDPYLRTLLIHGARSVLCHTKVPTAWQKAIQARRPANVAAVALANKMARTAWAILAHETPYEAHHVSHRPA

SEQ ID NO: 312982 - protein, 410 aa, unidentified
MDILYMRCAGLDIHRDTIVACVRLAEAGGVVRLVETFATTTTELERLSEWLAGHGVTCIAMEATGVYWKPVWAVLAGDFELVLANAHHVKAVPGRKTDVNDATWLADLLAHGLIRSSFVPAMPEQALRDLTRARKQLTREKASHVQRIDKTLQAANIKLGSVLSNIMGQSGRALLEALAAGESDPEQLASLVRTKIRASHAQVVEAVRGRLAAHQRLLLRLYLAQVDALDAAIATIDHELGERLEPVQETVQRLITMPGLSPLSAAVVISEIGLDMSRFPSAAHLISWAGLCPKNDESAGKRRSTRLRTGAPWLKAVLVQSAWCAVRVKASYLHALFQRLKARRGPRKAIVAVAAAMLTAIFHMLKRGAAYHDLGPDHFQRTERSRLAARLARKLGELGFDVTLTQRAAA

SEQ ID NO: 312983 - protein, 369 aa, unidentified
MESSVTKSAGPIHLGLDVSKSKFAVGILRWDEQTPDVEVIFNDEASVRRLIDRFPDRGQLRVCYEAGPTGFGLHRLLTSMGVACEVIAPALIPKAPADRVKTDRRDCQRLARLHRAGELVAIRVPTEAEEAVRDLCRARADLVADRTRTRHRLSKFLLRHDRIWHQDAWTGKHEQWLTGQRFDDPALRATYGHYRAVLAARDGELAALEADLAHWYTHGPFTDAVKRLAAYRGIAHLGALTIASEVGDWRRFPAARTFMGFTGLVPSEYSSGGSVHRGRITKAGNAHLRTQLIESAWAYQHRPGLGAVLRRRQDGVDPATAARSWTAQQRLCARFRRLSPGKTSRNIVTVAIARELAGFLWAEMTATHS

SEQ ID NO: 312984 - protein, 410 aa, unidentified
MTDTNITQTAPVLVAIDISKARHEVLIAVPGKKRRRRLTVLNQLEDFNRLIATLSDYGFPVRVAFEATGNYHRALAYHLAAAGFEMKLVSSVALARTREALHNSWDKNDPKDAQVILHMMEIGNEQFYHDPLMRGTNDIQELSKTHDIVSKSKTELWHRILTHYLPLYFPEADRFHRSSRSDWFFAFLERYPSPHLISAMGKEEFIADAWTVVGRRVSKERLLADIYETAQTSVGLPVDADSDALRMFRLVLAEGRGLIAQRNEIENRSIALLKDDTDYQLLTSIPGIGPINALTILAEAGDLRRFGHHRQFLKFCGMDLATIQSGTFRGQTKLSKYGNARMRRTLWMAGQVAILQRANSFRDKFERYISKDRQNTHLRRKAYTAIAAKMARTVHGIIKHGEPYRPFFEG

SEQ ID NO: 312985 - protein, 374 aa, unidentified
MSSQINTIHVAIELSNSLWLVGARLPGAERSRMRRITSGDTVALLALISDLRSRHSGGTDRSIEVACCFEAGRDGFWLHHLLTAEGIPTYVVEPASILVNRRAKRAKTDRLDAEGLLRVLAAHLAGDEQVCSMVQVPTPEEEDGKRPHRERQHLVQERTRFENRILALLATQGVRVRPSLRTWERDLATLRTGDGRKLPQHLRAELDRLRRRLVLTMELIRELDREREETLAAAPDELTSRKVVALRSIRGIGENFAAVLAREVFYRSFGNRKQLASYVGLTPMPHQSGGMDRDRRIGRAGNARARTTLVQLAWLWLRYQPDSALATWFRERVGTLQGRTRRIAIVAMARKLLITLWRFTETGEIPDGVVIKAA

SEQ ID NO: 312986 - protein, 330 aa, unidentified
MFLGIDVSKSTLDAALLKEGSKVRHKVFSNDAAGHAALIAWLGEHACHPVHACHPVHACLEATGTWAQEAALALHQAGHMVSLVNPARTHAFGKSQLKRTKTDKADALLIARFCQMHQPAAWSPPAPAVRELQALVRRLESLEEMHLMEENRLASGVSCQAVRADLEEHLADLQERMEKTRRQIKDHINQNPGLHNQAKLLESIPGIGATTAALLLGELGDISHFDNARQVAAFAGLVPRIRESGSSVRSRARLSKVGSSRLRKSLYFPAITALRFNPLIKALGLRLSAQGKSKMLIIGAAMRKLLHLAYGVLKSKTPFDPAFCAQTLDG

SEQ ID NO: 312987 - protein, 309 aa, unidentified
MTIICGVDVCAAWLDAWVAGEFCRVENSLAGVEGLADFCRRHGVSLVVMEATGGYERLAVGRLWAEGLACAVINPRAVRQFAEAMGRLEKTDRIDAAVIAWYAQVKRIVAQAPASDIQRKLAVAVTRLRQLTALRTMQSNQRRLVDDPEVRGSIDEMLALIARQSRAFEATIIALIGSDPVWARLDAAFRSIKGVADRTVARVLAEMPEIGSLSNKAAAKLTGLAPLAHDSGKRAGKRHVRGGRSPLRSILFVVAEVVRRHEPDFAAFHKRLTLAGKPKKVIRIALAHKLLVRLNAKARDVRSQIVCPA

SEQ ID NO: 312988 - protein, 365 aa, unidentified
MKKSSTAKTASNKNFERKLTVGLDLGDRSSWYCVLDEAGEVVGEKKLGTTPKAMKEVFAAMPRSRIALETGMHSPWVSRLLSELGHEVIVAHARNVRLIGESRRKDDRLDARMLARLARIDPQLLSPVKHRSAQAQADLMVIRARASLVRARTALVNTARGLTKSYGERMRGCNPRNMDTEKAQALSPELQAALGPLLQALESLSERITEYNQRIEAVAQQSYPQTAVLKQIKGVGTLIALTYMLTLEDPHRFRKSRDAGCYLGLQPGRRNSGQSEPQMHISKEGDPYLRTLLVQGAHHILGPFGADSDLRRWGLKLAERGGKNGKKRAIIATARKLAVLLHRLWVSGEVYEPLRNTKRTSLVAA

SEQ ID NO: 312989 - protein, 337 aa, unidentified
MRYLGVDLHSNNFMVCVLSDNGEQTFKRYKLSELAEFKGFLDLGDRVAVEATGNTRFFYNQIVSLVAECVVVNPSQFEVIKQSFKKTDKNDAEALARFLSKGLLPSSRMKDELHAEVNSLANTRDKLVKLRTTLLNKIHAHLKGAGYESRKEAYDHPANLRKVLSLNWSVAVRIELEVIVNQIHSLTEGITKLEKEITERGSEINGYENLKSIKGIGNYSAAVLLSVIGDINDFSDEDKLASYFGIVPRVSNSNQTQHYGGITKRGSKLARTVLVQCTLTAKRFSPYLKQYYERIKERRGSSKAIIATARKFLGIIYRTLKYKWVFSDFPNFVLAEQ

SEQ ID NO: 312990 - protein, 369 aa, unidentified
MAQVTTIGLDLAKRVFQVHGVDATGTVVVRRSLRRRQVLAFFAKLPSCLVGIEACATAHCWAREITKLGHDVRLIPPAYAKAYVRRNKNDPADAAAICEAVSRPSMRFVAIKTEAQQAAAGIHKVRAMLVKQRTMLINTLRGLMAEFGIVVADGRQHVEELIAVLTDPAEARIAAPLHDGLMAIVESLRSLEQRIERIEKQILGWGRSNPTCRHLTTIPGYGPILSSAMAAMVVEPTAFASARHFAASLGLVPRQDGTGGKVKLGPISKRGNGYLRRLLVNGAMSVLCSKRAKEDPWLMKLLASKPRKVAACALANKLARIGWGVMMRQEDFRSRRMISRTPDPGQPDAVLTALNPASRAPLAVACGPS

SEQ ID NO: 312991 - protein, 454 aa, unidentified
MGKPRVVPDEDHEVVYERVAAVDVAKASGVVCLRAPDPARPGRFASRIWDHVPATRAQIAGLGRELPGHGVQVVTLESTSDYWRIWYYVLESTGLAVQLVSASQAKNLKGRPKTDRLDAMWLARLTQHGMLRPSFVPPAEIRRVRDFTRARTDLVAERARCLQRLEKLLEDAMIQITSVAKDGLKARSVVAMVQALIAGERDPRVLADLAKGPLRGKRAQLAEALDGLFDSHHGVIAQMLLGQVAFLDGQITQMEEQAIAALARVPRSWGVDPDGETGPQAGTSAGSPVLAAARRLAEIPGVSEWLAVVIIAEIGLDMAVFPDPAHLVSWMGLCRSAARSGTRHGKGKPKKGNSYARAAAGQAAIGAARTATFLGERYARIARRRGGGIAQAAVARSIMIIAWHLLADPAARYHDLGADYCANRINRDKKIRNHIRGLHALGLTVTITAAGPAA

SEQ ID NO: 312992 - protein, 403 aa, unidentified
MARVFIGVDPHKLSATIEVVDDRETVLATGRFGTDKAGYAAMRKQVASYPDRVWAVEGSNGTGRPLAQRLLADGEHVVDVPAKLSARARLLDTGHNRKTDAHDAHAVAVVAVRTKNLRVLSYDADLEVLRMLVDRRDELSKSKVQAVNRLHRLLSELVPGQSKKDITALQAKAILASVRPRDSVGKTRKRLALEQLAEMVAIEKKMKASSKELKTLVIARGSHLMDLTGVGPVVAARILADVGDVARFTDRNRFASWTGTAPLDASSGEQIRHRLSRAGNRKANHVIHIAAVNQIRLDTPGRAYYRRKLAAGKTPLEALRCLKRRISDALYRQLRADARTAATTDANAGPGGHRGASHVSSAAGSIPHTDTSDQPLPGPAPTTLPASTPTRKTTILRPLEPAS

SEQ ID NO: 312993 - protein, 421 aa, unidentified
MTATLTATLFVGIDISLKTATCCFLNQTGTLLVKIFEVDNNTAGFEKLKDRMESLIPTNGFSLVCIGLEATSMYGFHLLDYFSSTTFKYPVEVKLYQVNAKYISKFKKAFPEKEKTDVVDCQVIAEYLRFGRLPAEYKPECLFLPLRRLVRYRYHLVKHLEKEKQLYLANLFLKFPGWVQNRPVATLGKTALDLTGEFTLDQLVEMPLEQLALFVAKAGNNRSPDPAAIAEEIKKAARESYRIRPELSSSVTFILACLSRTISALKENLKQVDKAIAEESKGFINPLISIKGIGPVYSAGILACIGDIKRFASHNQLARYAGLVWKRRQTGNTESEEKRLVRECDRYLRYYLVEAANSLRVHNELYRAYYQKKYQEVPKHKHKRALVLTARKLVRMVFALLSKNQLYDQSRDTQSPRHILT

SEQ ID NO: 312994 - protein, 389 aa, unidentified
MYSYFVGIDIAKNTHWASCLSSDGEIILEPFSFSNDNSGFQKFISKLESLDKTKILIGLESTAHYGENIISYLFNLDYNIGLINPIQTANLRRSNIRKTKNDKVDTKTIIKALTLGNYSLITSRDINNLKLKGLCRSRRNLVTMRSKAKIQLVSYLDQIFPELAQFFKGNLHLNVSYQLLKEYSSPKQISSLHLPKLSNILHDNSHGRYNKQDAIRLRELAKNSVGIDNPSLSLQIKHSILQIELYNEQIAEVEALYKQILDEMNTPILSIPGMSYNQAAVIIGCIGDINRFEHSCQLLAYAGLDPSVIQSGNFQARSTRMSKRGSGMLRYSLVYSAHNVVKNNKTFRDYYELKRSQGKSHYCALGHVAHKLVRIIFKMLKDNVAFNLD

SEQ ID NO: 312995 - protein, 405 aa, unidentified
MNAVGIDVSKGKSTVTIRRPGDMVLMPPCDIPHTQSAINALIEQIKSLDGETKVCMEHTGRYYEPVANWLSDAGIFVSAVNPILIRDFGDDSLRTPKTDKADSKKIARYALDRWAKLKQYGSMDKTRNQLKTMNRQFGFYMDQKTAMKNNLISLLDQTYPGANEFFDSPARSDGSQQWVDFVYTYWHVDCVRSKSLQAFTEHYRKWCKRNGYNFSASKAEKIYQSSSDLIAVFPKDDSTKTLIRQAVTMLNTASQTVEALRIKMDQTAATLPEYPVVMAINGVGPSLGPQLMAEIGDVTRFTHREALTAFAGVDPGKNDSGKHSQKSVRTSKKGSPSLRKTLFQIMDGLIKRSPADDPVYAFMDKKRSEGKPYYVYMTAGANKFLRIYYGRVREYLASLEESKES

SEQ ID NO: 312996 - protein, 343 aa, unidentified
MHIKRIGLDLAKYVFEVHAVDAQDEVVLRKTLRRDAVAQFFAELEPCIIGMEACCGSHYWARVLTDLGHQVRLISPQFVKPYVKSNKNDRNDAEAICEAIGRPSMRFVPPKSAEQLEIQAVHRIRQRVVANRTRLVNQVRGLLGEHGVVVARDITRIRRALGEIADSHESAFGDIFIDMLRDMRDELAELDIRLAGYNRRIKNLFRSNEMCQRIGQIEGVGPITATALVAAIGDKSCFKNGRQFAAWLGLVPKQHSSGGKARLLGISKRGDRYLRTLLIHGARAVLGKAAGKTDARSQWIGRMRERRHPNVVAVAIANKNARIIWSLLSRDQEYRPDHKMSFT

SEQ ID NO: 312997 - protein, 449 aa, unidentified
MAFRAFPLQKGEHVMSIDKIERFNCCGMDVHKDILVATIGITDRSTLITQYIQDTFNSFNSDLYRLCDWLASHHCSEVCMESTGKYWIPVYNVLEERGFTVCLAHPKYTKAIKGKKTDKKDSKWICDLYKHDLVRGSFIPPKEIRELRDISRYYHKLIGMNSSESNRYQNCLTVSNLGIGSIFTDVNGKSATRVMEAVLAADDPNDISDEDLLKLVHGRCKKKDQLLDAVRGCRIESDQRFKMCEIQKHKEELDQHLTACLAEMIKRATPFFHQFLHITEIVGISLLSAILIISEIGVDMSVWEDARHLCSWAGLIPGNNESANKKKSTRITKAGQYLKPLLVQCALSAIKDPNGYFGIKYRRIRKRRGHKKAIIAIARMMLICIYHMILTGESFHPSDYDELMNPKPRKPLELTIESAVDFLKSSGADIDAIIATLKEAPPDQITVHC

SEQ ID NO: 312998 - protein, 408 aa, unidentified
MNPLFVGIDVSSKNNVAYLMKPDGSKHSSFSVQNNLGGAKLLSERIVSALGSMQLERVVIGLEATSIYGDSLVYALREDGRLGRFQRKIHVLNPKQVRKFKEAYSDLPKNDWVDAFVIADHLRFGRINREVYMDDYRYKALQTLTRARFDVIQNLTREKQRFANYLFLKCSGMAQDKDIQNTSATTIALMEHFETVDDLANADLEELTAFITETGRGKFADPDATAKAVRAAAKGSYRLPKTVNDTVNQAMAVSIASMRALKGQVKVLDKAIEQQFEIIPNTLTSIPGIGKVYSAGIIAEIGDIHRFDSQASVAKYAGLVWNRSQSGDFEAEHSRMIKSGNRYLRYYLLEAANSVRRCDSEFRRYYDLKFKEVNKYQHKRALALTARKLVRLVFRLLKDNRLYIPPEG

SEQ ID NO: 312999 - protein, 418 aa, unidentified
MWYVGIDWADDHHDAAVVDETGQQVAKIRVSHSAEGLRQLTAFLLEVATRSSAAGAAGSAPDLEQLEQIACVVETTQGLLITALLEAGFPVYPVNPKTLERRRAPAGAKTDALDAYLLAKKGRSDLADLRRLAPDSPLVHELKALTHDQDGLVQGQTRLVNQLTACLKAYYPVALTLFAKLQQPATLAFLRAYPTLEAARGASVEELTAFLKAQPHYPGPVKAAQRLWDQLHAPQLHADPVTTRAKTRLMLALVSQLVPLMEQLSGYDEEIQRLFLTHPDSQVFLSLPGTGKRLAPRLLAGWGDDRERFGSAASVQALAGTAPVPYESGKFARARRRLACIKPWRNALYQFAWQSTTQEEWALAYYRRKRSEGKSHSVALRALANLWVRIIHALWLKHMRYDPALFLAARQAHARPAA

SEQ ID NO: 313000 - protein, 463 aa, unidentified
MSIVEAVEPETSLVLGRGTSDCRCEHEPQIRLSPRSLLGGSVIVNRRKEAAVQQIYGRVAGLDVHRDNVVACFRRLGPRGGVVFEKERFGATTARLRELEAWLAERQVELVAMEATGVYWKPVYYALEAKFAVWLCNARHVKKVPGRKTDLTDAEWLADVAAHGMIRPSFVPPPPIRELRELTRYRKTQSAARAAEIQRLEKVLQDAGIKLTSVASRVLTQSGRAMIEALIAGERDGARLAELAMGKMRPKVPALTEALTGHFGSHHAVACGRILGHLDFLNASIQALSEQIDARTAAFASVYTSLLPVPGFDRLSIDVIIAETGADMSRFPTPGDLASWVGVCPGSHESAGKRRRVGTTKGNPWLRQALIESARAAARTKGSYFGAQYRQIARRRGPNKAAMAIAHSLIELVWHLLSTGEVYKDLGDDYFTSRQDPERRARRLVAQLEELGFKVTLEATAAA

SEQ ID NO: 313001 - protein, 484 aa, unidentified
MAKRKMSTFERLNTGQMNRAKRRELGRRVSAGDPSLAITNPNAGGIDVGNESHFVAVPPDRDVNPVREFGCWTAALNEMAEWLKSCRIDTVAMQATGVYWIALYDVLEQHGIRVVLVNARHTKNVPGRKTDVQECQWLMKLHTYGLMRDSFRLQQDMEQVRTIWRLRDRHVKEAGREVQHMQKALTKMNIQLANVISDISGASGRAIISAVLKGERDPYKLAALADYRIKASREEVARSLEGNWRADVLFELQQAVDGYEFAHRQMGKCDEKLKQYLVSLPTRMLNQPTSSEGAPEPAAPKRKKAKKLSNNEPRPDMTEELKRICGVDLTSIDGINVMTAFTVVSEVGTDMSRFKDEDHFTSWMGLAPSKDITGGKIVGRSKKKVKNRVATILRTGATSLLESDTHLGARYRHLRRRLPSFKAAVKAMARYLAVQIYRLLTQGQAWVDRGALQFERRRVEREFASLQLKAKAQGFTLVPIAPAC

SEQ ID NO: 313002 - protein, 349 aa, unidentified
MLADELDYVIGVDTHLDEHVLAVVASPSGAPVARRSVGANTRGYASALRFALEAGSGARVWAIEGTGSYGAGLARYLASHGETVLETSRAPQTERRLRGKDDALDAVRTARAALASETLALPRRGERREALRLLLVARRSAVDVRREALGQLRAVIVTAPDGLREELRTLPVGKLLDRCSRLRRSSAMSSDEVATRLVLRSLARRIQAVTVEAAELERELLAHVRALGPRLLDEPGVGPIVAAQLLVAWSHRGRLRSEACFARLAGVAPVPASSGKTTRHRLSRGGDRQLNRALHTIVLHRRQHDPATRDYIERRIAEGKTRRDATRLLKRYLARHLYRLLQQTEPLMT

SEQ ID NO: 313003 - protein, 355 aa, unidentified
MLYLGIDQHARQITISLRDEAGDVVQARQVSTEPKKINAFFQQLTRQRLRKGESFVAVLEVCGFNDWLIRMLRDYHCHKVILIQPDDRKKRKTDRRDAAGLSELLWVNRDRLLFGKPVRGVRQVDIASTTDRENRRLTTLRKEAGQTRTRIVNKIRHLLRRHNLQWEMPTKRLPTLAAIAWLKKLMLPEIDRLEMNHLLADLEHVQQRLKELEGVISKRSGASKEAAIIATMPGVSHFTATSLACRVGRVERFPRAHSLANYWGLTPGCRNSGENNQRLGSITKAGSAMARWLLAQVTHKVLRKDARLREWFKRIKRRRGATIARVAVMRKLATIIWHMLSKRKTFAECRALAAA

SEQ ID NO: 313004 - protein, 379 aa, unidentified
MKRTQVIQENNSTREGILYMAMELSDKKWKLAFSDGSKERLRNIDAGEMLALCKEIAEAKEKFGLDEATKVISCYEAGRDGFWIHRCLISKGIDNKVIDPASVEVNRQRRRKKTDRLDAKKLLKALMRYMWGDKQACSVVRVPSIEDEDDRQLHRELESLKKERTRHSNRIRSLLILHGIRIENPGRRDFKKYLDSVRLWDGSEIRENLKDRLKREHDRYSQVEEQIKELERIRKKLVRNKASESMARVRQMLKLKGIGIESSWLLEKEFFSWRKFRNRKEVGSLSGLSPTPYSSGDSKREQGISKAGNRRVRAIIVEISWGWLRHQKESKLTKWFNERFANGGKRMRRIGIVAVARKLLIDIWRYIEHGVIPEGAIVV

SEQ ID NO: 313005 - protein, 356 aa, unidentified
MNGLKHQMEKRSMEHFAGLDVSVKETSVCIVDDTGRIVREIKVASEPEALLLVLKNGAYRFKRIGLEAGPLSQWLYSALGEANLPVICVETRHMRAVLNAQINKTDRNDARGIAQMMRAGLYRPVHVKTLRSQKLRMLLTHRKLLQSKAIAIDNDLRGTLRNFGLKVGVVGTIKFEARIRELVENLPDLAALVEPLLVVRRVLREQIAVLHRRLLTIVRDDEVCRRLMTVPGVGPVVALTFRATVDTPARFRNSRAVGAVFGLTPAKYQSGEINRTGAISKCGDEMMRVMLYEAAQILLVRSTKWSWLKAWAMQIARRRGMKKAIVALARRLAVIMHRIWVDGTEFHWTRQEAAAA

SEQ ID NO: 313006 - protein, 423 aa, unidentified
MKALSQIRPEEVLPEAMKNPAEVLFIGIDISSNDHIVRAVLGNMNRLKDKFIFTSTFDNLIYFCDWVHKIKKRYNARHVFIGLEPTGQYWLPVYEFLRDNLPESGTYEVASRAVSWYRKMKNSNSSKTDPGDAYSIAELVATGNCCRPIQHTSLTRNLRETMRLYDEATKRLLQTRQQLMAMVQKSFPEALSSVSSSEGIDGIFKILKDSINPKDITKVSQEQWVELKVRKGVARKKLRNLYFLAQYSLGQIDNDKFRSSLWKIQWTSWKNALQRRDDLKSILKEIIDLHEATPLLLTIDGVATVTIAAFLAGVGDINQYSSVKQVEKVFGFDFFRWQSGKMDCQPHITKHGYFIGRKYIVLAGERFIKYPEPNEWYNRRPKKTKDGKPGMSGVIALTAKLIRIMFAVVKTRKPYDASLAFKS

SEQ ID NO: 313007 - protein, 433 aa, unidentified
MHEVEDEPLFAERVAGIDIAKAGIEVTIRVPSDTRRGGRQQETRSFRTTRKELLALADWLRCWQVTKAGMESTSDYWKPVYFLLESEGFDCVLYHAAQVKALPGRPKTDKLDSVWLARITERGALPGSFVPPEDIRRLRTHTRYRRHLTQARTAEKARVEKLLEDAHLKLSSVISDIHGVSGRAMLEAIATGERNPKALAQLARGTMRGKIARLEEALDCAFVTEEHAAVLTMMLATIDYYTTRIEELTAKIEVLCEPYLHQIAQLDAVPGTGVITAQDVIAEIGTDMTVFPTAAHLVSWAKWCPQVAQSGGKRKGANASGHGNRYIGAALGEAAVSAGRTQSFPGAKYRRLVKRMPKKKALVATGNSLLTIYHALLSDPAAAYTDLGTDYYEQRANIRRQVRNHIRAIERHGYKVTIQAIDPQTGELEAAAG

SEQ ID NO: 313008 - protein, 342 aa, unidentified
METKRHIGIDLHRNCFTACVRLENGRNYLSQWKLEDLPRFTKKLRAGDEIAVEMTGNTRYFHEAVAPHVARLVTVDPNQFKVISQSVKKTDPNDARNLALYLAKDLLPEVRMKEKTEAQIASLTQTRDTLVKLRTALKNKINNILAAHGINLAKEALSSEKALAGVLKMHFDEMVEVELEVIVEQIRGLNQSIGKLEQTIKDRGQKLKGHRSLTSIKGIGNLGASILLSVIGDIDDFADEGKLAAYFGIVPRVQNSNETERSGRITKRGTKLGRTTLVQCALVAKRYSPYLARYYEKIKSRRGGGKAIIALARKFLGVIYRTLKNNWVFEDFPNFVLAEASS

SEQ ID NO: 313009 - protein, 461 aa, unidentified
MKGSKKKHRKSRDKKKLDETMEQVNPLAAGIDVGSRTHLVAVSPERDEKPVRSFGCTTPDLHALARWLISCGVETVAMESTGVYWVPVANVLEQHDLEVVLVDARQSKNVPGRKKTDVYDCQWIRKLHAYGLLEGAFRPDRRIQTLRGYWRHRAGLVESRSTQIQLMQKALEQMNLQLHKAISDITGVTGMKILRAIIAGEHDPCVLARMRHKQVKSSEEDIAKALTGDYHEEQLFILRQAMELYDHYMDKIASCDAEIERYMATLKDKGDMSTYDGKAQTSRRKNQPCFDLRKELYRISGVDLTQIDGIDTLTAQTVISECGIDMSRFPKEKNFCSWLGLSPNNRKTGGKIKRRGTRKVVNRASTALRIAAQSLHRSNSYLGAHLRRMKARLGPQKATTATAHKLARLIYRMLKYGERFVDQGQELFEKQYRERYLKATKKRLKEMGYALVSTETGVLVS

SEQ ID NO: 313010 - protein, 431 aa, unidentified
MLKINPLSTLYVGIDVSSKSNYVCALDFFKNKYINSSFANNQPGAEELALKILACLKEHPDMTTVVAALESTSVYSIHIANYLSSCEALMRFKPYVFVLNPKCTANYKKSYIGLGKSDPIDAFVIADYARAGNIESEPWRGSQFLALKRLTRHRLHLVECMTREKTYLVSNLYLKFSELQMLEGDNQPFCDIYGATSSSVLMEYLSPEEILDSSEEDLIAFLAEKSRNRIKDISKTADLLKKAARDSYRLDKALYEPLNVSIASSFNCIETFKKEIKVIDNAIEKEIKGLNPNAFIILQSIDGIGPVFAGGIVAEIGDITAFHSSDALAKYAGLTWKSNQSGDFDGEDTPMMKTGNHYLRYYLGEAANSMRKHNVEYGAYYRKKYNEVPKHQHKRALALTSRKFVRLVYGLLARNQLYSGVSLDTSIKDSN

SEQ ID NO: 313011 - protein, 353 aa, unidentified
MKKIVKQAVGIDVAQDELVVCMGRMYEDLTLELYSHKTFGNTAKGFELLTNWVSKLSNADVELIYVMEATGVYHESLAYYLSDRGDRLSIVLPNKISNYSRTLDVKTVTDKTASEAITRFGLERKLDNWEPPKGVYRSLRQLTRERDQVVVTRTIAKNQLHAEEAEAYPNKKSIARTKKLIAFLDKQEQEIKEELAQMIKEDEEVKRIVVLLCSLPGIGLLTAATILGETNGFDLIRNKRQLASYAGLDVKEKQSGTSVKGKPRISKKGNRYLRKAMHLPALTAIRHDERFKAIFARIVSKHGIKMKAAVVIQRKLLEMAYTLYKKQEKYNHEYLTKSEGKIAIEMQDLSIKN

SEQ ID NO: 313012 - protein, 343 aa, unidentified
MVHYIGLDVSLKRTSICVVNQVGSVVREGVVESEPEAIAAFVRSKAPGAVRVGLETGPTATWLWTELKRLGLPVICIDARHAKAVLKMQINKSDRNDAAGIARIMQTGWFKEVRVKDLDSHSVRALLASRALLVKIKRDLENQIRGLLKNVGLVIGRAKFNVFTVRAEELIEDRPELMAVVGPLLKARQAIEQQTDDLDRKVLKLARYDAQVRRFMTVPGIGPITALCFKATIDDPTRFKRSRSVGAYVGLTTRRHASGEIDWTGRISKCGDAMLRSYLFEAAGVLLTRVPKWSALKAWGMRLAKRNGLRKATVAVARKLAVILHRMWIDGTEFNWSKKEVAA

SEQ ID NO: 313013 - protein, 399 aa, unidentified
MLAVGIDISKSKSVAAILNQDGSMHTSPFEFHHTQPELDAFIKYILNSKQSATILMENTGHYHYPVLKAFQEAGLPVCMVNAYQIKKFGDMDLRKAKTDKKDAVRIARYALEKSYSLVPYTSMEQKYEDLRFLARQYNQRMLTLKTNKVFLLNLLDETMPGISNILPLTPRTPETSLSVLFINRFKSYDRIKKMGKSRFLDAFEKIARKSRNRQTKTYGLAIYEAALRNITTRGENEYTLAAQDQCLELVCESQKAADSIILKMQTLAETLPEYAVLRSMAGVGDRLGPLILAEIGDIRRFHSGKALNAYAGNDAPPYQSGTFESHNRHISKRGNAALRKYCFEVMQALKLTRPQDDPVYLFLLKKEQEGKPYNVAKMAGVNKFLRIYYARAMETLKQQ

SEQ ID NO: 313014 - protein, 349 aa, unidentified
MIVIGIDPHKQTLTAVAVDGGTGQALGELTVPARAPGFERLVEWERSLDAERSFAVEDRRHVSGALERSLIDRGERSVRVPPRMMGESRRTDRISGKSDPVDATAVARAALRHPDLPEATLAGIEREIGLLVAHREMLVNERTDRICKLRWLLHDLDPDLAPPLRTLDRFKTLDALAKTLRALETSVVKELCIELLNRCREITVRANELERRIRAVMKTHAPALLEIPGCAALTAGKIVAETAQVCRFPTEGHSARYAGTAPIPASSGARHRQRFNRRGNRQLNAAMHRIAVTQIRMHEPARVYLATKRAEGKTKTEAIRALKRHLTRVVFKTLTSMDRPTDRLTAAAA

SEQ ID NO: 313015 - protein, 370 aa, unidentified
MGHLSEAFVGIDTSKLRNAVAIAEGGRGGEVRYLGEFPATEAAMRKLVAKLAAKYRRLTFCYEAGPTGYGLYRLIKSLGHECLVVAPSLIPKKPGERVKTNRRDGLNLAKLLRAGELTAVWVPDDRHEAMRDLSRARLAAHKDLRGKRQQIISMMLRLGRIYPGKKTWGPAHMDWLMRQKLEHREQRIAFEELMEAVRQESERVARLEQAIREAVPEWSLAEVVTALQAARGIDLIAAVTLLAETGDLSRFCNPRELMGYLGIVPSERSTGDTVKRGGITKAGNGRARRILVEAAWAYRHPPRVGREKQAKVAAAPKSVREIAWKAQVRLCGRYRSLSRKGKHPAIVVTAIARELSAFIWAINREVMARR

SEQ ID NO: 313016 - protein, 327 aa, unidentified
MIYLGIDISKARLDCTLLDPATDKRKTKAVSNDPKGFEALSAWLDKQGFAPGDVHGVMEATGVYHEQAALWLTDAGMRVSVVNPAQARDFARGLAMRTKTDGTDSVALARYGALIQPQPWEAPPPEIRELKALITRLEALETDARRELNRREKALVAQAPALVRESLDNHLAALKQEIARLQQAIDDHVNRHPGLKADRERLLSIPAVGDKTANRMLAVLHSRKFRSADQVAAFLGLVPVEHQSGSSVQKRPRLAKNGDAKTRAVLYMAAIVAAQYNPHVKALYTRLCAKGKTKMAALGAAMRKLVHLCFGVVKHQTVYQPNWQPGS

SEQ ID NO: 313017 - protein, 347 aa, unidentified
MRFYTNQHHYYCGIDLHTKNMYVCILNQEGKIILHKNANVCEKTLLQFIQPYLTDIVISVECMFTWYWIADFCHQHNIPFVLGHALYMKAIHGSKTKNDKIDSRKIAVLLRGGMIPMAYVYPQEMRATRDLLRRRMHFMRKRSELLAHIQNTRNQYNLPSFEKTISRKSNRTNVIDHFNDPAVQKSMELNLVLIDQYDDILRKTENYILNHVKAHNPNDFYLLRSIPGVGEILALVMLYEIHDIKRFERVQNFTSYARLIKPQKESAGKLKGSGNGKMGNAFLKWAFSEATLLFIREKQEIKDLHARLKNKHGKARALAIISHKLGRAVYYMLKKQKAFYMNKFLNQ

SEQ ID NO: 313018 - protein, 381 aa, unidentified
MKQVIHTKDENRAPTLYLAFELSDQDWKLGFTVGLGQPPRQRKISAGDTTALKQELALAKQRFGLPADAPVVSCYEAGRDGFWLHRFLTSEHVTNLVVDSASIEVSRRGKHTKTDRLDVEKLLTMLLRYHAGESRVWSVVQVPSLAAEDQRHLHRQLLALKGERTRYVNRIKGLLVGQGIHLSVDSEFLTRLPKLHLWDGKPLPAGLAARLQREFTCWQFVQRQILDLETERRTAIRESQDPGMVQVRQLLRLKGIGENSAWLYVMEFFGWRDFHNRREIGALAGLTPTPFQSGGEDHEQGISKAGNTLIRAMAIEIAWGWLRFQPDSALSQWYQERFGAGSTRLHKIGIVALARKLLIALWHYLETGELPEGATLKPATA

SEQ ID NO: 313019 - protein, 435 aa, unidentified
MSGRLKVGFDISLKANDVCIETESGEMLVAHRRFANDWPGFQHLLELVLTTLRQGEFNGVDIAGEATGLLWFHTFYHLAQSDDLALFDPRLYLFNARVTKHFHKVLAERDKCDPKDAYVVAECLRFGRLPHELTFDERYLPLQRLTRYRYHVAHTLAREKVYFITVALYLKASAYTRLKPFSNSLGVTSQHILTEYATIDQLATIPLDDLVAELDLVGKGRFADPAENARCLQQVARNSYPLAACLVEPVNLILVSLLQHICFLEDLLKSLDDSIETALQKTPGAAYLRSVDGLGLVYTSGILAEVQDPRRFYDGLKRDRQGNLRPKTKHDAQAALAKFAGLWWPRNDSGDFHAEDRRLPHTGNCYLRYYLVEGGNSLRRHNAEYTAYYDRKFQESVKHKHWRATILTARKLVRLVFTLLHEEQMYQPPEVRYHK

SEQ ID NO: 313020 - protein, 428 aa, unidentified
MDEVDRNRLEEFRQLRKEIRQSEEHLIVGIDIAKERHHAFFGTATGKTLLRRLVFSNDGEGFRRLLDQVEALQVRHGLKKAVYGMEPTGNYHKPLGEYLIHMGRTVVLVSGVTVKHNRDSLDGRWDKHDDKDSANVADLISQGKCLYYEYPTAQLRGLRGLLSLKRRLKRQEQSYRIRIRNHLIAQYFPEMDSDYGRSEAQGLAIVRWCFPISQITEIDVDPFIERVTSRRISMEKRRRLEAIWEKAGESIGCDGVPGVDHEAKIMVEGLKQIREMIKETEEKIEELCNQFPEYPYLLTMPGFGPDVSSKVLGAVGDPDRFQNGKQVLKLSGYDLSADRSGRDSDRAIPQISKRGKSDLRYALYQAAFIASTKNQDFMCYYTRKLCGREKEKGIHTKMMVKLSAKMLVIAWTLMKKKEAFNPAYLNIE

SEQ ID NO: 313021 - protein, 465 aa, unidentified
MSHFYLGIDASKGYADFVLVNEQQVPVAKGFQLDDTARGHHHLLTYLHEFVAAHPSVTISAAVESTGGYENNWYRCLSTRVQQLPVRVARLNPARVKFNSQANAKRNRTDQISAHDVAEYLATHADNVVYNEPEGHAQLRRMWSHMQLLLKQKTQLMNHVSTVMYSSMPELLTYCRQSMPQWLLRVLAEYPTYQQLQRAPLAQIPYISKQKAHKLLACIEHGIGNSNPISGSIISSLAKQILALDLAITRAKKHLENNCQHHHAHIALLQSFKSIGAYSAVGLLVYIGDIARFASAKKLASYFGLHPIFKQSGDGLWGNHMSKQGASDVRALLYMVAFSAIQHNPIIKELYARCRAKGMKNNAALGVCMHKILRIVYGMLVHNTPFDPQTHRQHMERTKSHAVHSHNRSSVQRRDYDQHAPISRRQQKKRKEQTLSQDENLVTCGITQSAPPSVSFGNRIVNNSH

SEQ ID NO: 313022 - protein, 326 aa, unidentified
MKNFIIGIDVSKDTLDFCILQKDSRGKIQQGVIANKEREILTWLNNLDKENVVVALEHTGHYGALLSWLLEEQMFTYYLINPLDLQRSLGLQRGKSDIVDAYRIADYTITNNHKLSPFKLPCESLRKLKALMTARERYVKMSVQIQNSLKAEMILSKKVVLKQLIKLEQKQLKSIQNTIQDLEKQMMEIVKSSQDLNTTYTKISSVIGVGTITAIKCIIETDNFTRFTDARKFNCHCGLAPFPYQSGSSIKGRTKTHFLRDKTLKSILFKAAGSAIQHDPQLKKYYQQKLEKGKHKLTALNAVANKIVLRIFAVAKRNEPFVKLIA

SEQ ID NO: 313023 - protein, 578 aa, unidentified
MSHSSLGMSIGVGFDTARYGHHVYFLRPDLQPAAKPFHFCESQEGYAQLRQALEQLPARYGQVHFAMRLDAAGQYAVNLERFLRSLPFPQTISIGEPKRNRDYCKVHFPKRKADAVESQACARFALVEQPPVSANTPAPIRQLQELTGALQGQVKQRTRLVNQLHNRLARVFPELATLAPDLSAGWVLRLLAKYPSARQIASARLESLAAIPHLTPDKAQPIQAAARQTVGSLDGPVIEGLIRQSVRALQHSQRTTRAFKRLLIQAYDALPPSPHRHLETIPGIGKQTAAALTAKIMELERFATPQALVNYFGIFPEENTSGTDKFGRPVPPGAMHMSRKGNDLVRAYLWNAAKVAIRHNPVLRAFYARKRAQGKRGDVALGHCMQKLLHLAYAVWKTDRPFAPQAARTPPAPAPLPPRSPSGTNEKAVGRKGQSPVRKAVTTASVSLMAPVRAVKPATPQRAPSVSGGGLDYAGLHAQLSMEQVLEHLGHLGKLKGHGCQRRGPCPVHASSDARTRSFSVHLTKKIFQCFHPPCAIHGNLLDLWAAYHRLPLYEAARHLAQTFNLNLRSPGTEKRNP

SEQ ID NO: 313024 - protein, 421 aa, unidentified
MANSKKIRVQDLADLYKQCAGIDVHKESLSVCVIQPVAPGQPEGEVRAYGTTTRELRELTAWLKQRGVTHVAMESTGVYWVPVWQILEEGEFQLVLANARAVRNVPGKKTDTADCVWLATLLRKGLIQASYIPPAEIRALRDLCRAHSTLVRERVRVVQRLQALLETANLKLDSVISDLLGKSGRQMLDALAQGETDPGKLAALALGRMRSKRKELVAALEGHLRPHQKFLLQQGLVHFDQLNGQIDQFREQIEQYVRPFEAAVTQLAQMPGLERLSATKLLAETGADLQAFPSPERFCSWAAVCPGNRRSAGKQRSGRTRQGNPWLRSTATECAWAASRSKNTYFHAQYHRLAPRIGKNRAILAVAHSMLYVTWHLLRRQVPFQDLGGDYFQSINQAGQAKACLRKLQKLGYKVTLEPTT

SEQ ID NO: 313025 - protein, 340 aa, unidentified
MTIVMGLDQHRAQITAEWVDTVTGELSRSRVAPAHRESVRRFLARFEDHELEVALEATTGWRFVVEELQRVGASVHLAEPAETAARRGRKKRAKTDRADARLLRELVMVGRLPESWIAPDHILDLRARVRLRHTLIDERGEWQQRIHAVLYHHGCPHHHGIGLLTGTGREWLGSLELPATAREQVTVALQMIGAVDAQLAPMDKELRAYARRQPGCKALMGLYGIGHLTAVTILAELGDARRFSSSREAVRYSGLDITVHQSDQRRAPGHLSRQGPPALRWALYEAAQSVHRTSSPDRDYYVQAAERLGGNRACLAVARKLLKRSYHTLRELGDGALQPA

SEQ ID NO: 313026 - protein, 364 aa, unidentified
MKRKVYVGMDVHKETIQIAYLTSNTKEMVKEQQIKHNEVHIKKFINKLKTEWNEIHCCYEAGVTGYPLYRYLKSLGVNCILVAPGKIPRQSSDKIKTDKRDAIKLARLLRSGDLESIHVPSEEDEAVRDYLRSRDSLRLDLGRNRQRLMKFLLRKGNVYSTTKYWTVSHYKWLNNLHFENEILHETFNDYYSRVRVQEENLKAMDQKIQEIAKSEAFRERVGILRCFRGVDYLTAMFLLSEVNDFRRFKTAGSFMSFLGLVPGEYSSGSKRKQTGITKTGSPRLRRILTEAAWQHRFPGTGSKIVAARRTGQPALVVALAEKASLRLHKKFRNLQLRGKSPQVMITAVSRELSGFIWAAMNLAA

SEQ ID NO: 313027 - protein, 371 aa, unidentified
MEKNTIFVGLDVHKNTIDVGLADAGRDSEVRFYGSIGGDLDSLHKVIRKLQSTGVMLRVVYEAGPCGYDIYRSLTRRGVECMVVAPSKIPRKSGDRIKNDRRDALNLARLHRAGELTPVYVPTVEDEAMRDLTRGREDAVKAHRTSRQVLLAFLLRHGYRYSGVSYWSKAHWNWIGDIKMPHPAQQITLQEYVHAVQEQSARVQRLTQQIQELVAQWDLALLVQGVQGLRGISLIVAATTVAELGDLTRFASAKQIMAYLGLVPSEHSSGDSIKRGGITKTGNSHVRRALTEAAQAYSHPARESRVLLARLAGLPEEVRKIAWKAQVRLCDRFRRLTARGKNRNTVITAIARELAAFMWAIANELRPMRKA

SEQ ID NO: 313028 - protein, 402 aa, unidentified
MIFINCLGIDISKSESVVAHYKDEVLVKEMVIQNNQNGYRYLKNYIKHLNSLFILFESTGIYSRGMKRFCEIHKIDYLEMNPLEAKFKTSSLRSWKTDKSDAHKLALLAFRMKDSKVQRQSEEIYFELRERARFHLEMEINQNRLKVELVETLHQTFPGLEKLFTNRYSKIALNIAKAFPHPDFVSTLTHDELVEKVLHSTDKGISVNKAHKYVQKLIEIKNNSFPNVDKSSFLLQKVQYLCDKLLIGIEEMKEFDQEMIDLAKNTTEFENIISIPGIGELTAALLIGELGNIREFKTNKQLNAFVGIDIKRYQSGTSKSRDTINKRGNKKARRLLYLIIMNIIRGRNHYQSHIVDYYYKLREQPHGKTHKTAVIASINRLLKTIHYLIVNNKLYDYQKAPH

SEQ ID NO: 313029 - protein, 409 aa, unidentified
MVIYNDIAFTAGGRGPPPRRFPADAAGYEALAGAIAAAGEPACIAMEGTSSYGAGLTRHLASLGMPVREALSPARMQRRRPGQGKCDEADAERAARAAMSGSRLGTPKSQDGWVDGVRCMLAARSGAVKARTSAINTARSLLTTAPEGLRSRFRGMGGPRLMEELPSVRAEGALGAALGALADLWAAARDAALDMERAIEASLEENCPALLAMYGCGPVSAAKLAVAAGDNPGRLRSEASFAAICGACPIPASSGKTVRHRLNRGGDRQANSALHEIARQRVMRDPETAEYAERARARGKSDREVMRCLKRYVAREAYRALMRPHEVRRPEDASELVAARRAAKVSQVRAASILGTSEKYISMLERGQRELKPIRRAYEAWVEAGLPLDWDRQAFEAERKMDSKKHLAK

SEQ ID NO: 313030 - protein, 356 aa, unidentified
MSEAMPADIIVGVDTHKRTHAAVALTGLGARVAELTIQVGPAGYRELEAWARSLGAVRAFGVEGTGSYGAGLARSLREGGHLVHEVGRPDRRLRRQQGKTDHLDAEAAARSVLGGRATALPKSGTREVEMIRHLKVARDTAVKARTQAMLALKAIIVGAPAALRERLEAITGKMALVRHLAASRPGPLTTTTASAKAGLRALARRWLDLDAEIRSHNAHLGQLTERCAPEMVAAHGMGTGTAAEMLVLVGDDPERIRSEAAFAKLCGACPIPASSGKTSRHRLNRGGHRWANAALHRVVVVRMRTHRPTLDYVRRRTAEGKSKREIIRCLKRFVAREIFGYLCRPPRAACPEQIAA

SEQ ID NO: 313031 - protein, 346 aa, unidentified
MEHYAGLDVSLKLTSICIVDRAGKVEREGVVASDPEAIATFIKLHAPHVVRIGLESGATSTWLWTELNKIGLPVICIDARHAKAVLKMQINKSDRNDAAGIARIMQCGWYKEVCVKDLDSHATKALLVSRALLVKIKRDIENQIRGLLKNLGLVIGRAKMNMFAVRAAQLAEDRSELFAAVDPLLKARGAVEQQILDLDRKVLRLARNNAQVRRFMTAPGIGPVTALCFLATIDDPTRFKRSRSVGAYAGLTTRRYASGEIDWTGRISKCGDKMLRSYLYEAANVLLTRVAKWSALKAWGIRLAKRSGLRKAKVAVARKLAVILHRMWIDGTEFRWSSKKTADQPA

SEQ ID NO: 313032 - protein, 375 aa, unidentified
MVDNSEAFVAFDSSKLRNAVAVADAGRSGEVRFLGEIENTPTATAKLVRKLTTKYDRVVFCYEAGPTGYGLHRQITGLGHECVVVAPSLIPRKSGNRVKTNRRDAESLAKLLRAGELTAVWVPDRHHEAMRDLTRARGTAVIDLRAKRQQISAFLLRQGRHYPDDKKTWSKAHINWLAGQKFDFLEQRIVFEEMMLAMRQAQERLQRLEQAIREAMPEWSLANLLTALMAMRGLDLVSVVTFLSEIGDPTRFRSAPELMAYLGLVPSEESTGDTIKRGPITKAGNRRVRRMLVECAWSYQYPPRVSKEKQAKLAAVPEAVRDIAWKAQCRLHARYRALIRNGKLKTVAVTAIAREFTGFIWAVSREAMRDGVAAR

SEQ ID NO: 313033 - protein, 405 aa, unidentified
MNHVIAFDVSMGKSAMVIYDRHQHCVWEGEVTHTPAGFRFLKKQIEAVTHQDGREPHLVFEATGVYSEGLQAFLKEHGYAYSRLNPLEAKLQTASLRRHKTDVRDAHDLAKSHFRVDRETTYIQEDYYEQMRALGRYYEETDKELCRQDNRLHAFLQLSFPTFETVFSKNTELFYGMVQCYPHSALLADVSNDELCRQIKQATRKRLSSRQLKESAEALRAAGNASYPAIHPDDVRCRHMKQYAGRILELKRHKKEIIRQMVERSRDRVEFQVFQSFPGIGETTAVRLVGELGDIRRFQNAKQINAYIGIDVHRHQSGKLHHPDRINKRGNKRLRRILYFMIMGMLSHRRRTNNTIVEYYDHLKKQPNGKLHPVAVIACVNKFLKVAFHLIRHGLLYQYEVGRTS

SEQ ID NO: 313034 - protein, 337 aa, unidentified
MYYIGLDIHKKTISYCVKDAAGCVHREGKINSSRRELDAWIRALPQPRMMAMEATIFTGWIYDYLLPHAEKVKVAHPLMLRAIAAAKKKNDKIDAAKIADCLRCDFLPECHIAPTEIRDRRRVLRYRNLVVKQMVQMKNRVSGLLLETGVSYNKQRLHKVGYFGELMSTNADISDAVRPLLNLSRGMIRRSSKLEYDLVSSLERDPLLRERLRRLRTVPGVGSITALTWALEIGDYTRFSSNRQAISYCGLCADERSSADKVMRMPLSKQRNKHIQRVLVEAAKLAPRESPELAMIRARELERGNPNRATLAVARKMVCYMLAVERRQQDFVQTAAA

SEQ ID NO: 313035 - protein, 361 aa, unidentified
MAQAKTWAAFDVHVSGVVAAVLDRDSGELQVQRLPGRSDDVVAFAAGLPGPVRATYEAGPTGFVLARKLETVGIDCLVCAPGLIPRGASDRVKTDRRDAERLVRLLAAGELHRVVVPSVEAEALRDLVRAREDLRGDLMRARHRLAKLLLRHEVRFDGPQANWTQAHLGWLAGVRLAQPASQQALEDYRGAVSSLLIRREQLEAEIARALPESPWAPTARRLMCLRGIDTLTAAGLCAEIGDFHRFRHPAQVMSYLGVVPSEHSSGERRRRGPITKSGSQHARRLLIEAAWHYRRPPRVAGSLARRQRDGEPEILALSWKAQRRLHHVWNRMEQRNKRRTIIAVAAARELAGFCWAVATTD

SEQ ID NO: 313036 - protein, 312 aa, unidentified
MTHACAAGVDVGRDFFDVGLAPSGQVFRTANGPGGVLALVERLKRAGVSKVVLESIGGYAARLVRALAEAGFEVGVIDPKRIRALRIAEGKRAKTDRLDAKLIARFALIMQDAARPVPDAKAFEIRALSTRRRQLVEMAAMEKVRLKQTLDEAVADSCRQMIAILSEERARVEGRLQAELLATAERAGHAKLLQTIPGVGPAVSMTLLADLPELGRLDRKAIASLAGLAPHPNQSGTRTAQARIAGGRPCVRAALYMAAVSAARTDKGFKAEYQAMRQAGKPAKVALVAIARKIVVAANSMLKSNQPWIKAS

SEQ ID NO: 313037 - protein, 404 aa, unidentified
MNNVAGIDISKGKSTVSVLRPFGEVVAKPFSVGHTGSELKELADYLKSLDGETRVVMEHTGRYYEPVARFLHDQGIFVSAVNPKLIKDYGNNTLRKVKTDKADARKIARYGLDNWVELRQHTPMDTIRMQLKTLNRQQGLYSKTKTMMKNNLIALLDQTYPGVNALFDSPVREDGSQKWVDFATVFWHVDCVRNMSLAAFTERYRKWCKRHGYNFSQSRAVEIHAGAQDLIAMLPKDALTKTMIRQAIDALNAISASLERLKAEMRTLAAQLPEYPVVMAMHGVGDSLGPQLMAELGDVTRFTHRNAITAFAGVDPGADQSGTHEAKSTRASKSGPPELRKALFLVMDCLLKTMPADDPVYCFMDKKRAEGKPYLVYMTAGANKFLRIYYGRVKEYLALRENAD

SEQ ID NO: 313038 - protein, 359 aa, unidentified
MDIQGTSVGLDVHALSVVAHAVDEETGKVSKARLCPDHGEVLGWLHQLRAPVRMTYEAGPTGFGLARAINEAGMECVVAAPSTLQRPAGDRVKTDARDAAHLARLLRLGEITAVTVPEREIEAVRDLVRAREDARVDLMRVRHRLSNCFCGRGSSIFGGTPCTCAHEKWLRRQRFDDAHLKAAFDHGFDAVLAATAARDRLDEHLTEVAASPRFADPVNRLGCLRGIAALTGLALTVEIGDWSRFTGSSIGAYVGLVPCEYSTGTSRVQGSITKVGNTHVRRLLIEAAWHHRKSYRTSGPTLRARWAVVEPALRARGHAGNRRLYKRWRHFTERGKNPLVANLAIARELAGWCWSLATM

SEQ ID NO: 313039 - protein, 449 aa, unidentified
MERYAGVDWASEKHDVVVQQAGGEQVLAATFTHDERGLAALCSTLTRLNVVLVAIERPDGLLVERLLDAGLRVMAIHPNQVAAARPRFRTSGGKSDGFDAFVLCELARTDAHRFRVLVADSDDTKALRAFSRAREDLVQARVALANQLRAELQCFWPGAALIFAEIDSPIGLAFLARYPSPSDARGLGEKRLAAFLARHAYCGRKQPTELLAKLTSAPAGRAGDAEIEARRAIVLALVAALHPIVTKISQLTREIAHRVRAHPDGHVFLSLFRDPKSVVCAAALLAEIGDCRARYRSAEALAADAGMSPVAVESGKRKVACFRHGCDHRLRSAFATLADATRHWHPWAADRYAAARARGQDHQRAIRTLGRAWCRILWRCWQDHAAYDPQRHRGLQQHIALMIPDQSSPRLDLKATQRMAGAAVTRRAARSAEREALDGKPTTATTLEG

SEQ ID NO: 313040 - protein, 382 aa, unidentified
MRRVGLDLGVRHIAYCEVKDGKVIDRATVRSFSQLASRIGPESPAAHVAFEACREGWHVHDKLKSWGHEPHMLDTTRIRQIGVGHHKRKNDPIDAETIALAMESGRIAEAHVLSPARRELRAQLSVRGALVETRSHYVTTIRGLARAAGVLLPTCAAEKFAPKLDAMALDDKTRALVAPLAVVLKALEAEIESVEHTLATIAQGDSAIRLCATVPGVALIVACTFVSVIDEAKRFRNAHAVGAYLGLVPGEMTTGGPSQRRLGSITKQGNTMARVMLVQSAWLILRSRDADDPLRRWAEAIAQKRGKRIAVVALARKLSGVLWAMWRDGTVYDPAANATESARGVRRDAKRQAHRAEALERAGKKLRRPATRAAKRISEAEV

SEQ ID NO: 313041 - protein, 370 aa, unidentified
MSVRRILAKTIDTDLEYEAIGIDLAKNCVSAALLTTDGEVVCIDRLDYSELEKSAQVLCPTTFAMEPCTEMNYLVQKLEAWGHRCLVIGGKNVQNYVENHFSGQKTDLNDAQALAFLAQDTQLRTIKAKDVEQQKYASLTTLREQYIKQYRQTIVSLKGICQAWGLNISKGISGKARLKDLIENHAAFPEELKESLVDMVTHAQTAQKALNKITKTLELLAKNDKVCQLIQTIPGLGSICSCRLRATVGDIKRFKSPKDFPAYYGLVPRSIATGHNERKGKITHRGDRTMRSLMVQAAGSLVNMATKGKLKSKQLTKWILKKQKEKMPWGKLVCAVAAKLLRIVRAVLISNKPYNSKIAGVAKCSLPKGS

SEQ ID NO: 313042 - protein, 458 aa, unidentified
MARKRKNNNKKIGAPVLHCLNPNAAGVDVGATEIYIAVPADRDPQPVRHFSTFTEDLHAAADWLKSCQIETVAMESTGVYWIPLFQILEARGFQVSLVNARYVKNVPGHKSDVSDCQWLQYLHSVGLLRGSFRPEQAVCTVRSILRHRDSLAQMASSHVQHMQKALDQMNLQLHHVISDITGVTGMTIIAAILAGERNPHTLAALRDGRIKATADTIAKSLVGDYRREHLFTLGQSLAAFRHYQELIGACDREIAQLLETFESKMDPPEGSILESQDGQNPSGGEPRFDLQSHLHRIFGVDLTRIPGINVLTTQTLLAEIGPDLSQFPSAPEFTSWLGLCPDNRVSGGKVLSVKTRKVKNRAATALRIAAQALHRSQSYLGHFCRRMRAKLGAPKAITATAHKLARIIYQLVTTRQAYDETICVQNEMQNRRRLEARLRKQARDLGLEIIPAKTGAIG

SEQ ID NO: 313043 - protein, 338 aa, unidentified
MAMYCGIDLHSNNNYVAIQDETYEDVVCRRLRNDLGVILKFLEPYREELEAVAVESTFNWYWLVDGLKEAGYDMRLVNTTKASDYSGLKYTDDRHDARWIAHLLALGILPEGYIMPPKERGLRDLLRRRSYLVHQRTALYLSVKTIFARSKCQKVTTQDIRTWDSEAVRGMFDDPHVAESVIAMLPVVRVVTAQIKGIEKIALETGKLRDEFRLLFTVPGIGNILALTIMCETGDISRFRKVGNYGSYCRCVKSEKFSNNKKKGKGNRKNGNKYLSWAYSEAAHHATQFEPLAKRYFDRKKSRCHPMVAARALANKMARACFYVMRDQVPFDASRTFC

SEQ ID NO: 313044 - protein, 312 aa, unidentified
MEPLSLGIDISSKRLDCYWSHLNKHQSFENTLSGIAQLLLKIGQEKPVWIVFEPTGGYEIDLAFHLAEKGIAFSMVQPHRLRSFARSCGKLAKTDKLDAKLMATYGIKMTPKSTILGTKAQKELSSFVTRRRQLVDLLSIERQRIDQGRDPLIQEDIKDHCEYLKHRIINLEKQIQDCIHQDINLEEVSQTLQTFRGVGPTSAAVLLADLPELGHIGPKEISSLVGVAPFNSESGNTARKSKIRGGRLSVRCILYMVALVAIRHNTVIKEYYNRLRSQQKPPKLAIVACMHKTLIILNAMTRDHFKNKTVPS

SEQ ID NO: 313045 - protein, 350 aa, unidentified
MPRKFDTAVVTIGIDPGKNTMHLVGLDARGEIVLREKVTRTKIVSRLANMRPCLIGIEAGMGTHYVTRDLLALDHDVRQVPPVYAKPFRQIHKNDFRDAHAVAEAVQRPTTRCVPPKTDEQLDLQALHRVRYRLVGQRTAIINQIRCFLLEHGITVRQRLHWLRHALPDILAQRTDVLSPRMVRILEDLAQDWRRLDDRIEAVSGEIDALSKNTEPCRHLMTIPGIGPIISSAVVAAIGDGAAFTRGRDFAAWLGLVPKQISTGDRTILGRITKRGNRYLRMLFLQAARVVLLRPRNWMQHSFGPWLAAAAQRLHHNVLATALANKLARIAWSVLVQHREYEARLSVAAT

SEQ ID NO: 313046 - protein, 332 aa, unidentified
MNSIGCRDTVGIDLGDTFSYVCILDPQGRVTRRFRHPTTPKAFRAHHERRASSLVVIETGTHSPWISRLLKECGHEVIVANARRVALISRSKKKTDREDCELLARMGRADPALLAPIEHRGEESQLDLTTLRARGAAIRARTLLINAVRGLVKSCGERLPKCGSATFHKVAGKHMPQQLKESLEPLVGLIEANTTLIKAYDKQVKALCTKHQPTGHLQAVTGVGPIASLTFVLTIEDPRRFRRSRQVGAYVGLTPRLSESGDSKPQLRITKAGDVDLRRLLVTSAQYILGPWGPDSDLRRWGLALAERGASKGKKRAVVAVARRLAILLHHL

SEQ ID NO: 313047 - protein, 376 aa, unidentified
MLYVGIDIAKNKHDVTALNVPGKTVLKPLTFSNNKAGFELLDLSIRQLNQDCLIALEDTGHYAFNLLNFLHEQGYKVYTYNPLLIKEFAKSLSLRKTKTDKKDAHGIALKLLSDPNREQFQHDNRQIELKILARHIHRLKKKQSDWKVQYTRCLDIIFPELDKIVGKHSEYTYQLLTRYPNPQKRLEAGFDKLIEIKRLTASKIQDILSVAPRSIGTTSPAREFEIIEIIKHYKRLIDKAETCVNDLMAEFNSVITTVTGIGGRLGAVILAEIRNIHAFDNPAQLQAFAGLDSSIYQSGQIDLAGRMIKRGSPHLRWALIQAAKACARFSPAFKAYLKTKLEQGKHYNVAIIHLAKKLIRTLFYILKKSCHLTNKK

SEQ ID NO: 313048 - protein, 343 aa, unidentified
MKITMIGLDIAKSVFQAHGTDANGKCLLKRKLGRSEVASFFGKLERCQVVLEACGTSHHWARVIRDAGHDVKLIPPDMVKPFVKRGKKNDAVDAAAICLAALHPDTRFVPIKNEEQQSLLSLHSTRTLLVKQQTMLVNALRALAAEFGLIVPLGNSRLPDLLAKIGTSPDLPDVMKQTVILLFEQYGKLSESIGCLERRIQAQARQDEDARRLLTIPGIGPMTASLIVASVTDIDTFESARHFAAWLGLVPRQHSSGGKVRLGRITKTGNREIRKLLVLGATSMSFRAQKWTSAAGAWLCKLLERRPTRLATVALANKLARIVWALLSRKEIYRPAGRNVAVI

SEQ ID NO: 313049 - protein, 358 aa, unidentified
MVDKVTEAAVVGGVDTHKDLHVAAVVDQNNKVLGTQYFSTTRQGYRQMLAWMTSFGTLKRIGVECTGTYGSGLLRYFQNAGLEVLEVTAPDRMERRKRGKSDTIDAECAAHAAFSGIRTVTPKTRDGMIESLRVLKTCRKTAISARRVALQIIHSNIISAPDELREQLRNMTRMQLIRPLGSWRPDASEYRNVTNVYRISLKSLARRYLELHDEIADLDVMIAAIVDELAPELIKRNAIGYESASQLLITAGDNPQRLRSESGFAALCGVSPVPVSSGKTNRYRLNRGGDRAANSALHIIAIGRLRTDAKTKEYVARRVAEGHTKMEAIRCLKRYISREVYTLLRNQNRRINSIPITA

SEQ ID NO: 313050 - protein, 334 aa, unidentified
MSLELLAIDIAKQSFHVHGIGSNGVVLSRKVGRAKLLELIGYRDPQIVAMEACASAHPWGRQLVALGRQVRLINPRFVKPFVRGSKNDAVDAEAIYEAATRPTRRFVPVKSTEQQDLQSLHRVRERLICQRTSLINHTRGLLAEYGIVLPRGSSRFTTRAPEAVADAQLSDLARDLFAELFDQLSDVDERIKTLDARIVAICRLNEAARRLAALPGVGPLIATALVASIGAGRRFRSGRQLAAWIGLVPRQHTTSGKPRLGGIGKRANHDLRRQMIHGARAVAFRVSGRDDARSNWLKALVERRGFNRAVVALANKTARIAWALLTRSQSHALA

SEQ ID NO: 313051 - protein, 365 aa, unidentified
MDHFAGLDVSVKDTSVCIVDDAGRIIREVKVASEPDALLAVLTNRIYHFKRIGLEAGPLSQWLFSALAEAELPVICVETRHMRAVLKAQINKTDRNDARGIAQMMRVGLYRPVHVKTLRSQKLRMLLTHRKLLQSKAIAVDNDLRGTLRNFGLKVGMVGTAKFEARIRELVENLPDLAVLVEPLLVVRRVLREQIGILHRRLLAIVRDDEVCRRLMTVPGVGPVVALTYRTTVDVPARFRKSKSVGAVFGLTCSRDQSGERDRPGAISRCGDEMMRAMLYEAAQSMLGRSSRWSWLKAWATQIAKRRGMKRAIVALARRLAVIMHYGPAVRCKGIRTEWSFWSALIYPASRGSSCSGPSWLSAHT

SEQ ID NO: 313052 - protein, 352 aa, unidentified
MNETVNLNNLNQNLYIGMDTHSKDWTVSIYSDEFELKTYTQPPDPEIMSKFLHKNYPGFTYYCVYEASFGGFWIQRALEGLGINCIVTHPADVPTKHKEKNRKTDKADSRKLARGLRSKELDPIYIPSVEQESDRALLRARSKLTKDQTRSKNRIKSFLKLHNIIIGDCKYWSKQYVAKLQQLQFPNAYAIFSFDSYLKEYLSLNEQQKLIDKKIIELSKEPRYKENVKLLLTIPSIGLTTAMVLLTEIGDINRFETRNHLYSYFGLTPNIYSSSDHESVGAITKRGNKYLKSVIVECAWTAVRKDPALLKYYKGLLVRMDSNTAIIRVTRKLINRIRFVLNTKTEYKINVA

SEQ ID NO: 313053 - protein, 340 aa, unidentified
MGEVAVIGLDIAKSVFQVHGVDCAGGVVIQRKLTRARLLPFFEALPRCLLGIEACATAHHWGRQLREMGHDVRLMPPGYVKAYVKRQKNDMADAEAICEAVTRPTMRFVEIKSPEQQGIMVLHRTRQTLMRQRVQLSNTIRAHIAEFGLVAPAGREGLQRLIDNLPAIEQAPPIARACLMMLASQLKLVNEQILQADRAILTSVRANEVARRLMTIPGVGPLVASAMVASVPDPRAFRSGRNLAAWIGLVPKQNSSGGKERLGSITKAGNRYLRQMLVVGALAVIRRAQQCGSRRTWLTQLMSRRNTKQAAVALANKTARTIWALMTSGQAYREPEAMAA

SEQ ID NO: 313054 - protein, 422 aa, unidentified
MLEETEDREELIGRVAALDIGKAELVCCVRVPDPQGSGKRLQEVTTYPTMTRSLLQLADRLAALGVTRVVMEATSDYWKSPFYLLEAQGFEVWLVNARDVKHLPGRPKTDKLDAVWLCKVAERQMLRPSFVPPPAIRRLRDLTRYRADLIVVRTAEKNRVEKLLEDAQIKLSVVASDIFGVSGRDMMAALIAGERDPKVLAQLARRRLRAKLSRLEEAFYGRFSDHHAFLLETMLGRIDQASADIAAVEARIEEAVAPFAQAVDRLDEIGGVGHAAAQVIIAEIGVDMGRFPTAGHLVSWARFAPGVKESAGKRKGKATSGHGNPYLARVLGEAAAAAGKTNTFLGERYRRIARRRGTKRAMVAVGRSILIIVWHLLSDPDARFHDLGPGFYHTRIDTERRKRNHIHQLEALGYRVTLQPAA

SEQ ID NO: 313055 - protein, 331 aa, unidentified
MNRKDFCCFIGIDISKKVFDVAIIKDERTTSYVFENSKKGTNAFIRLLKNQKIPLANTLMCMEHTGVYGKLIIAKLVEKQAHFCVEMPIQITKSIGLLRGKNDKVDAKRIAQYALKNSHELELYKPIPEILEKTRILLKIRKQLVNARADFNKYPNELELFSPEMGKLAKKNLKKINKTLYDEIKRVEAEIKKLILSDDKLNKTVGLVTSVTGIGMITALHFAVFTSFFTRYDNPKQLACYCGVVPFEYTSGSSITRKSRIHPMANRTLKKHLHMSALAAINHDPDIREYFLRKVEEGKNKMLIVNNVRNKLVHRVCAVIKRQQPYVKNVA

SEQ ID NO: 313056 - protein, 387 aa, unidentified
MSKKKGRVVGLDVHPDSFAGAVVEGSDPASAQVLSTSRRVELEQLEKWASSHTNKEDILVLEASGNAFAVAARLRRIGREVEILDSHRAGKVGKVYCANDRVDAVKIARIYLSALSPVVWQPDAKTLERREIFSAYQGVVKESTRARQQLRAMLNEHCVRLEKGFRVCHPKAITRLLALREWTPARRMLLQQLHGSLVAARARRTLLRRHMAQEIVAEEALLRLTRLCGINLVTLYGVVAAVGDVRRFSHSKKLVAYLALNPSVSQSGNFEGNGALKSHGRGALRALLIQSGKRLLEVTNPLQKWGLAVAARRGRNKAAVAVARKLCVALWHVMMGHLIGALERLDTLETKLSKFATEVGPAALTAFGYNNKADFVEKKVYVLRSYP

SEQ ID NO: 313057 - protein, 317 aa, unidentified
MDKSITIAAGIDTAKAKLDVAIHGSKQHWQFVNAAAGWDELAKLMRARKVTRIGIEATGGYERNVVERLRKAGFVVVVLQPIQVRAFAQLTLSRAKNDRIDAGLIAACTAWRDSVREPPDPRLAPFADQLTFIEQTEEDIARIKVRLEHVRDAGMRQTMLDDVARLKQRRANMIAKLTTAVRRHDDLARRLDLVMTIDGIATRTALALIIRMPELGNLSRGQAAALIGLAPFVHESGKRKGESHIAGGRSRPRKSLYSAALPAAFRWNRQLIDLYQRLIGAGKPHKVALVACARKLIVFANAVLARATPWTKMIAAT

SEQ ID NO: 313058 - protein, 343 aa, unidentified
MEYGAIDLHLRRSQVRILEESETVVLDRRIDTTRAALEGLFGGRARMRILIESSTESEWVAQHLETLGHEVIVADPNYAPMYGSRSRKVKTDRRDAAALAIACRRGIYRRAHRVAGATRRLRQELRVRRHLVQTRSGLISVLRSVLRQEGLRLPAGSAARVLTRLDRVPLSPGLDAVLAPLRRILAELTTALHTIETAIETRAADDAVTQRLMTAPGVGPVVALTFQAALADPARFGGDAGRASAFVGVVPSEDSSAERQHKGRITKTGPRDLRAVLVQASWVIWRGRSTAGAALRTWAHALAARRGRRIAIIALARRLTRILYAMWRDRTDFVGARPVGVAA

SEQ ID NO: 313059 - protein, 339 aa, unidentified
MKLYGGIDLHGNNNLTTLIDEEDRLVFSKRLNNNISEVLFMLAPYRDNIVGLAVESTYNWYWLVDGLMENGYKVHLANPAAMQQYEGLKYGDDKTDSRWLAHMLRLGILPEGYIYPKEDRPIRDLLRKRSQLVRYRTSNILSMNNLFSRNLGYSIKGRKIKQLDADDIDELMEDENLALAAKCNLFVMQCAESQIKEVEKVVKRQAKLRPEFSNLLTVNGIGEILAMTIALETGNIKRFPSVGNFSSYCRCVSSTRNSNGKKKGEGNSKNGNNYLAWSFMEAATFAIRFNDLARRFYQRKTAKKKAVVAKKALANKLAKACYYIMRDEVPFDNERLFAT

SEQ ID NO: 313060 - protein, 347 aa, unidentified
MRFYTGQHRYYCGIDLHARTMYLCILDHTTGEVVLHRNLRSEPGAFLRAIEPYRDDLVVGVECIFCWYWLADLCADEGISFVLGHALYMKAIHGGKAKNDKVDAHKIAVLLKGGAFPTAYVYPRGMRATRDLLRRRLLFVRRRGELFTHIRIVFHQLNLPAPTGALLEPRHRSGLLETVPEPGVRASVEADLDLAERLDHVIHSLERTIQRQAKVDDPETLRLLKTIPGVGRILGLTMLYEIHDIVRFPRVGDFLSYARLVKSQKASAGKVTGTSGAKIGNVHLKWAFSEAAVLFLQKNPPGQRLMSRLRSKHGKGKALSVLAARLGRASYFMLSRSTPFDMDRFLN

SEQ ID NO: 313061 - protein, 394 aa, unidentified
MYYIGIDIAKKSHEVCFVDQNGQILDGNSFKIPNTLSGVNKLQQMLDRYALTPENAQVGMEATGHYWLVLYSWLFEKGFDIKVINPIVTDALRHMRVRKVKNDRVDAEIVAKVLMLGEYQETAIADGDILALRQLCRFRLWQVQTMGDLKRKVIALLDQVFPEYADLFSDVFGMTSKELLLQYTTPEEIAAVSARKLTTLLGKSSKGHFGKEKALEIQAAAKGSLGITVATDAFAFQIRQMVEQLEFVEEQITLLDQQIESYMAKLESPITTIPGVGPVYGAVILSELGDIHRFPSAKQIVSYAGIDAQVNESGDFKGTEAHMSKRGSPYLRRAIWGAAFIASRADPQLKEYYQSLRARGKPHRVAVGAVARKLCYLIFAVLSENRAYEVRARL

SEQ ID NO: 313062 - protein, 427 aa, unidentified
MTTSLTNDDMQNEHAAFIAIDWADQKHAFSLQVAGQNKRQTGTLEQKPEVIGPWVAELRERFGGRPVAVAVEQSRGALISALLDYDFITIYPIHPVTVARFREAFKSSGAKSDPLDTDQIMQILTKHLELLRPLNPDTEETRLLGRLVKDRRKAVDLRTSHIEALGASLKEYFPQAIEVLSGNLGSRLACDFLKKWPSFEAFQQAKESTIKRFFYGHNVRSPQAIERGWDRAKMGKALTTDLAIVESGSRLTQMHAQMIETLNSIVEDYDERIQKLFGDHPDAYLFNQLPGAGPAMAPRLLAFFGTDRSRYETAGNVQSLTGVAPVTKSSGKTKAVYMRRACPKFERQTFHEFARLSVLKCQWARNYLDYYTAKGKQYHTIIRALAFKWIRILFRCWKNRNPYNDQKYMATLLKRGSIFATLHLKKS

SEQ ID NO: 313063 - protein, 381 aa, unidentified
MIVIGTDTHKRTHALSAVDEGTGKVRAHRQIDADEAGHLAAVKWARGLDQQRVWAIEDCRQVSRRFEQALLAAGERVIRVAPQQMGASRRGERQPGKSDQIDSLAIARAVVKDGVDSFPVAYLDEQAMEIRLLFDHRNDLVVERTRVTNRLRWHLLALCPELERSLKRGSLNKARVLDRVDRRLRQLGPGARVRVAREQVSRIRSLTGQIDTLKRELRVLVEAHRPELLAEIGCGELTAALLIGRTAGAERFKSDASFALQSGNAPIPCSSGQRTQYRLNRGGDRQLNHALHIIAITRANHDPATKEYLVRKERDGKTKKGALRCLKRYLARRFHRILSLPAVTEQCDQHEFGEIPPHPRRAQLSDVEPITAAPCPMPCVA

SEQ ID NO: 313064 - protein, 337 aa, unidentified
MNYCGIDLHSNNCVVIVSDEEDRIVYGKRLPNDLALIRAALEPYRHALKGVVVESTYNWYWLVDGLTDTGYSVHLAHPAAIRKYEGLKHSGDFADAAYLAQLLRLGLLPEGYVCPREQRSARDLARKRMQLVRCRTAQILSIEGIMIRQTGIRIKSDAVKRLTAAQVNELALPADVALAMEANRAVSEALEQQIELLEKRLKERVSLRPEYHLLKTVPGIGQTLATTIMLETGSISRFAQVGNFSSYCRCVDSLRESNGKKKGEGNTRNGNKYLAWAFVEAANFAIRYSPQARSFYDRKKSRTNRVLATKALAHKLVRACYYMLRDQKPFDAHLCFG

SEQ ID NO: 313065 - protein, 348 aa, unidentified
MKKLMAGMDLHSNNIVVGIVDSDGKRVAHQKLGCQLKEIVKFLAPYKKRLERLAVESTYNWYWLVDGLQAAGYPVVLANPAKMDQYSGIKHADDKNDAFFLAELLRLNILPTGYVYDAQLRPVRDLLRRRMRLVQHRTALMLSFKSLFTRTTGQEMTLTQLKGLAVEQAQELYEHPANQLIAGIQIKQMEQLTESIEKLEGAVLKVARELPYYPKLKTLPGVGNILGLTMTMEVGNIKRFADPGHFASYCRTVDSQCLSNGKQKGQNNRKCGNKYLAWAFVEAANFAKRYDEPCRKWYDRKVAKTSTVIATKALACKLAKAAWHLMAQEVDYQAHRVFPEWAARKAVA

SEQ ID NO: 313066 - protein, 369 aa, unidentified
MADYREAFVAFDVAKIKHAVAVADSGRAGEVRFLGEIENRPVTIERTIRKLAKRYDRLHVCFEAGPTGYGLYRQVGDLGHDCMVVAPALIPKRSGERIKTNRRDAVTLARLHRAGELSAVWVPDIVHEAVRDLVRARQAGAEDLRRKRQQLLSFLLRHGRIYDAGGHWTLAHRRWLARQAFEHQAAQIVFQETSDAIEDAAQRLHRLDEQLAAIVETWSMKPVVEAYQAMRGASFLVAVIFAAEIGDVRRFETPPQLMAFLGLVPGERSTGDTVRRSGLTLAGNRRARRALVEAAWTYRYPARVSEPLRARLEGLPKAVRDIAWKAQVRLCARYRRLAAAGKKPPVIAAAIAREMAAFLWAIGREVAPS

SEQ ID NO: 313067 - protein, 340 aa, unidentified
MKEVSIIGVDLAKNVFHLHGASADGSVVFRKKLTRVQFERFMAAQPVCTVAMEACAGAHHWARTLTGMGHAPLLIAPRYVKPFVKRHKNDSADAEAIVEAALRPTMRFVEPKTAEQQGRAVLFRTRTQFIESRTVAMNALRAHLYEFGHTAPIGVHQVKRLAGIVEAEDSGLPEVVRLCCREILAQIAQFAERLRVLDREIARLSGEGETSRRLRTMPGVGPITALAVETFAPAMDSFRSGRDFAAWLGLVPMQHSTGGKQRLGRTSKMGQRDIRRLLIIGAMSTVQRTLRKGAPEGSWLARMLAKKPRMLVAIALANKMARGVWAMMTKNEDYRGAAMA

SEQ ID NO: 313068 - protein, 342 aa, unidentified
MIITIGIDPHKGSHTAVAVDCNEHVLDEIRVRSCSTQTARLREWAYRFEERTWAVESAHGLGYLLAQQLVAAGEDVVDVPPVRASRVRVLGSGKSQKNDPNDARSIAIAALRADDLATVCADDHAQVLKLLSKRHRDLGRLKNKASCRLHALLLEMIPGGAGFRITTVTRINAVIDGFEPADAMGRQRQDIARDLAGDIDRYNDLLDSSKQRIQTAVAASGTSLTTISGVGPITAAMIIGQAGNIDRFKSKHHFASYNATAPVEASSGSKVRHRLNQRGNRQLNWALHVIAISQLRHDTAGRQFFDRKVAEGKTTKEAIRSLKRRLSDVVYRHLVADAQLQS

SEQ ID NO: 313069 - protein, 344 aa, unidentified
MSKHSVSGGDITGLLMRLSQLREKSKVRTGQLVPIIVIQEAGLDGFWVHRALEQEGVESHIVDAASVMTSRRRRRAKTDRIDGEALLRALMAYKRGEPRVCAMVRVPTAEEEDRRRISRERKTLTAERVAHVNRIKGLLFSQGIAFKPLYGNRHARLEQLRTGDGRALPEHMKRQISRELDRLELLLEQIKAVEAERNTMLTALEGEKIPTPAKMLIRLRGIGSESAMVLWSEGLFRHFDNRRQVAAYAGLAPTPWQSGTIDREQGIAKSGNLRLRTTMIQLAWLWLRHQPGSALSRWFHERVERSGGRFRKTMITALARKLLVALWKYATAGVVIEQAAMKPL

SEQ ID NO: 313070 - protein, 390 aa, unidentified
MDVLYQSCAGIDVHQANIVVCILHGPLTSTRPKREVATFDTTTKGLRACHDFLSQFHVEAVGMESTGVYWRPVWHALCDDFELILAQPAHMKAIPGQETDKKDAHWIAKLTRIGLLPRSFVPDETIQELRELTRQRKHYVESRNRETNRIHKILQSGGIKLTTYIEDIMGLSGRNLLQLLVDGTPITPRIAHQSVYTSLKKKVPQLLEALDGYFSDHHRFMLKQSLEIYDFYQKQIELLEERMNVYLSQYENHVEILDSIPGIDVITASVIISEVGVDMSQFPTSGHLASWAGLCPGNNESAGKKRSTKIRHGNSYLKKCLCQAAFAIKKQKGSPLADRFYQIQSRRGSQKATIALAHQLLKIAYILLKEQITYPEFLAQKKTTRDELVA

SEQ ID NO: 313071 - protein, 368 aa, unidentified
MLNLNRAARNGTISDNTSNSDSTCDYAGIEVSAEELLVALRRQGKLKPLKSFPNTPGGHQAILRYLACPGRPVRVCLESTGVYGLDLALALQAAAGIAVMLANPRAVRHFAQALMQRSKNDRLDALVILEFAARMPFRAWQPPSPAARHLCALARRLEALTELCAAEKNRLHAVGATQDLPPVIRQDLQGSLRFHARAIERLQKEALKVVAQDSELEPKFNLLRSVKGIAEASALHILAAVAVLSPDLDVRQWVAYAGLDPREYNSGSSVHKKTRISKAGNRHLRRALYMPALVAVRREPHFRAYYEHLLARGKTKMQALVAVMRKLLHAIYGMFRLQSRFDGSKVYQFPQSELANSAPCTKEVAHAA

SEQ ID NO: 313072 - protein, 317 aa, unidentified
MSKGITICAGIDTGKRKLDVALEAGRERLEVDNNAAGRQVLAAWLERHRVKRVGIEASGGYEQDVVAELRCKGFVVVMFQPAQVRAYAMFHLQRAKNDEIDAALIARCTADAKKIHAPPDPRLAPFAHDLTLLDQITDTIAGHRNRRETCRDPRIRQFWKEEIARLKKLQRAELKRLVAAIRQHPDLAQRLDLINSVDGIGLPTAVTILVRMPEIGRITREQAAALAGLAPYDDDSGEMVGVRHIEGGRKRLRIALYCAALPASLRWNPQLIALYQRLIAAGKEHKRALIACARKLLIFANTVVARGTPWMAQPNPA

SEQ ID NO: 313073 - protein, 408 aa, unidentified
MEVLHPRCAGLDVHKDSVVASVRCASPPTHQEVRTFSTTTSGLIALGDWLASHACTHVAMEATGVYWKPVWHMLEGRFELVLANAQHIRNVPGRKTDVNDAMWIADLLAHGLIRTSFVPPEPIQELRDLTRTRKQLVREISQHSLRIQKVLEDANVKVGSVLSDVLGKSGRAMLTAMIAGETDPVRLAELAKGTAKKKKAELIEALRGRVTPHHRDMLKLHLDLIAALELALRDIDAHLGKALAPVQERARLLTTMPGVSDIVAEVIVAEIGVDMSRFPTPAHLVSWAGLCPRNDESAGKRRSTRVRKSANWLKTTLVTAAWAAARSKDSYLRAQFLRIKSRRGPKKAIMAVAASMLTASYFILRDGVAYRDLGPLHFDRRDRTKSASRLVQRLRHLGYNVEITAQAA

SEQ ID NO: 313074 - protein, 391 aa, unidentified
MICVGIDVAKDKHDCFILNSEGVVLADAFTIPNNLKGFQTLLDKLRDCSTPQDSIKVGLEATGHYSYNILGFLLDNGLATYVLNPLRTNLYRKSLSLRKTKTDRVDARTIAAMLLSDAGLKPYTDTAYHNEELKSLTRYRFDKVNERAQLKQSVSRLVCILFPELEKLVSSLHTASVYALLEEFPDARQIAAAHLTRLKSLLAEASRGRCGRDMAVEIRNAARCSVGSRMPAKSLELQHTIRLIRELDAEIEEIETAIQAIMEELHSPITTIPGIGYRMGAMILAEVGDFSRFDSPDKLLAYAGMSPSTYQSGQLKNCYPHMEKRGSRYLRYALYNAAKYVCHWDPAFAAYLAKKRAEGKHYNVALSHAAKKLVRLIFALEKSGQPYCPVI

SEQ ID NO: 313075 - protein, 322 aa, unidentified
MNKYSETFGIDISKDVFDCYGSTQGHLQFKNTESGFKKFQKLLRKDSLVVMEATGYYHYRFAQFLYHQGFVVSVVNPLSIKRFIQMKLAKVKTDKSDAKAICNYGLSQEVPLYNALTEVQSECLQLFRWMDSLLKKRTATKNKIHGEKVLGIPSKYVYHSLSRTLKHLDRELQGIDKKLLSLVKQDQQKQLTLLKSIPGIGVKTALFLIVITDGFKKFETASQLCSYAGITPTIRASGSSVRGRSRISKVGNRKLRNLLFLCAFSAYKHNKGCRELYERIVNKGKSKKLAMLAVSNKLLKQAFAIAKSGIPYDETHVSLLPK

SEQ ID NO: 313076 - protein, 421 aa, unidentified
MRKVDTGKVKVVKDDTLIVAIDVGMEMNRGYCTTPDGRSAKPFKFDNTREGLDTLWGMVMASKNRFTCTEVIVGYESTGPYGEPLVHYLIKKPVKVVQVNPMHTKRVKEINDNSPLKTDDKDPRVIADIILLGHALSVVIPEGDAAYLRRLNNARERHVRERTALVNQLQQLVFLLFPEFQKVIKDIKCRTPLYLLKRYPTPEAISVLEAHVLGEEMRKKSRGKFREHHADMLITLARNTIGITEGVSGLSMNIRHILVQLEMLKDLIAEIEGEMEKALGRIPYSSKLLSMKGLGVVSVAGIIGEIGDFKKFGTQPEIMKLAGLDLYEISSGKMKGQRRISKRGRSLLRKILYYAAIQTIRKNGILHEYYTRLTDRGMKRMMALVAVSRKLLGIIYAIVRDDSEYIVNFESMKRQVIKKAA

SEQ ID NO: 313077 - protein, 340 aa, unidentified
MEKQLFIGIDVSKARLDAALRPGNESFSVNNDQRGIATLIKQLKRPRVSRVVLEASGGYEIAAASELAAAGLPVAVVNPRQVRDFARALGQLAKTDAIDARVLAHFAELIQPETRPLPDAQSRELMALVARRRQVIEMLTAESNRHGRAAANLNRGIAAHIRWLRKQLTELDDALEQAIRRSPVWAEKARLLRSVPGVGSVTVTTLLAHLPELGTLSRRKIAALVGVAPFNHDSGKVRGSRAIWGGRAQVRAVLYMCALVAARRNPVLREFYARLRAAGKKPKVALTACMRKLLIMLNAIVRQQLPWNPEFAGAVPCPFSTAQAGARGDAVILLDSAVTA

SEQ ID NO: 313078 - protein, 404 aa, unidentified
MKGPIVSIDVSKGKSDYQAFKDLNVKYTGSRSIKHNKEGFDEIVNLVREMEKKLETEVCVVYEATGVYHRVLKKVLEDNNIKQFIINPLLSAKTRKNDSLRSPKTDKLDPKSIAKTYYNHSLHNSHKQETIYHELRELSRYYEDILVHIRKDKVAFRAQLDIVFPGYDTLYDDLYGPVALAIIEKYPHPEMLQKKKINTVSKVIQNKTCHRQAVSDTMADKAIEYSKTIYSGCDKDDIEVLILQRFIKKLNEDMAEAERTIGEMIKLAQELPDFNIIKSIPGIGDNLAARIIAELGDMTRFKKKNELVAFAGLDPRISESGQNDGDHMHITKKGNKRLRCLLYLAVTCSIRLKRDDNSIKDFYIKKKQQSNPMCSKAAKTACASKLVRIIYSMCKTGELYQYNK

SEQ ID NO: 313079 - protein, 429 aa, unidentified
MNCTQNKKIEQVKETTMIVGIDVGSEKHYFRAFNWRGIELTRKPVAFSNSMEGFNSFYNTIVELMQKSELEEALVGIEPTGHYWFDLGQFMGEKDIKFVMVNPHHVHKTKELDDNSPSKNDRKDPRVIAGLVRDGRYFYSYMPTGAYAELRNASNRRFVLVEEQTRAKNRLQKWIAVYFPEYKGIYTHIDAKGGMLVLKKAPTPEEIVRLGVEGIIKIWKDAKLRGNGHKKAMLILAAAMRSIGLKAGLTEAQMEIQDLIEDYELQTKRLERVNDLIKGLCQQVRYADKLLEIKGIGITTVAGFIAEVGDITRFDSTKELQKLAGLELVADSSGKHNGKTKISKRGRKRLRYLLFEAAISVVGKNEEFKEIHRYYTTREKNPLKKMQSLIVVACKLIRVFHAILTKGIRYDASKMLKDIRHPGEQLKAA

SEQ ID NO: 313080 - protein, 398 aa, unidentified
MLGAGHQQMERPMPKPNDLSRSLTAFEQNSTLIAVIEMSLSSWLVSGIVPGIERHPLKKLQTEKDALLKLLHRWRNEAVKAGCEITRIAVAFEAGRDGFWLARWLRMQDIEAYVIHPNSVAVSREHRRAKTDRLDTELLKRSFLGWIRGEPDHCSMAAIPKLEEEDARRPNRERENLVGQRTRIVNRMKACLIRFGIRTFKPTLRKAAERLETLITPEGVLLPPNTMAEMRRDMARLRFVMDQIKEIETTRLIQLEEAPKEGPQAMVRLLARVVGVGVETADMLVHEILSRDLRDQRAVARYAGLTGSPDESGKRSRDKGLAKAGNARVRRGMIQLAWRFLRFQRNSALAQWYRAVTKDARGAIRKTMIVAVARKLLIALWRMVTIGKMPENVTLRAA

SEQ ID NO: 313081 - protein, 368 aa, unidentified
MFNQRTAIGLDVHARSIRAAAIDTQTGEILEARFPGGNTPVTDWITSVQAEHGPVAVAYEAGPTGFSLARTIEVMGVPVTVAAPSKLIRPAGDKVKTDARDALLLARLLKLDELVAVRVATITEESARDLVRARDDARVELMMVRHRLSKLLLRHNLVYDGSVTWGSTHDAWLRRVRKNELATAGSGTLAAFDAAFDAVTLGLARRDRLDQQIGEMAADSEFTDVTNRLCCLRGINTLTGFALAVEIGDWNRFNGCTIAAYLGLVPSEYSSGTSRSQGGITKTGNTHARRLLVEAAWHHKPRYSPGKTMTDRWAKASSQAAARGDAGNRRLNRRWSVLAAHKKKHTVACTAIARELAGWCWSLAVMDE

SEQ ID NO: 313082 - protein, 373 aa, unidentified
MNDRNTTRFVGLDVHKETIAIAVADGALPAQVLSTIPHNFATLLKTLRRLGPPESIVCCYEAGPTGYGLYRQLRDAGYSCHVVAPSLVPVQSGCRIKTDRRDAAKLAHYLRSGDLTFVYVPDEATEAVRDLERARDDAKIAERVTRHHLSKFLLRHGRIYLGKTSWNPAHMAWIAQEVFELPAHRQVLADYREAVELAGARVARLTARMAEAVEGWDKAPLVKALQALRGIDLVSAVTLVAEVGDFRRFAKAGDLMAFVGLVPSEHSSGGSRRQGRITRTGNSHVRRIVVEAAWHYRRQPRMSKAIRVRNDRVSPGVRGIAWKAQKRLHGRLNRLLGRNKPACQAVVAVARELVGFIWAIAQEEVLLAPARVA

SEQ ID NO: 313083 - protein, 414 aa, unidentified
MDVVYTQCAGLDVHKKTVVAAIIVPDGQGGLHKETRTFGTMTVDLLALSDWLMGHGVTHAAMESTGEYWKPPFNILESNFEVMLVNAQHVKAVPGRKTDINDAEWLADLLRHGLLRASFIPPVGQRELRELTRHRSNFVRERATLVNRVQKVLESANIKLASVASDVMGVSGRAMLAALIEGHASPAEMADLAKGKLREKREQLVKALEGRVKPHHRFILTELLCQIDNVEEAVSHFDEQIQLLCVPFEAAIALLDTIPGVARQTAEIIVSEIGIDMSRFPSAAHLAAWAGVAPGNNESAGKRRSGKTRKGNQALGVALNQAAHGAAHTKGTYLSAQYHRLAGRRGKKKAILAVAHSILVIAYHLIKRQEPYRELGGDYFDQRRPEATAKRLVKRLQQLGYEVVIQSQPANVAA

SEQ ID NO: 313084 - protein, 339 aa, unidentified
MKLYSAIDLHSNNSVLVILDENDKVVYERRHPNELPVILAQLAPYKKRIQAVAVESTYNWYWLVDGLMEAGYKVKLVNTAAVKVYDGLKYTGDEHDARHLAHLLRLGVLPTGHIHPKEDRAVRDLLRKRGQLVRCRTAQILSIQSLVSRNTGKGITTDGVRNLDEAAISRACGGDAVKALAIKSNLAILRCLDEQIAAVEDVVLKQAKLKPEFKKLLTVDGIWNILGMTIMYEAGSMERFEKMGHFASYARCVSSSRWSNGKKKGEGNRKNGNKYLAWAFVEAAHYAVRYNERIRSFYQRKQAKTNKIVATKAVAHKLARACYHVLKEQTPFDEARAFA

SEQ ID NO: 313085 - protein, 337 aa, unidentified
MADAYILAIDLAKRSFQVCATDRGGTVLYNRTVSRAKLEQLLQSQAPSIVAMEACATSHFWGRFAEGFGHDVRLILPIYVKPFVKRQKNDAADAAAIAEAALRPNMHFVAVKSAEHQARAVAYRTHQCFVGQRTQMINALRSHLAEFGHVFAQGAAHVKEIRTVIADAALQLPDSVREISQLYLEQIEPLTQKIDTLTLKLREAVKVNAEMRRLCSVPGVGPVTAGAILAFAPDLKTFTSGRNFAALLGLVPRQRSTGGKARLGSMSKMGQSDIRKLLIVGAMSRIRWIVRKGVLPDNWLGHVLGRKPHMVAAVALANKMARIIWAMMTREENYRLA

SEQ ID NO: 313086 - protein, 402 aa, unidentified
MNAVGIDVSKGKSMITVMRPGKEVVIEPFEVSHTDSELIDLAKVIQSLDGEARVVMEATGNYHLPIAWMLHDAGIYVSVVNAMLIRNYGNNTIRKGKTDKKDAQKIANYAIDNWTELPQYFPEEDVRMMLKNCYRQYEHFSKIRTMMKNNLISLLDVTFPDANRLFSSPRRADGSEKWLDFIETFLHCQCVCGLTPAAFTKKYQKWCKKHGYNFSEDKALDIYASACGHVCVMPKTDDTEFMMQQAILQLKTVSKTLAALQQQMQTLAEKLPEYPVVMQLFGVGPILGPQLMAEIGDVRRFHSKKVLVAFSGIDAPPCQSGTMEVRSRSISKRGSSSLRRTIFLVMSVILQQKPLDEPVYQFMDKKRAEGKPYKVYMMASANKFLRIYYATVKAYLDALDAE

SEQ ID NO: 313087 - protein, 355 aa, unidentified
MESVKYIGLDVHQSTISVAVLNAEGKAVMQSVIATKATAVRDLLQGLRGVLHVTFEEGTYSAWLYDVVVGVVARVVVCNPRKNALLKSGNKSDQIDARKLAELLRAGMLSPVYHGEQSTRTLQQLVASYSALTEDTGRTMRRIKALYRSQAIACAGKKPLGKRHRGEWLARLTDSGQRRRAEWLYQELDAVQVLRREAKHAVMVECHKNPAAKLLRSMPFFGPLRAAVLIARVQTPHRFRTKRQFWTYCGLGLETRSSADYVEKDGQILRRRKPVYIRGLNWNYSHELKNVFKSAATTASAMDGPFRDFYESRVANGMLPAMARLTLARKMAAIALILWKKGETFAAEHLMPQAA

SEQ ID NO: 313088 - protein, 346 aa, unidentified
MMIIGCDYHPSWQQICWVDTLTGETEERKLEHASGEAEKFYRGLPEPAVIGMESTGNCQWFVEMATTAGHQVWIGDAAKIRASEVRQQKHDRRDAALILKLLLEGRFPRIWTPSGEEKDLRQLLIHRHKLVRIRVQVKNELQHLAMNQGVTRKGKLWSKAGEQVLRELPLKPWAGRRRADLLNVRKMLDGQIDLLEAAVAEVAQKNEKARLLMTQPGVGPITSLAFVLTMGDVSRFPRGKQVASYLGLIPREYSSGGKQRLGAISKQGNSFLRMLLVEAAQVAVRCDPQMRAEYLHRCHRKAKGVAKVAAARKLAIRLYWMLRTKRGYPEVVRVESSSRVPLVSAS

SEQ ID NO: 313089 - protein, 343 aa, unidentified
MDSYVGLDVSLKETSVCVVDGDGGILSEATVISEPEAIANYIKSAASGVERIGLETGPTATWLWHELKSFGLPVICIDARHAKAALSMQINKSDRNDAAGLARIMQCGWYKEVQVKRLSCHEMRAILNSRAQLIKVKRDLENQIRGLLKNLGLIVGKARGNVFHKRVEELLSKNDRLSVAILPLLQVREKVASEVADLSKKLLTVARNNEDIRRSMTVPGVGSITALAFYTAIDDPERFRRSRSVGAYIGLTSRRYASGEIDWSGRISKCGDAMLRSYLFEAAGVLLTRVPQWCKLKAWGHRLWKRIGFKKAKIAVARKLAVILHRMWRDETDFIWSSKEAAA

SEQ ID NO: 313090 - protein, 416 aa, unidentified
MDGFRWFVGLDWAREEHRICLLDGEGKQVAERDVSHDGAALSALCTWLLERTAAQPGEIAVAIETPRGPVVEVLLERGFAVFAINPKQLDRFRDRFSVAGAKDDSRDALVLGHSLRTDPHAFRRLAVDDPLVIELREWSRIYDELKAEQNRLTNRVRQQLWRYYPQANQLAEDVAAEWFLDLWLKVPTPEKVARVSEKAVARILTNHRIRRFDAAHVLRILRTPPLAVAAGTVEAATAHIRTLAARLRLVNQQIKEAERRLDELCAAFEAAAERASGQICEQRDVAILRSCPGLGRINIATLLAEATEPLRRRDYHALRVLSGAAPVTRRSGKSCIVIRRHACNDRLQKAVYHWARVAIQHDPTSRRQYAALRQRGHSHGRALRSVGDRLLSVLCTLLQRQVLFDPDYKTAHLAAA

SEQ ID NO: 313091 - protein, 309 aa, unidentified
MKPSLSQYIGVDVAKSCLDFDLPAPLDRIANTAAALAAALPGLPPGAHLVCESTGGYENALVAAAQAAGVPISVVPPQRVRSHARSTGRLAKTDRLDARLLSAYGRAHTPAPCRAPEPSRQQLKELVRVRAQLLELKKTEAGWREHPPALPLLQAQAQQREALLDAQLAEVEKAIRALVQSCPGRAELERMQQVQGVGEVTAWTVWAEVPELGQMESGQPAALVGLAPYARDSGQQRGPRFIQQGRPQVRRVLYMAAVTACQHNPVLKAFYRRLRARGKPAKLALVAVARRLIELLNLLLRNPNFVLAR

SEQ ID NO: 313092 - protein, 418 aa, unidentified
MTSHLTKTNYKAFVGIDWANDKHDLCIQDPSTGKREFSIIKHDVNEIDKWVKGLHKRFGSPIAIAVELTKGPIVYALQRYEFVVIVPINPTTLAKYRTAFKPSKAKDDPTDAELALELMLRYPNHFPPLNQQSVNMRKLMFLVEHRRKVVDDKQRVINQMINAIKQYYPQANEWFCKKDTHIFCDFITRWPTLQQAKKAHKSTLVKFFNDHGIHNCTIVDHRVSLIKKAKSLTDDKAVIDSHTMLVIFYIERIVNSMKCIQQYNKSILKLMDKLPDAPIFNSLPGAGAALSSRLLAAFGEQRDRFKSAKEVQQYAGIAPVTERSGQKSWVHWRWQCSTFLRQTFIEWATHSRLKSYWANLYYLQQREKGSSHQAAIRALAFKWIRIVYKCWQDGKPYNETQYLRALKDRGSPLLSVKV

SEQ ID NO: 313093 - protein, 359 aa, unidentified
MEKISNKQLDFTGQNIYVGMDVHHKSWKIHIYSDEFELKSLSQEPDVDRLSNYLQSHYPHANYQLAYEAGFCGFWIHRAFSAKGINCHVIHAADVPTTDKEKLRKTDKVDSKKIAKGLRNGDLNFIYIPDQQLELDRALLRSRHKLAKDTTRVKNRIKAILKLNGIKIPAGFPEKSKWSAAFVQWLKELEFANNAGKLVMQMQINELEFLKTQRKQVDEAIKQLSQTDNYTNNVKLLLSIPSIGVLTAMMLLTEIGDMGRFKRLDELCSYCGIVPNSHSSGENQDKGSLSRRGNSLIKKVLIECAWVAVRKDPALLLYYKHQLSNMIGQKAIIKVARKLLSRIRYVLMNQKEYVLGVIE

SEQ ID NO: 313094 - protein, 356 aa, unidentified
MSKILEDHYVGLDISDKTTAVCILDAVGNIVKEGFVPSEPDDLAKFLDDSGYGFRLIGLEASGIAIWLCRELLARGFQVVCVETHRSSAFLAAQKMKTDKNDARGLAQMMRCGLYRAVHIKSDESQRIKMLINNRRFLVEQRVDIENQIRGSLKVFGLKVGTVSERQYDGRVRELIIGDGELEVAILPLLEQRASGVERIKALEQMLATAAKHDPVCRLLMTAPGIGHLTAILFKAVIDDPGRFKRSRDVPAQLGLVPRKYASGETDYNGRITKAGDVMLRHHLYRAAATLTQTNARPCSLKKWGRNLRNRSSYKSATVAVARKLSIILHAMWVNGQEFDWSADRIGQTEKLAESA

SEQ ID NO: 313095 - protein, 418 aa, unidentified
MDVHRDFCGVAIAEAGAVRSGGRIETSPEALELFAASLARADVVALEVTGNAGEIARILRPHVGAVVVVSPHDTGISRARAKTDRLDARVLAKLLAAGELDALWMPDEWTRAMRRRLARRDQLVRARTRAKNEIHAVLIRRLAGRPPVSDVFGVRGRRWLSELELREDERETVAGCLRHVDFLDGEVAALDGAIASEALRKPEVLRLMTVPGVSVVTASTFVAAIGDIRRFSSARKLVGYLGLDPRVRQSGPGPARHGRITKQGSASVRHVLVEAVWTAVRSPGPMRAFYERVRARRGAQVAAVATARKLASLSWCLLTREQDYSFAQPSMTRRKIRKIELVAGAPSRKGQVPPGQGVRNKQIRAAERALAQQAEDAYRRTIADWKAVGPAKAGASVTPGRASQRPSKGKAARQTTSP

SEQ ID NO: 313096 - protein, 355 aa, unidentified
MSQEKYIGMDVHQATISVAVMDSGGKLIMECLLETKASTIVEFLQGLQGTLSVTFEEGTSAAWLHDLLKPHVSRLVVCDPRKNALLKDGNKSDRIDARKLAELLRGNQLHPVYHGEHGVRTLKELGRSYLTITQDVTRVMNRIKALYRSWAIPCAGATVYAPRHRAEWLAKITEPGVRVRAERLYQQLDLLQPVRLEARRELLAESHKHPGVKLLRQIPSIGPIRSALLVALLQTPHRFRTKRQLWAYSGFAVETHDSGEYRSVRGKLQRNRERMTVRGLNDNHNRDLKNLFKSAAVSASTRPGPLRDFYVARVEKGMRPTMARLTLARKIAAISLTIWKKGVKFDTQQLHRQAA

SEQ ID NO: 313097 - protein, 455 aa, unidentified
MNRKRSKARIDRKMLMVHPNAAAIDVGATMHMAAVRADRTPEPVRSFGTFTTDLHRLVDGFTECGVETVVMESTSVYWIPIFELLDARGFTVFLVNARDAKHVPGRKTDVSDAQWLQRLHSYGLLRASFRPKGQIAELRAYVRQRERLLEYAASHIQHMQKALTQMNLQLHHVVADITGATGLRIIRAILAGDHDPKVLAQLRDYRCHARAETIEKALTGSYRPEHLFALEQALALYDAYHEKVSACDVRIEAVLKELSIGRGRRSDSLLSPRRPRTNPVNGLAFDVRAALFALLGKDLTQIDGLGPYLSLKLVAECGDDLSAWASAKHFTSWLGLAPSNKISGGKVLSSRTRRCGSRAAALLRLAAVTVGRTDTALGAFYRRLSARVGKAKAVTATARKIAVLFYNAVRHGMEYVDPGASYYETRYRTRVIDNLHRRAKAFGFVLQPVEPSAVS

SEQ ID NO: 313098 - protein, 348 aa, unidentified
MITIGIDPHKDTHTAAAVEDSTGQLLGELTVPGTEKGHLELRSWAHEIAGDGGEVRFALEDCRHVNGRLERFLLGAEEVVLRVGTRLTAHARKTARTVGKSDSIDALAVARAALREPDLPRASIDPELRELKLLVDHREDLVSERTAVVSRLRWHLHDIDSGLEPFARSLNRDPVRRGLSRRLGRYGTGAQVRICRALLLRIGELTRAEAALHKEIAAMVAPMAPGLLAISGVGELVAARLLVEIGGAGRFASDSALARHAGCAPIEVSSGRTRRHRLSRLGNRKLNATLHVVVLTQARVHPPAQAYLAKKRAEGKSTKEAFRCLKRHLVRVVFRALNESAAPLAITE

SEQ ID NO: 313099 - protein, 421 aa, unidentified
MRKADTRKVRGVKDDTLIVAIDVGMEMNRGYCTTPDGRDTKPFKFDNTRDGMDTLWSMVIASKNRFKCNEVIVGYESTGPYGEPLVHYLMQKPVKVVQVNPMHTKKVKEINDNSPLKTDDKDPRVIADIIKLGRALSIVIPEGDAAYLRRLNNSRERHVRERTALVNQLQQLVFLLFPEFKKVIKDIKCRTPLYLLKKYPTPEAISVLDNHVLGEEMRKKSRGKFREHHADMLINLARNTIGIREGVSGLSMDIRHILVQLEMLKDLIAEIEGEMEIALGRIPYSSKLLSIKGFGVVSVAGIIGEIGDFKKFGTQPEIMKLAGLDLYEISSGKMKGQRRISKRGRGLLRKILYYAAIQTIRKNGILHDYYTRLTDRGMKKMMALVAVSRKLLGIIYAIVRDDSEYSVNFESMKRQVIKKAA

SEQ ID NO: 313100 - protein, 341 aa, unidentified
MEHCGIDLHLKSSEVCVVDEAGEANERATIPTTEQSFVRWFGKRAPMRICIEASGLSPWVARVLRGLGHEVIVANAQRVRLIAESTLKNDRIDAETLARLVRMDPALLCPIRHRREATQRLRGMLRVRRILVNNRTACLNTARGLLRSFGYRVPGQRPERLARALARGMVPEALCALVAPLVATALELDEKVEALDREVVEAGRAFPEVKRFQQVPGIGPLVALAYVLCIEDPSRFRSHRDLPSFLGLRPRMRESAERSHFGSITRQGDGEMRRLLVQAAHGCLRSRQDSDLKRWAEQLAGRIGKKKAVVALARKLAVVLHHLWVSGEDYQALRHEIAAAA

SEQ ID NO: 313101 - protein, 347 aa, unidentified
MIAIGADVHKQQCTLAVQRPDGKLSMLPSMDNTRENWLDLLTQLPPEAQIALEVSTSGHFVMSVLEEAGWRDRAHWVHTAGIDSLRKQKTDRLDAKRLARKLSVMEQDPLPEAWFPPRPIRELRLRARQRCWVAVLRTRVKNRVRSLLQMSGLRGTNPFTASGRTWLEQQKLSEATRESVEQLLRFHDFLTTERQKSETSLRGMEKDFPEIARLQTLPGVGHILSAVIWSEIGDLKRFDSPRALVNYTGLVPSLYESGERSVRGGITRQGPVWLRWALITAVNAATHGHNAFARRYRRLRRHKLPNVAKTAVARSITRCAYGVLKHGVDYQEQRWGRKAGIEMEQEA

SEQ ID NO: 313102 - protein, 369 aa, unidentified
MYIVGIDIAKRKHEAAVIDGEGTVIIKPFSFTNNCSGYNRLLAMLTKAKLPLDEVSFAMEATGHYWLALFTRLQKEGFRVQVINPVQTNSIRNFYIRQAKTDPRDALLIAEVIRFGHFSESTLHPENIYELRELCRGRHAIVSMQADVKRKVVALLDQVFPEYETAFTNMFGDTSMAILQTCPTPKELSEMPFEELCHLIEASSHKRFRMAKAQELQELARNSFGFAMAGDVFSTMIRLYAKHLDFLKQQVREMDRKIAEIMDTLDTPITTITGIGPTLGAYILSEIGDISRFSSAAKLAAYAGIDPTMRQSGEYNGVRNRMSKRGSPYLRHAIWLAASSAVLHDPALKLYFQKKRDSHLSTKQALLRC

SEQ ID NO: 313103 - protein, 313 aa, unidentified
MKPVPSNVFIGVDVSKERLDVAVASSGESMGFANSEDGIALLADFVKPLAPELVLFEATGGWEMNAVNHLAAQRLPLVVLNPRQVRDFAKATGQLAKTDAIDARILARFGQAVRPEVRPLKPVELRKLEALLTRRRQIVEMITAEQNRLVSAPEWIRVDIEELLEILKKRLAAINRDLNRLIRKSPLWREKDKILQSFPGVGPVMASTLIADLPELGSLNRREISALVGVAPLNCDSGTYTGKRKIWGGRAAIRSVLYMCTLTAIRHNPVIRDFYQRLRRAGKLPKVAITACMRKILVILNAMMRSHTCWQTT

SEQ ID NO: 313104 - protein, 353 aa, unidentified
MVKVKSKIFFKGKKIFVGIDVHKKRWVVTVRTYDLELKTFSMIPSAEELERFLVENYEGAVFYIVYECCFSGFWVYDYYHQRGYNIIVTPTNRVYRDGSIVKTDKIDSRKLAFQHSRDLLREVKVPEMKIREYRSLFRIYDKEKMRLGQILRQIRSILEVRNHPLKWERFNKEMVRKLKSVKFQEEIFNRKFSSLLMEYEYVQEQIKDTEERIKEIAKDKELSEKVRRIEKINGVGIVSAVRLVVYLFDMKERFESGEKLVHYLGLTPGEHSTGEQIVRSRTGLIGNKQLRSIIIQLAWVAVRKDGNLLDKFDRVYKSSGCKQKAIVAVARKLMMKVHSVIEKEEDYEINKAA

SEQ ID NO: 313105 - protein, 311 aa, unidentified
MTNDSIGIDISKDFLDAHRLSDGGTATFPNSLRGFRTLSAWLGCDMPARVVFEATGPYHRSLERALSGKFPLVKVNPLQARRFAQACGTRVKTDAVDARMLANFGNALSLEPDQPVDGEQIDLRELFSARGGLIKDRTRLINRLQTQTLALVRRQTKARIEQLTRQLKVLQHNINERLQACPGRARANTILRSIPGIGEVAASSILIEMPEIGSLRKKKAASLTGLAPMTQQSGKWRGKARIQGGRKPLRDALYMPALVATKHNPHMRDKYIAMVNQGKPKKVALTAIMRKLIELANALVKADREWLPNGP

SEQ ID NO: 313106 - protein, 341 aa, unidentified
METTRHIGIDLHRNKFTCCLQLGNGRNYLSEWKLENLPVFVKKLRPTDAVAVEVTGNTRLFYDAVAPHVARVVAVDPNQFRVISHSVKKTDPNDARSLALYLSKGLLPEVRMKEKTQAQIASLTQTRDTLVKLRTALKNKVNNILSAHGINLEKEALSSEKKLTEVLAMKFDPMIRIELKVIVEQIRSLNQSIAELEKTITEEGQKLEGHKNLTSIKGIGPLTGSILLSVIGDIHDFADEGKLAAYFGIVPRVSNSNETEQSGRITKRGSKLGRTALVQCALIAQRYSPYLKRFYEKTKARRGTGKAIIALARKLLGIVYRTLKNNWVFEDFPNFVLAEES

SEQ ID NO: 313107 - protein, 459 aa, unidentified
MARRNRTSPQPPTPPKRPSPRGAALQITHPNAAGIDIGANSHFVAVPPDRDDEPVREFRAFTADLMALADWLRACRVDTVAMESTGVYWIPLFELLSSRGFEVLLVNARHVKNVSGRKSDVLDCQWLQQLHSYGLLRGAFRPGDGVVALRAFMRQRHALLRTQARSVQHMHKALVQMNLQLTGVISDVAGVTGQAIVRAIVAGERDPARLAALRDRRVKASEADIARALHGSWRHEHLFALKQALAAFDFCGQQLAELDAQLEAQLQSLRLNEDEPAKGKKRSTARNAPKFDLRTRLFQMCGVDLTRVDGVDVTTALTVVSETGADLSRFPTSKHFASWLGLSPGTKISGGKLLSGRTLPNANRAAQALRLAAAALRTSKSALGAYYRRLCARMDKAKAVTAAAHKLARLIYAMLTRGQEYTDQGQDYFEERYRQRVVASLSRRAQQLGLKLVPQATTA

SEQ ID NO: 313108 - protein, 412 aa, unidentified
MDVLYPCCAGLDVHKDSVYACVRRIGPGGAVRETVQVFGTMTPELLQLADWLAGEGATHVAMESTGVYWKPVYYLLDERFELVLANAQQLKRVPGRKTDTQDCAWIAKLLQHGLIAASFVPPEPQRDLRELCRQRVQLGRQKAAVSNRIQKVLEDANLKLGSVASDVLGKSGRAMLRGLIAGETDPEKLAALALGRLRKQLPRLRSALTGRVTEHHRFVLKLLLDEVEMIEGLMTRLEERIGAVLGPFAEAVRRWMTIPGVDLRTAQAAAAEIGTDMNRFPSECHLSAWAGMCPGNDESAGKRRSGKTPKGSPWLKQALVQAAWAASHTKNTYLSAFYRRLAARRGRKRALVALGHTILVIMYHLQRNGTDYADLGGDYFERRDKDKLTRRLLRRLEALGMKVTVESTEQAA

SEQ ID NO: 313109 - protein, 376 aa, unidentified
MSQSTTVHVGLDVHKDSIDIALADAARETEVRHLGTVAGGTDAVTKALRRLVSAGHRLHIVYEAGPCGFALQRHLAALGWHCDVVAPSSIPRPPGERVKTDRRDAMKLARLSRVGELTPVRVPDSADEAMRDLVRGREDAVREQRNARHRLKAPLLRNGVAYSGRSAWSAAHLRWLATVRLPHAAQQIVFQEYLHAITEAGARITRHEQALRDALPTWTLSPVVTALQALRGVQLIAAITLVAEIQDFWRFASPRQLMAYLGLIPREDSSGPRRRQGAITKAGNAPARRMLVEVAHLYRYPARVSPVIARRQAQLPKAVTDIAWTAQTRLCSRFRRLAARRVPHNKIVVAIARELCGFVWAIAREVTPEPNSSNSH

SEQ ID NO: 313110 - protein, 415 aa, unidentified
MDVSSKTEFAAFVGIDWGDRKHDVCLQAAASGQRELSVLPHRPEAIAQWAEGLRQRFGGRAIAVCLEIAKGPLVYVLQRYPFLVLFPVNPTTLAKYREAFHVSGAKDDPSDAQLALDLLLTHPEKLTRLQPQSAAMRTLQQLVEQRRVLVQDVGRLTNRITATLKQYFPQVLEWFKDKDTLVFCDFLSCWPTLKHAQRARKARLTAFFHEHNVRYPHIVEQRIQAILTATALTSDTAVIEPNRLLVEVLVQQLRGLLQAVERFDREIDALAPTLPDFALFGSLPGAGPVFAPRLLAAFGEQRSRYASAAEVQMYSGIAPVTERSGSKCWVHWRLKCPKFLRQTFVEFAALSIPHCYWAKAFYDQQRDRGASRQAALRALAFKWIRIIYRCWQNRTPYDEVTYLNALKRRGSPLMN

SEQ ID NO: 313111 - protein, 391 aa, unidentified
MVCVGIDVAKDKHDCCILDSDGTVRADCFTIPNNMDGFKQLLQTIRDCTKKSDKIKVGLEATGHYSYNILGFLLDNDLAVYVMNPLHTNLYRKSLSLRKTKTDRVDARTIATMLLSDVDLKSYTDIAYHNEDLKSLTRYRFDKVQERAKLKQSVSRLATILFPELEQLVSSIHGTSIYALLGEYPGAKQISEVHLTKLTNLLTTASKGRYGKEKAIQIREAARASIGSVMPAKSLELKHTIKLIQELASEINEIEDSIQKIIDELNPPILSIPGMGVNSAAVILAEIGDFSNFSSPDKILAYAGCSPSTYQSGKLTNCYAHMEKRGSRYLRHALYNATKYVCYWNPVFAEYLAKKRAEGKHYNVALSHAMKKLVRLIYALQKSGKAYLAAA

SEQ ID NO: 313112 - protein, 365 aa, unidentified
MERIYIGVDFHARQQTTCYLKAKTGELVISELRHQDKEQVRAFYQQFPEPVIVGLEASGYSPWFEVLLEQLGCEVWLGHATEIRRRARWRQKNDRRDAELIWDLMVHDEFPRLHRPAATSREVLRMLRYRQKLIKLRTMAKNSLQALALQAGLAKGKQLFSRAGQEQFQRTAMSPVWQWQREHWFQLLQPLNAQLLETMVWFKAQSKDDVCVTRLRTHPGLGLLTALCLVHTLQPVSRFRNTRKVAAYAGFDPVERSSAERKCFLGISKAGSRLLRYLLVEAAQTAVRYDEDLQRFYKRLAQRRGRPKAKVAAARKLLIRAYIMLRDEIDYAEFRRRAVAARLARTGQRPNVPEVLIGQPASPDR

SEQ ID NO: 313113 - protein, 351 aa, unidentified
MNTQQTACPKLYIGIDIHKRSWKVHCATDLFAGKSFSMSPDPKQLHSYVSKHFKEYEVTVAYEAGCCGYHAHRCFESYGWRSLVVNPADIHRKGKEKHTKTDKIDAQLIARELKDNRLQSIIVPDRKREELRSLFRRRNDLVKDFRRIKSYIKMQLLYFGIREPEEFDNDHWSHKYRNWLDDIMFEYPTAKATLESRMRFFRFVDQELRDVSTQLRRYCKVNYKKDYLLLRSIPGIGGIVACGILCELGDLRRFNNIKHLAGYVGLAPSMYQSGNSQRTMGMTPRANRLLRSYFVEASWQAIRADPVMQAYYRKHQGKNVKSIIVKVARKLLSRTLAVIKTEVPYTIGVIE

SEQ ID NO: 313114 - protein, 381 aa, unidentified
MRNVCGLDVHKDNVFVCIDKEKGEKIQFKTGILTKDLDALRDTLVANDVTEIAMESTSVYWMPIWRVLENDFKLYLVNPYAIKQLPGRKSDIKDAEWIATCLRKELIRGSYVPDSTIQQLRQYNRRIFDINKQSVYIQNKIDAALQRCNIRIGNYISNVRAKSYCQIVDMLSEGKTSPELLILKVHKRTVNKWGRETILAALEGVVNKTDCRILKQLKEELDMLRKHKIECLVMLREICMENYKEQLLDIQTISGIGEQGAMQIIAETGVDMKAFITAAMLVGWAGLKPRNDESNGKFKSRSTTHGNKYLRKILIECAWGASRTQGCFFNKFSYHQTMVRKKNRQKVQVAIARKILVVIWNILEKGVVYNDVLEKNKTKDK

SEQ ID NO: 313115 - protein, 337 aa, unidentified
MERRYVGIDLHRRRSVVVTMDEAGEVLSSVRIANDPVAMSIAVAEAGEGAEVAFEATYGWYWLADLLKADGHHLHLAHPLAMRGMTTNRRVKTDWKDATLLADVLRMGSLPEGWIAPPELRELRELVRYRAKLVALRSGLKAQVHAVMAKNGILPARVEMFGPGGQAQLDSLDVPMNFTIRIESLRDLVEIYDREVAMLEREIHRQLKDDRGYQAIQKIVGVGKVLGAIFSAEIGDIHRFSSPERLCSWAGLTPKHRESDLTKHQGDITKQGSKLVRWAAIEAISGYRGGAKLRADYERIAQRRGKYRARVAVARKLLTLVYYGLRDGEIRCLETAA

SEQ ID NO: 313116 - protein, 359 aa, unidentified
MQRNKISFKGQKIYIGIDVHAKTWEVCVLTESGYKERHPQQASAKTLFDFLKKHFPDGEYHAVYESGFSGFSTYYALKEYGINCVVTHAADVPTTQYEEVMKTDKVDAAKLARSLRAGDIRPIYIREKENIDDRSVIRIRKTIQKQLSGYKARVKHLLHCNGVEIPERFARPGTHWSRAFIKWLKEDVVLLSSSRLSLDLLVKQVETIRQTLLDATKSIRRLAQTDRYRNNYELLMSIPGIGVSVAMCILTEIYDVKRFRNENQFASYLGLIPTCHNSGEKTASGEKTFRGNKHLGPMIIEAAWIAIYRDYGLGMAYARYKQSMKPQEAIVKIARKMSNIIFSVLKNSRKYEPYRWDKE

SEQ ID NO: 313117 - protein, 397 aa, unidentified
MKCDKYMGMDVHQATTVVDVVDADGKPVLETIVATEAAAIIRLVQSLSGPLHVTFEETTQAAWLYEVVRAYVTEVVVCDPRRNKLLGEGSKADKPDARKLAELLRAGMLRSVYHGHEATRKLKELVRAYETLSIDTERTMVRIKAVYRGRGIPTPGRGVYQLRKRDQWLEKLSEPGARQRVAFLYEELDLVRSLRRRAKQAMLVESRAHRAVSLLRTIPQLGPIRCALIVATVDTPHRFRTKRQFWSYSGLAVVTHMSSEYEIKEGRVVRSRKPIATRGLNRNCNRRLKEVFVGAATGGSQAEPYRSYLEKLKQNGHAGRDGAADPGAQDHHTGVDGVEERRGVRSQETELDDIAVLSGLPVARRIRPSSLVCSERHRVEGEDLQSRLSRLRLEAQA

SEQ ID NO: 313118 - protein, 402 aa, unidentified
MNAVGIDVSKGKSMVAIMRPFGEIVSPPFEIKHTTSDINSLVELINSVEGESRIVMEHTGRYYEVLAHQLSEANLFVSAINPKLIKDFDNDSLRKVKSDKADAVKIARYALDKWQNLKQYNVMDELRNQLKTMNRQFGFYMKHKTAMKNNLISILDQTYPGVNTYFDSPARSDGSQKWVDFASTYWHVDCVRKMSKNAFIDHYKNWCKRKKYNFSKSKAEEIYEKAKELVPVLPKDNITKLIIKQAVDQLNSVSTTIESLRTLMNETASKLPEYPVVMAMKGVGTSLGPQLMAEIGDVSRFTHKGAITAFAGVDPGVNESGSYEQKSVPTSKRGSSVLRKTLFQVMDVLIKTHPQDDPVYQFIDKKRAQGKPYYVYMTAGANKFLRIYYGRVKEYLSSLPES

SEQ ID NO: 313119 - protein, 340 aa, unidentified
MPLYGGIDLHANNSVVVLLNEQDQVIYQKRLPNHLPTILEPLSLHHGEIEGLVVESTYNWYWLVDGLMEAGYRVHLANPAAIQQYSGLKYSDDHSDARWLAHLLRLAVLPEGYIYPKAERAVRDLLRKRAHLVRQHTANVLSVQNIMARNTGARFSVKRIQELTKQELQSLLTEEPQVLAVTSSLAVLDCLKHQIKTLEQTVHKRLNHTPSYEQLLTVAGIGTILAQTIALETGAISRFPTVGNYASYCRCVDSKKISNGKRKGTGNVKNGNPYLAWAYMEAAQFALRFQPAAQRFYQRKLAKSRNNTVLARKAVAHKLSRACYYLMRDLVPFEETKAFG

SEQ ID NO: 313120 - protein, 355 aa, unidentified
MDSKKYIGMDVHKESISIAVMNGAGKMVMECVIETKASMILQFIHGLRGDLQVTFEEGTWAAWLYDLLKPHVTELVVCNPRKNASMREGSKSDRIDARKLADLLYMNKIKPVYHGEHGLRMLKELSRSYLTISKDLGRVMNRLKALYRSWAIPCAGTQVYAPRYRAEWLGRIREAGVRRRAELYYQQLDALRLVRQQARKELLVEARKHRATKLLRQIPGIGPLRAAHLVAVMQTPHRFRTKRQLWTYSGLGLETHDSAQYCVVERQLQRSNKPVTLRGLNTNHNHDLKDIFKGAAMRASTAAGPLHDFYEALLAKGRKPTMARLTLARKIAAITLIVWKKEVRFDANYLKQQAA

SEQ ID NO: 313121 - protein, 318 aa, unidentified
MLSFCGIDVSKDRLDVMVLPDEYSSSVPNDPAGWAILVEQLRGFSITAIGIEASGGYERGAVRSLQAAGMPVRQVNPFKLRQFAKASGVLAKNDPLDARMIASFVGIMPTRPAQRTTPAAEQLVEMLAVRRQLSAEKTAAENASRLLEDLMLQRLSRRRIARLAADIELLDKRLVEIVATDATLAHRYRLLTSMPGVGPVLACTLIALLPELGGMSRKQVAALVGVAPYAFESGTLKGRRCIWGGRANVRQVLYMAAMSASNWNPALKLFHDRLKGAGKLPKVVIVAVMRKMITTLNAMVRDDIAWAVSGRHSVTTAR

SEQ ID NO: 313122 - protein, 427 aa, unidentified
MKYTQNEKIFQVTEETLIVGVDIASEIHYARAFDHRGIEVGRLLKFSNDAEGFGQFTAWVGAIEEKCSKTRVMVGMEPTGHYWFNIAQQLKDHSMKIVLVNPFHVKRSKELDDNNPTKNDRKDPKTIAMLVKDGRYMEPYIPEGIYSELRTAMETRWQIVKQLNGIRNRMKRWLSIYFPEFNQVFGDWEGKAALIVLQDFPTPVRILEKGVEGIVGRWKQDKLRAVGRKRAMCLIEAARQSVGVREGIMAAENDMLNMLENYKLQIQQYERTMNMVEQLVKQIPGLDEMVKIKGVGLATAAGFIAEVGDISRFEHPKQIQKLAGLNIKENSSGKHKGKSSISKRGRRRLRSLLFQAIMPLVANNKGFQELHSYYTTRSQNPLKKKQSLVLLSCKLIRVFFALLTKGTAYDPDKMMNDIKRPLLQEAA

SEQ ID NO: 313123 - protein, 399 aa, unidentified
MTSPPATSRMLTIGVDSHKDAHVAAAVDQLGRILATTTIPTTLQGFVQLERWASGLGQVDRFGIEGTGSFAAGLTRWLQQRGYQVIEVTRPNRQLRRRRGKSDPVDAEAAARAVLAGEATVAAKTADGAVEMLRVLRVARRSAVKARTQAANQLASLVVTAPEPLRQQLRPLGPAQLVRTAAGLRPGPLTTPAAAAKLALRELARRTQRLSAEIQRLDAELARLTRTAAPGLLARRGVGAEVAGALLVVAGDNPQRLRSEAAFSMLCGASPLPASSGRTVRHRLNRGGDREANNALWRIVLVRMSCDARTRSYVARRTAQGKSKREIIRCLKRYVARELYQELRTVLGDDTQRDSSGSTRTRGRAADAVTTASLPALNGELPRLPAGASAINDQGGEPT

SEQ ID NO: 313124 - protein, 337 aa, unidentified
MKLKRIGVDLAKQVFQLHGVDSHEQAVCRKQLKRSQMLDFFRRLEPCTVAMEACGSAHYWARELRTLGHEARLIAPQFVKPYVKSGKNDANDAEAICEAASRPSMRYVEVKSAEQQAGQALHRIRSRLIRARTALVNEIRGLLGEFGLVESRHGIAATRRLAQTALDAQNGLPGQMRELLAELRGELDEHDARLSRLDDMIRRQAREDERVGRLMQVEGIGPITATALVSAVGDARQFRSARQFAAWLGLVPRQHSSGGKERLGSINKRGDTYLRTLLIHGARAVFRHCQDKADRRSQWLRQLVCRRNPNIATVALANKNARIVWAILSRGEGYRPG

SEQ ID NO: 313125 - protein, 421 aa, unidentified
MGNCAGVDWASEKHDVRVSDAAGEELLSASFAHEEAGLRSLCVALVRLKVELVAIERPDGLLVERLLDAGLRVLAIHPNQVAATRDRFRAAGGKSDRFDAFVLCELARTDAHRFRVLEPDSDETQALKALTRARRDIVESRTAASNQLHAELERFWAGPLGLFSDLDGQISLAFIKRYPSPADIRGLGEQRFAAFLKAQHYKGNQTPAVLLEKLRSAPTGRAGQAESAARRAIVLGLVNRLQGLRSELKALEKQIASAVRAHPDGKIFLPLFKDPQSVVTAAELVAEIGSCRERYPTRESLAADGGQSAVAIESGKRKVAHFRYACNGRLRAAICVLANSSRHHNPWAQALYASARDRGHDHQRAIRTLGRAWARVLWRCWQDGVPYDPALHRAYQRHITVLIPGEPGPILDIPATQRMAA

SEQ ID NO: 313126 - protein, 407 aa, unidentified
MPDYDWYVGIDWGGERHQVAILDATGARVAEHQVAHSGAGRESLVEHLARLGADPGRVAVAIEVPRGPVVDTLLMRGYHVFALNPKQLDRFRDRYSVAGAKDDRRDALVAASALRTDQLAFRQLQPDDPQVIRLRELSRTYDELLGEERRLANQLREQLWRYYPQALTHCPGADESWLWELLHEAPTPAHAQRFTRPALRALLARYRLRRITGDMLYETLQARSVTLTPGAAEAAAEHVELLLPRLRLVHEQRQQWERRMDALLDALGPPVEGRQEHRDVTILRSLPGVGRVVAATMLAEAWGLLAARDYQSLRAQSGVAPITKQSGKQRLVMMRRSCNHRLRTAVFHWARNSVRLDPRCRAQYQRLRQRHSQARALRSVADRLLSVLVAMLCSGTTYDVTRCPNAA

SEQ ID NO: 313127 - protein, 454 aa, unidentified
MPRRQRRTTRAVTTPVLHPHAAGIDIGATELYVCVPLDRDPQPIRRFGTFTEDLRAVATWLTQCGVTTVAMESTGVYWIPLYQILETRGVAVCLVNARHVKNVPGRKTDVQDCQWLQYLHAVGLLRASFRPPETVCAVRSLLRHRDSLVQLAATHTQHLQKALTQMNLQIHHVLSDITGVTGLAILDAILAGERDPQVLAGHRDRRIKASSETIAKALVGDYRSEHLFTLRQSLAAYRHYQQLIGACDAEVRTHLGTFASQIDPAVSPLPPSTGSRRTPRSTPSTPRFDLRTELYRILGTDLTQVPGLQTPTVHAIFSELGADLSAFPSGAHFASWLGLCPDNRISGGKVLSVKTRHVKHRVAYALRLAAQSLSRSQSVLGGFFRRMRAKLGAPKAITATAHKLARIVYHLLTTRQPYEESRLAAAEADHRRRTESRLRAQARVLGFQLVPVIE

SEQ ID NO: 313128 - protein, 305 aa, unidentified
MTFQKIHHQFKNDHSGFKEFGKLLDENSHCVMEATGCYYQQLATWLYSRSIKVSVVNPLSVKRFIQMRLRTSKTDKLDAQMIRRYGEAEQPKLWNPPSKLIIEATELHKFIELLVRQRAALKNKLHSLKSMGITRSPVVTSVRRQIRNLGNEITDLELKLESVIKEYQPDLLTRLCSIPGIGKRTAIFLIVLTHGFEKFETSRQLISYFGLNPIIRESGSSVRGKSRISKTGNTHVRNLLFMCAFTACKHNKSCSEIYQRITAKGKCKKLALIAVANKLLKQSLAIAKSGLYYDENYRSVYVNLG

SEQ ID NO: 313129 - protein, 335 aa, unidentified
MLYVGVDAHKAHSQMTVMDERGKVLERRRAASSREGMLEALAPHQGERMKAVLEAGYGWGPLYDWIGETAEEVLLAHPLKVRAIADAKIKTDRLDSEMLAHLLRADLIPEAYAPSKEVRAVKRVLRQRMFLVRIRTMVKNRVRALLSQHGVEPPPVSDLFGKKGLLWLKEEPELPEPDGWLLREDVELAETLKGKIRSTEGLIEELAEGDEAVGWLRSLPGIGEFFSVLIRHEVGEMERFPSPKKFASYTGLVPSTYASGKRITHGRLTKEGNKWLRWAFIEAVSPAIRCSPYLRAYYMRIKARRGTKDARTATARKLAELAWAVWTERREYEER

SEQ ID NO: 313130 - protein, 333 aa, unidentified
MFNYSFFVGIDVSKALIDVSYYLNGNVTYLGQYVNSKEGFQLLLDDLSKITPCPIDQWFVCFENTGSYSKELFYWLTSQGVPCREENALKISLSLGLRRGKNDKIDSQDICNYAFEKRDKIQPSATPKSMIIKLKCLLSRRDLLVKHRTALKVSLKEQKSSLEENFYTELEETNVEMIKYYDEHIKVLDDRIQQAIKSDSIAAKNNKLLQSIVGIAKVTSAFLIATTNNFESFTDSRKYACYCGIAPFSKSSGTKKGKSKVNHMANKKMKSLLSNGAISAIIHDPEISLYFKRKIKEGKVEGIVYNAVKNKLIHRAFAVIQRQTPYVKMMKYA

SEQ ID NO: 313131 - protein, 426 aa, unidentified
MNYTQNHKIAQVTESTLVVGVDIGSEQHYARAFDWRGLELTRKVFPFSNSLEGYQRFEKWVAELQESKGKDVVFVGCEPTGHYWFTFGDYVQSKGMKLVFVNPYHVKQSKEMDDNSPKKTDQKDPKTIAKLVVEGRYLYPYIPAGVYAELRAAMSSRERILKELSGTENRIQRWLKIHFPEYLIVYKQIHTVSGLMVLEQAPLPQDIIALGVDGINRIWREAKLRSVGIKRAKTLVEAAHNSIGRPGGRCSRTELILLLEDYRTKRQQLEAITAVLEEEVRKIPHIEQLLAIKGVGIVTIAGFLSETGDISRFTSPKQIQKLAGLELKETSSGKHKGRSSISKRGRKRLRKILFQVVLPLIRSNAEFRSVYEYYTTRIQNPLKSKQAMIAVACKLIRVFYAILTKGTTYDAHKLTTDIVRPQFQAA

SEQ ID NO: 313132 - protein, 487 aa, unidentified
MQVLYSRCCGLDVHQKTVVACVMITQPNGKVDKSIRTFATTTTTLLTLGDWLASLQVSHVAMESTGVFWRPIYNVLEDQFELILANAHEIKALPGRKTDVRDCEWIADLLRHGLIRPSFIPAKPVRVLRDLMRYRKSLVYQHTQQINRLHKVLETASIKLTSVVSDVWGKSGQSMIKAIIQGESDAQTLTELARGTLRGKLPQVQEALEGRIQPHHRMLLQQIFAQLQFLESSMQQVLKEIEAQMEPYQAVVELLMTHPGVQAVAAMGVVSEVGIDLSRFPSAKHFASWIGVCPGNHTSAGKRKHGKTTKGNAYLRALLAEIVWGISHTKDNYLSAKSHRLARRIGKTKAIVAVSHTVAVNFYHMITKRIPYRELGANYFDTVDRERLTKHTVKRLEALGYEVTLTPKDSKAVATPKLPPPPRSPQNSSACAHSLARRISPSAVTSSTARRWSMARPCLRTIHPIPPPSIRPPTPTEAMSPEVSVSP

SEQ ID NO: 313133 - protein, 340 aa, unidentified
MTQHKIIGIDLAKNIFFLFEINHKGKNLSRKKLQRSKLLSYIANKEPCTIAMEACSGAHYWAREFSQFGHEVILYAPQHVKTQRRKQKNDYNDAEAIAEVALYKRPHPVPHKSVEQQDIQSLIRMRRLLVTERTRIVNQVRGLISEYGIIMPKGAAAFRKAIPEILENDENQLSCILRELLSHQYERYLYIDEQVKWFDDKLNQTIKQFENAKRLMSIPGFGPLTSQAVAVWLGSGQQFKTGRDASAAMGLVPKQDTSGDKVILLGITKRGNTYIRSLLVHGARAALRRAKFKSDNLSKWMLELQERRGPNRAAVALANKLMRIAWAVITKNEEYRPTQS

SEQ ID NO: 313134 - protein, 331 aa, unidentified
MKNKQIVGIDVSKKTLDVLLLKSNHSFQVTNNPSGFVKLLQESIQVSGCSKDSLHFCFENTGCYSKLLSVFLQDAGITFNAFDALDIKRSMGLSRGKSDKKDARVIALYAWRRRDELVSTTLPGAVFDQLSALLSHREMLIKQRTALKNANKGHYNSYSENEFKFLKESQMRMIQQLTAEIKITECEILSHINTNAELKSNYELLLTIKGIGKILGFYLISLTHNFTKFTDPRKFACYAGIAPFEYSSGTSVKGKTKVHPCANKQIKSLLNMAAMSAIQLPGEFQMYYLRRTADGKNKMSTLNIIRNKLIFRAFAVVKRGSPYIDLHKFAA

SEQ ID NO: 313135 - protein, 450 aa, unidentified
MKMRPEEILDDDHELVVERVCAIDVAKASGKVCVRLPHPSWAGRRVSRVWDVEATTGAVTELADHLVGVGVEKVTVESTSDYWRIWFYLLESAGLAVQLVNAREVKNVPGRAKTDKLDSVWLAKLTEKGLLRPSFVPAAPIRALRDYTRLRVDLTQERSRYWQRLEKLLEDALIKVSCVASTLDTLSVRDMLDALIAGERDPRRLADLARGRMRTKRTALVEALRGRFDDHHAELVRMLLDQIDALNGQIATLTAHIELMLDTMPAPAPILDPTDHGPHDDASSMRALSVVDRLAEIPGVGPVSAQLIVAEIGMDMTRFPTAAHLVSWAKLCPRTIQSGPVHRGGKTGNGNPYLKGALGEAAAVAARTDTFLGARYRRIVKRRGKLKALVAVARSILVVVWRLLADPTARFHDLGSDYHTRRLHTERQLRNHLAQLAALGYRVTVEPAAA

SEQ ID NO: 313136 - protein, 467 aa, unidentified
MRQNSTKAGGKPARGGGVAEAQGLRRIRENAAGIDIGSQTHYAAVPPGRATPAVRRFGCLTPELHEMAQWLKACAITTVAMESTGVYWIPVAQVLEQYGLEIVLADATHIKNVPGRKTDVSDSQWIQQLHNYGLLRGAFRPQRALQVLRTYWRHREGLVQGGAQQIHLMHKALEQMNLQLHKVLSDVSGLSGMRIIRAILEGERDGETLAKLCDRKVRASAQTVAKSLTGDYRDDHLFTLRQAVELYDIYQEKMAACDREIQRQMAGFAPKADPRTLPPARPGKKPGRRRKNQPHFDLRAEMYRMTGVDLTQIDGISTLTAQTALCECGHDLSAFPSEKNFTSWLGLCPNNRITGGKVRRTRTRRVQNRLADALRVAAQSLHHSKSALGAFYRRMKAHLGPAKAITATARKLACQIYRLLKYGTDYVDQGEQRYEQQYRERLLHGMRKRAQQLGYDLVAVHSGEVVS

SEQ ID NO: 313137 - protein, 354 aa, unidentified
MLIIGCDYHPSFQQIALVDTDTGELQERRLEHREEAEKFYREVAVQGMKVRVGMEASGQARWFERLLAELNIELWIGDATEIARKRERKQKTDRQDAQHILHLLLKDDFPQIWVPSWENRDLRQLLWHRHRMVQARTRIMNQLQAVALNEGVRCKKRLWREKGREQLVSFRLAPWASRRRHDLLQWLDRLNPTIGALSQAIEQEVEKCPEAQRLRTHPGVGPLTALAFVLIIGKPDRFQCGKQIASYLGLVPLEDSSGNRRRLGHITKQGNSLLRFLLVEAAQVTARSLPEWRSKYVHLTMRRGRKIAKVALARKLAVRLYWMMRKGWDYEQLKKFGSHAGQPGNRDGVKQNIE

SEQ ID NO: 313138 - protein, 445 aa, unidentified
MVRRTIGIDLAIRGDHVARVFDDGQPAGRPLRFRLTSASLTGFVARVTGDLAEGATITAVMEPTGMSWFPVAHWLRRAGIAVIRVKGQRVKALRRYLSEHTKTDAVDAYVLGAMPGFGSVALDPVYVPSAEQHALQRLTKQRHRLDSLVCSGKRRLIDLTRWACPALEAVLPDLRTTLSLALLERYLDPHEVLRVRRATLVRFVGENASGNHPHSGPFVETLVDGLRAAARETITLHGTAVDFALLQAEVGFEVAQLRLLETQIKELDRRIEALYGALHPSDALRSIPGIGDRLAPLVLGVLHDRARFGNERHIRGFCGLFPTTSASGGAERPRQRITQAGNDRMKRALFLAADTARHIDPDLAAVYWRLMVGRGHHHKQALCAVATRLVNRISMVLRTGRAYELRDREGGPITVAQGRAIVNEHFCIPDEIRRTRRRNPVPIAA

SEQ ID NO: 313139 - protein, 350 aa, unidentified
MLIIGCDYHPSFQQIAFVDTSSGELSERRLFHREEAEQFYGKLKEQSVPVRVGMEASGHARWFERMLRDLQFELWIGNAAEIRAKRVRRQKTDRQDAQLLLRLLMEDRFPRIWVADAENRDLRQLLWHRHRLVQMRTRVMNQLHVVALNEGLRRKKALWRQAGRQELESLALAPWANRRRQDLLDLLDQLTPKIQQLTQALEEEVEKRPVTRRLMTHPGVGPLTALAFELVIGTPERFHCGKQIASYVGLVPSEESSGNRRRLGHISKQGNALLRYLLVEAAQVTIRTQAQWRSRFFHLAMRRGRKIAKVAMARKLAVHLYWMWRQGCDYGHLQKLGSHAGEPGNPYGVR

SEQ ID NO: 313140 - protein, 400 aa, unidentified
MSGSTSGFDGFVGIDVSKDKFDACGITRDAEKLFQCSATMDRKGFEKLKDHLGVVSASSVLIGMESTASYHVNLFSYLVSEGYTVLIINPLLISNYVKMQLRKTKTDKKDAVVIALFLLANGSTLIQRVTPSLISDLRDLSRQRESLVDEMTALKINIKRLLNITFPELEHMTLVFTKSMLKLLQQYPSAFALRSADLVQLSQMLIADSYGRKREAFATELIKTARSSIGINSPAKEIILKQQVTLLLHLEDALQEITGVLIEMSRKLMEEDINILTSIRGIGNKSAVNFLVEMGGDITQYDDSGKIIAMAGLDPAVYQSGQHEGKGRITKRGNRHLRRIIWLMTTRVIHYSDMFKVYYLKRRKEGLPYKMAVLATAHKLIRVIYAMLTQRTTFCPQVNS

SEQ ID NO: 313141 - protein, 375 aa, unidentified
MREKVRFLGLDVHAETIAVAIAEPDGEVHSLGTIANRAESIRKMMKKLGPVAQLRACYEAGPTGYVLYWQLAELGVKCEVIAPTLVPVKAGDRVKTDRRDAEKLARSYRSGDLTAVWVPDESSEALRDLVRAREAAKQDQLRARHRLSKFLLRSGQRPARDVKTWTQIYMAWVRQIRFVQMAQESTRLDYLHEVDHMSERVARLDHAIAEAARLAPAELQEVIKGLQALRGIAHISAVTIAAELGEFSRFQGARQLMGYSGIVPSEDSSGERTQRGSITKTGNAHLRRIAVEAAWSYRLRPCVGPALRKRQEGVADEIKEIAWKAQHRLHRRYCRLAANRKDERKIITALGRELLGFIWAIGIKAETAARQRMAA

SEQ ID NO: 313142 - protein, 399 aa, unidentified
MNTNILGLDIASKSCQVSLVTSDLKEVFNELFRNNQNDKDRLLLRIPHSCMVIMESTSHYHLPWARLLASHGHRVFILNPLMAKRMQTGTHCLRQNKTDKIDAYQLALLGTKEASALKNYEFKLGSNINSIRQLCKTYDLHRKALTELIVSAKMLLEMMIPEFGELDLAHNKRLSDLFLSIDSYDSLRRLHKKTIAAYACSASDLVLAVIRNPISTESEFDAYLPSLQCRLKVIQSMRAVLTETQAAIRTAAKSSPKVRADIKLAKTIPGFGPKTTAPIIASLPSNWTEWAQSKRDTARKLQAFFGFDPRKRESGKWRGTEHISKRGPLLARTALYQVALCGRLHDPYLAAIYERKRQEGVHHGIIITHLMRIQLQRLVAILVSRQAFVPLAVNSAQAA

SEQ ID NO: 313143 - protein, 367 aa, unidentified
MKKISTAGAKQIRNFREQKLTIGLDLGDRSSWYCVLDEAGEVVLEQRLGTTPKALKEVFGKMPRSRIALETGMHSPWVSRVLSELGHEVIVAHARNVRLIGESRRKDDRFDARTLARLARIDPQLLAPVQHRSAQAQVHLMVIRARAGLVRARTSLINTARGLTKSYGERLRGCSPHNMNVEKAQSLSPELQAALEPLLAAIESLSERIYEYNQQIEKIATNSYPQVARLKQVKGVGTLIALTYMLTLEDAQRFRKSRDVGCYVGLQPGRRNSGQSEPQLHISKEGDPYLRTLLVQGAHHILGPFGADSDLRRWGLKLAERGGKNGKKRAVIATARKLAVLLHRLWVSGEAYEPLRNSRPVPLPAAA

SEQ ID NO: 313144 - protein, 323 aa, unidentified
MQGKVLPEPNAMTPIYVGVDVCKDRLDVYIHPIGLRLEFANSPEGIKRLKRSLTTHEVALVVMEATGKLHRAAHRSLHSGGLAVAVVNPLRSRLFAEAAGALAKTDRIDCRMLAVLGESLGPEATAPASEFMENLQELARCRDAALAARTALLNQLGVTTARSAAVEIKRQLRAANTAIENLGAEIERLIAADPLLARRMSILTSIPGVGTITAIALIVGLAEIGSLSAKEIAMLVGLAPIAWDSGQSSGARHIAGGRATVRSALYMAAVSAARFNPALKTFYNRLIARGKKAKVALTAVMRKLVILANTLVRESRPWEPRHA

SEQ ID NO: 313145 - protein, 369 aa, unidentified
MGDRIGYVGLDVHKEGIVVAVAEGGARGEVREYGRIANTRSALDGLARKLGREGVKLRFCYEAGPCGYGIQRQLSAGGHDCVVVAPSLIPKRAGERVKTDQRDAVSLARLDRAGELTAVWVPDPGHEAIRDLVRARLDAVHALRRARQQLAGFLLRQGCHYRRPAWTKLHHRWLAGLKFEQAMHHLVLEDYIAAVEAAEARRDRLTAQIAAMLPDWTLAPVVAALQAMRGMALVNAATLIAELGDLSRFANPRQLMAYLGLVPSEHSSSASVKRGGLTKAGNSAARRLLVEAAWTYRFPARVSRELLLRQEELPKAIREIAWKAQTRLCARYRRLARTGKPANVVTAAIARELAGFVWAIARQVTIPAR

SEQ ID NO: 313146 - protein, 316 aa, unidentified
MNTKTNQSINIGVDTGKFQLDIYIRPLDIFFTVSNNEKGINEAISKIKKHQPERIIIEATGRLEMPFIMACAKAGLPFVIANPVHVKRFAGAIGQRAKTDKLDAKLIAHYGEAIKPPFSQLKPENMQLMSDLVARRNQLLVMQTMEKNRLQILPKELATTIKPILTAFKNQIAKIESKIVKLIESCPEYQTKNHLLQSMKGIGKIAAASIISNLPELGYMTNKQASALVGVAPINRESGRFKGMRKIQGGRHQVRTVLYMAMMSAIQSNPVFKSQYQKLVAAGKPKKVALIACVRKMIVILNSMLRDGVMWEAPKV

SEQ ID NO: 313147 - protein, 358 aa, unidentified
MDQRKYIGMDVHQASISIAVRDSSGKLVMDSVIETKATTVLGFIKGLNGSLWVTFEEGTSAAWLYDLLKPHVTKVIVCDPRRNALLKAGNKNDRVDARKLSDLLRAGLLTPVYHGGPGVRTLRELGRSYLTITKDLTRVMNRLKGLYRNWAIPCAGQQVYSPRHRAAWLEKLCEPGVRRRAEWFYEQLDTLVQLRREARKEFIAESQKHPASQLLRDIPRLGPIRAALLIALVQTPHRFRTKRQLWAYCGLGLQTRASGEYQFRGGQLQQSKKNPAVRGLNVNHNRDLKNVFKGAATRTNAASDPLSEFYQSLLASGMKPAMARLTTARKIAAIALTIWKKGERFDPEQLKRKPGLSV

SEQ ID NO: 313148 - protein, 394 aa, unidentified
MKLVGIDVGKNSHHFCVMDKENGEFNVTPTSFSNNKEGFDFLINSLKPYSKKSILLGMEDTGHYHVALLKFLLSNGYTVALINPKTTDLTRKMEGGITKNDKLDTITICDVLDTPERKKQYRITKVDRFDLYEQRQLTRHHHNLKEELNVYCNRLQKSIDLVFPEFNTLFSSKYSIVYMNLLKTFGSAEAIASTDIRTIRKCFEIKGRGNRISLTPEKLKECAKNSIGISSEVETIQIKHLVSQITLIKEQIAEIDKKIEEFSITNNSPILSIPGISHFSGTSILAELGDIGNYSKPSQIIKFAGVAPYHYESSQYNAQHTGITKKGSKYLRKTLYQIILTVINNNPVFKKYYRLKISQGKGHRCAQGHCIRKLLRIIYHLLETGQSFDPALLR

SEQ ID NO: 313149 - protein, 341 aa, unidentified
MEFYSGIDLHTRDNVVCVIDEKERKLVRAPNDLPSILSLLEKVPRRPAVAIEATLNWYWLVDGLQEAGYKVKLAHTMGLYMISGAKVKTDRRDAFSLAKLLRLDAIPEAYIYPKDTRPIRDVLRRRTRMVRLRAEAYVAIKRKFQQYGLPYSDKAIQSADEEELLRWFEHPGIRAALEMELERIRLYSRELKTVEKYILGTVRNKPIFEHLQTIPGVGKILALTIYYEVGDIARFASARQFCSYARVVPGMAQSGNVIRRGRGSKQGNPHLKWAFNQAAAISVRHYGYVRSFRQKHLDRRRSKARRLISLSIVAHKLAIAAYHVLRDEVPFNKELMFGKAS

SEQ ID NO: 313150 - protein, 415 aa, unidentified
MAMLVLYARCAGLDVHKKTVVACLMLTAASGKVIREVRTFASTTAGLLALAAWLTSQQVSHVAMESTGIYWRPVFNVLEGSFQVILVNAQHMKAVPGHKTDVKDSEWIAELLRHGLLSASFISPKPIRDLRDLLRSCKTLVQQRAQAITRVQKVKDSANIKLSSVACDVLGTSGRDMLDALLAGVSDADTLAQYARGRLRAKLPALREALDGRVDATHRLLLRQQLNLIDFLQAEIEKARGEIDEPLTPYEGQLSRLMQIPGIGRTAAATILAEIGVEMSRFPSAKHLASWAGVAPGNKQSGGKRLRAPTNKGNTHLRAVLAEVVWVISHTHDNYLSAQYHRLARRIGKKRAIVAVSNSVIVIIYHMLRSNQDYHDLGPHFFETLDTERQRSTAVRHLEALGYKVTLQEKQEVRA

SEQ ID NO: 313151 - protein, 451 aa, unidentified
MSKRKYNRKTKHLLTQNIHTDAGGIDIGAEELVVAVPPGRDSQPVRTFPSFTSDILEMRDWLVSCGITTVAMESTGSYWIPSYDILEEAGIKVCLVNARHVKGVPGKKTDVCDAQWLQQLHTAGLLKASFRPTRVVVAVRQLVRYRSQLVKDTGRHLQHMQKALTEMNVKLHHVFSDLDGVSAMRIIESILAGERDPETLWKLRDKRCRATRETFDKSIQGDWQESQLFILGQCLNTWKQTRESIEACNEKIKSLMDGVEKETGDPPPQAPGAQRRAGKNDPGFDVYQTAYHYYGVDLSSIDGIGAGAITTLMSEVGNARDLLTNFKSGGHFASWLGLCPDNRISGGKVLSCKTRRVVNRLAAALRMSAQGVMNSKSEMGNYCRRMKARLGKAEGTTAVAHKLARLIYALVQSKEPYDEAKAFQINAKTKARRIKSLKKMAKSLGMQVAPA

SEQ ID NO: 313152 - protein, 363 aa, unidentified
MNQVLNTDSIVVGVDVHKYGHTAAAVDCFGQEMGNLNFSNDLLSDFCSWMLSLGKKENIIVALEDANGYGVFIVKALTEAKFTFRYVPAILTERDRKRSTHHDKSDIKDAKRVAKVILTKYEETLPARESIATKSEIDTAVNLDLLLSERRDIVNWKSILKNQLHALLHQCFGDHYKDGYSKTFGKKACITYTKELKRRVKKDPNDFLAQSTVRRIERLILLTEQLVIIDKKIENISKDVPDVKRLSGNIHGCGVSTAATIVSQVYTIKRFSTKAKFAKYAGIAPTEKSSGQRGRLYTSPFGNRILNKAIHRIALSQISGNGDERGKIYYRKKLSEGKTKLWSLRCLKRQLSNRVYHVLKHAD

SEQ ID NO: 313153 - protein, 410 aa, unidentified
MELLHRRCCGLDVHKETVVACLRLVSDGKVTTEVRTFKTTTADLLRLSEWLAANDCTHVAMEATGVYWKPVWHILDDAEFELVLANAAHVKNVPGRKTDVNDAMWLAELLAHGLIRASFVPDTQTQEMRNLLRTRKQLVREQSSHVLRVQKTLEDANIKLDSVLTDLMGKSGRAMIEALIAGETNPAKLASLAHRRAKASPEEFREALRGRVTKHHRFLLRLHLNQIDALNAAVATIDAQVEANLGPFRTAVEQVISIPGIKNLGAHVIVSEIGIDMSRFPSDAHLISWAGICPRNDESAGKRRSNRLRKGAPWLKTTLVQCAWAAVKKKDSYLQAQFYRIKARRGPKKAIMAVAASILTAIYHMLKDGTMYKDLGRNHFDRRSTDQQKNRLVKRLTELGYAVEIKPLAA

SEQ ID NO: 313154 - protein, 361 aa, unidentified
MDKYIGFDIDSNKTSVCIVQKNKADKYTTIGPDAESAKRFLANEKKDGCRVHLVFEISGQAGFLYDSLVGCVDSITVANPDKMTWIYRTAKKNDRMDARKMAVLLSIGEIPAVHMPSKEVRQWRMIICHRKKLLAGAVTAKNRIRALFKSQGISKPGHKGKWWNIRNRSWMRGFCNESFDAENLWRIQLDNLLNELEMMEEHIASVTGYLDGYLEKQAGGKLLMSIRGVGPRTAEAVLAYTDDVERFEGGKEYCSYFGVTPKLDESGSSRRLGHISKKGPSVVRWVLVESSWKVIRYSPAFRAFYERVRAGQKGRKKIAIVAVARKLLSIMRAMQLTGEMFNEGLVSSLDYGKIEGLRKTA

SEQ ID NO: 313155 - protein, 486 aa, unidentified
MKTTRERKPEKAKAAAGRAPSKWQRMSRKQRRELTRKIQADDVSLEVVHPDAAGIDIGNECHYLAVPSKRDSEQPVRRFGCVTAELQAMAEWLKQCGIRTGALQSTGVYGIPVYDILEAAGLEVYLVNARETKNLPGQKTDVQESPWLMKLPTYGLLRNSFRPTAEIRRMRNYWRQRNDLIQSAGRHIQRMQKVLTERNVQLAHGISDWSGVTGQAIVKAILGGERDPHKLAELRDPRIQATPEQMARSLEGNWQEDLLFILRQEHEAHEFCHKQIAACDQELKEYLNQQEDRSQGAPLEEEKRKNRRHNKKGHKPQQFDMREALFRMTGVDLTRIDGIDVMTAATVISEAGWDMSKWRTQNHFVSWLRLCPDNQVSGQKIIGKGRLPTNNRLTTALKIAATSLKQSETYLGAQFRRLRTRLGSPGAIQAMAAQLARLVYGMLRYGMRYVDRGAQVYEEQHRQRQILFLKRKAAELGLKVVETAAA

SEQ ID NO: 313156 - protein, 324 aa, unidentified
MTDTMLGIDVSKKTLDANSARGQRKQSRTFANSAEGWQQMLTWLKAMGSKQAHVCMEATGHHSLGLALALHDAGHVVSVVNPAQIRDFARTKLGRNKTDKVDAALIREYAEMFKPEPWAPPSPAMRRLCELQTVRAGIVGSRTEWKNRIGSGLGDQAATTLATATVAHFTSQLEAINRAIAETIDQDAELRGRRDLLLSVVGVGETLAALLLVEMPAPGVLRRSGEMVAYAGLNPSQHRSGTSIDRPTRISKIGNAALRSSLYMPALAAMRFNPIVAALAVRLKSFGRLKPKQIVVAAMRKLLVLCFGVLKTGKRFDPSFATPA

SEQ ID NO: 313157 - protein, 326 aa, unidentified
MVNQLGSIVREGVVDSEPEAIAAFVRLNAPGAVRIGLETGPTATWLWTELKQLGLPVICIDARHAKAVLKMQINKSDRNDAAGIARIMQTGWFKEVRVKDLDSHSVRALLASRALLVKIKRDLENQIRGLLKNVGLVIGRAKFNVFTVRAEELIEDRPELMAVVGPLLKARQAIEQQTDDLDRQVLKLARHDAQVRKFMTVPGVGPITALCFKATIDDPTRFKRSRSVGAYVGLTTRRYASGEIDWTGRISKCGDAMLRSYLFEAAGVLLTRVPKWSALKAWGMRLAKRNGLRKAKVAVARKLAVILHRMWIDGTEFNWSKKEVAA

SEQ ID NO: 313158 - protein, 342 aa, unidentified
MQISTIGIDIGKNSFHFVGFDARGGIVVRRQCSRTQLIRALANVPPCLVGMEACCGAHYLGRILIAQGHDVRLIPPQYVKPFVKSHKNDLLDAEAIGEAVQRPTMRFVPLKTMEQLDLQAIHRLRTRLVARRTAVINQMRGFLLERGVAVPVGRCALGERFPEVLDNPALGLSVRFCRLLQQLRDEWRLLDDDIDEADQEIRTLAHGDEACERLMQVPGIGPLTATALVAAVGNGAAFAKGRDLAAWLELVPRQHSTGGKTVLRGISKRGNAYLRCLFIHGARSVCRHHRQKPHRLGRWLTNLEARAHPNVVVVALANKLVRTAWAVLQRNTHYDGRLLANA

SEQ ID NO: 313159 - protein, 411 aa, unidentified
MRLFVGDDWAEDHHDVEVMDEAGKVLAKRRLPEGVAGIAQLHELIGRHLGEDADAAEVIVGIETDRGPWVTALIAAGYTVFPVNPLQASRYRERHGVSGAKSDSGDAHMLADMVRTDSHQLRPAAGDSAEAEGIKVLARTHKTLIWERTRAVQRLRHQLREYFPAALEAFEDLDAPDTLELLGKAPDPARAAKLTRAQVSAALKRARRRNITDKATAILAALRGGQLGQPPPLTAAYAATTRALIAVIATLNEQVKVLQGQVEENFGRHPDSEIYRSQPGMGAILGARVLGEFGDDPHRYADGKARRNYAATSPITRASGKKKVVAARFVHNDRLVDALNAQAFTALNASPGARAFYDSLRGRGIEHNDALRRLANRLVGILHGCLKTRTLYNEATAWSHRENLPQSSVAA

SEQ ID NO: 313160 - protein, 387 aa, unidentified
MSPPNDLSRSLVPFEQGTTLVAVIELSQSSWLIAGFVPGIERQPLKKMAPDEAALLRLLHRWRDEAIQNGHPITRIAVAFEAGRDGFWLARWLTKHGIEAHVIHSSSVAVSREHRRAKTDRLDTAMLIRVFLGWLRGERGHCAMVAVPTLEEEDAKRPSRERENLVGERTRVINRLKAALARLGIRGFNPKLRKAPQRLESLRTPEGFPIPPNTLDEMRRDLARLAILREQIKAIEQARLERLQQAPETKPNAMIRLLASIIGVGIETADMLVQEVLSRNLRDRRAVGRFVGLTGAPDESGSRRREKGLAKAGNARVRRGMIQLAWRFLLFQKDSALAKWFRSRTEGPNGARKTKMIVALARKLIIALWRMVNTGEVPHGVVLRQPA

SEQ ID NO: 313161 - protein, 326 aa, unidentified
MKSKVGVDISKAKFDVALLLDGRKYRSKVFGNDPAGFRAFMAWLDANVAGGSGNVHVCMEATGVYHEGLALFLDQAGIDVSVVNPLLVKRFVESEGARSKTDSADSKALARFAEQRNPEIWEAPSPAVRRLQALVVRLETLKDIRLAESNRLDVAHESVRESLTHIIAQLDASIEQVRAQIRQTIDDDPDLKTRSSLLETIPGLGDKTIPQLLAYIGRPERFKNVKALIAFAGLAPLIEKSGSSLNKTRGTHPLGSAGLRHALYFPAMVAGKYNPVIARFWQHLKAQHKPGKVIVVACMHKLLAIAYGVLRSGKPFDPGIAVHART

SEQ ID NO: 313162 - protein, 394 aa, unidentified
MKLVGIDVGKNSHHFCVMDKETGEFNVAPTSFSNNKEGFDFLINSLKPYSKKSILIGMEDTGHYHVALLKFLLSNGYTVALINPKTTDLTRKMEGGITKNDKLDTITICDVLDTPERKKQYRITKVDRFDLYEQRQLTRHHHDLKEELNVYCNRLQKSIDLVFPEFNTLFSSKYGVVYMNLLKTFGNAETIASTDIRTIRKCFEIKGRGNRISLTPEKLKECAKNSIGISSEVETIQIRHLVSQITLIKEQIAEIDKKIEEFSITNNSPILSIPGISHFSGTSILAELGDIGNYSKPSQIIKFAGVAPYHYESSQYNAQHTGITKKGSKYLRKTLYQIILTVINNNPVFKKYYLLKISQGKGHRCAQGHCIRKLLRIIYHLLETGQSFDPALLR

SEQ ID NO: 313163 - protein, 328 aa, unidentified
MEQELHFIGIDVSKAKLDVDVLRPDGRHRSKKFTNTPKGHEELLSWLRSHNVAPAHVCMEATSTYMEDAAASLSDAGFIVSIINPALGKAFAQSEGLRSKTDAVDARMLAEFCRQKRPAAWEAPHPLERALRALVLRHQSLTDMHTQELNRRETAREVQMPSIDAHLLWLEAELKRLEKQIKDLTDDDPDLKHRRKLLDSIPGIGEKTSAVLLAYVGLKERFGQARQFAAFAGLTPRQHESGSSVNRASRMSKAGHVSLRRALYMPAMVALYKTAWGKAFRARLEKNGKGAKLIIGAMMRKLAQVAYGVLKSGRPFDATLHQENACVA

SEQ ID NO: 313164 - protein, 340 aa, unidentified
MTQHKIIGIDLAKNIFFLFEINHKGKNISRKKLQRSKLLSHIANLKPCTIAMEACSGAHYWAREFSKFGHTVLLYAPQHVKSQRRKQKNDYNDAEAIAEVALYQRPHPVPHKSVEQQDIQSLIRMRRLMVTERTRLINQVRGLIAEYGIIMPQGKATFRKAIPEILEDVENQLSPILRELLPHQYERYLYIDEQIQWFDNKLNQTIKQFDNAKRLMSIPGFGPLTSQAVAVWLGSGLRFKTGRDASAAMGLVPKQDTSGDKTILLGITKRGNTYIRSLLVHGARAALRRAKFKSDNLSKWMLELQERRGPNRAAVALTNKLMRIAWAVTTKNEEYQTKQS

SEQ ID NO: 313165 - protein, 430 aa, unidentified
MKSNTQNAKIEAITEKTLVLGIDVGSETHYARAFDYRGIEYSKKPFKFSNTEAGFATFKEWILDLKERHEKDKVVPGMEPTGHYWFNLGKFLQDNEMKPVLVNPHHVKKSKELDDNNPTKNDRKDPKVIAGLVREGRYMIPYLPEDVYADLRTASNIRFQLQAELTRIQNRISRWFNIYFPEYKTVYGKPDAKSGMLILKAAPLPEDILTLGIDGVNQIWRDAKLRAVGKARAKTLIEAAEHSVGSKEGAVSARMEIRMLLEDYESRNTRLQEVMVLIEELVRKIPMAEKLLEIKGVGIRTVSGFLAEVGDISRFNNPKELQKLAGLALVENSSGKHKGETTISRRGRKRLRYLLFEVAMSLVSKNQEFRELHNYYTTRRLNPLKKMQSLMAIAAKLIRVFYAMLTKGVDYDPKKMVSDIKRPAVYLQAA

SEQ ID NO: 313166 - protein, 347 aa, unidentified
MRFYQEQHRHTCGIDLHGRNLYLCVLDQQGDIRLHRKLRCDPELFLRTIAPYRDDLVVGAECIFCWYWMADLCADQGIPFVLGHALYMKAIHGGKAKNDKIDSKKIAVLLRSGAFPYAYVYPREMRSTRDLLRRRLHFTRKRAELLTHVQNTFTQYNLPKPSERLTKSDNRERIADLFDEPALRATIRADLSLIDHYDDLIPELEHTVLQLARVHDPDTLRLLMSIHGVGKVLGLTLLYEIGDIGRFPSAQDFSSYGRLVKCTKESDGKALGFSGAKIGNAHIKWAFSEAAVCFLQHNPAGQRYLQRLRKKHSKGKSLSVLAAKLGRATYFMLKQRTAFDRNRFLGH

SEQ ID NO: 313167 - protein, 344 aa, unidentified
MDHFAGLDVSVKETSVCIVDDTGRITKEVKVASEPEALLKVLGNPAYRFKRIGLEAGPLSQWLFSALAEAELPVVCVETRHMQAVLKAQINKTDRNDARGIAQMMRVGLYRPVHVKTLRSQKLRMLLTHRKLLQSKAIAIENDLRGTLRNFGLKVGMVGKVRFEARIQELVENIPDMAVLVESLLIVRRALREQIVILHRRLLAIVRDDEVCRRLMTTPGVGPVVALTYRATVDVPARFRKSKAVGAVFGLTCARYQSGEIDWSGRISRCGDEMMRVMLYEAAQSMMRSKKWSWLKAWAMQIARRRGMKKAIVALARRLAVIMHRIWVDGTEFRWTREQAAAAA

SEQ ID NO: 313168 - protein, 340 aa, unidentified
MNEITRVAIDTSKSVFTLHAVDARDQPVLRRNLRRQDLVPFFAKLPPVTVSMEACGGSHYWGRTLQALGHRVRLIPAQYVKPFVKRSKNDRNDAQAISEAAARPGMQEVAVKSADVQARAMLLTVRELLVRQRTQLVNALRGHATEMGLVAPVGGKGLAMLRSEIEADATLPEAATEALRLLGREVDQLEARLAAIDKNLLAQHKADPDSRLLSAIPGVGPMSALSFSRMVDATQFESGRHFAAWLGLVPREISTGGKQRLGGISRAGNERLRQLLVLGATAVIRFARPGRPGVSAWLLALLERKPRKLAAVALANKMARIIWAMLTRGEDYRLAKPVVA

SEQ ID NO: 313169 - protein, 377 aa, unidentified
MADTNLICTVAIELSQSRWVIGTLAPRGTKVLINAVPGGDGLRLMEYLGRLKERLAEEFGEPVELKVCFEAGYDGFWLARFLRDRGVEVYVLDASSFLVSRRGRRTKTDRTDVEAMAFTLQALLAGNSGVCRVVPVPTPEVEDAKRIGRERTRLASERTRHVNRIRGLLALHGIRRVRALWGGDWRNQLDQLVTGDGRLLGRYLKAEISREFERLHLVLSQIKVLEGERRQTLLDPASTFPDKSKVATLTKLAGVGELSATLLVAEVFHRKFQNRRHLASYLGLAPTPYASGDMQRDQGISKAGNKPARTLLVEIAWTWMRHQPTSVLTTWYRRRFAESGARNRKIGIIAMARKLAIALWHFVEQGVIPPGAVTNGR

SEQ ID NO: 313170 - protein, 356 aa, unidentified
MSREVKYIGMDVHKEANVIAVLNDGGKLVMESIVETKASSILQFIHGLRGELHVTWEEGTWAAWLYDLLKPHVHQVLVCDPRRNALLKEGNKSDKVDARKLADLLRTGMLRPVYHGEHGLRTLRELGRSYQTISKDLNRVMNRVKALYRGWSIPCAGTQVYAPRYRQEWLDKIEHAGVRRRAELLYEQLDGLQALRRTLRPELLAESRKHKASKLLRQIPCIGPIRAARLLALMQTPHRFRSKRQLWTYSGLGIETHDSAQYCYVNGQLQRSKKPQQIRGLNRNHNHEMKEIFKGAATRASCGVGPLRDFYVALLDKGMKPEMARLTLARKIAAIALTLWKKEERFDTEQLKAQAA

SEQ ID NO: 313171 - protein, 449 aa, unidentified
MPHAGVLTRGDRRRNERLARLRSIVRRDYAVVAVDLASAKQAVVVTDHDSVVLGRRMFTGDAWVIDDVLDWAVPIAAAAGFAGVVLGCEPTGHRWKPLLDRARARGIELVCVSPMLVHRGREEEDFTRDRSDFKDATIIAKKVSELRCYVPYQLDGHWCRLRHLGARRDDQLVAAGAARQALRDLLECAWPAVLRTAADPLEALTWRAAMAVSTHPEQITAMGYEAFAAAVTAELGRWGGVRRNLRILRAIWAAAQAPGGVGAERDATCERAADTLRDWHRALGEITDVETRMLAVLDALELTELVTTLTGLSAVGAAAILAQTGDPARFDCARTWVKHAGLCPRANESGAFTGTTKVSGRGRPGLRTAAWRAVWGALRHNPVYTARFQHLTSRGANPLRPGQARAAIAAALLRQLFIIVTRRVAWDPAIAAGHPAAGHPGAEVAPQAA

SEQ ID NO: 313172 - protein, 415 aa, unidentified
MDVLYERCCGLDIHKKLVVACMITPGPKGTPRKEVRSFGTMTADLLVLSDWLEEQGATHVAMESTGVYWKPLFNLLEDRFALVLANAQHVKQVPGRKTDVKDCEWIADLLRHGLLRPSYVPDRSQRELRELTRFRTTLVRERAREVNRIQKTLEGANVKLGDVASDVLGTSGRAILNALVAGTTDTARLADLAHGRLRDKHASLERAVDARMGAHQRFLLAEQLAHYDALNQSIERVSAEIAERVRLFEPIIERMDAIPGIGRRVAEILVAEVGTDMSRFPSAAHLASWAGICPGNNESAGKRKSGRIRRGSPWLRTALVEAAHAAVRAKNTYLSAQFRRLAARRGAKKASVAVAHSILVIVWHLLQHDCQYVDLGTNYFDEHDRQQVARRLVKRLEGLGYRVALDSLPASASAA

SEQ ID NO: 313173 - protein, 414 aa, unidentified
MGSGCKFCIGGMNVNCVGIDVSKGKSMIAVMRPLGEMVIPPFEVGHTDAELCELSRRLGGLEGETRIVMEATGNYHLPVASFLYDSGFYVSVVNAMLVHGYGNNNLRRVKTDKKDAVKLANYGLDHWLTLPRYIPEDEVRLMLKTTYRQYQQCTKVQTMLKNNLISLLDTAFPDANRLFTSPTRADGSEKWVDFISTFWHCECVCGLSEKAFTAKYQKWCKRHGYNFSQDKALDIYASACGHFSVMPKNDTTKILVEQAVSQLQATSAALAALRNEMQSLAASLPEYPIVMGMFGVGPALGPQLMAEIGDVRRFHSKKALVAFAGIDAPPYQSGQMEIRSRSISKRGSAVLRRTLFLVMSAILRCSPADEPVYQFMDRKRTEGKPYRVYMMASANKFLRIYYATVKQYLDSLEA

SEQ ID NO: 313174 - protein, 432 aa, unidentified
MKYKMQQKQNQRIQQITDCTLIVAADIAKQTHVARAIDFRGIELGRECVFNNDDEGLTKLVTWMKELQRLHSKTDIVFGVEPTGHYWFPLGAFMQELGVRFVLVNPHHVNKSKELEDNSPTKNDYKDAKVIASLVKDGKYTEPKLPTGVYADLRILMNLREKVMVNLGQVQRRIQNWLDRFFPEYTQVFKDWEGKASLITLRKCPFPQDLVSLGASEIVSQWKSGGVKRAVGMKRAKRLVATAEKSIGLKEGLTAARLELKALLEQYDMFTRQRDEIMAQVEQLLNQIPGTKEMLSVPGMGITTLAGFLAEVGDLHGYDHGQQIIRLAGLNLKENSSGKRKGKTGISKRGRSRLRALLFRAILPMVAKNSEFKALHHYYTTRACNPLKKKQSLIALCGKLIRVLHTLGTKQVQYNVEDLLGPIRKSQMQIAA

SEQ ID NO: 313175 - protein, 451 aa, unidentified
MSKRSGARAGLPVINEYAAAIDIGSRFHVAAVAPDLCTESVKTFQAFTGDVEHMADWFLSLGIKTVAMESTGVYWVPVYEILETRGIDVIVANARDARSVPGRKTDINDAQWLQRLHACGLLRASFRPGRDIAALRGYLRVRERLLEYAAAHIQHMQKALTFMNLQLHHVVTDITGVTGMKILRAIVRGERDAEVLAAMRDVRVRASAETVRDALIGNYQPEHLFALKQSIELYDFYQTRVDDCDVEIERVLTGLKMDKKEPIDPLPAPRTKTRQPNAISFDTRPLLHQITGIHLTQIHGIGPYLALRLISECGTDLSRWPTAKHFTSWLTLSPGSKISGGKVLSARTKKTANRITAQLRLAAVTVGRTNTALGAFYRRLASRIGKAKAVTATARKIAVLFYNAMRFGMVYQDPGSDLYEKEYRERVIKQLQRRAAHFGFRLQEASGPSVS

SEQ ID NO: 313176 - protein, 443 aa, unidentified
MAKVDLDVHVSRASMQFRMGTGVLTASAYITPLEVKEKMYRINVGIDVSKDDFEARAKNDRNQEVMSSRTYSNDKEGMLALKKDGDNLKEEYGEKLLYGMESTGIYHRALCQFLREQGEDVKVFNGLETKGIKDSKIRKTKTDEIDAGCIAEALILATEPSHDRSKDPLLEQIREQERLRARLMKKYTKCKIQADRALDMICQGYTDVFNDIFCQSSIEIIKETVRKTRLFEVDKEKMTDILEEYMDRQDAEEKAQLLKKIFQNAVVPKNVRDACITEIHMLIQQYQLFRKQKERTDRKIEKLLKEYDPYMSSVPGLGPVTVATILGELGNPSRFPTGKQVTAFAGLDPSVKQSGKMKKEGKISKRGPPHLREALYNATISAVRHNPVCKEFYDRLIKKGKCKKVARVAVARKLLLIAWSVEKNQKEFYVPSYVSEEYISKEN

SEQ ID NO: 313177 - protein, 476 aa, unidentified
MAKRKLSTFERLQRGERLLRRERRELQRQLESCDAELKMVHPDAAGIDVGNASHFVSVPAGRDREPVREFGSWTADLRKAADWLKSCGIRTVAMQSTGVYWIALQEVLEQAGLEVFLVNAQGTKNLPGRKSDVQECQWLMKLHTYGLLRNSFRPPEEIRGVRTIWRQRSRLVEEAGRRVQQIQKALTTMNVQLANAISDLSGVTGMAIVRAIVGGQRDPYALAKLRNSRIQASEEEIAHSLEGHWREEVLFELQQVVEGYDFHQKQIAECDVELERRMGKLGSHPTLEDKEKEGKGGKKLGKKPRKNQPGFDLRAELHRIFGVDLTRIDGIDVMTAQVILTELGPDLSGFPSEGDFSSWLELAPRNDITGGKTIRKKARKSKNRVANALRMAAEALSRSDSYLGARYRKFRGRMEGQPAVKAMARYLACLVYRLLTKGQEYVDKGAAHFVQKHKQREMANLQRKAAELGLKLVAAQ

SEQ ID NO: 313178 - protein, 372 aa, unidentified
MKSTTKFVGLDVSKESISVAVADAGQGPVRFLGNLPNTPEAVRKLVVRLGKPEELLVCYEAGPTGYGLYRLLRELQVTCIVVAPSLTPRRPGDHVKTDRRDALRLAQLLRAGELTPVWVPDEEHEALRDLVRARHSAKLDLKRAKQALNSFLLRHDVRMPNGKRWTKTFMRWLDTLSFAHRASQVAFQEYLHAIRELETRIERLEAEMCAIAQDSRFGPVIQAVQALRGVALVTAITLVAEVGEFSRFRSPAQLMAYAGLVPREHSSGVQTRRGGITKTGNSHLRFVVGEAAWSYRRKPAVKAALRKRQEGLDPEVLSIALKAQERLHRKYWHLVGRGKAHGVAVSAVARELLGFVWAIACYVEAKAQKQAA

SEQ ID NO: 313179 - protein, 408 aa, unidentified
MDENTGFDIWCGLDVGKQSHHACALDTAGRRVLDKPLPQDQTKLEELFTRLEGHGRVLVIVDQPNTIGALPIAVAGSMGIQVAYLPGLAMCRAADLYPGSAKTDARDAFIIADTARTIPHTLRRIDADEETLAELRVLVGFDEDLAAEATRLSNRIRGLLTQIHPALERVVGPRLTTKQGLAVIEQLGGPQGMAAASKSRLLKVITKAYPHRAQDFADAITAALAEQTVTVAGTAAAEQVLPQLAASLRQTLDQRHALAAQIEQVVDAHPLAEVLTSMPGVGVRTAARILLDVGDASQFPTAGHLAAYAGLAPVTRRSGTSIRGEFPARSGNKHLKRALFLSAFAALRADPTSKAYYDRKRAQGKKHNAALICLSRRRCDVLFAMLRNREPYRTPAPNPEPSPTPLAA

SEQ ID NO: 313180 - protein, 422 aa, unidentified
MNRTQRRCIGLDVHRDFAQVAIWQAGQVVQAGRFDATPEGVREFAAGLGPADEVALEATGNTWAIVTVLASRAGRVVVANPAKTRAIAEAKVKTDKVDAAILAQLLAADYLPAVWMPDAATSALRRQVLRRAHIVRQRTRLKNQVHAILHRNLVPRCPAADLFGIKGRSWLAAQDLPPDEGAAATALLRQLDFHAQELALIDADLGRVALGRPEVLRLMTIPGVDATVALSIVAAVGDFTRFRTPERLVSYLGLNPRVRQSGGQPASHGRITKAGPAHARGMLVEAAWCASKAPGPLRAFYQRVRARRGMQVAVVATARKLAVLCWHLIIKEEDYAFALPSLITHKRRKLELRAGAPPARGRKGRSASYSLKAVRAAERDLAAQGEAAYRTMVAAWQPTRPADKKVTGATASKGTRLIKPTG

SEQ ID NO: 313181 - protein, 407 aa, unidentified
MDQDYRFFVGIDWGTKIHRIVLLDCEGRAIEQYDAEHTGEGLQDLVAKLIRATACSPEEVAVAVETSWGALVETLLEHGFAVFSTNPKQVDRFRDRFTVAGAKDDTRDALVLACSLRTDRRSFKLVETDAPEIIRLRELSRFEDELKSELRRATNRLWQQLHRYYPQALKLSPAADDLFLWDLLRHAPTPSAGAKLSVVRIEKLLSSHRISRFTAEEVRSTLRTSALNLAEGAAEAASEHVLLLLPQIALLDQQLREVSRRIKELLKALEAVGSTDVSILLSIPGIGPGITATLLSEASRPIRERDYQSFRCFAGAAPVTKQSAKRKMVCMRHACSPRLRQALHHWSTRSIVCDARSRLHYDRLRAVGHQHARALRGVGDRLLAMLIAMLKQQTRFDPLRRQAARVP

SEQ ID NO: 313182 - protein, 310 aa, unidentified
MEKVYAGIDVSKDRLDVAVAPNGKTWHFSNDEAGISQLLTTLKQLAPELIVLEPTGGYEVPLVVALASESLNVAVVNARQIREFARVVGRLAKTDEIDAAIMASFAETIKPKARPLGDEESRRIKAKVSRRRQLVDMITAETSRLDKMHHEEVKLDILAHIQWLREQSNKIDDDLKKAIKNSPIWREKDELLQSVPGIGKVISATLLAESPELGTLNRKQIAALVGVAPFNCDSGAMRGKRMIWGGRAPVRSALYIAALVGTRYNPVIRTFYQRLLATGKAKKLALVACMRRLLTILNAILKNRQAWHYA

SEQ ID NO: 313183 - protein, 350 aa, unidentified
MNVNHYIGFDVHKKSISYCLKTADGRIVEEGKMRATRDALRQWAREREEPWRGAMEATLFSGWIYDALKPFAAELQMGHPAMMKAIGASKKKNDKLDARKIADLVRCDLLPACYVAPPEIRELRGMLRYRNLVVNQATRMKNKMSGLLMEAGAEYNKQRLHGKKYFTQLLDTVEEVPESVKDMLRLSRGAMEMFETTQQQLLAKLRKDPLLVKRVALLTSIRGVGEVTALTWALEVGDPRRLTSVSHAVSYCGLTSALVSSAGKDQRGPISKQRNAHLQTGLIEAAKMAPRWNPQLAAVHARELERGNRNRATLAVARKLVAYLLAVDKSGQPFQIRNQPAAAMTEEKVA

SEQ ID NO: 313184 - protein, 457 aa, unidentified
MGHARARKIPARMVEDEDYQLRHEKVAGIDIAKAKADVCTRLPPAREGGRRASRTEEVPAAAREILELGARLLAGGVELVVMESTSDYRRIWYYLLESLGLAVQLVNPAHARQLAGRPKTDRLDCQWIARLAEMGLLRPSFVPPPEIRALRDLTRTRLQLVRDRTREWQRLEKLLEGALVKLSSVVHSLAGTRSARVILQAIADGETGPGTLAGLAHGNVKGGRAAVRASLEGMQVQGRHRALIRLHLDHITWLDRMIPAVEDQIEAALDAIPAAWGVTADGVPCPGPGPGAAALPAADRLAEVPGVSPALARAIIAETGLDMTRFPTPAHLVSWAGLAPVARQSGPRNRKPKKGQGDAYLRGYCTQAAAGAAGTPTFLGERITRLSRRLGPNKAKCAVARSILIIIWHLLADPAARYSDLGPGWHDRKTSRERKIATHLRQLQALGLHVELTDTAA

SEQ ID NO: 313185 - protein, 331 aa, unidentified
MKKWNRVGVDVSAKELVVAIEALGRREAPIVLTNDADGHRKLIKLATKRGASAQVVLESTGTYGLDLALALHRAKRVEVMVANPRAIAHFARASLQRSKTDRLDAETILEFAMRMPFEPWSPPAPHILELRALSRRVEALSKTVVQEKNRLHANDQSEALSEFVKQDIRELADLLESRITRLRKQALRVIEQSGELAQAFAHITSIKGIAEASGITILAELAVLPADMTTRQWVAHAGLDPRQFQSGTSVHKPARISKTGNAHIRRALFMPALVAVQWEPHIKAFYEHLLDRRKTKMQANVAVMRKLLHAIHGMLEHDQDFVGEKFFAMKG

SEQ ID NO: 313186 - protein, 342 aa, unidentified
MKITTVGIDLAKSVFQVHGVDQQGKPVVQKRLSRQQVLRYFAQLPPCLVGMEACGGAHYWARKLQAQGHTVKLMAPQFVKPYVKANKTDAADAEAICEAVTRPSMRFVPIKNAEQQSVLSLHRARQGFVRARTAQANQIRGLLAEYGITLPQGIGHVTNRLPGIVEDAQNDLPGVFRELLERLRVHLIELNRQVQELEVLIDAWHRKSEGSQRLAQIPGIGPLTASALVASIGDARNFKNGRELAAWLGLVPRQHSSGGKVLLQGISKRGDAYLRTLMIHGARSVTRVAEKKSTPTDRWTTDVLARRHKNIATVARANKNARVVWALLAHERDYNVDYKWAA

SEQ ID NO: 313187 - protein, 320 aa, unidentified
MDEGGRTAVNRNVPGGRETLLNVIGDLPAGTPVAFEAAFGWGWLLELLQDHGFEPHLANPLQCKAIASARLKNDKVDAATLAHLLRADLLPEAWIAPQQVREQRAVLRHRAQLVRLRTLIRNRIHAILADHGCDRTSSCWSAPGRQWLEELPLTAVSRMVVANMLETIDALQVVIDRVEVHLAQTAKADPRVKALTALLGVGRLTALTILAEVGDVSRFDSARKLASWAGLTPTVRGSDRTVRYGHISKQGNPWLRWIMNEAAQTAKRSPDYIDTYVRITHRRGKKIATMAIARKLLARAWHVLSGAEEAARAKEACTTA

SEQ ID NO: 313188 - protein, 349 aa, unidentified
MEHYAGIDVSLELSSVCVVDAKGKIVKEAKVPSDPEALVLFFTGLGFVVERIGIEAGPLSQWLHAGLAKAGFETVLLETRHVKAALSAMTVKTDRKDARGIAQLIRMGWFRPVHCKSTGSQEVRALLVARKLLLGKLLDVEFSIRGILRGFGLKMGVVTRNGFDARVRELCAGQAILEQIARSMLAARCALQTEYTKLHKAVLSIVRGDAICRRLMTTPGVGPVVAITFKTAVDDPTRIAKSKAVGALFGLTPKKYQSGETDVTGGITRVGDESVRAALYEAANVLLSRVTRFSALKRWGMDIAKRRGLKRAKVALARKLGVILHRMWVDGTSFRWTKVASGDEQPARA

SEQ ID NO: 313189 - protein, 343 aa, unidentified
MEICTLGIDLGKNTFHVIGLNDRGKVVLKRCFARRQLLLFTSNLGPSLIGMEACCGAHRLGASLAAQGHQVRLIPAQFVRPFVKGNKNDYLDAEAIAEAVQRPRMRFVPIKTDDQLDLQALHRVRDRLISRRTSVINQLRAFLLERGVTYRKGRAYLKRQMPSILEDAEVSLTPRMRDLLDRLWQEWKSVELQIEELSGLIQAIAQQDAACQRLLTVPGVGPLVSTAMVAAVGNGSEFRKGREFAAWLGLVPKQHSTGGKSKLLGISKRGNPYLRRLFVHGARSTFLHLNRENHRIGSWMNQLEARTHQNVAIVALANKLARIAWAVLAKGEPYCATPNLAEG

SEQ ID NO: 313190 - protein, 404 aa, unidentified
MIFVGVDWAEAHHDLAVKDAAGKTLAKRRITDDLEGVRHLHEVLACYTDDPSEVLIGIETDRGLFVSALRSAGYRVFAVNPFSASRYRDRHSSSGAKSDPGDAEVLADLVRTDSHNHREIAGDSELVEAVKILARAHKALIWTRQRQTNSLRSILREYYPGALAAFADGLNAKQAIEVLLIAPTPELGRGLSRSRIASALRRGGRKRSIEERSTEIQQALRAPQLEAPALISNAFGETVKALASVIAELSRQIESLEAELASHFDKHPDAKIILSLPGLGTVLGARVLGEFGDDPDRFASAKCRKNYAGSSPITRASGTKRVVLARYARNRRLADALYLWAFASLTASPGARALYDRHRDAGDSHHQALRALANRFVGILHGCLVSGTLYDETVAWETRAEIAA

SEQ ID NO: 313191 - protein, 369 aa, unidentified
MEEVTDEPLYRDRVCGIDIGKAGLVATIRVPSDRDRSRRAQDTRGFGTTRREVLALADWLRSWRVPAVVMEATGDYWKGPFYRLEAEGFECVLADAKQVKNLPGRPKRDPADSRWLAACFERGAVTHCFVATGEFRIIRLHTRYRRELTEERTREKQRAEKLLESAAIKLSSVLSDLHGVTGRDIMDHLIAGDRDPRALAQLARARARRKIAELEEALEGAEFFTTGHAALLKVMLERIDRVAAEIARLTEVIEQLLAPYEEQLQQAESMPGWGRRAAQDAVAETGVDMSRFRTGGHLSSWAGKTPLDNQSGKRTGRAKSNKGNRYLAAITGETAAAVSKTQTREGARYRGWRGAAARPRPWLPPGTPS

SEQ ID NO: 313192 - protein, 338 aa, unidentified
MKLYGAIDLHSNNNVTVLIDEQDQVVYQKRLANDLPLIAQQLSGYRDRLQGIVVESTYNWYWLVDGLMDQGHKVHLANTAAIQQYEGLKYTDDHSDARWLAHILRLGVLPQGYIYPKEERAVRDLLRKRGQMVRQRTANLLSIQNLITRNTGSSIRSNRIKTLDAEAVDALLPNEDLALAVKANLAMIQCADKQIDILERTVTERIKLRAEFSFLKTVAGIGQILALTIMLETGEIKRFLSVGDYASYCRCVGSQKLSNGKKKGSGNTKNGNKYLSWAYVEAANFAVRFNAKIKSFYQRKKSKTNGIVAIKAVAHKLCRACYYIMKDQVAFDVSKAFA

SEQ ID NO: 313193 - protein, 369 aa, unidentified
MKKTIKNIGLDVHKNSISIGIADEGRDGEVRYFGKIDNSMDQLDKVIRRLVSEGAVLRFAYEAGPCGYGIYRYLTNNDMDCAVVAPSKIPQQNGNRVKNDRRDCLTLARLHRAGELTSVYVPTEADEALRDLVRTREDATRAVRTAKQQLGAFLLRHDIVYSGKSKWTKAHFNWLADMAMPHPAQQIVFQEYIDTVVGCSNRVQRLTEQIRQQSKQSRLHELIKALQSMRGISLIVAATIAAELGDLTRFENPGKLMAFLGLIPSEHSTGERVKKGAITKTGNGHVRRALVEAAHGYRFPARKSRELRKRQEALPQEILDISWKAQCRLCTRYQYLMAKGKKTNIAKTAIAREIAGFSWAIAQALPKVA

SEQ ID NO: 313194 - protein, 320 aa, unidentified
MQCIGVDVSKQELVTYDGVRGRTFPNDKQLGKFAEYLDSVKHVVVVFEPTSTYSHRLHALCASRSISTCQLNPRVIPNLRKASRSRSKTDKTDAELLYQYGMDRGKDEAREAKQVDRLVHALSAQLALYRVIQKARIAYQGLLEAWINDPSTPKTSINRLGADIASMKGKEARCVARAEEIIEEDQQASSTLQALMSIPGLGPITSITLLAFFRRYQGANREQTVALAGLDPMQYQSGTSVHRRGKISKRGSRELRKRLYEATLSAARYNVSVRKLYQRLKDAGKPEKVARTAAARKLLLIAHAIYKTGEHYRSPVNQAT

SEQ ID NO: 313195 - protein, 416 aa, unidentified
MGVEICSEELAGKVVAGVDTHADTHWLCVLDEERRVALSREFPADAAGIAALADAIGDPARCAAVGVEGTCSYGAALAGELALRGFRVLEVLNKKKERRRGRGEGKDDALDAERAARDVLAADGTSVPKERSGWVDGARPLLVARERCVSARVEAHAAALSLARTAPEDERRRWEGMGQERMMRAMLEIEEEGAGALHRAMLSLARVWEACTAEAEGLERMIADAVSEGCPALLAMYCCGPVSAAELAVAAGANPGRIRSEAAFAMLCGAAPIPASSGKTERVRLNRGGDRRANSALHEIAVRRLRYDPATRDYVARRISEGHTKAEALRCVKRYIAREAYRALLRPHDVGERLDRSSLRRAREGAGLSQAQVARALGVAPSSISGVETGRNQCRRLAERYSQWVLDGMPMEGGGI

SEQ ID NO: 313196 - protein, 395 aa, unidentified
MSTSALGLDIHRKFSKASLQEMTSEGQIGVVERARLEHCDREAMRQWLSRVPAGTPVAIEAAFGWPWIADLLEEVGLEPHLGHPPAIKVLAKHEAKGDRCDADRLAKFQLRGILPESYLAPPEVRQQRERMRYRISLVRLHTGVKNRIHAILHRLGILHSFSDLFGKSGRAFLEKLDLPEASQAVLVGYLRLLDNLREEIAGVEQWMRRNLAQDEVVRWLKTLPGVGVILAHVIRAEIGQIERFPDYRHLGSYSGLAPLSDDSADRHGRRHCSPACNHTLRWALIEAATGVLAIKGDKVWRLRRLYGRLTGGGRYNKNQAKVALARELIKLVYVVWSKGEPYTETPPPRPGSCGENRQTNSSRRKDKTTETTLRPDQPRHPMVRRRRKAVGQTDS

SEQ ID NO: 313197 - protein, 362 aa, unidentified
MNQIIRIGMDTSKYIFQLHGVDASEQVVLRKRLGRSGMLSFFTKLAPTVIVIEACGAAHCLARELGKLGHTVKLIAPQLVKPYVERNKNDGRDAEGLCEASSRPRMRYVPVKTAEQQAALMLLGVRDQLVMRRTQLSNTIRGHAAEFGLIEAKGLDKLASLLAAIEQGDSVPVLARDLFAMLARQYAQVQVELKAIEARLLAWHRGNALSRRLAEIPGVGPVTAAALVMKAPDPHAFRSGRMFAAWLGLTPKDHSTAGKTRLGKITRAGDERLRQFLVVGATSVVKQATGKHHRGPRWLLELVKRKTPKLAAVALANKTARIAWKLMTTGESYDSARIDAQRDAQRDAQGDAQGDAQGAAAA

SEQ ID NO: 313198 - protein, 458 aa, unidentified
MPGAEQRPIGLAAAESPVGSCAQSASTGATLVAAGQSIFKEDPMPAVTCRLFVGIDWGSETHHVCVLNLEAQIVEERKVQHTATSIAEFLDWLSTLAPDFPASLAIAIEVPHGTLVEELLERRFCVFSINPKQLDRFRDRYFPAGAKDDGRDAFVLADSLRTDQHCFRAVHLGDPAIIRLRELTRLDEDLNFCFQRHCCQLRQQLHRYYPHVLQLSKTADEPWIWALIELAPTPAKAAKITSKRIEKLLREWRIRRVDAEQVITALRGCSFSLAAGTVEVASEHVLLLLPHLRLLHQQRLAIASRIEQVLDQLGTSEGEQPMPDVKVLLSLPGVGRIVTATMLAEAPQLLADRDYHGLRAYAGVAPITRQSGKKSTVLMRYGCNLRLRNAVYHWSRVSMQHDTRSREHYHRLRSKGHSHGRALRGLADRLLALLCAMLRSRTVYDPLRRQVAEPPPSA

SEQ ID NO: 313199 - protein, 345 aa, unidentified
MKKRIEGVTVYGIDIGKNTFHVVGLDSSGKPMLHSKFRRDRLLAHFANTPAALIGMESCPGSQWLARKLQASGHTVKIIPAQFVRPYVKSNKNDMVDAAAIAEAVTRPTMRFVQIRQPEQSARQALHRVRDRYMSQRTGLINQMRGFLLEFGIAIRQGAGVFRLDLPRVLGDEENELPPSMRTLLADLWNDFKLLEIRIEELSKKIQRSVQYSDTARRLMTVPGIGPLAASALEASAGNGHQFVNGRFFAAWLGLTPREYSTGGKTTLLGISKRGNTYLRRILIHGARSCVQTCDRQRHPLGAWITKLEQRMHRNKVIVALANKIARVAWKILTRPGEIYRWADA

SEQ ID NO: 313200 - protein, 340 aa, unidentified
MIPTPTKKTISYCVKDAAGCVHSEGKIGSTRRDLDTWVRTLPQPRMIAMEATIFTGWIYDHLLPHAEKVKVAHPLMLRAIAVAKRKNDRLDAAKITDYLRCDILPECHMASTEIRDRRRVLRYRNLVIRQSVQMKNRVSGLLMETGVSYNKRRLHQVGYFRELMSGDPQISDGIRPLMKICREQIERGRKLDYALVSRLERDPLLKDRLERLKTVPGVGPITALTWALEIGDFTRFASIKEAISYCGLCGEEKRSADKVMRTGISKQRNKHIQSVLIEAAKLAPRQSPELAMLHDKERLKGNANRATLAVARKMVAYLLAVDRRQQNFVPAEEFKQTAAA

SEQ ID NO: 313201 - protein, 403 aa, unidentified
METFAGIDWASEEHALCVVDEGGLKLEGEFFTHDEVGIRELIARMRTLGAVRVAIERPDGLLVDRLLEAGFTVLPIHPNKLKATRPRYEASGGKSDGFDAFVLAEMARTDSHRHRALCPDSDETKALRALTRTREDLVGARVRLANELRAQLDAFWPGAARIFADVDSPIGLAFLQRYPAPADAKGLGEKRLAGFLARHGYCGRRSAAELLERLRTAPAGRAEALEAEARRGAVLGLVAALKPIVDQIRELTSQIAGAVRAHPDGQVFLPLFKDPKSVVTAARLVAEIGDDRSRYPTRESLAADAGMAPVARESGKRKVAGFRWACDKRLRDAVACLANSTRHTHPWARGVYLDARARGLEHPHAIRVLGRAWLRVLWRCWQDEVPYDPAKHGNLIRLQPTGG

SEQ ID NO: 313202 - protein, 444 aa, unidentified
MHYQKVLKMPESIPYLSVGFDVGADFTWMSIMLPNGILTGKPFKIIHSEPQSRELAISKIKEAQEMYSLESRCFLESTGIYHIPLLCFLRDKGFDCAVINPIITKNSTNMNVRKLHNDKFDSKKAAKVGLDASLKASIVPDDAIIDLRNLVRDYYYFKDLQSAIVLKLHAELKVSFPAYLNVFSKVTTQTSLKLLEAYPLAADMLAAPKDELVETIRSTARFGETYALARYDAICTAAKDAAVFGRALPSNALRIRLYIKMYREYQAHLDSIPEELHQAVGKLEGTPDYDRISFIQTLHGVGFLSAVVLIAEMGSFDLFSSPKKLYAYFGLDPGVNDSGKFHGDRVHMSKRGSSLARRILHMVAINNLKVDKATKTPVNPVIYDYYTRKCASKKKSVAVGAVMHKICNIIFAMLRDNKPFELITPEEHRERYAAEHPESVNPAA

SEQ ID NO: 313203 - protein, 417 aa, unidentified
MPVSNAHSRPAARVKAPRDLINVRFAPLCGLKSDILTCPRMGWTGRAPAPNGSQSAPGACQERITTMPRTTTLHAVTAIGIDMGKNTLHLIGLDARGAIMLREKVARGRIALRLANLPPCLIGIEAGMATHYVARELAALGHDVKQVPATYAKPFRQGQKNDFRDAHAVAEAVQRPTTRFVPAKTNEQLDLQALHRVRSRLVSERTAVINQIRGFLLERGIVVRQGPRFLRQQLPDILAKQTDVLSPRMARIVADLANDWRRLDERIEAVTDEIGTLAKSDDSCRRVMTVPGIGPIISSAMVAAIGNGAAFARGRDFSAWLGLVPKQMSTGDRTILGRISKRGNGYLRTLFMQAARVILLRSANWPKHSFGLWLVRAAQRLHPNVLAAALANKLARIAWTVLAQERSYEARVTKAAA

SEQ ID NO: 313204 - protein, 369 aa, unidentified
MKSVLYVGMDVHKETITVACASEGEDIRVVGTIANTAAALDGMIRKLVSGGKRLSFVYEAGFGGYVIYRRLREMGFSCMVAAPSLIPRKSGERIKTDKRDAIMLTRLYRAGELIGIVVPDTDDEAMRDLYRARSDAKKMCKVVKQQLLGFLLRIGVVYSSGKKYWTKMHYNWLDALSLPHPAQQLTLQEYLDAVRQGESRVVRLEGMLQSSAQNWKRLEAVKRLQSLRGVSFITAVGLLAELGDLRRFQNARQLMAYTGLVPSENSSGSSVRRGRITKTGNATVRWMLIEAAWSYRLKARKSSHLLKRQAKVDAATAELSWKAQVRLCGRYQRLLQKGKPKGKVITCIARELAGFIWALGIMKPMEQAA

SEQ ID NO: 313205 - protein, 338 aa, unidentified
MIVIGLDVHKQSVTAVAVDEAGRPLAETTASVGSDELIGWASELGAERLWAVEDCRQLTRWLERQLLGAGEELVRVPPKLTVPERRAGRARGKSDPIDALAIARAALREPDLSRPRPDEQRFRDLKLLVDHREDVVDARRRTQQRLRWHLHALDPTFVVPLRMLGRSSHLERVSRWLARQEQELQVRLARELVSQCRSLNRMIAQLDQELEQRVREIAPALLELPGCAAVTAAKLLAEIGPIDRFKSDAQLARHSGVAPLEASSGRVQRHRLDRGGNRQLNAALYRIAITQARYHPPACAYLERKRGEGKSRREAIRCLKRQLARVVFNTLKAEPALT

SEQ ID NO: 313206 - protein, 350 aa, unidentified
MIIIGCDFHTRYQTIAMLDEPTGELTERRLDHQSGEAEAFYRNLQGPVRVGIEATGPIRWFERLLTELGHELWIGDSAKIRASEVRKQKTDERDALLILDLLLTKRFPKIWVPTPAERDLRQLLWHRHKLVCLRTMLGNQLHALALSEGLCRKKKLFTKKGRGELAGLALGPWASRRRAELLQLLEQLAAPLAELDRAVLEEAQRRADAVLLMTHPGIGPVTSLAFVLAIGPITRFPRSKKIASYLGLNPSEESSGGRRRLGAISKQGNTMVRWLLIEAVHPAVRKDPELRQDYQRLKFRRGHAVAKVAIARKLAVRMYWMLRSGAVYAQLVRRQGSPGATLVDASSSSG

SEQ ID NO: 313207 - protein, 340 aa, unidentified
MKIIGCDLHAAQQTIAMLDPETGEVVEKTLKHEAGTVRDFYAGLPAPVLVGLEATGSMGWFLQLLDELRITYCVGHPATIRKAETRKQKHDRRDAALLLQLLTENRFPAIWIPSTELRDLRALLLHRHQWVRLRTRVQNALHAMALGYGVQRGHALWNRDGQAMLAALPLRPHAAHRRDELQTLYQQLDDQVDRLDDRVKQAAAQRPRATELMTHPGVGHVTALATEVFLGDPSRFADGKALASYAGMIPSEYSSGKRQRLGGLSKQGNPLLRFLWGEAAMHAVRRDPELQRFYRRKLQQKGLGKARVAAARKLGIRLWIMLRDQIDYNEFCRRSPRRQS

SEQ ID NO: 313208 - protein, 420 aa, unidentified
MFMIIPSQFPYQATVGLDWADQKHDVFVRFANGDSYRRKIDSRPEAIQEWLLELRSTCGEGKIALALEQRRGALFYHLCTHLNWIDLYPINPHSLASFRKTFFSSRAKDDPVDSQLLEELLRTHPERLRPYQPEPTTERKLEQYCRHRRRLLDLATKTELKLISTLKQYFPLAVHLFSDVGMKSDIALSFLSRWPTLDELQRAKAHTVRSFFYAHNSRSQSLIEKRLQQIGQAHPVTDDLALIEPLVLTTKCLVAQLHQFNQASNEFDRKIRELFKSNPDHFLFESLPGAGEQLAPRLLSLFGSDRSRWADATDIQKYSGIAPVVERSGKSLWVHRRLARPIFICQTFHEFAQQSTQRSSWADQFYRRQRQKGKSHHSAIRALAFEWIRINYACWKANKPYDESFYVQALEKRNFSVSST

SEQ ID NO: 313209 - protein, 408 aa, unidentified
MNPLFVGIDVSSKNNVAYLMKPDGSKHSSFSVQNNLGGAKLLSERIVSALGSMQLERVVIGLEATSIYGDSLVYALREDGRLGRFQRKIHVLNPKQVRKFKEAYSDLPKNDWVDAFVIADHLRFGRINREVYMDDYRYKALQTLTRARFDVIQNLTREKQRFANYLFLKCSGMAQDKDIQNTSATTIALMEHFETVDDLANADLEELTAFITETGRGKFADPDATAKAVRAAAKGSYRLPKTVNNTVNQAMAVSIASMRALKGQVKVLDKAIEQQFEIIPNTLTSIPGIGKVYSAGIIAEIGDIHRFDSQASVAKYAGLVWNRSQSGDFEAEHSRMIKSGNRYLRYYLLEAANSVRRCDSEFRRYYDLKFKEVNKYQHKRALALTARKLVRLVFRLLKDNRLYIPPEG

SEQ ID NO: 313210 - protein, 354 aa, unidentified
MSQTPNTTIAVIGIDIGKNSFHVVGHDARGAIVLRQKWSRGQVEARLANIPPCLIGMEACVGAHHLSRKLASLGHDARLMPAKYVRPYSRGQKNDFNDAEAIAEAVQRPTMKFVATKTAEQLDLQALHRVRERLVSQRTGIINQIRAFMLERGIAVRQDIGFLRTELPTILATRTDALSPRMLRVIEELAGDWRRLDQRIDGLSGEIEALARQDQACSRLMTVPGIGPIISSAMVAAIGTGDVFSKGRDFGAWLGLVPKQISTGDRTILGNISRRGNRYLRVLFVQAAWVVLVKIKNWERYGLKSWIEAAKRRLHHNVLAIALANKLARIAWAVLAKGRAFELTRTDDASVRPA

SEQ ID NO: 313211 - protein, 399 aa, unidentified
MTASPRVVIGADTHLDSHHLAVITDAGKPLADTEFPTSQTGYDDAVRWAQSFGAIVFAGVEGTSSYGAGLTWVLQAAGIEVAEVSRPDRAARRRQGKSDPLDAYAAARAALAGHGVAVPKDASTGALRALLSARRSAVKAHTAATNQIHALLVTAPAELRDRYRRHNSNALVKALARCRPATHNDATTVAVLTAAKALAQRAEFLAHQKQDLNAHLDVLVRQINPALRTAYGVGADTAAQLLATAGTNPHRLRNQASFAALCGAAPVPASSGKITRHRLSRGGDRAANNTLYRIALVRMSAHPQTRDYVQRQVANGRSKKEILRLLKRAIAREMFRLLTRPAPVDDYRDLRPARQAKHITLATVATHFGVPVITVSRLERGHQRNEALANHYRRWLIAA

SEQ ID NO: 313212 - protein, 386 aa, unidentified
MGKSITSSVYVGLDVHKDSIDIAVAEAGRDGEVRHIGSIGGDLVSLDKALRKLISRGAPLHIVYEAGPCGFVIWRHLSAQGLACEVVAPSSIPKRSGDRVKTDRRDAILLARLARAGELSAVRVPDAADEAVRDLVRAREDAVRECRNARHRLKALLLRNGINYAGKSAWTAAHLRWLARLKMAHATQQIGLQEYLHAITEATARIGRLEQALRDALPEWTLRPLVQALHALRGVQLIAAMTLVAELQDFTRFANPRQLMSYVGLVPGEYSSGPKRRQGAITKAGNSAARRMLVEVAWHYQHSARVTPIIAKRQDRLPKAVTDIAWAAQLRLNAKFRRLLARRVMKTKAVVAVARELAGFVWAIGREVQTSGWPGAPIAADAVAAH

SEQ ID NO: 313213 - protein, 348 aa, unidentified
MMIVGVDFHPEFQQIASVDTETGEFQEKRLAHPAEAEKFYRSLVGQKVRMGMEASGHARWFERLVAELQFELRIGDAAEIRTKRVRKQKTDRQDAQLILRLLLEDRFPQIWVPSWENRDLRQLLWHRHRMVQARTRIMNQLQAVALNEGLRCKKKLWRERGRQQLESFRLAPWATRRRRDLLELVDRLTPTIAELSHAIEQEVEKCPAAQRLRTHPGVGSLTALAFVLIIGEVNRFRCGKQVASYLGLVPLEESSGNRRRLGHITKQGSSMMRFLLVEAAQVTVRSLPEWRSKYLHLVLRRGRKIAKVAIARRLAVHLFWMMRKEWDYQQLKKFGSHAGEPGNRHGVL

SEQ ID NO: 313214 - protein, 411 aa, unidentified
MNAVGIDVSKGRSTVAILRPTGEVVMAPEDIFHEADDLNGLVDRILSLEGNTKVLMEATGRYHELVASELYERGIFVSVVNPILIRHYNPDSTVRKVKTDKKDSVKIAKYCLEHWNDLREYSPMDTIRQQLKLFSRQYNLYMKNNVSLQNNLISLSDKTFPGVDTLFKSPERADGHQKWVDFFTTFWHVKCITGSSKESFVERYQKWCKRNGYNFSASKASEVYDYCLRQLTTLPKTDVTKTLIQTAAKELTAANELLASLRKEMTRLAQQLPEYDVVRAMYGVGDITAAQLIAEIGDVRRFPRRSSIVGFAGVDPEVEQSGKSNPDGKPATKRGSPHLRKTLYQIMSTYIKLSPANEPIYQFLDKKRSEGKPYNVYMTAGANKFLRIYYARVKERLQALDDAPDSDELNS

SEQ ID NO: 313215 - protein, 319 aa, unidentified
MDILGIDIGKTRFDVCLLSADAKHTANFPNTEAGFAQLASWLGKWRPVPASGLHACMEATGNYGLDLAAFLVSDGVTVSIINPRQIKAFGDAELARNKTDQLDCALIARFCLAQRPPAWQPPMQHMRHLREMVRRCAALKENRTQELNRQKAGCASPVVQASIARHVAQLTAEIDAMTAEIRALLATEAQLETDFALLRTVPSIGDVVATLILAEIPNIRDFTPKALAAFAGLSPAEHSSGARQKNIGISRIGNARLRAGLYMAALSALRHNARLQDFVARLKEAKKPKKVILVAVARKLLVMAQAVLKTQTAFNPQLP

SEQ ID NO: 313216 - protein, 409 aa, unidentified
MQPILKSCCGIDVHKNMIKASIAKGPLDSPPRFCTRTFSTMTRDLLKLKDWLTENDVEAVAMESTGVYWKPIFNILENDFQVILANPQYLKKVPGKKSDVKDCEWIASLLRCGLIPASFIPQRPIRELRELNRTRRKLVGMMSSEKNRIQKVLEDANIKLASVVSKIDGVSSMTMIQALLDKYSLSKEEITDMARGKLKSKVDQLVEALNGKVTDHHRFLLNLHLNNIAFLADQVQEIDKQIQKLMIPFQKEESLIQTIPGISKISAKAIISEIGVDMSQFPSEAHLASWAGICPGNNESAGVKKSGKIRKGNRYLKAILIEVAWAASRTKGSAFSAIYNNIAKRRGKKRALVAVGHQILIAVYRTLKTGEPFVDQGAEAIYRRNLETRQKSAIRLLERSGYSVAKASA

SEQ ID NO: 313217 - protein, 345 aa, unidentified
MKSRTKEALYCGIDLHSNNAMYVVTDQTDKVVFKKRIPNQLPVIVSALKPFKSKLVTVAVESTYNWYWLVDGLMDQGYPVVLANPAAIDQYDGIKDANDLTDAAFLAHLARLDILPTGYIYPKEERPVRDLLRRRTLLVRQRTATKLSLQNMFVRQAALNINWRKIRKLTPEQRVDILGDNEFLLFVTESQIELIEVFNKKILQFEEKVLEHAKLKPEFELLLSIPGVGPILALTIMLETGTIDRFKKVGDFTSYCRCVRAKRQSNGKSKGRNNSKNGNPHLAWAFVEVVHHAIRRSPQAKKFYDRKKSKRNGALATKALGAKWSKGAYYVMKRQEPFDLKRLFS

SEQ ID NO: 313218 - protein, 341 aa, unidentified
MKNLFIGVDFSKEKVDVAIIFADGLTETAPRVFNEFKTTVSGYKQLVKWVEQNSCGIDSSLWLFCGENTGDYSKGLCNFLYGKGYDMWLENAKSIKDASGLRRLKSDRADASMIAEYAMRNYDKAIMYEPLSESLAQLRELFLYRQMVVRHRCSFQVRRGEKKLTMEKSPIKTMISQSGRHIVSELNKEVEKIDKRIAELIKSDEELTEVFTIVTSVPGIGTQNAVCLMVYTDNFRRFNYDSRKIACYYGIAPFGKDSGTSVHSDPHVHYMANRQIKAMLTQAALAAVNFNPVMARYYMRLVERGKKKQVALNNVKNKLVHLVTAMVRNRQIFTPEYKISA

SEQ ID NO: 313219 - protein, 343 aa, unidentified
MDHFAGLDVSVKETSVCIVDDTGRIVREVKVASEPEALLSVLKNPAYHFKRIGLEAGPLSQWLFSALAEAGLPVICVETRHMRAVLKAQINKTDRNDARGMAQMMRAGLYRPVHVKTLRSQKLRMLLTHRKLLLSKAIAIDNDLRGTLRNFGLKVGIVGTVKFEARIKELVENLPDLAVLVEPMLVVRRVLREQIGILHRRLLAIVRDDEVCQRLMTVPGVGPVVALTYRATVDLPARFRNSKAVGVVFGLTPSKYQSGEINRTGAISKCGDEMMRCVLYEAAQVMLTRTNKWSWLKAWAMKIARHRGMKKAIVALARRLAVIMHRIWVDGTEFRWTRKAAAT

SEQ ID NO: 313220 - protein, 405 aa, unidentified
MAELENNLVFAGVDTHKDTHTLCLLDCMGRAIGTFKFDADAKGYDALAGKIGDPATCAGIGVEGTGSYGAGLTRRLVELGYCVYEVMVPGRARRNPGRPKSDPADAEVAARQVIARTNLSKPKDQFGWTEDLRQLMIARDRLVRATSAMINAAKSLIVTAPEDLRRSLAKLSRKDLRSALSALDPGADGVVLALGALGRAWDLQDREADAVEGKMKEILEANAPALLAISGCGTVSAAALAVAGGGNPERLNSEAEFASLCGAAPLLASSGKTERHRLNRGGDRKANRALYQIAVTRMSYDQRTKDYVEKRKGDGKSKKETIRCFKRYIAREVFRALRHPFEVKGPSWKDLRPARQALGITLVEAGNALNVGFQKVSYAETGRLMNVQFLEKYDTWLKSQTKEAS

SEQ ID NO: 313221 - protein, 341 aa, unidentified
MNHYAGIDVSLECSSVCVVDANGKILREAKVASEPEALIAWFRSSGFDLERIGLEAGPLSQWLFAAMREAGLAVELLETRHVRKAFEAMPVKSDRNDARGIAQLMRLGWFRPVHCKSMSAQETRTLLTARKLVQSKLHDVENSLRGILRGFGLKVGKTTELKFAGRIEELVAGHPHLQVIAKALLAVRAVLRTEYAAFEKQVRKLARSDMRTRLLMSTPAVGPIVALTYASAIDDPARFKSSKQAGAHFGLTPKKYQSGETDYTGRISKIGDSSVRTVLYEAAHVMLTKPVKGCSQLKSWAMRIARRAGMSKAKVALARRLAVIMHRMLADATPFNAAAAA

SEQ ID NO: 313222 - protein, 443 aa, unidentified
MRYESHVLGQQIGASPVFQAPERYPERALVGVLAQTMTGLEERLIERGRAMRVAGIDIASQTHVLGVTTESGEVLVKPTSIDEDAAGYDKMFALLGPADDVFVAMEATGHYGRNLFAALCERGYRVALLNPLRTQRFNQEDLRRAKTDSLDALGIARFAVQKRPPPTPPIDEPRDQLREFVRLFDRLTQDYGDRRRQLHRLVSLTFPEFKRHVTLASQRATAILAAYPTAAAFSDSCVSQLAAIRCGTLVVGFPLAHALVDTAKISVGHHHGPAYRMEMTFLCEELDCLRTKLRDIREELERRVAEHFVGSLLMTIDGLGLTTAARIVAAVGDPARFRSGACLAAYVGVVPGTNESGLRRGGRVSLSPLGNARLRSALYMSTLGAVRTNPWLRAYYERLRAKGKPPKVALIAATRKLLMAVYSVAKHRQPFVPQMATSSTPRR

SEQ ID NO: 313223 - protein, 362 aa, unidentified
MRIIGCDLHARQQTLAMLDTATGEVVNVTLPHEGNNVREFYSTLPRPVCVGIEATGSMQWFVNLMEELGIECRVGHPATIRAAEPRKQKHDRRDADLILKLLVENRFPAIWLPSQELLDLRALLRHRHQWVRIRTRIQNALQSIALANGLRRGPSLWSRDGQNTIAALPLAPHTSYRRTELQAMYEKFETEIEKLNQRVQEQANARSGARLLMTHPGVGPVTALATEVFLGDPARFADSKALASYVGLIPREHSSGGRQRLGGLSKQGNPLLRFLWGEAGAHAVRRDPELQRFYRRKLVQKGLGKARVAVARKLGIRLWILLRDQIEYQEFCRRGQKQQKSSDACAGMPETPYGATSHRPVD

SEQ ID NO: 313224 - protein, 584 aa, unidentified
MQSRSRVYVGIDVGRRTHRAALVPLERAARGWEQVPVITFAADTEGFRGFFAALHAADATPENTVCAREPTGGYYSQPIFQALQQRGFEVLWVKNQAVHDLRETVYGRWSKTDAEDARLIARPLYLREAVGQEYAFQVAHPGALPYRNLRLLVELRWKQVQARRRASNQLMQVLDVLFRELRRVFRKSTTRPTPLHLLTRFPTAQAIAAASERDLYQVLVGEARSLRHQTAAPELRRLAQDSVGVRQGWEVLELAQGWLVQQLCELQRSLADLEARIEAAVAEFPETAVLRTFPHMSSRRIATLLAGMGAPIEAFPSDRALRRQWGWYVELEQSGARVRSRLGRGGYRGTRRELYLMAWQLVKDRSRDNPFRHYYRRLLRGDPAPKVPKVALGHVASKLVTVMYACMRRRQPYASTTSIPSAPGGPGPRTGYPVRWGREVRRLWPGLRAAASDAARPRDPPARPAPRATARQHGPAVGPVPHQLPPPGHGEVVRRPASQVQKARRVARVPDPQGQTEHAIDPGEWRGFEHQKRGTRAHVRTRLPRKQQEPDRRPEGGATKSPPSARADGGLKHHRAPARHAVWW

SEQ ID NO: 313225 - protein, 383 aa, unidentified
MKKNIKTRVMNTASAVDAAAAEPQPAVDGAALVVRQYQAVVGLDVGDRQSHYCVLDLSGGVVAEGVVKTTEASLRVLFEGKGRMRIALEAGTHSPWISRRLIALGHEVLVANPRKLRLIAESDAKHDRADAQLLARLAHVGPALLAPIQTRSAQTQTDLTLIRAREVAVQTRTKIVNAVRGMVKSSGHRLPASPRLTFARKATEACPEALQPAVLPLLRLVQTLTNDIAAYDRLVVEKARAYPETEAIQTIHGVGALTAVAFVLVLNNDRSRFKRSRDVGCYLGLKPKQRDSGRQSPQLGITKAGDPLIRRLATQSAQYILGPFGRDSALRRWGLVLASRGGKNAKKRAVVAVARKLVVLMHRIWITQEAYDPMRGVRVRPAA

SEQ ID NO: 313226 - protein, 386 aa, unidentified
MQASNERTPIAGHNGTIFVSIELSQKNWLVTLHSPDKDRMSHYKVGVGDCAELLGLLDRVRERARRALGAAPRVTSCYEAGYDGYWLHRFLQANGIENYVFDPGSIAVEQRGRRAKTDRIDGEQLVRTLRAHCRGEPRVVRIVHVPSVEQEDARRATRERDRLVKEQTGHTNRIKGLLRLHGLQPGNPCRRDWLTWLGKQRDWQGRPVPPQKLAEIEREHARLMLLRDQLSKLEESQAEVEPTPELVETTRRKEVLFRLKSLGPAFTGTLTHEVFYKDFTNGRQVGSYVGLAPSPWKSGGIDREQGISKAGNPRARQKAIELAWLWLRHQPDSALTLWFRERAAKANKRNKRITIVALARKLMVALWRFVTTGLVPTGAKLKPATA

SEQ ID NO: 313227 - protein, 447 aa, unidentified
MVPDGRQVEVEEHEQIVERVAAIDVAKASGMVCTRVPHQTTPGKRITRVWEVAATTNAIIALADQLARQGIERVVVESTSDYWRGFVYLMEARGLCVWLVNARDVKQVPGRPKTDKLDAVWLAKLNERGMLRPSFIPPAEIRQLRDYTRLRSDLTQERSRHVQRLEKLLEDALIKLSTVASDIMGASGRDMIEALIVGQRDPKVLAELAKGRMRGKRAALVQALTGRFDDHHAELARVLLDHIDALTTQTDRLTARIEELIAAVLTAQPPQDQSGLSHAQAAQILLPTPDRLDEVPGIGSKAAQVIIAEIGLDMGQFPTPAHLVSWAKLSPRTIQSGAKHRAGTTGKGNPYLKGVLGEAAAAAAKTNTFLGERYRRLVKRRGKLKALVAVARSILVIVWHLLADPTARFHDLGADFYTNRTDTNRKTRNHIRQLQALGFTVTLTPAA

SEQ ID NO: 313228 - protein, 414 aa, unidentified
MSYKIAGIDVHKKVLMVVVMDASTPESKPERRRFTTMPSDLQRLLSWLREQGVEEAVMESTAQYWRSVWLELEPYMRLQLAQAFSNRAPRGRKHDFKDAERLVRRLIADELILSFVPAGEQRTWRNLTRMKLQLTRDQVRLQSQMECLLEEMRIKLSVVVSDLLGASGLRILRALAQGESDPKKLALLGDDRLKCTEEQLIDALTGRPQPLHREMLALQLERLQLMDGQIAKLNGLIAQAMKPHQEAVIRLAEVPGLGVDSAQQVIAEVGVKASTFPSAAEFTSWVGTCPGKDESAEENHSSRSAKGNKYLRRVLSQAAHAAVKKNGSHFQTVFRRLLPRLGYQSAIWAIAHRLCRVIWKILHEGVRFIEQGIEPDPKAKKQRARMLARALRKLGYDVAITPMNPATAENGMQI

SEQ ID NO: 313229 - protein, 422 aa, unidentified
MNFGPVVGIDVSKRFSDMCILSPDNQIFAQTKIYHDSTSMKRAEALLKKATEAFGGRPAVVMEATSHYHLILFQFFSDCGYDVLVVNPLQSSSMKDFSIRKRKTDKVDAFKLAMLYRTKTLRPSQIPQSAIRALRLLCRERVELLNDVTRYKNRLTAFLDQIFPGYDKVFSDVGSITSRAVLSHFPTPAILLASDEYELVEVIATASKSGYKFAKKKAEALIKTAETAKVLGIHTCADESMILSIIPMLNTLSDSVTYLEQSIGNLLAQVKTVRKNVELLQTIPGVGPHSASLIMAEIGDISLFKKPKQLAAYFGLDPSERQSGTFRGTKNKLSKRGSPYARAALHMAVVNAVFRHANAPAANPVLSGYYEKKCKTKPAKVALAASMHKLIFIIFAVLRDQKPFELRTPEQHAREQGFIKVA

SEQ ID NO: 313230 - protein, 409 aa, unidentified
MDVVYRCCAGLDVHQATVVATVRRPAADGTRESVTATFGTMTPDLLGLREWLQASGVTHVALESTGVYWKPVYYALEDSLTLLLINMHAVKHVPGRKTDVRDSEWLAQLLEVGLLRPSLVPPPAIRELRDLTRYRTQQVRDRAQEVNRLCKVLEDAGVKLSTVATNVLGVSGRAMITALVDGRTDPDALADLARGKLRAKIPVLRRALQGHFRAHHAVVVTHILAKIDFLEETLADLTREIDERLRPFDTAMTGLDTIPGVNRVTAMAIIAETGADMTRFPSASHLCSWAALCPGQNESAGKRHSGRTRQGNRYLKGALIQAANAAAHSKQTALHALYVRLRARRGHKRAIVAVAHQILTIAYYIMRDGATYQELGPMYFEQRTREHSIRRHVQRLEALGLTVTVTEAA

SEQ ID NO: 313231 - protein, 344 aa, unidentified
MKKATTIAVDVAQAVLEVAVSHRPGQVASRHRLQRGEVLPFFAQQPAATVLFEACGSASFWAREIEKLGHGVVLLPPQHVRRYRTRNKTDRADAKALLEAFRNEEIRAVPAKTPAQQTLAALHRLRSAWLGTRTARLNTIRGLLREHGLPIPAGARRVVPQTLDWVQDSQSPLSAALRFVLFEACSEVRELDERLHKVEVQLEALAKQTPLAVRLRSVPGVGLLTATAIAGFVGDLTRFPTGRHFASYLGLTPREHSSGSIRRLGAISKRGDTYLRMLLAHGARSVLAAAPRQTHPDRLRSWALELASRVGHNKATIALANKLARCVWAVATKALAFQPKEEAA

SEQ ID NO: 313232 - protein, 318 aa, unidentified
MQDTAVTWIGIDVAKLTLDVAWEAGQQWHSFQVANSREGIAELLGRLPAPEVTRLVIEATGGYERRLVTASVEGGYRLAVVNPRQVRDFAKALGILAKTDRLDATVLARFGQQVQPRLLEEDPAKRAELVQLVARRRQLIELRTMESNRLEQATARLAQKSIRQVLKTLEKQVDQLEAEIARLLQSDDDWRTKIKLLTTTPGVAEVTSATLVAELPELGKLDRQAIAALVGIAPFNDDSGQHRGKRRIAGGRATVRRALYMAALAARRCNPVIRAFADRLAAQGKKPKVILTACMRKLLVILNTLLKHRTPWNPAHAC

SEQ ID NO: 313233 - protein, 325 aa, unidentified
MSSYETVGIDVGARRLTASGEEVVLASDYENTASGRKALVAALARSKRPVRVVLEATGIYFLDVACDLVAAGIEVMVVNPKVAHHFAEAMLQRRKDDPVDAAMLGEYGRRMDFVPWTPPAPKLFALRAISREIGALGKALTAAKNRRHAVDSTALGAAVVRRALDRQIALNETLVEELLATAVEQIKGDAELKRRFDRTDSIPGFAAKAVVCVMGELVVLPPMKAAQWVAQAGLDVREEASGSSVQRKPRISKRGNKRLREALFYPAMSAARCCPEAEAFCNRLVARGKTKLQATVALMRKLLHAIHALWRNNETFNAKKLFAPA

SEQ ID NO: 313234 - protein, 354 aa, unidentified
MNIKYIGMDVHKETISIAVMNGEGKVVMESIIETKASTILQFIEGVRGDLHVTFEEGTWAAWLYDLLKPHVAELIVCDPRKNALMKEGNKSDKIDARKLADLLRGGYLRSVYHGENGLRTMKELARSYLTISKDLTRVMNRVKALYRSWGICCAGQQVYAPRHRSEWLNKIGETGVRRRAEFFYQQLDALRVLHKAVRRDLLAESRKHGATKLLREIPSIGAIRAALLLALIQTPQRFRTKRQLWTYSGLAIDTRDSAQHRFVNGQLQRSKKPQQLRGLNQNHNHDMKAVFKSAATMASGGEGPFHDFYQGLLTKGMEPAMARLTLARKIAAITLTIWKKGAHFDAKQLKPQAA

SEQ ID NO: 313235 - protein, 382 aa, unidentified
MQASTVDTPTAGHCGTIFVALELSQKTWLVTLHSPDRDRISRHKLEGGDHAGLLALLESVRTRAAGKLGTAPKVVTCYEAGYDGFWLHRLLTAAGITNFVFDPASIAVEQRSRRAKTDRIDGELLLRTLMAYLRGEPRVVRIVRVPSVEQEDARRASRERDRLVKEQTGHTNRIKALLRLVGMATGNPRRGDWLGWLARQRDRQGDPMPPGLLSEVKREHARLMLAREQLAALEQAPVAAATPATAQMAERRDLLLRLKGLGPVFAATLAHEVFYKDFHNRREVAGYCGLAPSPWRSGGIDREQGISKAGNPRARLKAVELAWLWRRHQPDSALSRWFAARTANAGKRAKRIAIIALARKLVVALWRYLTTGLVPEQAVMKA

SEQ ID NO: 313236 - protein, 341 aa, unidentified
MNIITIGIDLAKNVFQVHGVDERGKTALQKQLKRAQFALFFSNLAPCLIGMEACGSAHHWARKLQAFGHTVKLISPQFVKPYVKTNKNDRADAEAICEAVSRPNMRFVAVKTIEQQAVLSLHRARQGFVKARTAQANQIRGLLAEYGLVIPKGISHVTKEVPLILEDAENELPGVFRQLIAVLLNHFRELHRLVTELETKIKDWHRNNEASRKLAEIPGIGPLGATALVASIGDARTFKNGRQLAAWLGLVPRQHSTGGKPTLLGISKRGDVYLRTLMIHGARSAILAAQRRSENTGWLAKLLERRHPNVAAAALANKNARVVWALLAYDRDYQPGYARAA

SEQ ID NO: 313237 - protein, 404 aa, unidentified
MIFVGVDWAEAHHDVCVLDRDGEVLARTKIPDTLEGVRALHELVAPLAEEPHEVVVGIEKDRGLIVTAMLGAGYRVYALNPMSVARYRERHVTSGSKSDPGDAKVVADVVRTDRHNHREAKGDSDGVDALKVIARAHQSAIWSRQREKNALRNALQDYYPGALRAFGTDLDSGDALEVLRVAPTPALGAQLSLAKITSALRRGGRERNLERTAKKIQAALREEQLRERPRVEAAFGTITAAHVAMIRAYGDTIAELEAALREDFEQHPDAAVVLSLPGLGTVLGARVLGEFGDAPNRYADAKSRRNYAGTSPVTKASGKSKVVLARHSRNARLSAALDQWAFCSLKNSTGARTYYDELRARGKTHRQAIRQLANRLVGILHVCLEQRVVYDENLAWKHRVDIAA

SEQ ID NO: 313238 - protein, 384 aa, unidentified
MNKHSMIFIGLDTHKEFHEVAYCEEQRGASAVHYGRISSSKVSVKKLIRQFESKYPGATIHVVYEAGPCGYWIYRLIASLGHCCYVVAPSLIPKKPGEHIKTDRRDALKLVKLLKSEDLTPIYVPEPEDEAVRDLSRARELAMKDLKEAKYQLKALLLRNNIRYEGTANWSKKHLRWLTELILPHPAQHIVLQEYLQTIEERIRRLERLDNELTHHVHQWRYYPVVKAIQAMRGVRLLVAVGVVAELGDLHRFDHPRKLMAYLGLVPSEHSSGGKRHLGAITKSGNGRARRLLIEGAHSYRYPANVSTNIQIRQEGLPKDIVDIAWKAQLRLCKRYQRMSKKGKHYNLIITAIAREMAAYIWAIVREVVLTPVNPKLRLSRVPA

SEQ ID NO: 313239 - protein, 354 aa, unidentified
MSQTLNSAMAVIGIDIGKNSFHVVGHDARGAIVLRQKWSRGQVEARLANIPPCLIGMEACVGAHHLSRNLVSLGHDARLMPAKYVRPYSKGQKNDFNDAEAIAEAVQRPTMKFVATKTVEQLDLQALHRVRERLVSQRTGIINQIRAFMLERGIAVRQGIGFLRTELPTILATRTDTLSPRMLHVIEELAGDWRRLDQRIDGLSGEIEALARQDQACSRLMTVPGIGPIISSAMVAAIGTGEVFSKGRDFGAWLGLVPKQISTGDRTILGKISKRGNRYLRVLFVQAAWVVLVRIKNWERYGLKSWIEAAKRRLHHNVLAIALANKLARIAWAVLAKGRAFELTRTDDAGVRPA

SEQ ID NO: 313240 - protein, 411 aa, unidentified
MVKENFIYVGIDLHKETHTAVTIDCYNQKLGEITFPNRPADFPKLVTKVKKCNTDAKEVVYGLENAYGYGRPLAVWLIDKRYFVKDVNTAISHRQAKHRGAMYRKSDSDDAEAIALATLNMLDKLPDACPNDAYWSLGQLVHRRDNIMKQRTRLVNQLHEQLCIAYPSYKQFFNDISRPTALYFWEHYPSRKYLKGKSVEDLRTELVPVSHNRCSTKNCEKILDAVASDKVKNNAYQDARDMVTLSIVSDLQHYDSQLAEVDKMLEQMYKMLGCTLTTIPGVNVITAVKILAEIGDIKRFSNANKLAQFAGIAPLHLSSSGKGKDVATKQGNRRLQATIYFLAIQMVQVSSKGTPRNPVVRAYYEKRKAEGKTSQQALICISRRLISIIYGMLKNGTEYRMLVAENAGEKL

SEQ ID NO: 313241 - protein, 358 aa, unidentified
MQRNEITFKGQRIFIGIDVHAKNWEVAIASEVGAVRRHSQKPSARELFDYLKKNYPDGEYQAVYESGFSGFSTYYALKEVGIGCMVIHAADVPTTQYEEVMKTDRVDAAKLARSLKAGQLRGNYIPEKQFIDDRSVVRIRRTIQKQLSGYKSRVKHLLHCHGVEMPERFSKVQTHWSRAFITWLKNDVRLMSDTRASLDLLVRQVEVIRGTLLEATRQLRRMSQTVRYRRRHDLLRTIPGIGPVVSMSILTEVCDVKRFHNEKEFAAYLGLIPTSHSSGEKTVHGEKTFRGNRLLGPMVVEAAWIAIGWDAGLGAQYIQYRKRMKPQEAIVRIARKLSNIIFSVLKNEKEYVPYQTGN

SEQ ID NO: 313242 - protein, 343 aa, unidentified
MQAVTTIGLDIAKSIFQVHGVDAIGNVVIRRQLKRRYVLAFFQKLAPCVVGIEACATSQHWSRELKAFGHTVRLMPPAYVKPYVKRQKNDAADAEAICEAVTRANMRFVATKTPGQQSCLMLHRTRHLFVRQQTAVINAIRAHLAEFGVVAPVGRRGVAELLDVVADSSDERVPEVARACVAALGAQLRMLKAQILEFDRQIMAWHRSNETSKRLDEIPGVGPALATALVAGVADPKAFRSGRNFSAWIGLVPKQHSSGGKDRLGGISKQGDRYLRSLFTAGALAVIRYARIHGTKHRPWLAALLARRPTKVAAIALANKIARIAWAMMTKGERYKEPAALAA

SEQ ID NO: 313243 - protein, 377 aa, unidentified
MTTTDAATEARETVYVAIELSKKTWVLGIAHPDRDRPSIHRVSGGNIAELVSRLRVAARNNRRILVCYEAGYDGFWLARALAKMGIECRVLDPASIQVNRRARRVKTDRIDVLALLRALIATDRGERHVCAIVRVPSVEEEDARRSHRERQRLVRERTGHINRIKGLLFAQGIRDIKPKLRRSRIDFAALETAEGHPLPDRLRRELEREYARLSLIATQLREVEKERDTADAQDPVVEQKRQLLAALHGVGATSAAILAREVFARSFASRRQLGSYLGLTPSAYDSGSTTRCQGISKAGNSWARRILIEVAWLWQKYQPASPLSHWYIQRTAGQSSRIRRIMLIALARKLAISLWRYVETGLVPEGVAIAKAKLRPA

SEQ ID NO: 313244 - protein, 343 aa, unidentified
MQAVKTIGLDIAKSGFQVHGVDADGQVVFRRQLKRRNVLAFFQKVPSCLVGMEACATSHHWSRELQALGHTVRLMPPAYVKPYVKRQKNDATDAEAICEAVTRANMRFVATKTPEQQSGLVLHRTRHLFIRQQTAVINAIRAHLAEFGIVAPVGRNGLEQLLNVVADAGDKRLPEVARTCLMALGTQLRALKAKLLELDRMITAWHRSNETSKRLDAIPGVGHVLATALVASIADPKVFRSGRDFSAWIGLVPKQHSSGGKDRLGSISKQGDRYLRSLFTAGALAVIRYAKIYGTKHRPWLTALLARRPTKVAAIALANKLARMAWAMMSRGERYKEPVALAA

SEQ ID NO: 313245 - protein, 354 aa, unidentified
MSQQLSTTIAVIGVDIGKNSFHVVGLDQRGAIVLRQKWSRSQVESRFANMPPCLIGMEACVGAHHLSRKLKGLGHDARLMPAKYVRPYSKGQKNDFRDAEAIAEAVQRPTMKFVATKTADQLDLQALHRVRERLVSQRTGIINQIRAFLLERGIAVRQGQRFLRAELPRILAAPPDVLSPRMVHVIEDLAGDWRRLDERIEGLSGEIEAIARRDAGCERLMSVPGIGPIISSAMVAAIGNGDAFAKGRDFAAWLGLVPKQISTGDRTILGKISKRGNRYLRVLFVQAAWVVLIKPKSWERHGLKPWLEAAKKRLHHNVLAIALANKLARIAWSVLARGRSFEARMTNEANAQPV

SEQ ID NO: 313246 - protein, 353 aa, unidentified
MKRDKYMGLDVHQAMTVAVVMDAEGKVVLETMVATEAAAVLRLVKSLSGPMRVTFEESTQAEWLYELLRSHVTQVVVCDPRRNKLLSEGSKADKVDARKLADLLRTGMLRSVYHGHQATRKLKELVRAYETFSLDTQRTMNRIKAIYRGRGIATPGRGVYQARTRDQWLAKLAEPGLRQRAAWLYQQLDQLKPLRKQAKQVMLAESRAHRAVSLLRTIPQLGPIRAAFIVATVDTPHRFRTKRQFWSYVGLAVVTHMSAEYEMKAGKVVRRRKPVATRGLNRDCNRRLKEVFISAATGGSRDESYKLYLDRLIDNGMRTEMARITLARKIAAVALIIWKKGKEFDRKQLNRTT

SEQ ID NO: 313247 - protein, 406 aa, unidentified
MRVVHERCAGLDVHKSSVVACALLPEGKQSRTFGTMTGQLEQLAEWLRGLDIQAVAMESSGVYWKPVFNILETVGFELLVVNARHIKAVPGRKTDVKDAEWIADLLRHGLLKPSFIPNREERELRELTRYRRTLIEERAHEVQRLQKVLEGANIKLEDVISDVVGLNGRRFLSALIAGDYDPEAVAATANYGLQRKRELLAQGLRGSIGSHQRFLLDQLLSHIDFLEQRIAALDQEVKQRSRPFEAAIAHLDQIPGVGSRAAQEILAEIGTDMTRFPTHRHLASWAKVCPGNNESAGKRRSGFAGKGNRWLRSILVECAWCASRKKDSYFKTQYHRLAARRGKRRALLAVGHSLLTVIYYLLRDGVLYQDLGSNYFDQRDRSQIARQAIRRLERLGYQVALTEGAA

SEQ ID NO: 313248 - protein, 313 aa, unidentified
MATYIGIDVSKERLDVAARPSGEGWAVDNDDGGIHDLVSKLRSLEVELVVLEATGGLQARSAAAIAAAGLPVAVVNPRQVRDFAKASGRLAKTDALDAQALAHFGEAMKPEPRELPDAQAEELGAMLARRRQVVGMLTAEKNRLHRVASPAVRSRIEAHIAWLEGQIGELDQELDRAIRESPVWREKDDLLQSAKGVGRVLSTTLLAELPELGTLGRKEIAALAGVAPLCRDSGKLRGRRSVWGGRARVRAALYMGALTARRSNPVIKALYERLVAGGKPKKVALVACMHKLLIILNAMLRDGVRWGERPATP

SEQ ID NO: 313249 - protein, 416 aa, unidentified
MSGKREIACGVDVHNEFIVATILSSDGFKLQARFETCLEDLLKFKNWLKENGCHKVALESTGNYWLPIYHILEGSVNFILANAYQIKHIPGRKTDSLDSEWLAELCLKNLITPSRIFTKDHRELRSLTRARESLIKIRTKIKNRVTHELEAACIKLSSVIADVFGKSGRHIVDGLLNGMDLEKILESIPSGRVRKNKEEIRGIIQANLSSSQIFLLRSHLNMIDAVTKQIEEIDAKISDQITLRNEDMRIALSMPGMGFISASTILAEIGDFRDLSSANKLAAYCGLVPSVYQSAGKLINGHITKHGSPHIRRIIIEVAHAIILTKKLSKLKKFFLRIKARRGAKIGIVALARKVLCILYHLLVRRELYQDDLLSKPRCIKNPRLHPKTAMDLDEMIRTIIKAGYEVKKNECLESG

SEQ ID NO: 313250 - protein, 370 aa, unidentified
MLDTTTFIGLDVHARSIKAVSLDVMTGEVRAATFGYDAGAVAEWVRSMDPRARCVYESGVTGFDLQKRLSGLGVDCVVGAVSKMIKPSADRRRKNDRNDAEFLARMLSVGNVVEVWVPDDECEAARDLTRALEDARDDLSRSKQRLSKFLLRHGLAFDERTPTGRRKGNWTRAHWSWIESIRFAERADNDVLAYYVDAVRRAAEEKARLEGLVEAEARKPRWRKRVDSLRCLKGVDTASAADLVFEAGEFSRFRNARSFAAWVGLTPSEHSSGESDRRGAITKAGNKHLRKTLVEAAWHYLTCSGRPKDLAKGQAPDRGARRHAAKGVRRLVERREALLARGVHGNKANVATARELACWVWAVGLMAEEA

SEQ ID NO: 313251 - protein, 399 aa, unidentified
MLSCGIDTHKEIHQVEIQNQDEKVMWKGQISNDRKGFNALLSKIQIIERSNSDKVEGIFMNPTGNYHIPLHHFLESSGYKVIYVDPRVTDYARKMSNLGKEKSDTVDAAMLASTPWKDRKAFGNTIHKREPVSGLTRLYESITRNVTRITNIINSDLACVFPEFTDVFPDVGSKTSMAILDRFTTPSGIVKEGIDGVLKVMQRSSRNHYRKDDAEKLVSLARDSVGIHDTDGVYAFRIRQNVAMLISEKKHLKEIEEKILKLAENDEDVKNIDDMKGIGPINAAAIVSEIGDIGQFDSALKLQSYGGKAPKMSGSGGKAHATGVSRIRNSYLANSVYESAKFLVHHKNEEFLKIYEREIGKGKKRKQAYIVVSRRLLYHVHSIMKNHKPYRVRLPNVKW

SEQ ID NO: 313252 - protein, 418 aa, unidentified
MTATHSIASTVLVAIDISKHRHEVLIGVPGKKRRRRMTIMNTLEDFQRLSATLVNYGLPVRIGFEATGNYHRPLAHHLGQAGFDLKLVSSVGLARTREALHNSWDKNDPKDAQVILHMMEIGAVQFFHDPLVVGTADIQELSKTHEIVSRSKTELWHRILTHYLPLYFPEAERFHRSSRTDWFLAFLEMYPTPTMITAMSQEAFIADAWQVVGRKVAKERLLSDIYATAVDSVGLPVEPDSDAVRMFRLVLAEGRSLVRQRNEIEARAVALLSDLPDYQLLTTIPGIGPINAMTILAEAGDLRRFRHHRQFLKFCGMDLATVQSGMFRGQSRISKYGNARLRRTLWMAGQTAVLTKTNSFRDKFERYISKDRHNAHLRRKAYTAIAAKMARTVHAVVNHGEPYRPFFEGVSPGGRTSL

SEQ ID NO: 313253 - protein, 346 aa, unidentified
MTIVESTRAVIGGVDTHLDVHVAAAVDAVGGLLGVESFPTNEQGYRRLIEWLRGLGTVMLVGVEGTGSYGAGLTRHLQQAGLQVVEVDRPNRQARHRAGKSDPLDAIAAARAALSGTANGAPKSRTGNVEAIRVLMVARRSAVEERITTLNQLRHLCITAPEPIRRRFSGLTPAALAKRAAALKPRRRDPLRYSTLLAIRTLGRRVLYLRDETKELNAVLRPLIQTTAPGLLGVFGVGYDTAAKLLVAAGDNPQRLRSEAAWAHLCGVAPLPASSGKTIRHRLNRGGDRQANSALYHVMITRLSHHEPTKAYVARRLAQGKTLGETARMLKRYIAREVYKQLPRPA

SEQ ID NO: 313254 - protein, 410 aa, unidentified
MDTLIERCAGLDVHKDTVVACVRVPARGGGREQSIQTFGTTTAQLLALRDWLVAHGVTRVGMESTGVYWKPVYYVLEDALECWLLNARHLRNVPGRKTDVADAAWICQLVEHGLVRPSFVPPKPIRELRNLTRYRKAQIEERTREAQRLDKVLQDAGIKLSSVASDVLGVSGRAMLRALIAGTRDPETLAELARGTLRRKIPALRQALHGRFGPHHALLVGTILAKLEFLDEALEHLSAEIEQVIAPFAAEAALLRTIPGVDRRTAEAVVAEIGVDMSRFGAAGRLASWAGWCPGNNESAGRHGPGKTRKGSKWLHTYLTEAAKAAARTKGTYLGAQYARLRGRRGPARATVAVGHSILVAAYHILDRHEPYRELGPDYFRRRHSREHQTRRLVRQIEALGYHVRLEEVA

SEQ ID NO: 313255 - protein, 363 aa, unidentified
MKIVGCDLHARQQTLAMMDTETGEFTEKTLLHEGNAVREFYAGLGSPALVGIEATGAMQWFLELLEELGIECRVGHPAKIRAQETRKQKHDRRDAGLLLTLLREDRFPEIWMPSTEQRDLRTLLRDRDQWVRMRSRVQHTLQAIALNHGLRQGRSLWSRGGQSALHALPLPPYTAQRRSELLGMYGQLQKQTQELDKEVESQARQRPHARRLMTHPGVGPVTALATEVFLGDPSRFTTGSEVASYIGMIPCERSSGKRQRLGKLTKEGNKLLRYLWTEATMRAVEKDAELKRFYRRKLVQKGMGKARIAVARKLGIRLWIMLRDQIDYAEFCRRGQLRQEGKAHAGMPELQHGPANAVTGSTE

SEQ ID NO: 313256 - protein, 416 aa, unidentified
MTIRSRFPYRATVGLDWADQKHDVFVRFANGDSYRRKIDSRPEAIQEWLLELRSACAEGKIAIALEQRRGALFFQLCTHLGWIDLYAINPHSLASFRKTFFSSRAKDDPVDSQLLEELVRTHPERFRPYQPEPTAERKLDQYCRHRRSLRDLATKTELKLISTLKQYFPLAVNLFDGMKSDIALNFLSRWPTLDELRRAKAQTVRSFFYAHNSRSQSLIEKRLQQIAQAHSVTDDLALIEPLVLTTKCLVAQLRQFNQAISEFDHKIKELFKSHPDHFLFESLPGAGEQLAPRLFSLFGSDRTRWADATDIQKYSGIAPVVERSGKSLWVHRRLARPIFVCQTFHEFAQQSTQRSSWADQFYRRQREKGKSHHSAIRSLAFKWIRIIFACWKANKPYDESFYVNTLAKRNSASSST

SEQ ID NO: 313257 - protein, 338 aa, unidentified
MKAYAGIDLHSSNNYIGVIDGQDRRLYRKRLPNDLDTILSALSPFKKDLVGIVVESTFNWYWLVDGLQQDGYKVHLANPSKIKQYEGLKHTDDDWDSFWLAHMRRLNILPEGYIYPKEHRPVRDLLRRRLLFVKHRTAHILSLQSMISRNLGTRMSVRAIKKLTEADADDLFDSPTLVFAASNNIVTISHLTKIVKSIEKQVMSQVKLHKEFKLLLTIPGIGDILGLTIMLEVGDIKRFAKVGNYSSYCRCVKSERLSNGKKKDENNRKNGNKYLSWAYVEAANFARRYCPKAQRFYQRKKAKTNGIVAIKALSNKLARASYYIMRDQVPYDANKLFD

SEQ ID NO: 313258 - protein, 410 aa, unidentified
MDIVVERCAGLDVHKRSVTACARVPDQAGGRSEELHTFPTFHADLERLRDWLLSLGVTTAVMESTGVFWKPVWQSLEDSIDCVLVNARHVHNVPGRKTDVADAAWLARLGECGLVRSSFVPEPVFRRLRDLTRYRRRLVESHTREAQRIDKVLEDAGIKLSSVASKTLTVSGRAMVESLIAGERDPEVLAQLAKTRMRAKLPELRRALVGRFGEHHALLCRVALGRADDLGEAIGRLDSEIERLIEPFAHHRERLCTIPGVGQRTAEVIIAEIGVDMGRFPTSAHLASWAGLCPGNNESAGHHYSGRTRRGDKWLRVALTEAAWAAARTRGTYLGARFWRIARRRGANRAAVAVAHTILLAAFHILRDETDYADLGGDWFARRVDSQRLTHALVGRLEALGHTVTLTTAS

SEQ ID NO: 313259 - protein, 374 aa, unidentified
MSDHSEAFVAFDTAKLRNAVAIADAGRTGEIRFFGEIDATPTATAKLAKKLAAKYEHLTFCYEAGPTGYGLYRQIKELGHECIVVAPSLTPKKPGDRVKTNRRDALDLARQLRAGELTAVWVPDERHEAMRDLTRAREAAVEDLRAKRQQVSSFLLRLGRHYPGKKTWTKAHMNWLTSQKLEHTEQRIAFEEMLLAVRQAQERIGRLEQAIRAAVPDWSLAEVVTALMAMRGIDLISATAFLAEIGDLSRFRTPRELMAYLGLVPSEHSTGTTVHRGPITKAGNRRARRILTECSWAYRHPPRVGKKKQEKVAAAPQGVREIAWKAQHRLAARYRALVKKGKKPVVAITAIARELAGFIWAVNREVVMNRAPVM

SEQ ID NO: 313260 - protein, 475 aa, unidentified
MDTMVTQVRLGVDVACRAAHQASLADATGTLMFSGRKFHTRPDELERLWARLPADAEVMVVMEPTRNAWVPLAAWFRARGAQVVLVPPEQSADLRDYYNKHTKTDRLDSRVLARLPLLHPDGELVEVDELGPAEPLKRAVRRRSSLVERRTGCHQRLDALVELLGPAWADVLGTGDYGKAALAVLERYADPRALKRAGRNRLTAMLIRHSRGAFREAKADALLAAADETLELWAGGGIDFAALAEDIAGEARLARHLTEEIAALEERIAALYNDADPAGIVLSTPGLGVTLAAGILGRTGDLNRFRNLAGIRSFTGLVPKIDQSGNTHRHGPPTKKGDPGLREALYLAAEQARKVDPTLAARYHRLVVEHGKHHVSAVCTIAPIVMTRIAACWRNGERYILRDVDGREITEAEGREICRERYTVTAADRQRRRRPTAAKEHKGRTGRRDQESTEAAPAASPSHPKTTHPKDLVHA

SEQ ID NO: 313261 - protein, 343 aa, unidentified
MDSYVGLDVSLREVSVCVVDEAGSIQSERTVAADPDVIAALLEAHAPTVRRVGLESGPTSVWLWRELAERGLPVICIDARHAKAALSMQINKSDRNDAAGIARIMQTGWYRQVQVKSPHSHAIRGLLNSRALLVKVQRDLENQVRGLLKSVGLIIGRAKDGVFGTRTRQLLAAHADLAAIASPLLEAREAIHQQLTRLERRVRQLAKEHKQTSAFMTVPGVGPMTALAFLATVDDPTWFRRARAVGAYVGLTPRRYASGEVDWTGRISKCGDTMLRTYLFEAAGVLLTRVQKWCALKAWGLRLAKRSGMKKARTAVARKLAVILLRMWRDGTQFHWTAAPAAT

SEQ ID NO: 313262 - protein, 317 aa, unidentified
MRVVFGIDVSKVSSEVAILVNGEKFHNYTMSNDAIGFSLLLGDLKTVPKPEIIFEATGIYSRRLQAFLDEHGYAYTRLNPLEAKKQLDSLRVRKTDQIDAEKLAQSQFVLNRKTTYVQKEVYQNLRDLSRFYQNLTEDIVRAKNRLHKVLQVTFPELENILSTPSGEQYWNLVIAFPCKDFVLDLSKDELSESIRLSTTKRISDKRVAYLAEKLTALANQSYCAVKKTSPILEEVRYYGKELLRLSEQRQTVLDQMVELAQPLPEYDILLSIPEIAETTATSIIGELGDIRRFQSANQINAFIGIDLRHYESGNFLA

SEQ ID NO: 313263 - protein, 409 aa, unidentified
MRIIGMDIHRVFAEAVVLEDGEIKRLGRIGMTRDHLEDFARTLLPTDHVVVEATGNATAVTEILAPHVARVAVANPLQVHLIAKAKIKTDAIDARVLAKLYAAGFLPEVWIPDAATLARRRQVTRRRQLVRQRVRLKSIVQSVLHANLIPPCPFADLFGGKGRAWLRAQYLPDDEREAVERHVEEYDRLSEALKGVERDIARAALADTNVTRLMTIPGVDMVVAVGLMAAIGRIDRFDRPDKLVAYIGLNPSVHQSGIGPAHHGRITKRGRSDARHLLVEAAWQTVRGPGPLHAFYERVRGKRGNHIAAVAVARKLVVIIWHLLTKAEDYSWVRPSLHAKKIRDLELRAGYPPRRGQKGASYDYNIPQRRRDERNRAQQAEGAYRRMTTGWRRSGPRSEPTGATNEERQ

SEQ ID NO: 313264 - protein, 326 aa, unidentified
MAKRITVCAGIDTGKSKLDVAVDGIAEQLRVDNTAAGHKVLLEWLRRHKVRRVGIEASGGYEQPVVAELRRKRFVVVVFQPAQVRAYAKFHLQRAKNDKIDAALIAACAAAVKKIHPAPDPRLMPFAEYLTLIDQIGEDVARLKNRLATCRNPRLRALWTQEIARLGKRKRTELKVLVAAIRRHADLATRLDLIESVSGAGLPTAVAILVRMPEIGQLPREQAAALAGLAPYDDDSGDQLAARHIQGGRERLRRALYAAALAASFRWNPQLIALYKRLSAAGKEHKRALIACARKLLIFINTVVARGTPWQDEAPARGLVASQRAA

SEQ ID NO: 313265 - protein, 358 aa, unidentified
MRIIGVDLHTRQQTIAMLDTETGEVTEKTLKHEGDTVRKFYEALPGPVQVGIEATGSMHWFLELMEELGIACRVGHPAEIRKAESRKQKHDRRDAALQLKLQIEDRFPSIWMPSTELRDLRTLLRHRHQWVRMRTRVQNALQALALSRGLRRGKTLWSQAGQQAIESLPLPPQAAYRRTELQGLYRLLHEKIEELDHRVREQAVQRPGAQRLMTHPGVGPVTALATDVFLGDPARFEDSKTLASYVGMIPGEYSSAGKQRFGKLSKQGNPLLRFLWCEAAIHAVRRDPELQRFYRRKLQQKGLGKARVAVARKLGIRLWIMLRDQIDYQEFCRRGQMRRNSGGARAGMPEVGHSPAAQ

SEQ ID NO: 313266 - protein, 343 aa, unidentified
MPHYVGLDVSQKTTAICVVDAQGKRLWRGVCATDPGPISARISQHAGVDAKVGIETGSMTPWLVHGLRAAGLDVACLDARRVKAALQMQLNKTDENDAEGLAQIMRTGWYRAVHVKSLDAHRARALLGARAQLVGMTTRLSNMIRGVLKTFGLLPGAGRGLRFDRKVEALLEGAPEIALVVRPLLATWRQLRQQIAVFDKAVLQQVRADPICRLLMTVPGIGALSSLMYVSTVENPSRFSRSRAVGAHLGLTPRRYQSGETDRSGHISRCGDGLARTLMYEAAIVILHRVKRSLHLKDWAEAIERRSGSGKARVALARKLSVILHSVWRSGEPFRWAAPAMAA

SEQ ID NO: 313267 - protein, 293 aa, unidentified
MDITTIGLDLAKSVFHIVCFNKQLKEVKKRMLRRNQVLQFFTQLPPCLVAMEACASSHYWGRELRSLGHDVKLIPPQHVKPYLRGNKNDYNDARAIAEASTRPSMSFVAIKTTEEQDMQAIHRMRAQCIRDRTALSNSTRGLLGEFGIVLPRGLATLRKSIHGLLEDADNGLSDRFRNLLARRYDQFVELDGHITFYTNELELLSQQDDACQRLQTVPGFGPIVSSAFRSVIGDGRAYGRGRDASASLGLVPRQHSSGGKGPACPLSRLKQLKNRTCRLFTGCVPSAFEIGRL

SEQ ID NO: 313268 - protein, 342 aa, unidentified
MIPEPSAPFYQLFVGVDIAAASFTTTWTLAGPPKERARTFAQTPDGFAAFQAALASTAVQPALTLIVLEATGSYWITLAVTLHQQGYAISVVNPAHVHAFARSLPRRAKTDPQDAQLLTHFAAERVPPRWTPPEHVYHELRQRLLVRDGLLSMRQQARNQRHALEQWPVQIAGAFEALDGMIAELEKRIATLEVELTAVLRDGAWAESAALLGSIGGIGLVTTAWLLVGTLNFTACRSGEAAAAYAGLVPLAHQSGTSVRHRSQIGHAGNARLRTALYMATLSAARHNPVIRAQYQRLRAAGKPAKVARCAAARKLMHLAYAVVTKGARFDPNYSTRGATAL

SEQ ID NO: 313269 - protein, 364 aa, unidentified
MKKISIAKTKSQAASKKVTIGMDLGDRSSRYCMLDEEGVVIGEGSTPTTKAGMAKVFGAMARCRIALETGCHSPWVSRQLQGFGHEVIVANPRNVRLIGESTRKDDRLDARTLARLARIDPNLLSPVRHRGAEAQAHLAVIRARRVLVRARTMLVNAARGLTKSFGERLRKSGAGQVGPTLAAELSPEIRAAVSPLLAEVEALNQRIAAYDRKIEQLAKEHYPEVERLTKIKGVGTLIALTFVLTVDDPSRFQKSREVGCYMGLRPGRRNSGKSEPQLHISKEGDRYMRTLLVQGAHYILGPFGSDCDLRRWGLKMSERGGKNAKKRAIVAVARKLAVLLHKLWVSGEAYDPLRNSRQVAAHAA

SEQ ID NO: 313270 - protein, 397 aa, unidentified
MASEGWADAVPGKTRSRLAPASSWTDFDAVRAASPRTAGLRPTQPPEAMMRFYSGQHRFYCGVDLHTRTLSLCVLDSVGAIALEVTLPPDPDRLLAALAPYRDGLVVGCECLFAWYWLADLCNEQKIPFVLGHALYLKAIHGGKTKTDTIDAQKLARLLRGGTFTEAYVYPKAMRATRDLLRRRTYLVRKRAELLAHLQMTFLQYNLTPPAQKLCYAANRAKLNLNVFADVSTRSMLQADLAIVSALDQQIKRLEGELVRTAKVHDPQTFARLRSVPGIGPVLALILLYEVHDIRRFVDESHFLSYARLVGGVRESAGKFKGTGGRKIGNAHLKWAFSEATCLLIRSLPKAKTWLARRERKIGKKRALGALAARLARTVYHLWRKQEAFEEKRFLAS

SEQ ID NO: 313271 - protein, 357 aa, unidentified
MDKSNKLDFSGQDIYVGLDTHLKSWRTSIMVGESPYKTFSQDPSPKLLKDYLVRNFPNANYYSAYEASFSGFWTHRNLLNLGIKNIVVNPADIPTTDKERKQKEDSRDSRKIAKQLSQNDLTAIYVPEIEIEGDRSLIRYRKTLTKEIARTKHRIKSLLYYFGIEIPVQFSGKKYWSKSFTNWLMGVNLPTASAKLALVGHLEMAEMLRKKQYSTTKEIRKLSEKDIYRENYFLLLSVPGVGSLTAMIILTELGDISRFKNLDKLCSFIGLVPMTNSTGENEKTGGITVRRNKILRTAIVESSWIAIRNDPALMLVYQKLTKRMEPQKAIIRIAKKLVNRILYVLKNKKPYVQAVVE

SEQ ID NO: 313272 - protein, 352 aa, unidentified
MAKNDFDELMSVGVDIGKDVFHLVGFDHDGQLVLRKKLKRLALVATFEQLPRCIVGMEACLSAHFVSRTLREMGFEPRIIPAIYVKPFNKGQKNDYNDAEAIAEAALRPNLKTVSEKTQEQLDLQALHRVRSRLVSRRTAAMNQIRAVLIDQGITVRRSVAALRNSLEAILDNRSGEMSLRMRRLILGLQQDWIWLDKRIEMTTAEIKEVSETEPGCQRLMTIPGIGPLISTAMVAAIGQGEAYDRGRDFAAWLGLVPRQSSTGGRTILGSITKRGSRYLRMLFVQAAQVIMMRPKNCHKFSFGPWLEAASMRMQHNKLGVALANKLARIAWSVLSSGKDFDWKGQETAAAV

SEQ ID NO: 313273 - protein, 351 aa, unidentified
MSQKTNAVAVRTIGIDTGKNTFHLIGLDEQGAIVLREKLARGRIGRRLANVSPCLIGIEAGMATHYVARELLALGHDVRQVPPAYAKPFRQGHKNDFRDAYAIAEAVLRPSTRCVPVKTDDQLDLQALHRVRSRLVGQRTAVINQIRSFLLERGIAVRQGPRFLRQRLPEILAKRIDVLSPRMIAIIEDLSGDWRRLDERVERVTEEIEQLAHGSESCRQLMTVPGIGPLIASAMVAAIANGAAFAKGRDFAAWLGLVPKQMSTGDRTILGHISKRGNRYLRTLFMQGARVILLRPANWARHSFGPWLTAAAKRLHHNVLATALANKLARIAWTVLAQRRNYETRVVTQAA

SEQ ID NO: 313274 - protein, 386 aa, unidentified
MLLAQSEAAIAIRTDLCATFVSLELSRSTWLLTSLSPGAGEKMSKHSVSAGDTAGLFSRFVELQQKARTRTGRTFPIITIQEAGLDGFWIHRLLQGEGIESWVVDPASVLTSRRRRRAKTDKIDGETLVRTLLAYKRGEPRVCAMVKAPTPEEEDRRRICRERKTLTAERVRHVNRIKGLLFAQGVGDYEPLRRNRRGRLEELATGDGRPLPEHLKAQISRELDRLEVILAQLKAVGSERDAMLEPAKEGPPTPASLLAQLKGIGPEFAAVLWSEGLFRSFNNRRQVAAYAGLAPTPWQSGSVAHEQGVSKAGNPRLRTTMIQLAWLWLRHQPGSALSIWFRERVQRNGGRSKKTAIVAMARKLLVALWKYAVHGILIDGSTAKAA

SEQ ID NO: 313275 - protein, 305 aa, unidentified
MISWIGIDISKSNLVVWVQPQNDGFEVPNTIEGFDVLIARLAQYTVGRVLLEATGGYERRVMAALQQASFSVLRINPRRARAFAVAMGKNAKTDPIDAAVLADFAEALHASREKPISPEREALRELVQLREHFVQQRDDNKRRLQQAQLPAVVEAIKDHIRYLQTQIKQFGKAIDQSMRELDAEKADRLISVKGIGTVATASLLVYLPELGELDRREIAALAGIAPYNDDSGNHRGKRQIFGGRARVRRALYMSCWVVIRYHTDFKARYKALRERGKSAKVALIACMRILLIRLNAMLRDGTEWR

SEQ ID NO: 313276 - protein, 450 aa, unidentified
MTDEPAEMISRAAAIDVAKGSGMVCTRVPHEASPHRRIQRVWQVSARYADVVALMDELVSAGIQRLVIESTSDYWRIWYYLAEAAGLHVWLVNARDAKHLPGRPETDKLDCVWLCKLNERGMLRRSFVPPEAIRDLRALTRLRSRLAADSARHQNRIEKILEDALLKISAVISDLMGQSGRRFLAALVAGQRDPETLAALGDRRLKASTAQLEAALTGRFRDIHALEIGMLLELIDGLTAQITRLDEKVTAALAAIPGIAPACTGCGEIGGTHAPGCAGAGNPVLSVIERLDEITGIAVDGAQILIAELGTDMTVFPTPGHAAAWAKLTSRTIQSGATSRNGRAGKGNPYLRAVLGRAAMAAAKTESYLGERYRRIARRRGKQKAIVAVGRTICEIACMIIADPSVRFCELGPDYYARLDAGRQTRNRIRDLERLNPGMKVTLTPATQAA

SEQ ID NO: 313277 - protein, 338 aa, unidentified
MGYKRISIDTSKHVFAIHGVDEAERPTLRLELRRSQIEAFFARLAPTEVALEACGGAHHWGRQLSAMGHRVKLIPPQYVKPFIKRNKNDRHDAEAIGEAASRPSMPTVAVKTVDEQAATMIAKHRELLVGQRTAAINALRGHAAEFGVIAAKGTAKIEALLVVLTSEPGIPAAAKAMFAAMGEHIADLDAKLTAAERQLLEQHKRNPVSQRLAAIPGVGPITAITMALSVNPANFESGRHFAAWLGLTPRERSTGGKQRLGRISKAGNERLRQLLVVGATAVIRVARPGRPSSSAWLLGLLARKPKKLAAVALANKVARIIWAMMARGEAYRHQPITA

SEQ ID NO: 313278 - protein, 340 aa, unidentified
MDNIGLDLHKRESQLCILTAEGEVVERRIRTSRERFSEVLGARAPAQILLEASTESEWVAQHLESLGHTVIVADPNFAPMYATRSRRVKTDRRDARTLAEACRLGAYRRVHRVSAERRHLRAELTVRDALIRTRTRYVAVVKARVRREGLRVPSGEPQHTGAKLAALPLAPVATAELAPLVALLEPLNAAIAAAERRLATLAAADPVVTRLMTAPGIGPVTGVAFVATLDDVKRFATAHQVAAYLGLTPSERSSGEQQRRGRISKTGNPRARWLLVEAGWRLLRSAQPAAAPLRVWATRIAARRGRAIAAVALARRLAGILYAMWRDETTYHASAIEAVA

SEQ ID NO: 313279 - protein, 405 aa, unidentified
MSKSLRFVGLDVHKDSIVIAVAEAGRDPAEVCGEIPNDWETLRKTLRRLATGHSLRCCYEAGPCGYGLYRKIKKAGIDVVVVAPSLVPMQAGNRVKTDRRDARKLAHFLRSGDLTPIYVPDEEAEAIRDLERAREDAKNAERVARQQLGKFLLRHDRRWPKSNWTREHLAWIGQQKFEHQAQQRVLTDYLKAVEDAAAREKQLTEELAEVVKHSSLYPLIKALQAFRGIQLLTAVTIAAELVDLKRFSSPRQLMAFLGLVPSEHSSGQSQRRGRITRAGNGHVRRVLTEAAWSYRYQPRMSKAIRKRNEGVSVGVQRLAWKAQQRLHQRLYHLVKKGKRHEKAITAVARELAGFIWALGQEPELLAKTSIDERFSEQRGNKERPRLKPRPSPSFDRGAPQQSPTN

SEQ ID NO: 313280 - protein, 351 aa, unidentified
MLYTGLDLHRSFSYITTMNDKGEIVGQKKLPSNGEVVEFLKEFDDTMEVAIEATPSWYWLYDCLEDEGFKVKLSHPLKTKAIAYAKVKTDKVDSATLAHLLRSDLLPLSYVPEKPIRLNRELLRYRARLVRVQTRIKNNIHTILAKNNVSHSYSDLFGKEGMAFLYSLSLPENYKIALEGYLSVLETLRHEIRLASKRVQALAEESQDAVLLMTIPGVGYYSALMIESEVGDVKRFPSAKQLCSYAGLVPSTYASGNTCYHGHITKQGSRWLRWILIEAAIHAVKRPGPLRRFYFKVERRKGGKVAKVATARKLLEWIYHMMRDNKSFKEVERLAELQGKGEPVKKPGLVL

SEQ ID NO: 313281 - protein, 361 aa, unidentified
MSWTALHSTDSLVGVCGEEDTMEDVAVVGIDLAKSVFQVHGIDAAGKLVLRRRLSRSKLLSFFTALPPCLIGMETCASANYWARELIALGHDVRLMPPQYVKPYVKRSKNDASDAEAICEAVTRPTMRFVGVKSTEQQSVLVLHRSRLVLTRQRTQLGNAIRAHLAEFGIVAPVGRQGFERLVGVIADRDDDRLPSPARSCLAMLVDQYRLVLDHLLETDRAIRAHSRASELGRRLQEIPGVGPLVASALLATVPDPQVFRTGRSLSAWLGLVPRQHSSGGKERLGGITKAGDTYLRKMLFVGAMAVIRHAERFGTRKPWLLKLLARRHPRSAAIALANKIGRVAWALMTSGERYREPAAA

SEQ ID NO: 313282 - protein, 383 aa, unidentified
MKTETTRINEYNAIRPHLYMAFELSQAEWKLGFTIGFGQQARIRTINARDLEALEFEVKAAKKRFGLPEDTPVLSCYEAGRDGFWIYRFLQTSGVENLVVDSSSIEVNRKARRAKTDKLDTGKLLTMLMRYHQGETKVWSVVNVPSPEAEDNRHLHRELGTLKSERTRHINRIKGFLAGQGICMIVTDDFLERLDMIQLWDGSLLLPGLRARLEREYERMQFVEEQIKTLEAERLDLIRHSVRPDIEQVRQLLRLKGIGVASSWLYVMEFFAWRNFRNRREVGALAGLTPTPFQSGSDSREQGISKAGNTFVRSMAIQIGWGWLRHQPESKLSLWYEKRFGHGSKRLRKIGIVALSRKLLVDIWRYLETGLVPEGAELKTRLF

SEQ ID NO: 313283 - protein, 418 aa, unidentified
MNNIIMVPNTLILGIDIAKENHYGQFVVNGEYIKKPFIIKNTKESFDCLLVMIKELTSHYGTVHTLVGMEPTGHYWKNIAYYLKNRGINICLVNPYHVNKTKELEDNSPTKNDKKDAKIISKLIYQGQYLTCMFEEEIYINLRLCSNNRQELRKQLIAEKVRLIALLDEYFPELSRLFSDILSKSSVAILKSCPFPKDVLDIGIERLTQILKNATKNRVGLKKAMLVYKSAEESIGVPVGLEGAKYRLELILRKLEGLQKEIDAVEALMEQYLDRTGYADFLLSIQGVGIVTAAGFLAEVGDVSKYDDHKQLQKVAGLNLKETSSGMKKGKTKISKRGRSNLRNILYQAAMVMVAKNHAFKEVYQHLTKRQKNKLTGKQAIVALSVRLIKVMYTLCTKKIMYSHDKVHGLNSYQQAAS

SEQ ID NO: 313284 - protein, 500 aa, unidentified
MKTKRSKAKIRAGRRGLSVTGSEPEQKLEILKPDAAGIDCGAQEHYIAVPPDRVSAGQPTVRCFSAFTEGLDAAVDWLKQCRVSTVAMESTGVYWIPLHQKLEEAGIEVYLVNARHVRHVPGRKTDVQDSQWLRQLHRFGLLNASFRPDDIICRLRSLHRHRDNLVSSSASEIQHMQKALQEMNLHLHHAVSDITGLSGLRIIDAILAGERDPEKLVKLRDRRVSKSTPEQMKAALQGDCRPEHLFVLSQSLQAYRFYQARIEESDREIEPLLEKLAQQVEAASGNVNLDALVPSVPKGGSTTPEQLRQAKPASGPKSKRKHKPRANEPKIELAGLLERICGIDLTQVVGLNVLNVLLIISEIGVDMSKWRSAKAFCSWLGLCPGNKISGGKVLDSRTRQVVNRVADALRLAAQSAGRTETCLGIFYRRKQAHLGAPKATTATARKLACLIYQLLKNKRPYQEPDPVTYQLRLQKSALTRLQKQAASLGYTLLPTALVPA

SEQ ID NO: 313285 - protein, 320 aa, unidentified
MRNAVGLDISKTTFDATAIIGGIEKSAKFDNDSKGFEQFKHWLKELGCTDAHICMEATGNYYEGIADYIGSLYKVSVVNPLKISKYAESRFTRTKTDKQDAKLIAEYCQTAKAQDLVIRKPVINDGYKLKRLSALYAQLTADSTAQKNRLEAAKDTFVVKICQSNIRHLQKQIKAVKKELEKLTKQPALKAQTDRLATIPAIGRLTAVMLLNYLSGADFQTSNKFAAFAGLTPQIKDSGTSVRGKQSLTKYGNRRLRAMLFMPAMVAYRIKAFPDFIARLEAKNKPKKVILAAIMRKLAVIAYHVYKKGEDYDPTRYKTA

SEQ ID NO: 313286 - protein, 377 aa, unidentified
MKKELYLGLDVHKDCIITAVAEEGRKGEVRESGALSNDLHAVEKWIGRLRQAHGKEVILRACYEAGPCGFGLARRLKQLGVECEVVAPSLTPKRSGDRVKTDRRDARKLARLLRAGELTPVYIPEPTDEAIRDLCRARSDAVDDRRRSRHRLKGFLLRHGYRYQGKSRWSAAHERYLRELVLPHPAMKVILEEYLQGIAAADQRIARCEAAMRDLLEKWRLAPAVHALMAMKGFQTVAAMILVSELGEVHRFTHPRQVMAYLGLVPTENTSSERRRQGHITKCGNAHARWLLVECAQHYATPPKVSKELSRRQEGQPAQVRAISWRAQNRLHRRYRCLLGRRLQRNKTIVAIARELCGFIWELLRTQDCYQAKSTPV

SEQ ID NO: 313287 - protein, 344 aa, unidentified
MDHIGIDVHKAQSQICILSESAERIEQRILTDRVRFGEVLGGRPGARILIEASTESEWVARCLEALGHEVIVADPNFAPMYATRSRRVKTDRRDARALAEACQLGAYRPAHRTSDTQRLVRAQLAVREALVRTRSRYISVVRSLLRREGLRVRGGEAKSFGRRVGELEVPQALALAIEPLLVVLEPVNQQIDRADRGLARRVTEDPDLRRLTTLPGVGPVTATTFKATIDEVERFRGAGQVAAYLGLVPRERSSGERQQRGRITKAGNSRARSLLIEAAWLILRGKRSDTIALRTWAERVAARRGRRVAAVALARRLSRILYAMWRDDTGYAPEKIRRPEAQAA

SEQ ID NO: 313288 - protein, 504 aa, unidentified
MTQKNTSSKFRLLLTWAVGKNPKLKEVYTMNVKSTKAKNQVTTVNIFEQQELIAKVEAIKSNLKASTWHELETKGKFTKNDKLSFISDDMLILGCDIGSDTHYIRAIDTRGRELSKSAFKFSNSFEGFQSAKEWAVQLAVTHQKEQIVLGLEPTGHYWFCLATWMISNGISVVQVNPYAVKQTKEIEDNSQLKDDTKDPKLIANLVKDGNYGMPYLPEKLYADLRRLSMFRDQLCEDRIRCLNRLHREMKIYFPEYKDALGKVDGAFCLELVKKAPFPEALIALGNEGIRQIWHEAKLRGRGYSRADEILKYARESIGVKDGADASSLAVKWFAERIIEIDVQLAKIENQLIQKCMEIPHAENILEIEGIGDRVLSGILSEIGDISRFDDVKEIQKLSGMGLVACSSGKHKGQTKISHRGRKRLRYWLFQAAKSAVVHSKEFKELHIYYTTRTDNPLKKMQSLIVIACKLLRVIYTILTKGTIYDPKKMLMEIKHPMKQAAKAA

SEQ ID NO: 313289 - protein, 363 aa, unidentified
MFNSNDTVVNGHNGTAHRILAIDLGKFKSVACLYDAASAEHAFETLATRPQAVHDLIVAKRPDRVVIEVGAAAGWVSDLCQALEAPVEVANPNHDAWRWKHVKRKTDKDDALKLAQLSAMGQLPTVQLPASKVRQWRSLIGYRWTLVSRRTAIKNHIRAILDRQGRGMATGKSGWTDKSVAALQQLAQPLGAASMEELWRGQLALELTALEQVGGLIAQVESKLQTLAEADERVRRLRSIPGVGPRLAEVVVAMIDDPARFRNGKQVGAYAGLAPRLYESGAMSRQGRISGRGNTLLRTLLVEVAWLMRRYNPHLRAIFDNVCRGSKTRRKIAVVATARRLLVICWAMLRDGTDWRPPQPAAP

SEQ ID NO: 313290 - protein, 407 aa, unidentified
MSHNIAAIDVHKKLLVVVIANAGKPDVILQSRKFGTGAAELRHLLAWLSQYEVVEAVMESTAQYWKPVWMELEPHMRLHLAQAQSNKARKGRKSDLADAKRLLRRFVAGELDLSFIPEPEQRAWRMVTRGRLQLIRERVQLQNQIESLLEEGRIKLSSVITDLLGASGRRILRAMANGAADPESLAELGDRHLKCGRPALVDALTGSMGDIHRRLLAQHLDRIELIDRQIEELNQTAALQMQRYQEAVTRLIEIPGIGAEAAQEILAEIGPEAAAFPSSAQLASWIGVCPGSDESAGENHSGRCAKGNRFLRRLLSQAAQAAARTKGSHLESVFKRLVVRLGYVKAIWAIAHRICIIVWKILHQGDRFIELSEARNPKAIQRAINHHLKALRRLGYAIPQRAVAARA

SEQ ID NO: 313291 - protein, 413 aa, unidentified
MQTLVERGCGLDVHQATVVACLLIVRKDGKVQKQMRTFGTITRELLSLREWLLSEGCTHVAMESTGVYWKPVYALLEGGAGGLEIVVANAQHVKKVPGRKTDVKDAEWIADLLCHGLLRSSFVPPKPIRELRDLTRYRRKLVESQSAERNRLLKLLETANIKLASVATDVFGVSGRLMLEALVEGKATPQEMAELAKGRLRQKIDELGPALEGKLEEHHRFLLRLQLDRLEAAEKDLAILEHRLQEKLKPYEAQLTLLDEIPGVDWTLAAVIIAEMGVDMSVFGSVSQLASWAGVCPGNNESAGKRKSSRIPKGNVYLKTALVEAANAAAKAKGTYLRDKFYRLKARRGYKRAAVAVAHKILVAIYHMFSHQVCYNELGDAYLDKRNKHHLTRNLVHRLERLGYTVTLEQKAA

SEQ ID NO: 313292 - protein, 431 aa, unidentified
MLSMLEKRRGCQALPDAARGVVVGVDVSKGKMTFGAYRPGEQSKVYFVDQDKAGYRKFKVVLDNLRNSGYDPWVAFEPTGPYSTCLRERLLRMEEHVVQVNGYHVKRTKEVRDNSPGKSDCKDPRVIGDLVWQGCYQQVNEMPEAYIELRCESSEWASLSKQRARVRNEFQGLLEVWFPELRNIFRDPLCNSARALVRHYGSVTEIVGADIASIRSILRDASCGTTVKRAEEIQKASRESISPHEGQRGRHRAMVAQLDMLEMVEARQYSLYQEMIEGLKDVPEADPMLSLGGIGIITVSGILGGSGPISMYATYGQIEKFVGLNIYEASSGRWTGEKHISKRGQAQVRYLLCQAAVQQIRKNGLFREYADELKAKGKKAGQIRVAVARKLLKIIYAMARDGRAFDPNRFRATGGMEHGQLTHQGTPMKAA

SEQ ID NO: 313293 - protein, 357 aa, unidentified
MHTTQQISFAKVHFFIGLDAHLRNWKITIRLDGLELKTFSMNPSPLELITYLQKHYPDGIYHIVYEAGFCGFWALRIFRQHNIDCIIVNPADVPTTNKEKVNKSDPIDSRKLARTHENKELHGIYIPDTFHEELRALMRLRYRIIQSQTRIKNRIKGLLYCQGIQIPLQFSGRDRWSHAFILWLQQLQMKTSAGNFTLQNLILQLKEIREHNKNVLKQLRKEAQHPDIAPIMKALQGVPGVAFITAMYLYTEIMDMKRFANDNHLVSFVGLVPSTQTSDENVYSNGISFRQNAFLRTMMIEAAWTAVREDPAMTLKFKELSKRMKSQDAIIRIAKKLLKRIRHVWLKQEEYVYALVA

SEQ ID NO: 313294 - protein, 355 aa, unidentified
MKNKNLNFKGQEIYNGIDSHKKHWDVTIMLHGMQVAKVSLDPKPIALAKYLRKNYPGGIYYSVYEAGFSGFWAHRELLELGIKNIIVNPADVPTKSKERRRKSDRIDSAKLARELSVGNLEGIYVPTVEEESFRNLVRLREQFKKDQTRQKNRIKSLLNFVGAKLPEDIDEKHWSKRYITALRDLPIEQPETKQTLNELLDSLENIRGQILKIVRQLRKNVNSKEDSKQIIELLLSVPGVGFITAITLYSEIIDINRFKRLEELVAYVGLAPAVYSSGEKEKTLGLSKQRNKYLRNLIIEGTWTAIRKDPALQMAYGKLLNRMSVQKAIIRMSKKLLGRIRHVWTKKEKYVLSVV

SEQ ID NO: 313295 - protein, 355 aa, unidentified
MSKLKYIGLDVHQASISVAVLEESGKLVMQSVIATQATAILEFFAGLRGTLHVTLEEGTYSAWLYDLLVGRVSKLVVCNPRKNSLLKSGNKSDRIDALKLAELLRSGMLSPVYHGENSTRTLHELARSYMSITVDTTRVMSRLKAIYRSQAIAYGGKKLYTRRHRGEWLNQLQQPGLLRRAERLYQQMDLLQPLRRQARQELMMESQKHTVCQRLRTIPYLGPIRAAVLVARVQTPHRFRSKRQFWAYCGLGLETRSSADYQQIEGRLQRSRKKLLIRGLNVNHNHDLKNIFKGAAMSASIFSGPLQEFYQERLAAGIKPEMAQLTLARKMAAIALIVWKKGESFDPGKLNTQAA

SEQ ID NO: 313296 - protein, 338 aa, unidentified
MYVCILDQAGTVLVHKNLPTTPEAFLRVIAPYRAARVVAGECMFTWSWLADLLARAGITFVLGHALSMKASHGGKAKNDKLDAHKIAVLLRGGMLPQAYVYPAERRATRALLRRRCPLMRQRAELLAHRQNTNSQYNLPEIGKKVADKANREGVEAHFPDPRVRKTIEVDVALINPYDQLLGEVELASTRTAKAPDVQTFSRLQSVPGIGQILALLRLYEIQDISGCPRVPDFVSSCRLLKCAKESAGKRLGPAGKKIGNVHLRWAVAEAAVLFLRHNQPGKAYFTKLEHKHGKAKALTVLAQKLARAVYYLLSREQAFALTRFVPASPLRGGTEPAV

SEQ ID NO: 313297 - protein, 421 aa, unidentified
MTQSAPHTFAAFVGIDWADAKHDVCLQAAGSAKRECCQLDHTPEAIDAWVITLRTRFNGQPVAVCLELNKGPLVFALCKYDFLILFPLNPLTLARYREAFTPSRAKDDPTDAELQLELLLTHRDKLRPLNPQSPTMRALAQLVEHRRRVVGDKVRITHRLTSTLKNYFPHALQWFQDKDTLLFCDFLSRWPTLKAAQLARRSTLETFFRDHHVRSSDVIDKRIHAIHAASPLTIDEGVIAPHALLVQALVSQLRVTLQAIETFDNAIAQRAQSHPDFPLFQALPGAGPVFASRLLVACGEQRDRSASAAELQRDAGIAPVTERSGKQSWVHWRLQCPKFLRQTFVEWAAESTRHSFWAQVYYQQQRDKGKAHQAAVRALAFKWIRILFRCWQERTPYNESAYLQALNSRGSSLLHNLAKEA

SEQ ID NO: 313298 - protein, 466 aa, unidentified
MDEWEVRVIRRLVGVDLGIASAHTVRVLAEDGREVCRRRCEPTVDSLGRVEAAALAGAPAGTVLEVVMEPTGPAWLPVAVFFTARGHRVFRVSSAKAADLRRFLSRHAKSNGIDADTLARLPLVDPTGLHPLELPGAEAAALDRRVRATDRLTVLAAQHKVRIKDLTRQLLPCSPLTGELGVADLAVLERWADPRALLAAGPARLTALIVKASHGKLGADRAQQWRAAAAAAVELYADHPAIAWTDLAAEVGTEVRLLRATQAELAAHAQERETAYRYTDLGGLARSLPGVADVGGPVLVAGMGRAGRFPNGAAFKSYTGLAPRASETGNTDRKGQPMSKAGSSLLRTTLIRAADNARRQDPQLARIYYTQMVERGAEHLKAVCVVAGALAERAWAVMNRQMPYVICDIDGTPVTPEQAKRIIAQDFTVPDEVRRRRRSSKTPGRKPQQDPTANGGRPLSKPHTAA

SEQ ID NO: 313299 - protein, 364 aa, unidentified
MNKKRKRMTTAPDPKPFAPDQVDPCGTEVSAEELIVALCRKGVQQPLKSFPNTPEGHREIGHYLARSGRLVRVCMESTGVYGLDLALALAAQAGIQVRVANPRAVRNFAKALMERNKNDRVDAGVLQEFAARMPFEPWQPPARPALHLCALARRLEAITDLCAAEENRLHASQATEALPAIIRRDLERSIRFHQRAAQRLTREALKIISEDSNLQQRYTLLVTVPGIAQTSALRILAELVMISAHLDARQWVAYAGLDPREYSSGTSVHKKVRISKAGNRHLRRGLYMPALVAVRHDPHLRGFYQHLLANGKLKMQALVAVERKLLHAIYGMFKHQQAYDGTKVYRLPDGLTPASSAPVRTEAA

SEQ ID NO: 313300 - protein, 410 aa, unidentified
MEILYPHCAGLDVHKDSVVACVRHVRDGKVATTVKTFKTTTQELMLLSDWLSAEGATHIAMEATGVYWKPVWNILSDSDFHLVLANAAHVKNVPGRKTDVNDACWLADLMAHGLIKASFVPGEPTQQMRDLLRTRKQFVRERSSHQQRIQKTLEEANIKLDSVISDVLGLSGRRMIEALIAGQTDPQVLASLAHVRIRATAAELEAALRGRVTAHHRFMLQLHLDHLDAVDAAIARIDKEVDGNVEPFRTAVQMLSDIPGISNLSAQMILSEIGTDMSRFETDGNLISWAGLCPRNDESAGKRRSTRMRKGAPWLKTTLIQCAWAATRKKDSYLQAQFLRLRSRRGAKKAIGAVAASMLTAAYHMLKYGTLYQDLGAKHFDQRTKGKQILTLINRLKNLGFDVAITPLAA

SEQ ID NO: 313301 - protein, 431 aa, unidentified
MSKFFYKPIVGIDISADFSVAAILAPDGEVYRKPFKIMHNRNGFDYLVDQIKKAEKELNMKTAIFMESTGVYHLTLFHFLKDTFEVCILNPLITNCNKNVDIRKVKNDKKDALTIAKIGKFQDVKYSSNFDIEIYTLKSLCRDYYKFTDSKSTFKKKLSTDLRVIFPTYNTVFSNITCKTSIAILKTYSSPEAILNADRDALIGLISTNSRKGLVHSEKIYNKLYAAAEEAVYIGLKSPSLFVKIINTITIIESLETQIKNLLREIHLLMHSNRISAEFKKNIQLIYSIPGVGELTAITIMSEIGNIKGFIKPKHLVAYFGIDPSVNQSGKFNSNKNVMSKRGTRIGRRALYAVALASIRKNRSGEPINKVLLNFYKENMKGKSKKVGLVTIMHKLINYIFSVLKNQKEYELRDPKIHAKMYLNKQSNFAA

SEQ ID NO: 313302 - protein, 351 aa, unidentified
MFIIGVDYHPSFQTIAFLMEETGECGEQELNHSDGEAERFYRDLKQRRICVRVGMEATGYSRWFERLLAELGFELWIGDPAEIKAKRVKKKKTDREDARLMRKLLLEDRFPRIWVPDPENRDLRQLLWHRHRLVQMRTRIMNQLQALAMNEGYRWKKKLWSEQGRAQLEKLSLAPWASRRRQELLELLDRMNPTIEELTAAVEREARKRPDVMRLMTHPGVGPLTALAFVLIIGTWERFPRGKQIGNYVGMIPSEDSSAGKQRLGHISKQGNSLLRFLLVEAAQAAARCNPDWRRRYFHLAMRRHKSIAKVAMGRRLAVRLYWMWRNGCEYSPSLEFGSYAGQLGTGHGVK

SEQ ID NO: 313303 - protein, 348 aa, unidentified
MIIIGVDFHPEFQQIASVDTDTGEFQEKRLAHREEAEAFYRALAGQKVRVGMEASGHARWFERLVAELQFELRIGDAAEIRTKRVRKQKTDRQDAQLILRLLLEDRFPQIWVPSWENRDLRQLLWHRHRLVQARTRMMNQLQAVALNEGLRCKKRLWRERGRQQLESFLLAPWASRRRRDLLELLDRLNPTIAELSQAVEQEVQKCPEAQRLRTHPGVGALTALAFVLIIGRAERFGSGKQVASYLGLVPVEESSGNRRRLGHITKQGSSMLRFLLVEAAQVTVRSVPEWRSQYFHLAMRRGRKIAKVAMARRLAVRLYWMMRQGRGYEQVKKFGSHAGQPGHRDGVQ

SEQ ID NO: 313304 - protein, 315 aa, unidentified
MTAYLGIDVSKQTIDCYLSCDKGTFQTKQSNNGKGFQQLQNWIDSHCDDQLCICMEATGAYWQKLANCLYANGHQVCVENPAKIKYFSKAVMVRNKTDKQDAMVIANYCRMMNPRIWRPESDNVLALRNIMRLLARLKRQRASELTKVIETQESLRHIIHANITHFDKQIAETEKYLKQFFKQNSDLNQQKALIKTIPGVGDTTAAVMLSVLLGSQQFEHAGQFVAYLGLNPQQHQSGTSVNGKTRISKIGKADLRTALYMPAMVAYSKRLYPQFVDRMKARGKPTMVIITALMRKLAVLAYTIHKKQTPYVKAH

SEQ ID NO: 313305 - protein, 324 aa, unidentified
MSSHEIVGIDVAARKLVMIGERVALAEYENTAAGRSKLAKALSRSPRPVRVVLEATGIYFLDLACELAAAGIAVMVVNPKATHHFAEAILQRRKNDPVDAAMLREYGRRMDFVSWQPPRHELFGFRALTREVQALSKTVAAARNRLHAITATKLAPTVLIGALERQIAHNQALIDELVAAAVAQTESDPELARLLARTDSVPGFAAKATVLVIGELSVLPPMTARQWVAQAGLDVREETSGTSLARRPRLSKRGNKRLREALFYPALTAARCCPAAAAFVERLVAHGKTRLQAIVALMRKLLHGLHAMWRNDEDFDAEKLFAPA

SEQ ID NO: 313306 - protein, 339 aa, unidentified
MNQVSTIGFDIAKHVFQVHGTNRQGHTVLRRKLRRNQVIAFFKTLPPCLVGMEACGSAHYWARQLRALGHEVRLMPAEYVKAYVKRQKNDGTDAEGCCEAVGRPTMRFVPIKSEEQQSVLMLHRARELLVRQRTMLINAVRGHLAEYGIIAPQGRAGMDELLELVEGEEGGSLPELARSLLVLLAGQLRQLRVKISELERQIHAWHRANEQSRRLETAPGIGPITASAIVATVPDPSYFKSGRHFAAWLGLVPRQNSSGGKERLGRITRAGDPYLRRLLVVGAHAVLRFSNKAKSAPTRWAAELLSKKHYTVAAVALANKMARVIWAMMMRGEEFRAAA

SEQ ID NO: 313307 - protein, 322 aa, unidentified
MSFSFSGVDENEQPVLRRQIRRGEVAKFFAKLAPARIGIEACGASHCWARVLRGLGHEVMLLPPQYIKPYVKRGKNDKIDAEAICEAMSRPTMRFVPVKSAEQQAALTMLGVRDLLVKQRTMLINAIRGHAAEFGITVAKGSKQVPELLGRLASEKGVPALAREMIAMLSSQLDGLDIKLTAIERRLMAWHRQDQTSQCLATIPGIGPITGVSFALKVPDAKAFRSGRHFASWLGITPREGSTAGRQKLGRISRAGDEDLRRLLVIGATAVIRAAKPGRTAPWLLALLARKSKKLAAVALANKMARIVRAMMVSGETYRQPA

SEQ ID NO: 313308 - protein, 332 aa, unidentified
MENFYFIGVDVSKKKLDFCVMFEGKVVHEEETANHQSAIMSLLHHLEEDYQIDNTRMLVCAEHTGQYTFPLACACKAVECKLWLENAAEIKYSSGVQRGKNDKVDAKRIAIYASRFQDKVQYYERPTEDIERLKQLESERTLYVTDLAKYKGQLKDQREYMPKDLYERKVKRLRALVDDLEEAIQAITDEMDEVIASCPVLFRQKELLMSIDGVGRVVATNMIITTEAFTRFDDPRKFNCYAGVAPFSYSSGSSQHSKARVSHRADKVMKRLLHLAAVAVTHRIGGELKQYYERKVAEGKNKMSVINALRAKIVARMFAVIKRNEKYKPILS

SEQ ID NO: 313309 - protein, 350 aa, unidentified
MDIYFGCDAHKRYSMFASLTDRGQRGQPVRVEHARALYREYLRGLPPNSPIAVETVGNWYWMIEEMERAGHDPRLVHARKAKLMMGQINKTDKLDAAGLATLLRNGTLPEVWIPPSDLRDQRELPRMRMSLVGVRTMLKNRIHATLAKYALEIDEVSDVFGVKGRELLKGRLAELPPYTRESVETQLELLDEVGEHLDRCEQEIREVVKATPEMTLLKTIPGIGSILAVVIALEVGDVSRFPGPEQLASYAGTVPRVQSSGGKTSYGKVRPDVNRYLKWALIEAANMIVLHRREWEGRHLVELYQRLRERKGHAKAVVAVARHLAQAVFWMLKKKEAYKEPHRPISSSRE

SEQ ID NO: 313310 - protein, 415 aa, unidentified
MLILGCDIGSETHYVRAIDTRGRELSKSVFGFSNTAEGFESMLDWSTKLAAANDKKQIVLGLEPTGHYWFCLTTWLVAKGISVVQVNPYAVKQTKEVEDNSQLKDDKKDPKLIANLVKDGNFGMPYLPEKLYADIRRLSMFRDQLNEDRIRNLNRLHREMKIYFPEYKDAFGKIDGAFSLELLKEAPFPDGLAALGTEGMKQIWHEAKLRGRGYANASAILEYARKSVGIKDGADAGRQAVKWFVSRIIELDEQLSDIENQLNQRCNEIPYAKNILAISGIGENILSGILAEMGDISRFDDVKEIQKLSGLGLVACSSGKHTGETKISHRGRKRLRYWLFQAAKSAVAHSEEFKELHVYYTTRKQNPLKKMQSLIVIACKILRVIFTILTKGTTYDPKKLLGDIVRPDQSIPQAA

SEQ ID NO: 313311 - protein, 316 aa, unidentified
MSAGPCFVGIDVAKAQLDIAVRPSDARWQIPNDPEGYAALVERLSRLAPALIVLEATGGFEAPAGAALAAAGLPVVVVNPRQVRDFSKASGQLAKTDAISAAILAHFADAMRPPVRPLPDATTQELHQWLARRRQLVEMMTAENNRLPGAARAVRPSIQAHLGQLRRQLKGIERRLKALIERSPVWRDREQLLSSTPGVGPVLATTLLADVPELGRLNRKEIAALVGVAPLNRDSGTLQGKRTVWGGRASVRAVLYMAALVASRKNPRIRAFYERLCAAGKPPKVALTACMRKLLTILNAMVKHGTAWKEPAALGA

SEQ ID NO: 313312 - protein, 444 aa, unidentified
MAMRKRDDEVFPNAAGIDIGASKHWVAVPRHLAEQAGCEPLREVGAMTDDLNALADWLLALGVDTVALESTGVYWIPVYEVLEQRGLKVWLVDARQMKYVPGRKSDVQDCQWLQKLMSLGLLRAAWRPDGEVCVVRAVARQREVLITEQVSWVQRMQKSLVQMNIQLTEVLADVMGTTGQAIIRAIVAGERDPQVLARHRQSRVKASAEEIAKALTGNWREEHLFVLRQALEMYDDIAKHLLECDVKLQALLDQRSQTRVDLGKAPKAGSKSRIEFDVRQALANWAGVDLTRINGLGVTVVMKLLSEIGPDVSRFASVKHFCSWLGLCPGTKISGGKVLSSGTKRSANRARQALKIAAMTLSHNDSALGAFYRRLCGRMDKPRANTATAHKLARMVYFMLTRGEAFVDQGQQRYEEQQRERSIAALKRRAAALGFRINPMESAA

SEQ ID NO: 313313 - protein, 407 aa, unidentified
MKLYVGIDWSQSKHDICLLNPAGVVQTQTVIEHSETGFFQLDRLLNRIGVNSQECAIGLETAHSILVDFLWDHNYSAIYVLPPTLVKGSRTRLRSSGARDDPSDAFLIADILRTDLGRLHCWQPDSPLTRQIRVRVRFFDFLTTQIVRLTNRQLAILLRYFPAAADLFSGLNTLIAQHFILHYPTPQSASQLDLPSFRAFAKQHRYPRPSKLAGILAKLDRPYPQAPQDLVEVYQSEAQELARMLLEALRLKCTTGTELAQLLTQHPDYEIYDSLPGAGDYLKAALLSKLGDDRQRIGRANHLQALAGTCPVTVSSGKRKFVRFRHACDRDFRRIAQQWAKSSLGDSIWANTYYSQVLPRCDSHSHAYRCLANRWLAILWRLWQDRVPYDESYHLQQRRKKSQPINR

SEQ ID NO: 313314 - protein, 427 aa, unidentified
MARQPKGETHMTKTNRQWFVGVDWASSKHDVSLTDDSGKIIGRRIFAHSGEGLAQMADWLLRESGAMAADIQVAIETPHGAVVETLLERGFKTYSINPKQLDRFRDRFTAAGAKDDSRDADVLASSLRTDGKAFRALMPADPAIVELREWSRMAEAHGQDLRRYMSRLHEQLQRYYPAFLALGGDADAAWKLALLELAPTPAMARSLPRAKVARLIEAHHVRCHDVDGVLAILRAPPPAVSDATVAAASAHVRTLLKSIRLAAEQSKEANAMLERLTKALAEPEDNASGQTVQRDAAILRSSPGLGRIILATLLTEAPQAVHERDYHALRCNGGIAPVTRQSGKRRYVVRRLACNRRLRNALYHWARNAIQKDARIRAKYEALRARGQSWARALRTIADHLLYIACAMLRSGTLYDKNHGSEAIKSA

SEQ ID NO: 313315 - protein, 339 aa, unidentified
MKDQDVSDVVRTKKRTAMRYIGIDVSKATFVVAYSSDKGGEIRTFNNTTAGIRQFIGTLPKDGSIHCVMEATGNYSALLLYMLNVAGITVSMENPLKVKNFAKAMLSTIKTDKSDARLITLYGEKMNPRPFKVQGEAILRLRQKRTVIRQLTKQITAMSNLRGSLACLPVPDKGTTHTVDETIKFLEKKRDRLQSELTDLVEVEFSRQLALLTTIKGIGITLATALIITTGGFTYFQNAKQVSRYLGICPTYEQSGTSVNIKGHINRNGDAYTRGLLYIAAWPASRFNAQCKETYTRLRQNGKSGKLAMIAVANKLVRQAFAVVAHDKEYVDGFVSNRP

SEQ ID NO: 313316 - protein, 379 aa, unidentified
MKLNSQMELGVFFRQCVGVGISKDKFTACLYMFDRAADVGCHTASVDFANTRQGFNQLVRWSRKEAQRGYPLTYLMEPTGVYYESLAHHLHKIGQTVYVVLPNKARKFCEAEGIKTKTDAMDARCLALMGCVSRKLCPWSPPEPIYRELRQLTRFRADLCKVRTSMENRKEALQHMVGVCSDVLGGCDKLTREIDKLLNQNEKTIALKLAENKDLMAKVNRVATIKGVGWTTVVSIVAETEGFHLIKNRKQLASFAGLDVIARQSGKEDPKHGISKKGNANIRAALYMPALSATRCNRQMKDTYNRICLKHPKEKMIGLVAVMRKLLLLIYTLWNNGEQYDPAKGQTDTTSEAESGEYSQQMTQEPDWNAVNQDGEPVS

SEQ ID NO: 313317 - protein, 336 aa, unidentified
MEEAPRRSSTDGFAFFLGIDVGKTALELALRDGEEIVARTTVSNDPEGHSTLVSWLEDQGARPKKACVCMEASGDFEKAIAQRLYEEDYRVSVVNPRRIKGYASSQLQRTKTDSADAALIARFGQREDPRPWKPPSAAESRLQELTRARQALKKEKTRAQNRLDEAEDKAVRKAHENLLDEIERQIEDLEEEIEEHIEEDSELNDRCSLLETIPGVGLQTAAIVVSELGAPEQFENARQAAAYAGLVPRHRESGTSVRGKPQMSKVGNGRLRRAMYFPAMTALRFNSAVKAFGNRLKERGKEKMVVVGAAMRKLLHICYGVLKSGRPFDPSLHPGT

SEQ ID NO: 313318 - protein, 415 aa, unidentified
MALKIVYKICCGIDVHKTFVVACIASTDKHGVTSYERHRFSTYTKGLKNLLQWLLEHNCKDVCMESTGKYWIPVYNILEKDCSIVLAHPKYVKAIRGKKTDKKDAKWIADLFKHDLVAGSFMPPADIRQLRDLMRYRFKLTCFKSSEKNRLQNCLTVSNIQLGNVVSDTFGKSAQAILDKILENPADTSFDLEPLVFKSLKKKLPELRDAIDGYITPEQAGKLKVIKSHYENLEARKAELEELILALATPYQQELAILQTAPGISSDFTAIGIISEIGTNMEAFPSAKHLCSWAGLTPTNNESAGKKKSVRVSKAGCYIKPLLVQCANAVVKSSKHPEMRNRYLRLKKRRGHKKAIIAIARMLLTALYHMLKNGENYNAELYRKSDLPPVDREITVEQAILIARNQGYKIKSATA

SEQ ID NO: 313319 - protein, 354 aa, unidentified
MGNSTTIAVDLAKSVFEVAVSEVPGRVSERKRLNRAGLVPFFSNRPASVVVMEACGSAHHWGRELEKLGHEVRLLPPARTTKYRIGNKTDRADADAILEANRNEKIHPVPVKTIPQQTLSTVHYLRQAWMKTRTARLNALRGVMRELGVAIPVGAKVVLAKASEALAQGRVPEALQPLLLASMAEIRQLEENVKEGDLLLARLARSIPVARALQEIPGIGPLGSTALIAAVGDPNRFRSGRKMSAFLGLVPREFSSGDKRRLGSITKRGNTYVRMLVIHGGRAILVAAHRRKNPDRLHRWALEVERRQGRNRAAVALANKIIRMAWAVWARGTRYDGALGENSVQTTARTTGAF

SEQ ID NO: 313320 - protein, 370 aa, unidentified
MERGSPMLNTTTFVGLDVHARSIKAVALDAMTGEVRSATFGYDAAEVAGWVSSVDPSAKCVYESGVTGFDLQKRLSSMGIDCVVGAVSKMIKPSADRRRKNDRNDAEFLARMLSVGNVVEVWVPDDGCEAARDLVRALDDARDDLKRCKQRLSKFLLRHGHAFSETTPSGRRKGNWTAAHWAWIKSISFAEKADDDVLAYYIDATRQAMEDKARLERLVEAEASKPRWKRRVDSVRCLKGADLVFEAGEFSRFKNARSFAAWIGLTPSEHSSGESVRQGGITKAGNKHLRRVLVESAWHYPGCSPHSKDLTKGQAPDPGARRHAAKGVRRLVGRRAAMLERGVHKNKANVATARELACWCWAIGCMVENG

SEQ ID NO: 313321 - protein, 358 aa, unidentified
MDKLTTIGIDLAKEVIAVCVMDQHGHMVEQRVLRREAFERWAAQLPSCTVAMEACSSAHHWGRWFAARGHAVRLIAPEFAIASRKGGKNDTADAQAIAIAIAALQPTMRFVPVKTVEQQAILAWHSCREGWIKERTALINRARALLTEFGLVIPRCAERILTALPTLVDDPRLPDPIHALLLEMREQLAILHARLSRCDAHISAHAKSNATAKRASELTGVGPLTASALAAVVPNAKAFKNGRQFGAWLGLTPSQHSSGGKTRLGRISLRGNRYLRMLLVMGARSALRSALKAESSNATRLQRWVQALYERKGYFKTLIAIANKNARMLWAMLAKGERYDASAWERCSRNPNAAVASH

SEQ ID NO: 313322 - protein, 409 aa, unidentified
MGILFVGDDWAQDHHDVYLMGDDGKRLAGGRLPEGLAGLARLHKIVADHAQDPAQVVIGIETDHGLWVQGLLAAGYQVYSINPLAAARYRDRHHLSGAKSDAADAKLLADLVRTDRHNHTTVATDSYGVEGIKVLARAHQSLIWARTRHGNQLRDALREYFPAALATFEDLTSRDALAVLSKAPNPDKAAKLTIKQIVIVLRRAGRQRNLEVRAQQIQEGLRSAQLTAPTALVEAFALTTAASVSIIEEMNQQIIELEVGLSEHFGKHQDAGIYRSLPGLGETLGPRVLGEFGDDPGRYATAKCRKNYAGTSPLTIASGKKRAVIARYVRNRRLYDAIDRWAFCSLTNSPGCRAFYDQRRESGDSHHQALRALGNRLVGVLHGCLRHHTIYDENTAWAHRTKTPESVAA

SEQ ID NO: 313323 - protein, 422 aa, unidentified
MMDKERSWFVGIDWAAQEHVVSLYDGAGNKIGQRKFSHGGTGLTDMIAWLLKASGGEPGEIHVGIETPHGPIVEALLERRFNVYSINPKQLDRFRDRFTVAGAKDDSRDADVLSDSLRTDMRAFRKLSIADPLIVELREWSRIDEELKVEHGRLTNRLKHQLWRYYPQMLELADDVGAKWFLELFEAVPTPEKAANVREKTIARILKNHRIRRFDAAHVLAELRRPALAVAPGTIEAATAHIRSLIGRIRIINGQLADAGQQLDRLCKKLSEPVADEDGEAAPGQKPEQRDAAILDSLPGVARTVLATLLAEAPDTLQRRDYHALRALCGSAPVTRRSGKSRMVVRRYACNHRLRNATYHWAQNAIQHDHTSREKYDALRARGHGHARALRSIIDRLLSVACAMLDSGTLFDPEFASKRATG

SEQ ID NO: 313324 - protein, 345 aa, unidentified
MPIVGGLDIHRKQITFDYLDTVTGQVRRGQVSPADREHLRAWLARFAGLEDVAFAVEGCTGWRYVVEELAAAGVSAHLAEPADTAFARGRKRHAKTDKTDCRHLRMLLAEGRLPECWIPPGHILECRALLELYHDLRAEHTAWVQRIHAVLFHQGAPALGEGTLRTEQGLTALRAAAADWLSPAGQLQVATALEILEALEARLHAVRHQLTDAARHLAGAKVLAARLYGVGPVTALAMTCWLAGKDRFSSSRKAVRFAGLDVTVHSSDRKGPPGRLSRQGPPVLRWAVYEAGKTHARSSAPDHRYYAQVKDRCNGKRAALSEARKILRQACHILAELGDDALAPA

SEQ ID NO: 313325 - protein, 413 aa, unidentified
MERYQVAGIDVHKKMLALVVVDVAETGDWQFERRKFGTGTADLQALAGWLKDQEVREAVMESTAQYWKPVWQALEGQCRLHLAQAHSNRAPKGRKRDFADAERLVRRHVAGELILSFVPNPEQRLWRTMTRTKQQLTGDRVRLQNQLEAFLEEVRIKLSSHVSDLLGLSGRRMLQAIAGGANDPLEIAALAAQGVRATRQQLADALSAARTLSDLHRQILKLFLERLTLIETQRDTLDRALGQALREHQDAVRRLAEVPGLGADSAQQIIAEVGPHAATFPSAAQLSSWVGCCPGREESAEVSRSDRSPKGNRQMRRILTQAANAAVKAKGSIFEILYRRLVAHHGHAKAIWAVAHRVCRITWKILHAGVTYEERGIRSNLQAAKQRANRLVRNLRRLGYQVQLTPIHPEALV

SEQ ID NO: 313326 - protein, 401 aa, unidentified
MPELWAGTDAGKAAHHCTVIDTDGTKALSRRVPNNEPELLDLIGDVLALAEGSPVTWAVDLNAGGAALLIALLAGHGQQLLYIPGRTVHHASRRYRGDGKTDAKDAYVIADQARMRRDLQPLQEWDEIAVDLKILTARRYDLAADRTRAINRMRAQLLEYFPALERAFDYAASKAALILPTGHQTPAGLRRTGTSRLATWLRNRKVRGAQAIADTAVAAAQAQQTAVAGESTAAAVVHTLAKEVLALDEEIAHIDGQIAARFGEHRDAEVILSMPGMGPLLGAEFIACTGGDMDAFGSSARLAGVAGLAPVPRDSGRISGNMRRPHRYHRRLLRVFYLSAQIAARFCPTSKTFYDRKRAEGKSHKQAVLALARRRLDVLWALIRDHRTFTTTPPASDHGPA

SEQ ID NO: 313327 - protein, 332 aa, unidentified
MQMLAIDLGKQSFHIYGITCDGEVISRKVSRAKLTDAVIGLQPQSVAMEACASSHHWGRVFDAQGYTVHLIHPRFVKPFVKGSKNDAVDAEAIFEAANRPTMRFVPLKSVEQQDLQALHRTRDRLIVQRTALINHTRGLLAEYGVVMPAGASRFRLQIDKMIETVELSNLAKNLFLKLVEEYRDLDARVSTLDDMLVEICRKDERCKRLTALPGVGPIVATSLVAAIDDGQHFASGRALSAWIGLVPRQYTTGGKPRLGGIGNRANHYLRRQLIHGARSALLRISKHDDRRSKWAQELQSRAGHNKTLVAMANKTARMAWAMLRSGESYKMA

SEQ ID NO: 313328 - protein, 392 aa, unidentified
MARTRPKSNTTTPTPVIDPVGDITGGVDTHLDFHVAAAKDSLGRLLGTQTFPATQAGYTALLAWLTHFGPLALVGVEGTGSYGAGLTTYLTGQGVHVVEVNRPNRQKRRRTGKSDPQDAINAASAALAGEDTATPKLRHGPVESIRVLREARHHLVKARTAAINTLKSLLVTAPTALREQLSAASTATLVADCAALPGPGLPPARPGTPDRAQASQHLATQLRDSGEGLRLALGELARAIQFYDQRLSELDTTLSALVAQTAPRTTALYGLGTDTTGQLLTTVGEHPDRLHSQAAFACLTGVAPVDASSGKHEHHRLSRAGDRQANAALYRVVIVRLAHHQPTRAYLAARLRPGTKMTKKHLIRCLKRYLAREIYPRLMADLAALHDPQPTT

SEQ ID NO: 313329 - protein, 394 aa, unidentified
MEAVTSQPHTPAAIRTDLAAIFVSLELSRSTWLITSLSPGNGEKMSKHSVGGGDVAALLHRFAQLQEKVRSRTGNQVPIVSIQEAGLDGFWIDRVLKANGIESYVVDPASIAISRRRRRAKTDKLDGEALVRALLAFKRGEPRVCAMVNPPSPEEEDRRRICRERKVLIAERVKHVNRIKGLLFGQGISGYEPLRKNRRKQLDELHTGDGRPLPTHLKTQISRELDRLELLLEQITAVENERDTLLAAQKDSVAATATLIPAGAMLCDVKGIGLELAAVLWTEGLFRHFDNRRQVAAYAGLAPTPWQSGTIDHEQGVSKAGNPRLRTTMIQLSWLWLRHQPQSALSLWFTARVQSSGGRTKKSAIVALARKLLVALWKYVTAGVVIEGAVLKTA

SEQ ID NO: 313330 - protein, 407 aa, unidentified
MLFVGDDWAEGHHDIEIMDASGRALLKARLPEGVEGIGQLHGLIGERIGRDADPEQVLIGIETDRGPWVAALVAAGYRVFVVNPRQTFRFRERFSPSGAKSDAGDAHALADMVRTDSHQLRQVAGDSDLAEAIKLLARAHQSMIWDRQRLVARLRAHLRDFFPAALAAFGEELAAAEALDLLGQAPDPDTAMKLSLAKITAALRHARRRKIDERARKIQDGLRSEQLRLPPTVQRAYAVTVSSLVAMITTTVEQIDYLEQELTGHFHEHPDRAVYLSQPGIGVVLGSRVLGEFGDDQDRYAGPKARKNYAGTSPITIASGRRSTVNARYVRNTKLIDALMRQAMAALAGSPGARAYYDRQRARGLPHNAALWHVGNRLVGILHGCLATRSLYDEATAWGHHTAAAAA

SEQ ID NO: 313331 - protein, 458 aa, unidentified
MAKVRSWVGLDVHAAKVVACVVDAESGEMTVHRMGGETAGVVAFCSGLPRPTRAAYEAGPTGYGLARALVAARVGCVVAAPGKIERPAQDKIKTDARDAERLVRLLMIDALYAVRVPTPEQEALRDLVRAREDVRVDLMRARQRLSKLLLRHDVRYEDTTSRWGERHRRWLAQIDLGQPGAQATLTDYVGAVEALELRRGTLEAAIAQLVPDTPCAQAVARLRCLRGIDTLSAVGLAVEIGDFDRFERPGQLMSYVGLVPSEHSTGQTRRQGHITKSGSQHARRLLVEAAWHYRRPPRLGTTLERRQQDQSPVVVAIAWKAQQRLYHLWRRLDTQRHIRRTIVAVAIARHLAGFCWAIVNHDEHDYEHDLLDQPRRSQPSRARTRARVADAGSPSSASRSACGRPTGDSSTGHPLAGSKVEPGGPTTGKAVASGNARHAGDQPARARRSQPKAHTATR

SEQ ID NO: 313332 - protein, 310 aa, unidentified
MDAVIVGIDVSKDRLDVHVLPSGEAFGVGNDPAGIEALAGRLAALEPALVALEASGGMEIVAVAQLAAAGLSVAVVNPAQVRSFADALGKRAKTDPIDAGVIARFAAAAGVKARPLADAQGRLLAELVARRRQITAMIVAEEARLKRAGERQLKKSITRLLAALRRELEVLDAELDGQVRASPAWRIKQDLLASVPGIGKGIARTLIAELPELGSLDRRRIASLAGLAPFTRQSGTWRGKSFIAGGRASVRAALFMGALVASRHNPVLKAFRDKLVAAGKPRIVAIVATARKLLTILNAIIRDQKPWQSA

SEQ ID NO: 313333 - protein, 346 aa, unidentified
MTAFAALDVSKRSTSIHIVDEKGTCLWRGKTLTDPDALAMALSPFSNDLTLVGLETGCWTTWLWHELTDRGFPMVCMDARQAHAALSISINKTDANDAQGLAHLLRTGLFREVRVKSWDDMRKRTLLRARATMLRCVLDLANAIRGALRTFGISLPAGSGNGGAKIFERRGIDHLATRTDLEVIIGPLLEAWRAGRVQVARHESTIRQIVRTDPRCQLLMTVPGVGFLTAVGYVGAIGDPATFKSGRTAAAWIGLTPRRYQSGAINQQGRISRQGDKLLRSYLYEAAAHLLTRAKTDSALRRWGLKLRERIGFKRANVAVARKLAVILHAMWQSGRPFETDGAVPA

SEQ ID NO: 313334 - protein, 339 aa, unidentified
MTELKLIAMDTSKHVFSLHGVNERGEVVLRRELRRQQLDAFFRKLPPTEIVLEACGSSHHWGRTLAALGHRVRLIAPQYVKPFVKRGKNDRIDAEAISEAALRPNMRFVPVKSVEAQADAMILSVRELLVKQHTQLVNALRGHASEFGVIAAKGTGHVEGLLERIAADPAVPAPAQAMFVELGERIDELRTRLAELDRRLAALHKANPLSRQLAEVPGIGPIGALTLALTVDASQFHSGRHFAAWLGLTPRQNSTGGKTRLGGISRQGNERLRQLLVLGATSVVRLTKPDYRHASAWLLALLQRRPRKLAAVALANKMARVVWAMMTSGEAYRPQPAAG

SEQ ID NO: 313335 - protein, 368 aa, unidentified
MHGQSRRLRMAVIEERERRIVGGVDTHKDLHVAAVVDEQDRVIETRCFATTRQGYRQMLAWMRSFGELQRIGIESSGSYGAGLLRFMQQAGIAVLEVTTPDKQDRRRRGKNDDLDAQNAAHAAFAGQRTVTPRSRDGMIESLRVLMACRKTAVSARRVALQMIHNTIVCAPDGLRDQLRSLTRMQLVRTLAAWRPDLTAYRDLDSAYRIGLKSLARRYLELHDEIADLDAMVAAIVDELAPNLIARNSIGHIGAAQLLLTAGDNPERLRSEASFASLCGVSPVPASSGKTVRHRLNRGGDRAANSALHIIAIGRLRTDQRTKDYVARRIAEGHSKLDAIRALKRYLAREVFTLITQRRREINATRIAA

SEQ ID NO: 313336 - protein, 342 aa, unidentified
MKIVGCDLHTRYQQVAMLDQETGELIERRLEHQSGEALAFYAALLGPVRVGIEATGHTRWFERMLAELGQELWIGDAAQIRASVVRKQKTDARDAAHLLDLLLSERFPRIWRPTMAERDLRQLVWHRQKLVWMRNAVGNQLHALAMGEGVCRKKKLFTKKGRVELEGLGLGVWASYRRQELLTMLDQFDGSLRELDRAVAEQAEQNAAAVLLMTHPGVGPVTSLAFVLTLGPVERFERSKQVASYLGLNPREHSSGGRQRLGAISKQGNPMMRSLLVEAGHTAARLDGELRQDYQRLKLRRGSGVAKVAIARKLAVRMYWMLRGPANYAQLVRMQGVPPVST

SEQ ID NO: 313337 - protein, 412 aa, unidentified
MHERQKHFYVGVDLHKQHHVAVIINCWQEKLDEIKFENKPSAFSTFLLDIYKHMDDGLTPIFGLEDVGGYGRALAQFLDEHGQVVKEVNPALSYAERKSNMTTQKSDSWDAECVARILVNKLDQLPDAKPHDLYWSIQQLVSRRNALVKAQGALKNQLHIQLSHHYPSYKKFFSEVDGKTALAFWERYPSPPCLEAVSVKQLTIFLLEASSNTCSVKKASEILKLVKEDGNTIREHQETRDFLVKSIVRDISFKKQEMRYVERELKGLMSLLDFQLDTMPGIDLVTASALIAEIGDVRRFPNANKLARFAGIAPVYFGSGGKGREQKSKQGNRALHALFYNLAVQQVQVAKGSKLPRNPVFHAYYQRKLKEGKTKGQALVCIMRRLVNIIYGMMKHKTAYELPIIKEEEVVY

SEQ ID NO: 313338 - protein, 422 aa, unidentified
MWEQTQDVGEVIARVAALDIGKAELVCCVRLPAADGSGPRLQEVTTYSTMTRQLQVMADRLRTLGVTRVVMEATSDYWKPPFYLLEANGFDVWLVNARDVKHLPGRPKTDRLDAVWLCKVAERQMIRPSFVPPEPIRGLRDLTRYRAALVSDASGEKNRVDKLLEDAQIKLSVVASDIFGVSGRAMLAALIAGERDPKVLAGMARSRMRVKIPRLEEAFVGRFNDRHAFLLAKMLARIDAIGLDIADVDARIDAEIAPFAAAVARLDEIPGVGATAARVIIAEIGVDMSRFPTPGHLASWARFAPGVHESAGRRTGTGATGHGNPYLARVLGEAAVSAGKTDTFLGERYRRIARRRGKKKAIVAVGRSILTVVWHLLSDDDAVFIDLGSDYFDTRAGTERAVRNHIRQLQALGYQVTLQPAA

SEQ ID NO: 313339 - protein, 279 aa, unidentified
MPKATHFIGIDLHKTVVQVCVLDEHGKVSEEFRVRLGAEADGQEVLRRLARWQTTVRCVVEALGLNRWLVNACQQAGFNMVVADAVKLSVKRLGKKTDRHDARELARRLWVGDVDRYARSYYPSDEEYGVRKVVRVRHQLVGIRQQVGNQIRALLNAYLLPSPGTALYAASSLTTLAAIALPTGDVTLCLQTLVTTLRQLQDSIEQLTKQIRHCAKATPVQALETQLPSVGPQTAHTLYYELGDLSRFDNAKQVCAYAGLVPRVANSGDTHHILRSAGL

SEQ ID NO: 313340 - protein, 373 aa, unidentified
MTTNGARRSGEATRTEVVLGVDTHLDFHVAMVLDHLGRRLGESKVPTTTGGYRSLLSWAEGFGSVRCAGVEGTGSYGAGLTRYLKSMGITVMEVERPKRRHLKRNGKSDPKDAEAAARAVLAGEAAGEPKSADGQVEMIRVLRAARCSAVKARSQAANQLQALRVTAPEELQRHLCGLSTSELVATAARFRPGNGPDDVETATRFALRSMARRHEALSEEIAELDEQLDRLVAEVAPGLICLPAIGTHHAATLLVVAGDNPERLGSEASFASLCGVSPVDASSGKVVRHRLNRGGNRDANRALHMICVVRMGSDRRTRSYVARRTAEGKSKREIMRCLKRYIAREVYRILVSSVTVEPSPIGTTNRIVGAEIA

SEQ ID NO: 313341 - protein, 408 aa, unidentified
MNTLYVGIDVSSKSNVVYLMLPNGDKHSNFSVANSHEGSTLLVKKIYSALTSHSLDTVLIGLEATSVYGDNLVYFLREDATLAPFNRKIHVLNPKQVKKFHDAYNDLPKNDYVDSFVIADCLRFGRINKEVYMGDYRYKALQNLTRARFFAVQNLVKEKQRFMNVLFKKYSTMTQEKVFSDTFSTTALAVYDEFESAEALANMDLHELTDFIIEKGKNRFPDPDAVAKAIQKAARSSYRLPKTVNDSVNQVLSISITSMKALESQIKEFDKAIKAQMELLPNVLISIPGIGPVYSAGIMAEIGDINRFNSQAALAKYAGLAWKQHQSGGFESEVTRLIPSGNRFLKYYLCEAAFSLVRCDKEYSDFYRLKYKEVNRCQHKRALALTARKFVRLVFRLLKDNRLYCPAK

SEQ ID NO: 313342 - protein, 404 aa, unidentified
MKGPIVSIDVSKGKSDYQAFKNLNVKYTGSRSIKHTKEGFDEIVSLVREMEKKLETEVCVVYEATGVYHRVLKKVLEDNDIKQFIINPLLSAKTRKNDSLRCPKTDKLDPKSIAKTYYSHSLHNSHKQETIYHELRELSRYYEDILVHLRKDKVAFRAQLDVVFPGYDTLYDDLYGPVALAVIEKYPHPEMLQKKKINTVSKVIQSKTCHRQAMSDTMADKAIEYSKTIYSGCDKDDIEVLILQRLIKKLNEDMAEAERTIGEMIKLAQELPDFSIIKSIPGIGDNLAARIIAELGDMTRFKKKNELVAFAGLDPRISESGQNDGDHMHITKKGNKRLRCLLYLAVTCSIRLKRDDNSIKDFYIKKKQQSNPMCSKAAKTACASKLVRIIYSMCKTGELYQYNK

SEQ ID NO: 313343 - protein, 361 aa, unidentified
MVEDSEVFIGLDVSKDSHAVAVAEGGRDGEVRSHGEIGSDAASVRRFVRKLDRPGLRLRFCYEAGPTGYGLKRLIDEMGHECAVIAPSLIPRRPGERVKTNLRDAVKLARLYRAGELTEIWTSDEAHEAMRDLVRAREAAVKDRTRKRQEIRSFLLRIGKVYPGKKAWGTKYFKWLHDLSLAWPAHVAVLHEMILAESQCRERVARLDQAIEDALLDWHLAPEVDLIAAVTFMVEVGDVRRFETPRQLMAYLGLVPSERSTGDTVRRGGITKTGNARVRRVLAESAWTYRYPARVGKKAYFATRHMPEAVRDTAWKAQARLTKRYRALVARGKRSTVAITAVARELVGFMWAIARMQPEGS

SEQ ID NO: 313344 - protein, 455 aa, unidentified
MPHRPAKSRRHSVASLPAPHPHAAGIDIGARQILVSVPPASAPDPVRTFATFTEDLHALRDWLKECAITTVAMESTGVYWIPLFQILEAAGLEVCLVNARHAKNLPGRKTDVQDCQWLQYLHSVGLLRASFRPVDQVCAVRSILRHRDGLVRGAARCVSHLHKALTQMNVQLQHVISDLTGVTGLAILQAILDGERDPQKLAALKDRRIKATHDTLAKSLCGDWREEHLFTLRQSHELWLEHRRLIGQCDQEIARLLARFDTQAPAPLSTPNKSSHRRPQRNEPSFLAREESYRVLGVDLTAVPGFQTPTALLLLCELGPGFAEKFTTAKHFGSWLGLCPDNRITGGKVYSVRTRDVKSRVAEALRLAAQSLWQAKNYFGDLYRRWKARLGAPKAITAMAHKLARILWHLLKYKEPFNPEVFAREEEKMKRKRLARLNNSAAALGYSITPIPSYQ

SEQ ID NO: 313345 - protein, 441 aa, unidentified
MGNLEKIHDNAAGIDIGSEKIFVATDKQPVKSYRTFTNTLQECVKNLQSQNVRTVAMEATGVYWITIYDMLEKAGMDVWLVNPADSKNLPGRKTDVQDCQWIQQLHSFGLLRRSFIPKEVFRQLRTYNRLREDHIQMASSHIQHMQKALISMNIRLPEVLSQVHGKSGMLMIESILSGNTDAKHLLSLCDFRLRKNKGEEILQALQGFYSEEHLFELKQAYDAYYFYQKQIQDCDKKMEIILEKMSSENSISDEEILQKANKETKRVRHHNPQIDKLHYKLIRITEGRDATTLPGFTDYNYLRVLSELGNDISRWPTEKHFTSWLGLAPGQNRSGKINKRTKKRSSTKAGQVFKQAAQTLLISKHIALGAFAKRIKAKRGPAIAIKATARKLAVMYYNLMKYGADYVEAGTKKYEEKYRSQLIKFMQKKAAELNLQVIDIQ

SEQ ID NO: 313346 - protein, 372 aa, unidentified
MAEVSAVFVGVDAAKLKHAVAIAEPGRSGEVRYLGEIEASPEAVHKLLARLAARHGKLHVCYEAGPTGYGLYRQVIGLGHECTVVAPSLIPRKAGDRVKTNRRDAVQLARLLRAGELTAVWVPDEGHEAMRDLVRAREAAVDDLRRKRQVISSLLLKQGRVFPGKKTWGATYVRWLQQQTFAHPAQQVVLQEMVLAERHARERLARIEAAIAELLPSWSLAPVVEALQALRGIRLVTAATIMVEAGDLNRFESARQFMGYLGLVPGERSTGNTVRRLGITKAGNGRLRRALVESAWTYRHPPRTGTAKHYVLENLPAAIKDIAWKAQTRLCARYRALAGRGKLLTVAVTAVARELAGFVWAIGREVKPMPTA

SEQ ID NO: 313347 - protein, 401 aa, unidentified
MKRLSGGIDIGCESHHILILDEEDNVLYNQKVAHKLNEFAETIKLFKQIERKEGGKISFALEGKNGYSAPLDRILLTQGFTLYNVDNLKLKRFRQAFAGEWRDDQRDALMLSKMLKLKDHINSQREKVFIKIEKSSPVTESLKLLSRHQQTLINEKVRLTNRLRKKLLEVCPQILELGKVKNKKIIAVLAKYPDFSKYKRITLKSLLKIKGIGERRAPFLLKRLNNIEYMPGLTDIYKTIILSYAQRILQLHREIKDIDKSLDEIGEKNKEVNHLKTIPGIATKLASRFIGEIGDINRFPSGKQLAIYCGIACVNDDSGKVTKAKAVYKANKICKQTLITMAGCSIRSIHQCKAYYLKKRTEGKSHNHTLRCLARQMIKVIYKMLTEDRDYIVRKELKKVA

SEQ ID NO: 313348 - protein, 349 aa, unidentified
MTTACSVTLGVDTHKDLHVAVTLDQLGRRLGVATFGTDDAHHASLWAWASDFGPIGQAGVEGTGSFGYRLAQFLTSSGVQVFEVNRPNRVTRRRRGKSDPLDAEAAARAVLAGDATATPKHRTGPAGQLRALLVARRSAIKARTQTEQQLRSLILELDDDKRAHVDRRRIVDLTSACAALTGTDGTSLALRALARRWQHLDQEVGDNDQHVTAIIRRVTPGLVARPGIGPVCAAQLLVTAGDNPDRLHSQAAFAALCGASPVEHSSGKTQRHRLNRGGDRAANSALWIIANNRLMHDPQTRAYAARRTATGASRKEILRLLKRYIARQVFPEIRHALSPPDALPDNSLT

SEQ ID NO: 313349 - protein, 410 aa, unidentified
MGLFCGIDWATEHHDVAVIDDDGHVVARGRVSNDAPGFAALLTLLAQAGDSAADPIPVGIETDRGLWVAALRETGRTIYPINPLAASRYRARYGVSGAKSDATDAVLLANIVRTDPGAHRPLPADTELAQAIRVLARAQQDAVWARQQIGNQIRDLLKDFYPAALTAFADLPEGGLARRDARTILAAAPTPAQAAKLTPARLRRLLIKAGRKRYLDRDIARLCEVFTDTYLHQPPVVENAMGIHLAALLGQFEAACTAADALAEAAVAHFEQHPDAEIITSFPGLGMLVGARVLAEIGDDRSRFADARGLKAFAGSAPITRASGKKTVVLHRYIKNRRLAAVGPIWALGSLRASPGARRHYDARRAAGDWHQQAQRHLFNKFLGQLHHCLHTGLRYDEHLAFPPPLQLAA

SEQ ID NO: 313350 - protein, 353 aa, unidentified
MEYYIGCDAHKKYSIFTGISGDGEIIPPKRVEHEKEKFRFFLENNLPAGSCIAIETVGNWYWLVDEMEKAGHKPSLVHAAKAKLMMGQINKTDKLDARGLAILARNGTLPAVWISPGELRDKRELPRMRMAMSQVRTKFKNRIHATFAKYGITFDETSDIFGGKGRKLLEKALDELPPETKNSVQEQLCLLDQVEKSINNAEKRIRQVINIDPNMQLLDTLPGVGPVLAIVIALEVGDVNRFATAEKLASYAGKVPRVSSSGGKTYYGKVRPDVNHYLKWAFTEAANAIILHQDRMPDCHVLRLYWRVRQHKGHAKAVTAIGRHLAESAFWMLKNNEPYHEPKANRLVSSSQE

SEQ ID NO: 313351 - protein, 367 aa, unidentified
MKKISTAAGKTARNFRNHKLTIGLDLGDRSSWYCVLDEAGEVLLEQKLGTTPKAMKEVFGGMPRSRIALETGMHSLWVSRLLSEFGHEVIVAHARNVRLIGESRRKDDRLDAQTLARLARIDPQLLCPVKHRSAKAQADLTVIRARAGVVRARTALVNTARGLAKSYGERLRGCNVRNMNPEKAEGLSPELQSALQPLLVGIESLSEQIREYNERIEKLAQSSYSQVALLKQIKGVGTLIALTFLLTLEDAHRFRKSRDVGCYLGLQPGRRNSGQSEPQMHISKEGDPYLRTLLVQGAQHILGPFGTDCDLRRWGLKLAERGGKNGKKRAIIATARKLAVLLHRLWVSGEVYEPLRNSNRMAMPAAA

SEQ ID NO: 313352 - protein, 355 aa, unidentified
MLYLGIDQHARQITISLRDESGDVLDARQVSTQPGRINAFFEQLTRGRLRKGELFVAVLEVCGFNDWLIRMLKDYRCHKVILIQPYDRKKRKTDRRDAAALSELLWVNRDRLLDGKPVRGLRQVDVASTSDQENRRLTTLRKEVGQARTRLINKIRHMLRRHNMQWEMPTKTFPTQAAIAWLKKITLPAIDRLEMNYLLVDLQQVEQRVKELEETIAQRCGASEDAVLLSSMPGVGCFTATGLASRVGRVERFPRAHSLANYWGLTPGCRNSGENNQRLGSITKAGSGMARWLLAQVARNALQKDARLREWFKRIRRRRGASIARVAAMRKLATIIWHMLSKRKTYKECRALAAA

SEQ ID NO: 313353 - protein, 385 aa, unidentified
MPQFSGSTQAALDYNSTIIGALELSEKKWVLAVQLPGVSRHSRHVLEACGHGLASFVERLKARCAAAGRKIARVILTHEAGRDGFWLARFLARRGIEVHVIQPSSLPVDRRARRAKTDIIDVEMLLRTLMAWLRGEPRVCSMVPIPSEADEEARRAYREREDLTGERRSIVNKIDGILATLGVKGYKALRRDRREQLTAVRQPDGDPIPQKARARIERLLDRLDLVLKLIEQVESARDAVLKKDAPADEAERMIRSLTDLRSIGPDFATLLVREAFVRQFRNRRALGGYVGLGGTPFSSGGSEREQGIGKDGNRRVRAAMVELAWTWLRWQSDSALSVWFRARVGAMGGRIKKIMIVALARKLLVALWRYVKDGVIPDGARMKAA

SEQ ID NO: 313354 - protein, 354 aa, unidentified
MQSQIIASPKLFIGMDIHKKSWSVHLRTDLFDHKGFSMPPEPVKLADYVTSHFADHEVALTYEAGCCGFSAARYFLNLGWTVKVVNPNDVPRSDKQLYQKTDKLDCRNLCRQLQRDQLHGIYIPTEPEEQFKSLLRQRNQVVKQLRKAKSHIKGLLLFHGIAIPEQFDNPNWSHDFIGWLKNIQWSHSTGTACINSKLRILEMLKNEYLQTSNELRAYCRKYHKKDYYLLKSIPGIGGLLAAAILAELGDIRRFKNEKEFSSCIGLVPGIHQSSETDLTMGLTPRCKSLLRSYLVESSWVAIRTDPEIQAYYRKHVGKNAKNVVVKVAHKMCCRILSVIKNETPYQVNYRKTNK

SEQ ID NO: 313355 - protein, 314 aa, unidentified
MDKPAVWVGVDVSKDQLTVALRPSGEQFSLANDGRGLRALIKRLAPLRCARIVVEATGGYETLLVAGLQAAELPVVLVNPRWVRWFARSLGQLAKTDRIDARVLALYAERAELKVRELPDEQTRELRALCARRDDLLEMIVAEQNRLEHAPKRLRREIRAHIGYLRRRLKHLDRDIDSAVRGSELWRQKNELLNSVPGVGPVLRASLLAWLPELGTLNREEAAALVGVAPFNRDSGLMHGRRTISGGRAPLRRVLYCATSAAIIWNPLLRAYYEHLIGNGKLHKVALVATMRRLLLILNAIIKTRTAWRSPCPA

SEQ ID NO: 313356 - protein, 434 aa, unidentified
MTKHQPTPPDAALVAIDIAKHRNEVLIELPGRGRRRRLTVLNTRADHDRLLEMLGALGHPVIVGFEATGNYHRPLAWRLLKAGFELRLISSVALARTREALHNGWDKNDPKDAQVILHLLRSGISQHYHDPLANGINDIQELSKTHEVVSKAKTEILHRIQTHYLPLYFPEVERFRNNSRSDWFFAFLDRFPTPASITALGRDAFIEAAWDVVGRKVSKARLLADIYETARSSIGLPIDPSSPAIAMFRMVIAEARSLIRQRDVIERMAHELLQDRPDYRRLRQIPGIGPINALTILAEAGDLRRFRHHRQFLKFCGLDLATHQSGQFRGQTRLSKFGNARLRRALWMAAQIAIRQRENSFRDKFERYIAKDWHNADLRRKALTAVTAKMARVVHAVIKSGTDYRPFFEAAVPSGRTPLRLGREGAPRDLGATL

SEQ ID NO: 313357 - protein, 346 aa, unidentified
MMIIGCDFHPSWQQVSWLDTETGETGEQKLVQASGDAERFYRQVAAPALIGMEATGNCHWLVDLLSELGHELWVGDAAQIRASYVRQQKTDQRDAAHLLKLLVEGRFPRIWMPSSEVRDLRQLLLHRYKLVIIRARVKNELQHLCLNKGVQRKRKLWSAAGQQILRELPLKPWAARRRDDLLKLMAMLDQQIEPLDQAVQEEAQRDKMALLLQTQPGVGPITALAYVLTMGDVSRFPHGKQVASYLGLIPREHSSGGRQKLGAITKQGNRMMRMLLVEAAQIAVRFDPEFRKQYLHRCHSKPKAVAKVAAARKLAVRLYWMLRTQQPYPAVVRIESSPRVPLVGAS

SEQ ID NO: 313358 - protein, 343 aa, unidentified
MEYYVGLDVSLKQTSICVVDQTGSVVRESVVDSDPEAISVYVKSKAPGAVRIGLETGPTSTWLWTELKQLGLPVICIDARHAKAVLKMQINKSDRNDAIGIARIMQTGWFKEVHVKDIDSHSIRALLASRALLVKIKRDLENHVRGLLKNLGLVIGRAKFNVFAVRAEELIAGRPELIAAIRPLLEARDAVGHQVSELDRKVMTLARHDAQVRRFMTVPGVGPITALAFKATIDDPARFARSRSVGAYVGLTSRRHASGEVDWTGRISKCGDAMLRTYLFEAAGVLLTRVPKWSAVKAWGAKLAKRNGLRKAKVAVARKLAVILHRMWIDGTEFNWSKKEVAA

SEQ ID NO: 313359 - protein, 310 aa, unidentified
MKAAWVGVDVAKDTLAVCVLPDKRQRSYANTLEGWAHLLNELSGYEVQRVLLEATGGYEAGVLRYLAAAGLPVVRINPRQARAFAEAMGSQAKTDPLDAALLARQAQVLEAPLYQPQTAQAQALQELVKRRTHLVAQRDDDRRRLAQATLPRVQANIRHCLAFLNQQITLLNHDITHACRELDDERTRRLSSVSGIGPVSVANLLAYLPELGHLDRRQIAALVGVAPYNADSGPKKGIRRIAGGRSAIRRVLYMAAWSVVRHQTDFKRRYQDLRQRGKPAKVALIACLRVLLIRLNAMLRDGTPWRSEPA

SEQ ID NO: 313360 - protein, 399 aa, unidentified
MECVFGIDVSKENANVAVLVDNVVIKQFKIGLDRLGFSLLSDELNSFNAPLIIYEATAYSRRLRAFLQRDGWKYTELNPLAAKKVMEEFRHTKTDALDAVGLARAMIKNHFRPTYQESPVYTELHDLERTYQQFNKDIVTNKNRLHRALQLTFPEIEHFMSSTDGVLYWHIVQRFPHPAIVLSHEENELTEIILTETSKKIGLKRAMKLANHLLALAQNSAPAKEPQSHAVRAVIALAKEVERINQLKAQMIVEMTTLGENLSEVPLLVSIPGIGIKTALCLIAELGDVRRFHSANAINAYIGIDLIRYESGQYEAKMHIRKRGNPYARKILYRAILNIISVSQYQPTLISANYKRKKQSAQSHGTKKIAIAAMSQFNRLMHHLILNNELYDSTTFMPE

SEQ ID NO: 313361 - protein, 381 aa, unidentified
MSTRSVIFWVGLDVHKESITAAVFRGRDPEPLRVDRIANEPKRIRRYFERLQRDGQARACYEASGAGYVLQRMLLEWGIACELAAPSLIPRRAGEHRKTDRRDAIKIARDFRDDRLVLIHIPTEEEERVRDLVRCRETFQREILKSRHYILKFLRRRGFIYREGTHWTTRHMNWIRQVLKPGQLAAEDRIVLGEYLALLEYKLQRRDDLDRRIEALALTPRFKPIVDRICCFRGFKTQAAMVIATELGDLRRFESPRQLMAYLGLVPSEHSSGDRRRLGAITKAGNTRVRHVLVQAAWHYRKRPAVGHSLRRRQQDQDPAVIAHAWKCQHRLYKVFHRLAAKKPKQVAATAVAREMVGFLWAVLHDVDPYELQIPELTRAA

SEQ ID NO: 313362 - protein, 353 aa, unidentified
MKPGMESNMSSPVVIGIDIGKEVFHLVGFTADGKIAFRRRIRRLGLKDAFEKLPRCIVAMEACLSAHFVSRTLRALGHEPRIIPAIYVKPFVKGQKNDYNDAEAIAEAALRPNLRFVQEKSQDQLDLQACHRVRSRLVSRRTATINQIRAFLIEQGIAVRAGPRALRKSLFVILDNRKEEISPRTAKLIRGLYDDWCCLDERIETVTGEIEILSRSEAKCRQLMSVPGVGPLISTAMVAAIGSGEAFERGRDFAAWLGLVPRQYSTGGRSILGRISKRGSKYLRTLLIQAAKVLLMRPHNWARYSFGAWLNSASERLHRNKLAVALANKLARIAWSVLRNDQAFDTHLEVAAI

SEQ ID NO: 313363 - protein, 344 aa, unidentified
MQQIKTIGIDLAKNVFQVHGVDASDEVVVAKQLRRNQVIPFFEKLFPCVVGMEACATAHYWARELIKLGHDVRLIPPVYVKAYVKRGKNDAADAAAICEAVTRPSMRFVPVKSEEQQAALAVHRARDLLMRQRAQLTNALRAHLAELGVIADTGCEGGAKLVMVVADARSTGALPAEMINALSALIDQIFSLQEQIDGLNNCIKRQHRTSDVAKRLEGIPGIGMITATAMAATATDPGQFKSGRDLAAWIGLVPKQNSTGGKVKLGGISKQGDRYLRRLLVVGGTSVIKLAKIFPWRYPWVAKLLERKPAKVVAVAVANKLARVAWAVMNSGGTYRPQLRGARP

SEQ ID NO: 313364 - protein, 313 aa, unidentified
MSEQKITGIDLAKTNFYLFSINAHGKPAGKIKLSRNQLLNWLVQHPKMTVVMEACEASHHWAREIRKLDHDVILLPAQHVKAYLRRQKNDYNDAQAIAEACQHGTIRPVPIKTLEQQDVQTFLKMRRLVSMERTQLINHIRGLLAAYGIVFSKGATELRQKLPALLEDAENELTDTMRTLLHRQYIRLITLDNELEWYDSEQKKYVRQDPGCKRLLAIPGFGPLVSQAIKSWMGDGKQFRRGRDASAALGLVPRQFSTGGKQVLLGITKCGDQYVRSMLIHGTRAVLFRASGKTDSLSVWFIVFGKNVASTGL

SEQ ID NO: 313365 - protein, 412 aa, unidentified
MDTVVAYIGLDWADERHSVHLQTAEGTIEHLELEQKPAVLHEWVAQLQQRFGDGKIAVALEQRKGAVIHALLMYDCFVLYPINPKALARYREAFRTSGAKDDPLDSELLLDLVVRHRDRLRAWVPDTVESRTLQALCEQRRKLVNQRVALTNRLTSLLKQYFPQALEWVGDLASVQACDFLTQWPTLAAVQGARSSTVRRFYQDHNCRKRAVIDARLAAIATARPLTTDVAVIEPLSLSVHAYATQLRALIAAIQTFDARIAEVFAQHTDRDVFGSFPGAGDVCAPRLAAAFGTDRSRWQSAAELQSHSGIAPVTERSGKTLWVHHRLACPKFVKQTFHEFADQSIRFSRWARAYYDQQRARGNDHHAALRALAYKWMRILFRCWKERRPYDEDTYIDALRRRGSPLAKHFA

SEQ ID NO: 313366 - protein, 341 aa, unidentified
MERLYYIGLDIHKKTISYCVKRVDGKIIQQGKLAADRKTLLHWMEGLPGPWLGAMEATLFTGWVYDFLQPYAVDLKVAHPEMLKAITAAKKKNDRADAEKIADLLRVNLLPECYMLSEELRELRRILRYRNMIVRTAVKMKNKMSGLLMEVEATYSKEKLHRRKYFDNLLERIEDVPESVKNMLKLSRSSLEMFDAVQKKLVRTLREDNLIRERIQRLTSIKGVGEVTALTWVLETGDYSRFHSARQAISYCGLCSAQRESAGKEQRGPISKKRNKHLQTMLIEAAKLAPRWNPQLAAIHEKELNNGHRNRATLAVARKLVEYMLAVERQQKDFVPSELAA

SEQ ID NO: 313367 - protein, 341 aa, unidentified
MQITTIGFDIAKNVFQIHGIDAAEKVVIRKQLRRGQVLKFFAALPPCLVGMEACATAHYWARELTKLGHEVRLMPAKDVKAYVKRNKNDAADAAATCEAVRRPTMRFVAVKSAEQQAQLMQHRARDLLIRQRTQVINALRAHLAELGITAAQGREGIRDLLAIIADEADARLPIDARASLMVLAAQLQALQTLIGSIEKRIVARHRSSEASKRLQTIPGVGILGASAIATIVTEPKAFRSGRDFAAWVGLVPRQDSTGGKCKLGPISKQGDRYLRRILVVGAHAVLKRARLHPQKYPWLTQLLARRPFKVVAIALANKMARIAWALLAKGETYRMPRLAAV

SEQ ID NO: 313368 - protein, 309 aa, unidentified
MFSYLGIDVSKDSLEIRILPEDIGMSYANNCAGFKALIDWLKPYNVRRVLLEATGGYERAAMKSLQAVGLDVLRINPRRVKSFAEAMGYRAKTDPIDARLLAEFAHVVKDSGSRITNVEQDNLRALIQQRENFVQQQSDDVRRLKTASVDLVKPLLQSHIDYLTQAIKTLNNLIRQSAQVLDRDKIARLCSVKGIGIVTAASLMAYVPELGEVGRREIAALLGVAPYNDDSGNHQGARRIGGGRFAARRAMYMACWVVIQRQPEFKARYEALRQKGKCAKVALIACMRVLLIRLNAMIRDGAEWKERAV

SEQ ID NO: 313369 - protein, 359 aa, unidentified
MQTQRNELNFEGQNIYVGLDVHLKSWTACIMTEHLEHKKFTQPPEAQVLYNYLVRNFPGGNYLSAYESGFSGFWAHRQLESFGIKSIVTNAADVPTGQKEKIQKDDGVDSRKLARSLRSGELEAIYVPTESTLEERSLIRMRASLVKDMARFKQRIKFFLYFFGISYPERFSNPSSHWSKNFLSWLKEEVHLSESGKQTLNIMVDEVEEQRKLLLLVYSQIKQLAGTQAYACNVKLLKTIPGIGLLTAMHFLTEMETIERFKDTDHFAAYVGLVPTRHNSGEVKNDGKMTFRGQSLLKKCIIESAWIAARKDPALSLAYNRYVKRMNPNKAIVRIARKLLNRIYFVLKNKKEYVYCVVK

SEQ ID NO: 313370 - protein, 389 aa, unidentified
MKIYVGIDIAKLNHFAAAISSDGEILIEPFKFTNDADGFQLLVSKLESFDKNSLIIGLESTAHYGDNLVRYLVTELYQVCVLNPIKTCQMRKNNVRKTKTDKVDTYVIAKTLMMQDNLRFVSFFDLDMMDLKALGRFRQKTIKQRTRLKIQLTTYVDQVFPEIQYFFKSGLHQNAVYALLKEAPSPKEIASMHMTHLANLLKVNSHGHFTKEQAKELRVLAQKSVGANDSAISIQITQTIQQIELLDSQLEKIEAEMTDIMKFNDSVIMTIPGIGYINGGMILGEIGDIHRFSNPNKLLAFAGLDPSVYQSGNFQAKTTRMSKRGSRVLRYALVNAAWNVVRNNATFKAYYDAKRAEGRSHYNALGHCAGKLVRVIWKMLTDEVEFNLE

SEQ ID NO: 313371 - protein, 399 aa, unidentified
MAVMIGIDPHKGSHTAVAVTAAEEPLGTVRVRACPAQAEQLVAWAAAWPERTWAVEGAPGLGRLLARQLVAAGERVLDVQPKLAARVRLLQTENTGKSDPNDALSVAVAALRSKAQRPVLADDHATVLKVWAKRHRDLSRARNQVACRLHAVLCDLVPGGVADEITAGHAARILGRITPAGPAAEARRDLAAELLADIRHLDAQRREVKKKLATAVKASGTSLTEVFGVGPVIAATVIGDVVTVARFPSRDHFAAYNGTAPVEVSSGEKKIYRLSLRGNRRLNHAIHMAAITQIRHKHSDGRGYYERKIAEGKTRKEALRCLKRRISNALYARLRADARKGGPGGQPGNLSVSRAAGSHPEHRLFGQATPGPEASLRAGSAHAGHAAARASVNNARRTT

SEQ ID NO: 313372 - protein, 400 aa, unidentified
MHLTANISIPQKNFIAIDLHSDNAVICVRRNALNKAGELVGKNIWCGRFCIRDGLDNFIKVLVPHCQDFDHVAVVESTYNWYCLADAFEERGWLLRVADPSTVSQANLKASDDRTDAQYLAERLRVGSLKHYLSLSYSSRALRDLCRYRMAMVQDCASLKIKLINLYRNQLSKNVRVADLLERCQPHMQPNYRFNSDILEEFKDPNIRLRVAFEISRIAMLEEMIEECNAEIQKQCKDQELVKLCKTIPGCGPVLSAVICTEIGTMQRFKSAGDFVSYCRLCSTSKLSNGKSKGLGNAKNGNAYLSWAFTEVAQYASRNPVIREILQRLLRKYGGLRVKAIRTLAAKIARVTFYVLNNKQPFNAAKCFGMELTKSIVKKFPHKSLREDAAVVLPAVAGQA

SEQ ID NO: 313373 - protein, 343 aa, unidentified
MQAVTTIGLDIAKSVFQIHGVDAAGNVIVRRQLKRRYVLPFFQRLPPCLIGIEACASSHHWSRELKALGHTVRLMPAAYVKPYVKRQKNDAADAEAICEAVTRANMRFVATKTLEQQSCLMLHRTRHLFIRQQTAVINAIRAHLAEYGIVAAVGRNGVEELLGVVADPSDKRVPEIARACLAALGAQLRMLKAQILEFDRMITVWHRSNETSKRLDAIPGVGPALATALVASVPDPKAFRSGRNFSAWIGLVPKQHSSGGKDKLGSISKQGDRYLRSLFTAGALAVIRYAKIHGTKHRPWLTALLARRPAKVAAIALANKIARMAWAMMAKGERYKEPVALAM

SEQ ID NO: 313374 - protein, 354 aa, unidentified
MQYIAFDSHKRYTYAVVEEKEKGRVMEKRIEHRRGEIGAFLSQCEVGSPVALETIGSWYWIVDEIEAAGMLPRLVNARKAKMMIASSKKTDRLDAKGLNTLQRTGTLPTVWIPSSELRDIRELYRTRMVLTQMVIRLKNRILSCFSKYGISFDETSDAFNIKGRASLEAALEILPTQTCFAVKELLRQLDLLQEAVKEFEARMLQVQSNDPEIKLLQTIPGVGAILSYVIAYETGDIHRFPSASCFASYAGTTPSVHASGGKVRYGHTPSSVNHYLHWAFIEAANVISMRHEVLRFRHTARLYERLRQAKGHDIAVGAVARHLAEATYWILTTKTAYREPNQNKQVVVVSSKEG

SEQ ID NO: 313375 - protein, 415 aa, unidentified
MTDQRQWYAGIDWASQSHHVFFSDGDGRRIGERAFDHGGEGLAEMVAWLLAKSGAQEAAQILTAIEVPHGPVVETLLERGFRVYAINPKQVDRFRDRFSPAGAKDDSRDAAVMASGLRTDPRCFRDLAATDPVIIELREWSRISDDLGTERNRLTNRLREQLWRYLPAFLELVDDDLGAEWLLELWEAAPTPAKAARLHAATVAKLLKRHRIRRFDAAQVLAVLRKPPIQVAAGTTEAARAHIVTLIARIRLPNRQLKQAHHQLDALTARLVPAEESEPGQHKQNDVEILASLPGVGRIVLATLLTEACDALQRRDYAALRSLTGVAPVTKRSGKSCIIVRRYACHGRLANAIYHWARVATQRDPRSRAKYTTLRSRGHSHARALRSVADRLVNVACAMLKTGTVFDPSITGQTA

SEQ ID NO: 313376 - protein, 459 aa, unidentified
MRQKGKRTKGIEQAHPFEGMSKVNPHAAGVDIGAEEIVVCVAPNETTQLVRGFGNYTVDLHAIAAWLAEHGIKTVAMESTGVYWIPLFEVLEQGGFECLLISSRSLRRVAGRKTDISDAQWIQTLHNYGLLESSFRPQAELVALRSLLRHRRSLVDHRSPHVLHMQKALLQMNIQLSQAVSDVTGVTGQAIIRAILSGVRNPKMLASLLEPGCKKSEEEIGKALTGTWREEHLFVLKQAVALYDFYTQQILECDQEIERLYSETHPDWDSGELQLLSSRKRNSHSKNAFYESEKIRGHLKRISGVDISLVDGMGVSLAQTVILECGTDMSKFLTDKHFCSWLGLAPKHEISGGKVLNNKTLKTKNRAGQAFRMAAQSVKQAECSFGVLYRRLRARLGPAQATVATAHAIARVVYRMLKYKVEYDPLSVNEYQKQYEEQQIKYMKKRAAKFGYQLMPVPA

SEQ ID NO: 313377 - protein, 432 aa, unidentified
MEEVTDEPLYRDRVCGIDIGKAGMAATIRVPSEKNPARRAQETREFATTKRGVLELADWMRCWQVPAVVMEATSDYWKPVFYRLEAEGFECVLADAKQVRNLPGRPKRDTTDSQWLACCFERGSVFPCFVATPEFRIIRLHTRRRRDLTGERSREKQRAEKLLEDAAIKLSSVLTDLHGVTGRDIMDQLIAGQRDPKVLAGCARTRARAKIPQLREALEGAEFFTAHHARLLASILNRIDAITAEIDQLSAVIEELLAPYEEQLAQAESMPGWGRRAAQDVIAETGTDMTRFPTPGHLASWAGRTPLDKQSGARKGQRRHKRGNKYIGAVTGETAVAAGKTDTREGARHRRLVRKRGKAKACVATGNTQLRVFHALLSNPGMRYHDLGPGWYDDQRQTARRLSRLVGALDAMGYEVTLCRKPEPGPEPAPAA

SEQ ID NO: 313378 - protein, 400 aa, unidentified
MKTVLSVDVAKNKSMIMLMNNDGEILIDTKEIKHNLGEFEKVKEEIEEINPENLTVFMESTGTYHLPVERYFKENNFNTLVINSLTTKNNYDTLRKTKTDTKDCMRLAKLFFVNEVEYHDLSKKDLYANLKAMTRQYFYLTQLNVSCKNRYKRLINICFPEFEEIFKGSRIYEETALNFIKTFPHAYIVKEKRIDALYNNLYKTNSRHDYYYKRLANKIKDIAVNSYPGVDKDHSDVKNLSDMAAILQENIKTINELKEKMIKTAKESPYFDIINSFYGIGEVLTTELLGELGDITRFDNHRQLIAFCGLDPTIIQSGKSINVHGTISKRGNKYARWILFNISQIVVKLGHQCPGHPVYDYYLTKKAEGKHYYENLTACSTKILRMLYTMCKNNTTFKIN

SEQ ID NO: 313379 - protein, 459 aa, unidentified
MPKHSRRRKRSLTAGPESQPFPLVNPNAAGIDLGSRSHYVSVPEDRDPRPVREFGCYTADLRRMAEWLKRCRIETVAMEATGVYWVPVFEVLESYGFEVLLVDARQVKNLSGRKTDVVDCQWIRHLHSHGLLRAAFRPAAEICEMRAYWRQRTSLVQSASRQILLMQKALEQMNVQLHKAVSDITGKTGLGIIRAIVGGQHDPRALAELRNRRLKSSREELVQALTGNFREEHLFALTQALEGYDFIHRQIESCDRRLQAYMRRLPGKASRAITPTPPRTRRKNQPHFDLRAEQVRIAGVDLTRIPGINTLTVQAVLTEVGVDVRRFPSEKNFASWVTLCPNNRITGGRVRSRRTRNSDHRLGSALRVAAQTLGRSQTALGAFYRRKRAHLGSPKAVTAAAHKLARLIYRMLKFGEEYVERGQEAYEAQHRRQSIARLTRVARDLGLGLISRETGEILG

SEQ ID NO: 313380 - protein, 317 aa, unidentified
MSNRTFVGIDVSRDFLDVVVRPSGETLRVAYDGEGLTTLGEHLRELRPKLIVVEATGKLEGAVVAQLQIVGLTPVVVNPRQVRDFAKATGELAKTDRLDASILAHFAEAIRPKIRPLPDRQLQELCELVNRRRQVQKMRTQENHRLARTVSAEVRLRIEKHLVFLEDELDDIDTQLQHRIAGSPAWQADVNLYCQVPGIGRTLATAVVAQLPELGSLSGRQLSKLVGVAPLADDSGLRAGKRRIWGGRSSVRTCLYLATLVAIQHNPPIRQAYQRLVSLGKPKKVAIVACMRKLLVILNAMKRDGTGWAPQLAAARP

SEQ ID NO: 313381 - protein, 385 aa, unidentified
MNAVGIDVSKGKSTVSILRPFGEIVYSPFDINHSSSDINALIQLINSVEGESRIVMEYTGRYYEVLAHQLSEANLFVSVVNPKLIKDFDNDSLRKVKSDNADSVKIARYALDKWHKLQQYGDMEELRNQLKTMNRQFGFYMKHKTAMKNNLIGILDQTYPGVNTYFDSPARSDGSQKWVDFASTYWHVDCVRKMSLNAFIEHYQKWCKRRKYNFNKTKAEEIYEKAKELVPVLPKDDITKMIIKQAVDQLNNTSATIEKLRSLMDETASKLPEYPVVMQMKGVGPSLGPQLIAEIGDITRFHKKSALTAFAGIDPGVNESGSYEQKSVPTTKRGSADLRKTLFQIMDVLIKTAPIDDPVYQFLDKKRSQGKPYYVYMTAGANKFL

SEQ ID NO: 313382 - protein, 394 aa, unidentified
MHSVGIDIGKRQHVAAICREGQRSADKAVLRFGADRSGLALLERWLSRHGPVDRVVMESSGHYWLPLAAALHRASVPVAIVNPVSARHFATRRLQRTKSDPADARTLAALGMADRPRIREPLAGAELREAARFAMHLVEEQSQIDNKITRLIELGFPEIEQAYDDPTCQSALAVLRLAPTAPAVARQRVTTLADANRGPGHRAVGPTKAAQIQALARDTLAPPELAPQIGFEMELLIAQHDLLEQQIAQAEERVAGLLDGELARRLQTIPGVGPAICATLIAEIGDIFRFSGFDQLVAYAGVHPAEKSSGQKGANPETSWRMAKTGNAYLRAALYRMSVVGLQHNPTIKAHYARKRAQGKSKMNALGHCMKKSLAIVWGIWRGDHDFTLEPPSA

SEQ ID NO: 313383 - protein, 350 aa, unidentified
MIELKRLAIDTSKHVFALHGVDAGDQPVLRRELRRGRFEAFLSGLAPTEVVLEACGGSHHWGRRALALGHRVRLIPPQYVKPFVKRGKNDRIDAEAIAEAAARPGMAEVAVKSAEAQAQGMLLKMRELLVKQRTQLANALRGHAAEYGLVAAQGMSQVEPLLAAVAADPAIPPLAKAVLARLGQQVAHLDAEIATLDAELLALHKAHPISRLLEGVPGIGPVTAISLALAIDPVQFTSGRHLAAFLGLTPRQHSTGGKTRLGRISRAGNRRLRTLLVVGASAVIRHVRPGARLASPWLLALLARKPRKLAAVALANKMARIVWAMMTRGEAYRRPTGSAPAATAAMPAAA

SEQ ID NO: 313384 - protein, 410 aa, unidentified
MEVIVERPAALDVHKAQVTACVRVPGEDGVRVEQVHEFKTTVRGLLVLRDWLTAHKVTQVTMEATGVYWKPVWHVLEDDFELLLVNARHVKQVPGRKTDVADAQWLCRLAEAGLLRSSFVPPKTIRELRQLTRYRKAQIAERQREANRLHKALEDTGIKLDCVATDILGVSGRAMLDALVSGTTDPVVLAELSRGRLRAKIPELTEALEGRFEQLHSLLIGSILAHLDFLDAQILALSEAIEAKLAPFSGAVQLLCTIPGIAERTAQNVIAEIGLDMSVFPTAAHLASWAGQCPGNDQSAGKRRSGKTRKGSKWLNLALKEAAMAATRTTDSYLQALYRRKKAQGGHNKAIGAVKHSMLCAIWHMLTTGEIYTDLGPDHLARRNPERQTKRLVAQLERLGHAVTIQAAAA

SEQ ID NO: 313385 - protein, 339 aa, unidentified
MEITTIGLDLAKNVFQVHGINSAGEVVVRRTLRRAQMQRFFEQLEPCLVGIEACGTSHYWAREIIKCGHHVRLMPPAYVKPYVKRGKSDASDAEAICEAVTRPTMRFVAIKSPEQQAMLALHRTRDLFVKQRTQLVNMIRNLLAEFGIEIRRGIEQALIVARHIAVHGLLEVPPLAAKVIAGLSEQVLDLQSKLRELERELLVWHRSSDVAKRLATIPGIGTVCATALAASVSDPHQFRSGRQFAAWLGLTPLQHSSGGKERLGRISKMGDKYLRRLLIVGMTSLVRRAKYKPEAVDPWLADLLSRKPARLVTVALANKAARVVWAIMVRGGVYRRASA

SEQ ID NO: 313386 - protein, 402 aa, unidentified
MNMNSNRRVAGLDVHKDSIYLCIMGHDENIILQKTYGVLTPELRQMREDMLFHGVTECAMESTAVYWIPVWNELYGSMELKLVNPYFIKQLPGRKSDVKDAQWIAECVLKNLIRGSFVPEPIIQDMRKLNRRIMDLNEDMTYNCNKLDAALQRCGFRLSNYVSSTKSKSYQSVLRSIIEGRSSPDELVGLVHGRTLNKHGRSSIKASVTASFSRTDMTIFKQLKETIDLIERQIDECQKELTELCKEHFPKQYGRLQTIPGVKERAATAIIAETGVDMKMFATAACLVGWCGLKPRNDVSNGRFKSRKVTHGNRFLRQILIEIAWAASRSRNCFFSHFSYIQTTLKKKGKMKIQVAIARKILVAVWHMITKEEDFIDIYLKRLEELKSTKERIRQFESCMAK

SEQ ID NO: 313387 - protein, 339 aa, unidentified
MSKPIRPQQAMVFCGIDVSAETLAVAVQQEDERFEERVFENTAGGHEALIAWLQKRKVGARVSLEATGIYSLDLALALDRAEGIEVAVLNPKVIHRFAQTLRRSKTDSADAQVLAEYSRRMPFAAWVAPELNGLRLRTISRHIQGLVVEHTRQNNRLHAAEKSVSTPHCVVQDLKRSTASLKPRIAGLRGEALGLVRSDEAMRKRFELLIRTPGIAAISAMQLLGELAPLSPEMSVRQWVAHSGLDPSHQVSGTSVHKPSRISRAGNRHLRHALYMPALVAVRRDPHLKAFYETLLHRHKAKLQALMAVARKLLHAIYGILRTQTPYDGSKLFPHPRTD

SEQ ID NO: 313388 - protein, 342 aa, unidentified
MKEASIIGLDLAKRSFQAHGALADGSVAFRKKLTREKVLGFLAEQPRCVVAMEACGSAHHWGRAIRDAGHEVRLIPPAYVKPFVKRQKNDAADAEAIAEAASRPTMRFVAVKTEEQQARAMLFRTRDLLVRQRTQLINALRGQLSEHGVVAPQGPANVAILAQAIDDMTASLPLLVVELARVYLDQIDGLSEKVAGLEKAIACEAKRDAMTRRLQTMPGVGPITAMAIETFAPPMEVFRRGRDFAAWLGLVPLQHSTGGKQVLGKTSKMGQRDIRRLLITGAMVIVRWACRKGAREGTWLHRMLGRKPRMLVAIALANKMARSIWAMLTKREDYRAPVAATP

SEQ ID NO: 313389 - protein, 419 aa, unidentified
MNATTEFAATIGLDWADKKHDLWLHPNDGSKAQHIRLEQTPEALHAWVAKLRERFGGRPVAIGLETSRGPVISALMAYDFIVLFPINPKAMKDYRAAFSVSGAKDDRTDAQLAEEFIRLHRDKLKALEPDTELTRKLGGLVENRRHLVDERTRIVNQLHSTLKTYYPLAETLLGEEMNLPMAADFLACWPDLETLQKAEVKTLRSFFYKHNSRSAEKIEERLAAVQQAKALTTDLAIIVPARLLVVALAGLLKPLHRAIARMDQEIKQAMDAHPDAAIFRSFPAAGPALAPRLLVAFGTNRDRFESADEVAQFYGLAPVVIQSGNSKTTHMRHRCPKFGRQTFHENANCAAKEHSWTRCYYEQQRKRHDDKHHQACRALAYKLIRIYFVCWKTHKSYDANRYTQALEKHGSPLHKALEN

SEQ ID NO: 313390 - protein, 370 aa, unidentified
MSQSSTLFIGMDVHKETIAVAYVAQDHGAEVTSLGTIGTRQCDIDQRVRKMQSKATHLIFVSKAGPCGSWLSRYLTNKDDTCWVVAPSLIPQKAGDRVKTDRRDAMQLARLARSGALTLVYVPKVADEAIRDLSRAREDTLSDLKDATFRLKAFLLRHDIRYTGRANWSPAHLRWLSEVVCPTPAQHIVFQEYVRAVTAHTERLRRLEPARPEHGQSWRLHAVVEALQALRGVPCTVAVTMVAAIGDLSRFDTPRALMKFLGLIPSEYSSGERRQQGSMTKAGHTHARRALVEGAWAYRYPAKVSRHLQLRLEKPSTIIQDISWKAQVRLCQRYRRLVARGKHANVVTVAMARELAGFMWAIAKEIPIIP

SEQ ID NO: 313391 - protein, 403 aa, unidentified
MNAVGIDVSKGKSMIAVMRPFGEVVISPFEVQHTDSELSELAKLLKSLIGETRVVMEYTGNYHAPVARVLHSAGIYVSVVNAILIHDYGNNSLRRAKTDKKDAVKLANYALDHWLSLSRYFPEEDARLMLKNCHRQYEQYSKLRTMLKNNLISLLDQTFPGANRLFSSLRRADGSQKWIDFVHAFWHCECVCSLTEKAFIRQYQKWCRKNGYNFSEKKAQDIHASACGHVGVVLKSDTVKLLVGQAVSQLQATSTALAALQQEMQTLAASLPEYEIVMQMFGVGPILGPQLMAEIGDVRRFYSKKALVAFAGIDAPPFQSGKINVQSRSISKRGSSSLRRALFIVMSVILQNSPADEPVYQFMDKKRAEGKPYKVYMMASSNKFLRIYYAQVKSHLDSLGVHS

SEQ ID NO: 313392 - protein, 387 aa, unidentified
MYYIGIDIPKFKHDCAVIDDSGEIVTPSWSFTNDSEGFSQLKTLVDSLDAETRIGLESTGHYGMNLKLFLESNNFSFMEFNPLLINRFVKSKSLRKTKSDSIDCMMIAHYLMTVEYKPYPTLLYHTEKLKSLTRFRDSLIRLRSRQLVELTNILDKVFPEFKPFFGGKFSVTSLYILSNYSSPEKISNMNSKSYETLRKLSRGRFSTVDFAKLKQLAKNTVGNTEDYLLQEMQIVLELYKQLDSKIDETEASIKECVSAMNPPMLTVPGIGVESTAIILAEFGDFSKFKNASQMLSFAGLEPGYFQSGTSETTGKMVKHGSSYLRYALMNCAQTVVTYEPTFAMFYAKKRAEGKPHRVALSHVVKKLLRVIYTLHTKNIVYDADFVR

SEQ ID NO: 313393 - protein, 363 aa, unidentified
MFTERTSVGLDVHARSVAAAAIDGVTGELFQTKLTPSYEHIRSWLTELPGPVAVAYEAGPTGFGLYRHLSAAGLRCEVVAPSKLQRPAGDRVKTDAKDAVHLARLLRLDEITTVSIPTIDQEAARDLVRAREDCRGDLMRARHRLSKLLLRHGIVYYDGNAWTGKHDTWLRTEALAQLSARATRLAFDSDYETVLVTKARRDRLNAVIEEMAADSEFTPTVRRLGCLRGVGTLTGFALAVEIGDWHRFSGNTIGSFVGLVPSEHSSGQSKSQGPVTKTGNGHARRLLVEAAWHHRPRYTVGKTMRDRWDLAPAAARARGDEGNRRLHQRWVKFIDRRKRGTIANVAIARELAGWCWSLAVMED

SEQ ID NO: 313394 - protein, 443 aa, unidentified
MSQNTRTHLRGQRGQAFADQIRGLPPEHILCVSLDIHKYFHVVMLHNALGELVTPTFEIDIFQSGFDKLCQSIDDVKAKTQAQIVLLGMEPSSHYFENLARHLLARKQPVTLINSFAVKHNRDQHMMQREKDDEIDTAAIGDLLRRGEGSPYQPATGVYLKLQQLDRVRLGQVRIRAIVQNHILGHLDRIFPGLVLVGDEALKRYTPLFTKDFWLCQTLQHLIRVCPDPRRLAALSPEELRAAFHARGYRLAVSMARKLIDYAQKILLPEPELIAIRSELLQRDLALLETLDAHIADLDQRLATLVADTPYAIWTKLKGLAPVQVASLAGAIGDPKHYDHAGQVFRRAGLVPGRHDSGVHQHQGQGKHILKVGDVYLRRALMNGVASLLLHQPCLSTYYNRLQLTKPKGVARVATARRALGILWATLRDQQPLTLGLKQGVQL

SEQ ID NO: 313395 - protein, 412 aa, unidentified
MDVLYKRCAGLDVHKDSVVACVRLADGPTVVREVRTFATTTSALLDLSAWLAEHGCTHVAMEATGVYWKPVWHILADGEVELILANAAHVKAVPGRKTDVNDATWLADLLAHGLVRSSFVPPAEIAEVRELVRTRKQLTREKARHTQRIQKTLEAANIKLDSVISDILGVSGRAILDAMAAGESDPAVLAAKADRRIKATPEALQTALFGRLRRNHRFLLELHLQQIDGIDAAIASLDAEVSERLTPFAQAVRLLTSIPGVGELSAETIISEIGTDMSCFPTDANLVSWAGLAPRNDESAGKRRSNRLRPGAPWLKTTLVQCAVSASKAKGTYLNALYRRLRARRGPKKAICGLAAAILTAIYHMLKDGTFYVDLGPDHFDRRDKQHQTKRLVRRLNELGYAVDIQPLPASA

SEQ ID NO: 313396 - protein, 502 aa, unidentified
MDLTDLTSTDTKPASPAPPPGLVAGVDTHQDTHTLAVLTAQGAVIATSSFPADQQGYDDLTAHLDRLGPLMAVGVEGTSSYGAGLTRTLRQAGYDTVEVLRPSRRVRRHHGKSDPIDAIAAARTVLSGDGVSQAKDTTGPAEQLRLLLAARTRLISAATAITNSIHSLLTTAPEPLRERYRRLDTPALITRLARTRPTRTITTPQQAATSALHHMARTHQDLHHRAERLNQQMHHILTTHYPGLLAVYGAGTTVAAQLAVTAGGNPGRIHNEAAFAHLCATAPIPASSGKTTRHRLNPGGDRRANAALHRIALVRLRHDPTTKNYANRRTQEGKTTKEIIRCLKRAIAREVYRALTQPPPTDTTSTLAAHRKRHHLTQTDVAHALNTYPARISDIENHRRPLPQLTHRYHQYLTTLDTQQEHQVHRSLASSRAARLAAESMPASATTTRSAMPWAAWKASAMGMIVEVSALFPSQHPILRGKPRRSTSRPTMTWGSTRLSLE

SEQ ID NO: 313397 - protein, 403 aa, unidentified
MFSLGIDVAKQSHRYLLLNPEGKKVRSSSFENSSQGFQDLWQQLQDLKIPQQDLLIGMEATGCFWENLYSFLKEKGFPTVLLNPFHVKKFREALGKKAKTDEIDALVIAQFLRTQEYVQSQVAEENIQSLRELTRLRFELLNEKKNYHRQVCSLLTLIFPEYEQTFLKNPFTATSRAILEKFPTAKKLAQAKPKQIEKIVRSIHGNPFDLQEITALLTAAKKSIYSGRAEEARSTSLRILLTQVSNLSAAIQQLEEEIHKILSPQESEENRPGENLLTIRGVGERTQAAALSYLGEKGTNFPSSTHAVGYIGFFPKIHQSGQTQKENKICKRGPKVLRWALYMAAVASVKHNPEMKILYQQKCAQGKTKKQALICVGKKLLQIMLAMLKSGKPYNPQLVFKQA

SEQ ID NO: 313398 - protein, 351 aa, unidentified
MNILAMDLSKSNTVFCLYNKDSAKSRYGKVKTTPQQIHDLIVKYSPDRIVFEVCSAAGWVFDTADGLCSEVQVANPNTQAWRWKNVKNKNDKKDALKLAQLSAMNQLPTVHMPKPQVRQKRALIQYRQSLVSRVVGIKNSIRSILDKQGYSITAGKSGWSKRQVEILERLSLPFERCDIDNLWRGQLYVELEMMRSARKALADVTGKLDELAKSDKNIVLLQTAAGVGPRLAEAIAAFIDEPARFTSGKQVGSYVGLTPRQYQSGSMNRQGKISGQGNKLLRALLVEVSWLGLRHNAWISRTYHRLLRGSPSRKKIAITAVARKLLVRCWAMLRDGQPWRDIEAETEKQAA

SEQ ID NO: 313399 - protein, 356 aa, unidentified
MAEHRLSYAGERIDVGIDVHKETYTVICLCQRQMVKTATVPADPVRLAESLPRWLPGARIFSAYEAGFSGFVLHRVLTTAGITTMVVNPASVAVAANDKVKTDRRDAKKLARDLADGRLRGIDVPTAAEERARLLPRTRAQLVAHRATSTRQIKAKLHQFGRITPGSRRLMRSRSLREMAAWALPPALHVSLTLLADQWRCAPRQLLEVRRLLREQAKAPAALETVYRSVPGIGEVVARTLATELGDMTRFANERALLSYTGLTPSEYASGAAIRRGHMSRQGVSRRRHGLVATAWRALPGDPILQVMFDRSAAPRGKQRAIVAIARRLIGRIRACFRHGTTYAVGTIGEVLASFG

SEQ ID NO: 313400 - protein, 355 aa, unidentified
MDGLRYIGLDVHQDTVSAAMLDGEGKLMMQSVLATRAAAILDFLHGIKGTLHVTFEEGVHSAWLYDLLERRGARGLVCNPRKNKLLKSGNKGDLIDARKLAELLRNNSLSPVYHGGISALEVQHRMRSYTMLTEDTTRVLNRLKAVFRSQAIPCHGRRLLRLDHRESYLAQLPTAGLQQRAESLYRELDALHPLRLRAKREMLAECRKHPAMKWLQSVPFLGKVRTAVLIGRVQTPHRFRTKRQFWSYCGLALETHDSAEYRMVDGQVQRKSRPAQLRGLNWNHNHELKCLFKSAATMAAFREGVFREFYSGLLAKGIRPEMARLTLARKIAAITLKIWKEGETFNAEQVKPQAA

SEQ ID NO: 313401 - protein, 362 aa, unidentified
MSNSTTWVGMDVHKENIVTVSISGDSGTVMTRWETPNTAKGKERLAGRIAGLGKARCVYEAGPCGYDLRRFLDGKGIPCDVIAPSLIPTKPGDRIKTDRRDAEKLARMHRMGELTAICVPTPAQEALRDLVRAREDANEDLVRCRHRLQKFLLRQGRRFEGKSWTREHWRWVRALTFDDANAGTVLAEYVLAVDQQLERVARLDARIEEEAQNPGIAPVVARLKTLRGVRTLTAMTIHTELIDLSRFASPRDLMSFIGLVPSEYSSGGKQRRGSLTRAGNAHIRRVLVEAAWHYRHPPHRTGETIRKRREGQPPEVIETARKAEVRLYRKFTRMVMRGKRTTVAAVAVARELAGFVWAIGRI

SEQ ID NO: 313402 - protein, 445 aa, unidentified
MHYKRLLTFIDGVSSYLSVGLDVGADFTWMSIALPNGSFVGKPFKIIHSDSRSRDLAVTKIKEAQETYSLKSRCFLESTGIYHIPLLCFLRDKGFDCSVINPIITKNSTNINIRKLHNDKFDSKKAALVGLNVSLKTSILPDDSVVDLRNLVRDYYYFKDLQSAVALKLTAELKVSFPAYAKVFSKVTTQSSLKLLSSYPLPEDMLAASKEDIVDIIRSTARFGEAYALRKYDAIISAAQDAAVFGRALPSNAVRIRLYIDTYQEYQKHLDALLKALHETVEKLQDTLIYDQICLLQSLYGIGFLSAVVLVAEMGDFKLFSSPKKLYAYFGLDPAVKQSGKLNGDKVHMSKRGSSLARRVLHMAALNNVKVAKGSGIPVNPVVYDYYTRKCSGKKKPVAMGAVMHKICNIIFAMLRDNKPFEIITPEEHCRRFAAEHPDKIRKAA

SEQ ID NO: 313403 - protein, 307 aa, unidentified
MEAVHPATLVDRGVWTRADAEPPTRPSGFQELACRWVVERTIQRVVFAPTGAYHRALERSLATTGLPLAKINPRHARRFAEALGQLAKTDRLDAALLARFGALLEPPTRPVPTPTLDAMKELLVARQALIKDRTAALNRQKIVRSPLLRRQLAQRLRQIAHQLAAIEAHLLNLCKGDADLAPRLAILMSVPGIAQATALSLLVGMPELGSLDQGQVASLAGVAPVAHDSGTSRSRRMIRGGRANLRQALYMPALVAARFNPDLKAKYQALVAAKKPAEVALTAIMRKLIILANALLRDQRHWTPQPA

SEQ ID NO: 313404 - protein, 369 aa, unidentified
MSEITRAPIVRVGVDLAKQVIQVHAVDVSGRRVAARAFKRDQFLAWCAQLPAGCLVAMEACSSAHYWSRKLRALGLDARLIAAHFVTPYRMEGKSGKNDANDAAAICEAASRPCMRFVPVKTCEQQGVMSLHRVREGLKEERTACINQIRGVLTEFGLVFCKSPKVLRAVLADVIEDASNELSAMARLVMQRAFEHWRELDEHLRWCDRQVGQHVRASPQAKRAVKVFGIGELGASALTAGVGDFKQFKSGHQFGAWLGLAPKQDSSGGKTRLGRITKRGDDYLRTLLIQGAKAAVMSADKRDDPTSRWLAQLTARAGWQKACVAMANKNARILWAVMTREEGFDPNHVSVKPRNPVAVAPSDPAACAA

SEQ ID NO: 313405 - protein, 411 aa, unidentified
MDVGYARWAGLDVHKATVVAWVRSPGLRAETRPAETQTFATTLRGLAALAAWLTAHAVTHVAMESTGVYWRPVFAVLEGTVQVQLVNARHVKMLPGRKTDVRDCEWLAQLLECGLVRGSFIPPAAVRDLRDLTRLRKTLIRERGPHVNRIAKTLELANIKLGSVVTDIMGKTGRAILQALSIGRADPEYLAAGAQGRLRKKPAALREAVEGRLTPHYAFLLPQHLALIDTLDAHMATLDTRSEAAMVPFAEPAAVMQTMPGVATRAAEAILAETGVDLSPFPTAAHFASWARLCPGNHESAGKRRSTRTGKGATWLRATLQEAAWAAVHTKKSYYRALSYRLKARGGPKKAIVAVQHAMLVALWHMLKRRVSHQDLGADYFAQRNTERTLRHHVRRLEQLGYHVLLAKEAA

SEQ ID NO: 313406 - protein, 355 aa, unidentified
MGGLKHQMEKRSMDYFAGLDVSVKDTSVCIVDGTGKIVRELKVASEPEALLAALRNAAYHFKRIGLEAGPLSQWLFSALGEAGLPVICVETRHMRAVLQAQINKTDRNDARGIAQMMRVGLYRPVHVKTLRSQKLRMLLTHRKLLQSKAIAIENDLRGTLRNFGLKVGMVGTAKFEARIKELVENLPDLAVLVEPLLVVRRVLREQTAVLHRRLLAIVRDDEVCRRLMTTPGVGPVVALTYRATVDVPARFRKSKAVGAVFGLTCSKYQSGEIDRNGRISRCGDEMMRVMLYEAAQSMLRSKKWSWLKAWAMQVARRRGMKKALVALARRLAVILHRIWVDGTEFRWTREAVTAA

SEQ ID NO: 313407 - protein, 418 aa, unidentified
MKKHSKSLQRSEPTLKGTKARGPVQRDAKEVLAEVLGKLTGKLDARAVSTSAKENRKGNTVGPNRDRLTVGVDLGDRWSQYCILGLEGETLAEGQLRTTQEDVREFFQALTVARVVIEVGTHSAWVQDVITEWGHEVLVANPRLMEGSKRRKRKSDRIDANKLARLGRVDPQSLYPIRHRSREVRQDLVVLRARDALVSVRTELINTTRGLVKSMGTRLPRCSSPSFAEKVKDAIPVEVREALLPLVQLTETVNDCIARYDQKIEELGQKKYGHTTLLRQVKGVGPITSLAYVLTLEDPQRFSSSREVGPYLGLVPKQEDSGDSQPQLGISKTGDRMLRRLLVGSSQYMLGAFGPDTHLRRYGLRLCERGGKNAKKRAVVAVARKLAVLLHHLWVTGDVYEPLHQTGAETRTAQATAA

SEQ ID NO: 313408 - protein, 360 aa, unidentified
MEIHRTSVGFDVHARSVVACGLDRSTGELFERRLTPDHQEILAWIGSLPAPVAAVYEAGPTGFGLARFLEAAGIECSVAAPSKLQRPAGDRVKTDVRDARHLARLLHLGQIVDVAIPSVEQEAARDLVRAREDCRGDLTTAQHRLSKLLLRQGIVYYGGNAWTGKHEQWLRTHRFEVPGLQVAYDAAFDAMLATLDRRGRLDQAITAMAADSVFTPVVGRLGCLRGVSTLTAFGLAAEIGDWERLSGRSIGAYLGLVPTEYSSGSTRSQGGVTKTGNSHARRLLIEAAWHHRAPYRPGRDLRRRWEAASPAARARGQAANRRLHARWARFDERKKRSVVANAAIARELAGWCWSLAVLDD

SEQ ID NO: 313409 - protein, 401 aa, unidentified
MIDTGDIDVFLGLDVGKGEHHATAVTPAGKKAFDKRLPNTEPKLRELFSKLKAKHGTVLVVVDQPASIGALPLTVARDVGCPVAYPPGLTMRRIADLYPGEAKTDAKDAFIIADAARAMPHTLRAIDGEDETIAELEMIVGFDDDLAGEATRVANRLHGLLTQIHPSLERVLGPRLQHPAVLTLLERFGSPAQIRKAGRRRLVTLLRPKAPRMAERLVEDIFDALDEQTVTVPGTEAAALIVPSLAASLTAVLDQRRLLAGRIEELLEAHPLSKVLTSMPGIGVRTGARILIEVGDGSTFPTAGHLAAYAGLAPATRSSGSSIRGEQPSRRGNKQLKRAFFLSAFAALADPASRAYYDRKIAQGKHHTQAVLCLARRRADVLFAMLRDGAFYESRPAATVS

SEQ ID NO: 313410 - protein, 452 aa, unidentified
MPRLVGEVTYSADGVSCRSSTDPLGCRRVSFGSNRFHHIEQGDELTIFVGDDWAEDHHDIHLMDADGTKLASRRLPEGLAGIRGFHELVAAHAEEPAQVVIGIETDRGLWVEALAAAGYEVFAVNPLAVSRYRDRHQVSGAKSDAADAKLLADLVRTDRHNHRPIAGDTPDVEAIKVLARAHQNLIWSRNRNTNALRSALREYYPAALETFESLADRDALAILGRAPTPSDAARLSVSKIRSALKAAGRQRNLDAKALEIQTALRTEQLAAPAAVTAAFGATTRAAVAIIAELNRQISELEAELATHFEAHPDADIYRSLPGLGVILGARVLGEFGDDPNRYTTAKSRKNYAGTSPLTIASGKKRAVLARYVRNRRLYDAIDQWAFCALTNSPGARAYYDQHRAAGDLHHQALRALGNRLVGILHGCLRNHSTYSEHKAWAHRQTNPETKAA

SEQ ID NO: 313411 - protein, 347 aa, unidentified
MRFYTKQHQFYCGIDLHARTMYVCILNQDGEILLHRNMKTSPETLLRNIAPYRADVVVAVECMFTWYWLADLCAQEGIPFVLGHALYMKAIHGGKAKNDKIDAHKIAVLLRGGMLPQAYVYPAAMRATRDLLRRRMHLMRKRAELLTHIQNTNSQDNLPEIGKKIAYKANRAGVAERFADPAVQKSIEVDLALISHYDFLLRDMELSVLTTAKEHHTNTLYLLRTVPGIGEILSLVLLYEIHDIHRFPRVQDFVSYCRLVKCAKESAGKRYGTGGTKIGNAYLKWAFSEAAVLFLRDNPLGQKYLTRLEKKHGKGKALTVLAHHLARAVYYMLKRATAFNMDKFIHR

SEQ ID NO: 313412 - protein, 403 aa, unidentified
MNAVGIDVSKGKSTVAIYQPGDQLVLKPCDFRHTQSDIRSLIGIIRELDGETKICMEHTGRYYEPVASWLSDAGLFVSAVNPILIKNFGDDSLRAPKTDKADAKKIARYTLDRWAKLKQYGRMDETRNQLKTMNRQFGFYMNQKTAMKNNLIALLDQTYPGANAFFDSPARSDGSQKWVDFVYTYWHVDCVRGKTLEAFTEHYKNWCKRKSYNFSAAKAKEVYSNSSDLIAVFPKNTNTKMLIHQAVEMLNLASRTVESLRSEMDQVASTLPEYPVVLAMNGVGPTLGPQLIAEIGDVTRFTKRGALTAFAGVDPGKNESGQYSQKSVPTSKKGSPHLRKTLFQIMDSLIQRSPADDPVYAFMDKKRAQGKPYYVYMTAGANKFLRIYYGRVNEYLSSLSEDE

SEQ ID NO: 313413 - protein, 376 aa, unidentified
MLATAPAAPPPVLLKYVVGIDIAKATFAACLGSIDAAQRLRLGKVVEFPNNAAGFEALRHWVAAGLDYEPERPLWFVVEATGVYYEELAYYLSAQQQALSVLLPNKVKHFARSTEQKSKTDALDARLLCRLGLERQLPAWQPLTPAMRQLRSLTRERAALRTQAAQAKNRAHAYAHSYEPDPLALKRLQQRQALFEAQMAEIDAQTAAVVDATPALARKLAQLTSVPGIGLTTAVTIVAETSGFALVENERQLASYAGLDVVQRQSGNLARPTAISRRGNARLRTALYLPAVSSLRYNEQQKAFYARLRARSPNGKVGVIAVMRKLLLLSYSLWKNDQDYNPHYHPATVLPQKVAPTTGAEATQDAPSGAPLKAQI

SEQ ID NO: 313414 - protein, 361 aa, unidentified
MDAPSESQGKESRELTDTKGDRPMQIVRIGLDIAKNVLQVHGVNEQGKVVVQKQLSRGKGLVSFAQLPVCRIGIEACGSAHDWGRELQKLGHDVRLMAGHLSNPYRPKQKNDRNEAEAIGEAVARPQRRFVPSKTVEQQAVVTVPRARELLVSERTAVAHQIRGLLMEYGKGIPAGIQRLRRELPAVLSADDEGLPILARPVVSELQARLSELEERMAGHDRQSAQLARQNAAAKRLRQVEGVGPITATAIVATVGEATAFSHGRQFAAWLGLGPKQGSTGGKPRLGPITTRGNVDLRTLLIHGARSVLQYTAKRTDAKSVGVEGVRQRRGDNIAAVALAAKHARILWALLAGGQEYRIAA

SEQ ID NO: 313415 - protein, 386 aa, unidentified
MKTVAGLDVHKDSVYLCILRENGEKIERVFGVLTPQLDSMRDFMAENKVSEVAMESTSVYWIPIWRVLVDSFELKLVNPYFIRQLPGRKSDVKDAQWIAECVMKELIRGSFIPPPLIQQLRLYDRRIFEINAELVRKYSKIDAILQRCNIRLSNYVACTDCKSYKAVVKQISEGVTSPQELLRHVHKRIINKHGEDTILAALTGVVSDAEIDMLAQYVAESALLEDNKNKCIEKMREICNREFKEQMKNLQEIPGVSERSALTVLAEIGPDVNAFPSAKHLVSWCGFNPRNDESNKKIKSNKITHGNRFIRIASVQCAWAASRTKDCYFSKFYAFHTQVRKKFKLKVVVAVARKMLVCIWHILKFNVPYKDFAPRKPAVEDCTQLA

SEQ ID NO: 313416 - protein, 351 aa, unidentified
MVIIGVDYHPSFQAIAFFVEETGEWGEQELNHREGQAEKFYRELKQRGIGVRVGMEATGYSRWFERLLAELGFELWIGDPAEIKAKRVKKQKTDRNDARLLLRLMREDNFPQIWVPSPENRDLRQLLWHRHRLVQMRTRILNQLQALAMNEGHRWKKKLFSEQGRAQLEKLALAPWASRRRQELLELLDRMNPTIEELTAAVEREARKRPEVLRLMTHPGVGPLTALAYVLIIGTPTRFKRSKQIGTYVGMIPSEDSSGGKQRLGHISKQGSSLLRFLLVEAAQAAARVHPDWKRRYIHLAMRRHRSIAKVAMGRRLAIRLYWMWRNGCEYSQSSEFGSYAGQLGTGHGVQ

SEQ ID NO: 313417 - protein, 352 aa, unidentified
MKRVVPGPAPGQSVFVGVDLSRSTWWFSARWGGEVQRRWSTPNDLRHLEALVDAYGTGGLHVAYEACGFGYEMAWRLQARGAAVTVVAPSTVARTPGLRVKTDRIDADRLAEELAHGRLKGVAVPTRVDHEHRQLSRTYAQAIQDRQRAQARLRALLQEHGRLGPAPRLGWAAYTRWLATQVLPAAVQCCVDELRTAREEAHQRARRLRTALLAVADDAPYAPLIAALTEQRGIGRFSAIRLRLELGDLRRFTPAAAFTHYLGLTPSEHSSGDRVQRGHVTKCGPAAVRAWLVQCAWASIRAHGDPALRATFERLCPRMGKKRAIIAVTRRLALRLRARWLAALADPTWSMA

SEQ ID NO: 313418 - protein, 341 aa, unidentified
MRLRKVTSAETKGKSLVLEDFDHYVALDWSQEIMAIAHVRRRDKEPVVFERASELKLLKQYLQTLQGTIVLTFEETTTAQWLYLELRGEVDRIVICNPYMNRLLSAGPKTDKIDAAKLCLLLRAGLLTEVFHSDNSLYELRLLVSAYRDLVQAGVRILNQRSALLRGHGDSGTHAPFILEHLDKSLELYRHAKQQYEAKFEEFCRHSKQLKLLLPVSGIGTIGAVTILATVVDARRFPRTGKYLSYCGLVKLEHSSGGRSYGRRKPQYSRSLKAVYKVAALAAIRGNNPIREYYDALLARGLAKHHARHQIARYIATVTYGILKTGTTYNPYQWRTYTKVA

SEQ ID NO: 313419 - protein, 407 aa, unidentified
MDQVLQHTAFAGVDWGGHEHQLCVVDGAGHKQVELKVSHDVAGLDELIGALAGCGNHVPVAVERAEGLLVEHLQAHGHPVFPVSPRIAARARERYRVAPVKDDRFDAFVLADTLRHEHLHWRPLSVPSPLLAELRALTRDRDRLLETQQATEAQLRSIMESYHPAPARLFSSMDRQIALAFVADYPTPQVASRVRTARMAGFLRRNGYTGRVPAQVLAERMRANLLSGSAGTIAGKAHSAKTFAHLLGVMNEALAEFDDAIASVVAEHPDARIFASFPGVGPILTAVLLAEIGEDRHRYPTAQTLLAEAGLAPVTRSSGRSRSVRFRYASNARLREATMWWAFNSLKTSPWAATAFRQARDARGQRYHRALRGLAARWMRVAWRCWQDRTSYDPALHTGAAIAEHSA

SEQ ID NO: 313420 - protein, 358 aa, unidentified
MEKLIRVGMDTSKSVFVLHGVDAAEKVVLRKKLRRQQVIEFFGKLKPTKIGLEACGAAHYWARELEALAHEVVLLPPQYVKPYVKRGKNDAADAEAICEAMSRPTMRFVPVKTAEQQAALMLAGTRDRLIRTRTQLTNAIRGYAAEFGLTAAKGLDKIEPLLARLAAATELPKLAKELFAAHAREYAQIKVAIQKIEAKLMAWHKHNELSRRLVEVPAIGPIGASLAVMKVPDPHAFRSGRDFSAWIGLTPKDHSTAGKTRLGVITRAGDETLRSTLILGATAVIQQVRRGKGHPSPWLIDLLKRKPPKLAAVALANKTARIVWKLMVSGESYNPMRLRDTRGPSARYGSEVTAITQA

SEQ ID NO: 313421 - protein, 449 aa, unidentified
MLEPQEIEDEEYEQVLERVAAVDVAKASGMVCTRVPHSSRPGKRRTMVREVAAATGAVLELAEQLAGERIEMVTLEATSDYWRIWFYVLEAAGLRVQLVNARDVKNAPGRPKTDKLDAVWLAKLTERGMLRPSFVPPAEIRRLRDYTRLRTGLTRERTRHWSRLEKLLEDALIKVTAVASKTGSKSVRAMVEALIAGQRDPQVLAGLARGKMRARHDRLAGALAGRFDAHHGELARMMLDQIDALTTHIGTITSRVGELIEAIPGAWGVDADGVTGPGAGLGPGAPVLPAVARLDEVTGIGAAAAQVIIAGVGLNMGVFPTPGHLVSWAKLSPRTIQSGPKNRSGPAGDGNPYLKGVLGEAAASAARTATFLGERYRRIARRRGKLRALVAVARSILVIVWHLLSDPAARFGELGAGYYASRIDTGRKTRNHVRQLEALGYTVTLAQVA

SEQ ID NO: 313422 - protein, 414 aa, unidentified
MKRQENKACGADIHKRFLMACILSRDGSKVLNRFDMTVEGVLSFASWLKDNKCKKVAVESTGNYWHLVYQVLDDEFEFILGNAFKTRRHSGAKTDKRDAEWLAELCLNNQIEPSRILPKEDRELRALTRARKGYVDFRSKIKARTIQELEACTIKLASELSDVFGKSGRHVLQGLVDGRSADVIVESIPSKKVKKNKEKIKQAIIAGLSPISIFLIKSHIQMIDEVDKKLVQLDAQISRLLKGRKRDIEIAMSMPGIGLVSAAAILSEIGDYRNFASGKKLAAFSGLDPSVYESAGKRYNGKITKMGSKYLRRMIIECAHALSRTKAKTQLKRFFLRIMARRGKNIATVALARKMLVVLHHLLINQEMYKDDGLAKPKNVKVSFSEEANYPSLDEMIEVLVGAGYFVKKDSQGG

SEQ ID NO: 313423 - protein, 327 aa, unidentified
MARMQGKTTSDISQLFAGIDVSKAHLDLQLSCERRSRRFANDPAGFAAIDAHLRARAATPCLVALEPTGRYHFPVWRALHEAGHGVAPLNPLHVRRFAESDGELAKTDAIDAAVLARMAAQRRPAAKLPPSEEQLRLKALTTSIADRIDRRATLKGQRAEVRDPLIARFDEAEIAQLSEAIDALKAERARLIKANPQTDRVAAILCSMPGIGEASAHRIIAEMPEIGTLDKKQAAALLGTAPRANQSGKRDKRRRTKGGRRRLRAALHMPAIVASNANPDLKAFKLRLKAKGKENAVILTAILRKLIILANALVAQNRMWTPKMPLT

SEQ ID NO: 313424 - protein, 406 aa, unidentified
MGSETHYARAFNWRNYEYSKKPFAFSNDEAGFPSFKDWMDDIAEKHGMETVIPGMEPTGHYWLNLGAYLQEQGMKPVHVNPHHVKKSKELDDNNQSKNDRKDPKTIAGLVNEGRFSYPYIPTGIYAEIRNLSNLRIQTQEEITRIKNRIARWFSIYFPEIKDVYRNPDAVSGLMVIKQAPLPCDIKELGVDGVNKIWRDARLKGAGIKRARTLVTAAEHSIGNTEAPRSARKEIRNLLEDYEGYKKRMDELMEEIEKTLSEIPYIDKLMEINGIGIKAVSCFIAEVGDIGRFDNPKQVQKLAGYSIVADSSGKHKGESRISHRGRTRLRYALYEATISVIGKNKEFKEIHSYYRTREKNPLKKMQSVIAVACKLIRIFYTILTKGVDYDGQKMLNDIVRPEIQPAA

SEQ ID NO: 313425 - protein, 351 aa, unidentified
MDRYIGIDAHSESCTVVVMGPSGKRLRQQVVDTDATVLIAFLKGVSGDKYVCIEEGQLAEWLVEALGPHVKEIAVVQPPEHGGRKSDLDDAWALAERVRVRAEGTYVFKPTTQYRALREAVRAHSTAVKEQTRAKNRFRALLRSRGVPKLDETIYELESRDRWIAQLPQAYRRRAEWLGQQVDATSEAHVLAEKWLREEGKKLADVQRLKTAPGLGDVRAAQIVAVVVTPHRFRTKRQFWSYCGLGIVTRASGEWKRSNNGQWQHVQGKVQLRGLNLNRQPLLKAVFKGAAISALSKNNHLRKHYDQLLANGTAPHLARLTIARQIAAATLAIWKKKEEYEPTKHYPTEAA

SEQ ID NO: 313426 - protein, 389 aa, unidentified
MEARTVNNLPPAGTHDDAICCVLAIELSKKSWIVAVNTPLLDKISRHTLKPGDGKELLDLCERIRTRVARETKKRVEMVSCYEAGYDGFWLHRLLEGHDVRNHVIDPASLQVDRRARRAKTDRVDAERLLRSLMAYLRGEPKVWSVVRVPSVAEEDDRRLHRERGRLINERIQHVNRIKGLLAIHGIYDYQPLRRDRTQRLERLRTADGRTLPPRLEAEILRELQRLELVIGMIKTIEAERDAIASANTETERRGAKKVQHLAKIKSIGPEFATTLVGEVFYRSFDNRKQLASYVGLTPAHFQSGAMCRDQGISKAGNAKARTVMIELAWLWLRHQPDSPLSVWFRDRVGKLKGRIRRITIVAVARKLLIALWRYLETGLVPEGAALKV

SEQ ID NO: 313427 - protein, 433 aa, unidentified
MKVLYERVAGIDVHKDMIKVAIRSPGDKPWTRKTEIFEFRTFYGVLQQMARELRKRGVTHVVMEASGVYTEPVYYALAEQDFTEVAVINPAHAKALRGHKTDAKDCARLAELFECGLLRGSYIPVPELKEVRDLTRYRIKTVQARTSEIQRLGKALESAGIKLGSVASSITGTASTAMIEALIDGERRGGVLADLAIGRMRTAGKLADLSMALAGRFTDHHALLCRLHLDRIAVFDDAAGGLDKRIAGKAARWQREQGLLTSVPGFGDVVAQAWLGEIGPAPHRHFASCEKLASWVTLCPGNNISARKRKHGRTGDAGTYIKPMLVQAAWAAIRVRGRLQARYNRLVRRFGGDKNPGAKKKAITAIAHTLLKIAYQVLKSGVPYQEPGADFYTRRESPEHKQAWLERQLQKLHPGCTVTITITPPEAALPPGA

SEQ ID NO: 313428 - protein, 384 aa, unidentified
MRLVHLQRFDTNKDPLITPEYGMMEYPNKFLSKEVFMRFYSKQHKYYCGVDLHAQTMYVCIIDQEARIVKQKNIKSTPPAFLKAIDKYRDDIVVSAECMFTWYWLADLCCKEGIPFVLGHALYMKAIHGGKAKNDRIDAYKIAYLLRGGNIPMAYVYPSEMRATRDLMRRRNHLMRKRAELLAHIQNTMHQYNLPLFGRNIRYKGNREGLIEHFKDECVQKSMEANLSTIDHYSSLLFKLEYYITKKAKVHDGDSLFRIRTIPGIGETLSLIILYEIHTIKRFPRVQDFVSYSRLVKPSKESAGKIYGHSGRKIGNAHLKWAFSEAAVLMLREIPEVKKYKEKLERKHGKAKALSILAHKIGRAVYYMLKRKEVFDVKKFLNKK

SEQ ID NO: 313429 - protein, 409 aa, unidentified
MRIIGLDIHRAFAEAVAWDDGKLKRLGRVDMRRPLLEAFAKKLSMEDVVIVEATGNAASVAAVIAPHVKKVVIANPKQVRVIAHAKIKTDTIDASVLAQLYASGFLPEVWIPDEPTQALRRQVTRRNQIVRQRSRLKNIIQSILHSHLIPSCPHADLCGASGRTWLFHQVLPEDERLAVERHLREFDRLGEDLKVIERDLARSALRDEGVKRLMTIPGVDMVVALAIVAAIGDVGRFEQSQKLVSYLGLNPSVRQSGPGPAYHGRITKQGRGHARGMLVEAAWAAARAPGPLHAFFLRVRARRGQHVAAVATARKLAVLIWHLLSKGESYVWARPALHARKLRDLELKAGYKAERGQRGAAHAYNIKSHRDQERRWVEQAETAYARFVAGWNPRGPKQARTGAATEGRR

SEQ ID NO: 313430 - protein, 428 aa, unidentified
MKHHYYIGIDRSDDTIDFCQLSSTGEALHQQKINSAPESLFSWIERLINELPDGATIALCIEQPCQNLVNFFTQFKQIDIYLENPAVIKKYIESLSASRAKDDKRDAAAIAQYIYERHPRLQPYSNPDPQSQQIAALVEKRRQLVGTRTSLTNKLTQALKDYYPQALGLIGKYIYSPLSCAFLTKWPSLQALQKSRPSTVTQFYHTRNSRSTKLMEKRHQIIANSVPMCTDDDLLEVYALLVISLVKSVQQIQIAITNFDNLIEAKLKLHQDAELFVGLPGAGPCYAARLLAFFGSDRERYQDASSIQKDSGVAPVTKQSGKMHFVHRRYACKKFDRQTFVEWAGQTISKSLWAKAFYLQQKAKGHRHQSILRSLAYKWQRILFRCWKNNKPYDENTYIEALKKASSPLVIIISEVKTTHPKLCKQIT

SEQ ID NO: 313431 - protein, 356 aa, unidentified
MSTRKVQDFVVKGKEVFIGLEDSKKTWKIAVRSEKMLIHRASMEARCPVLIQYMRNKFPECTIHLMYEASFKGFNLYDQLTEDSIDCVVIPPHVVTEPKVTRVKTDKRDALRLALVLENHDFKDPCHVPDKERREDRQITRTLIAIQKDIIRTRNRVRKFLDFHGIAVSFPDRWGREEFRALKKLSLSESLRISLNILLTQLEQLWVHQTSLRAALRQLCSTERYQKAFKIARSLPGIGWFTAIRFVLELGEDLSHFTSGKKIASFVGLTCSEYSTGETVAKGRITGMGSGFIRATLIENSWTAIRKDPVLLAKFTRIWRGSGSKKKAIVAVARTLIVRFRACILSGTPYAAGVIQ

SEQ ID NO: 313432 - protein, 325 aa, unidentified
MSVIGIDVSKAKLDCAWLTANHKVKSKVFTNQLSGWQELIQWATHNTGNEISELQFVMEATGIYHENVANWLYDSGAKVSIINPAHVKYYAQSLGGGGTKNDKKDSVILARYGVREQPSLWQPAPQEIRVLKALLTRLDAVEKDLQRERNRQEKALVSDTPATILASIKHMINHLETERKTLEKRIDEHIKAHQQLKENRKLLESIPGVGKVISQRMLMLLGAYQFEDAHQCAAYLGLIPVQKESGSSLKGRSKLAKNGNKTIRAKLYMATVTATSYNPDVKALYQRLVNKGKSKMSALGAAMRKMVHICFGVLKHQQPYQPQTE

SEQ ID NO: 313433 - protein, 349 aa, unidentified
MNATTTYAVDIAKNVIQLHWVEPATGEIHRKKLSRAKFSEFIAQRRPARVVMEACGGAHHWGRWLATLGHQAELLPARQVRAFVRGNKDDAADARAIWLAAQQSDIRRVPVKTDEQQAVLSLHRMRTHWMSVRTATINALRSLLYEFGVVLPVGKQIALKALAAQRADIDEKLPASMVRLIDAQLQALKEVEHNVKVFEDEIAVVQKSHDAAKRLRQVPGIGLLGATALSAVLGDGCGWRNGREFACCLGLTPRHTGTGGKVRMGGISKRGDPYVRTLLASGARAVLASPHPPQWATQLLARRPLNVVVMAMANKMARTAWALVAHGRGFDKQWQSVPPLQALAGVSAS

SEQ ID NO: 313434 - protein, 350 aa, unidentified
MTSVARHFIGVDLHKKALQFCVLDDRGNLLHEQAVKIAPDAAAEMVFNSFRPWQGTCRVAVEAVGMNRWFVNGLQARGYDVVVADPIKLNLKVLGKKTDKRDAREIARRLWLGDIDRDAKTWYPDDDVYGDRKLVRTLRQLMKHRLGLNNEIRAQLRAYNISPPATTLHSKKGVDGLLAIQMPNASLTVSLHVLAHSLASIEAQIAVLTEQIEKRVASDERLRKLQQQLPSMGAITTLTLVCELGDVHRFRNAKAIASSGGVVPRVYQSADTAHHGRMTKRGSRSLRSVLGQWSVRLMAHDDLVSAWAAPKKQRLHKNKVRMMLARKLLVGVAVSLRRDEPFDLRRCLGR

SEQ ID NO: 313435 - protein, 346 aa, unidentified
MNYIGIDVHKSICTAVVMNDDEKVIDQIIDFGTNDEGYSFIIDHYSPKDSYILFENLTTAHRVYHFFKSRGYRVEGLHTGHGCVTEISKTDFKTDLEDATKLARMCKDHFTGRREYALAHFADIDSMKAKELCRVMNDCSEQRDKLNLRIQAYMDMFDIHLPKGLKNVYSDKAMKYLKSLDHLALTIMVEDMASAMEHIDMAREGLESLFKNNEDVRNLMSIKGIAIQTAATIYTVIDGIERFETPESLVSYFGLKITRHESGGDRDLHGHINKRGDPLVRKYLANVVAKHPIYYPDSDLARFYKRKKEIMPHWKAVTAAMRKLVCIIWAMMTRHQVYRFSSPVKA

SEQ ID NO: 313436 - protein, 386 aa, unidentified
MHHATTLPVPERTCSRGDCATLFVSLELSRSTWVATALAPGSSKMSKHTLVGGNGRKLLDLLERLRTRAEQRIAAPVRVVAIHEVGLDGFWIHRLLEANGIESQVVDPASIAVPRRHRRAKTDAIDGETLLRTLMAWQRGEPRVCAMTVPPSPIEEDRRRISRERATLLRERICHTNRIRGLLFGQGVHNYNPLHKNRRECLEELRTGDGRSLPAHLKAEILREIDRLELVLRQISEVEAERDEMLRPAEASSPAALLMRLKGIGAEFATVLYLEGLFRHFDNRRQLAAYAGLAPSPWKSGSIDHEQGISKTGNPRLRTTMVELAWMWVRYQPASALSCWFRQRVGSERGRSRRISIVALARKLLIALSRYVSHGEIPAGAVMKAG

SEQ ID NO: 313437 - protein, 396 aa, unidentified
MKGRYNLMIYVGIDIAKRNHFASAISSDGKELMKPFKFTNDGDGFQLLQSHLFELSRSDSIIIGLESTAHYGDNLVRYLVACHYNVCVLNPIKTSAMRKNNIRMTKTDKVDTFMIAKTLMMQDSYRFITFYDIDLMDLKRLGRFRQKTIKQRTRLKIQLTSYVDLAFPELQYFFKSGLHQKAVYALLKEAPTPQRIASMHPTHLSHLLAAASHGHFKKEQAKELRALAQKSVGANDSALAIQITHAIVQIELLNSQLDSIEAEMAGIMKFHDPVIMTIPGIGYINGGMILGEIGDIRRFSCPAKLLAFAGLDPSVYQSGNYTARRTRMSKRGSRTLRYALINAAHNVVKNNATFKAYYDKKMAEGRTHYNALGHCAGKLVRVIWKMLTDEVEFNLD

SEQ ID NO: 313438 - protein, 342 aa, unidentified
MTEVTIIGIDLAKRVFQLHGARHDGSVVFRKKLSRAQLLTFVAQHPRSVVAMEACATAHGWGRELEKLGHEVRLIPPVYVKPFVKRQKNDVADAEAIVEAALRPTMRFVAVKTEDQQARAMLFRTRQMFVGQRTQMINALRGHLAEHGLVAARGPAHLKRLADAIADDNTELPDEVRELGQMYLEQIDGLTARVAELDGRMKRAAKEADLVRRAQTMPGVGPVTALAIETFAPDLATFKRGRDFAAWLGLVPKQHSTGGKARLGKTSKMGQRDIRTLLVSGAMAVLQAVERFDTPKNGWLKRLLTRKPRMVAAIALANKMARGLWAMMTKQEDYRNPVAEMV

SEQ ID NO: 313439 - protein, 341 aa, unidentified
MQITTIGLDIAKNVFQVHGIDAAERVVVRKQLRRGQVMKFFEALPPCLIGIEACASAHYWARELTRLGHEVRLMPARDVKAYVKRHKNDAADAEAICEAVGRPRMRFVRPKSAEQQGRLMQHRARDLLLRQQTQVINALRSHMAELGIAAAQGREGLKPLLAVIADKKDARLPIDARASLIVLAAQLQALHTMIGSLEKRLIVQHRTNEASKRLQNIHGIGIIGASAIAATVPDPKAFRSGRDFAAWIGLVPRQDSTGGKQKLGPISKQGDRYLRRILVVGAHSVLRRAKLNPEKYPWLTQLLARRPFKVVAIALANKMARIAWALLASGGHYRPRLGTAA

SEQ ID NO: 313440 - protein, 367 aa, unidentified
MFERTSVGLDVHARSVAGCALDAQTGEIIPHRMSPDYAEILAWIVSLPAPVRVVYEAGPTGFGLARFLLAAGIGTLVAAPSKLQRPSGDRVKTDAKDALHLARLLKLGEITAVRIPSADQEAARDLVRAREDARGDLMRSRHRISKLLLRQGIVYSGGKAWTGAHELWLARQHFEAPARQLTYASSLEAMHEILDRRDRLDEAITAMAYQSDYTPVVRSLECLRGISTLTAFGLAVEIGDWNRFTGSTIGAYLGLVPTEHSSGASRSQGSITKTGNTHARRLLVEAAWHHRRPYESPSRLLRSRWEEATSEARTRGHAGNRRLHNRWISYLERRKRPVIANVAIARELAGWCWSLASGTDQASPVPN

SEQ ID NO: 313441 - protein, 468 aa, unidentified
MRNAIGIDPDSKGFICVLVKLSETKVTTRGYMTTDSDLKSFLRWVKGEGDDIVAIEGSNGLSKPIEKALREAGIIFYSFKPADTDKFRKAVLGQNKDNRKDAESVARYAMALESQGKLERYRRVWFADQELQLLTRSYERKSQAMTAEVNRLWKLIRLASPDLYLALGGNNPEVELSESVVKTQGILTLLSEKPDFGEWKTLSDEELLEAMGRGNCKGRRELIRELRKVMGSFASVSPAIALMIRNSAQQIKRFKQERIDITKMLDVLTRDTIAVQSLKETRGIATITSATMIAEIIDIRRFAREDSLACYSGLGMREHSTGETVRMVPSQLFNHRLKDAFMTAARNFVLFNPDSHLAGYYRNLVKAGMPRMEATKRVARALVRVIYRELSALNEKNADATEVEEQKEGESDMASGATRSDQSHTSDISLSSPPTSTVRGSKIVKGGATRTLRSKARRGRKAVSKKTA

SEQ ID NO: 313442 - protein, 434 aa, unidentified
MKEITEDYFEKDILHPVCCGIDIHKTWNFAAIVINDVEHHVAHYKTERFSNFAKGQKALTEWLKMNRCTIACMESTGQYWYPVFDAIEDAGLHPVVAHPKYTKPQHGKKSDPSDAIWIGKSYASGRVIPSFIPPRKFRNLRGLVRCYVKLSYTANSNKNRVLNCLTDAGIKLDDTFSDVFGKSSRAIVNHIIQHPRELFDVTPFIDKSCKTPIPKIQEAIAKVPEMSDAILKKMEIALEIVDKHEEYRKEIQETVEKELGEYQHILDLIRTVPGFNTNSFTAVRVLVEIGPDIHVFPTAKHFCSWAGVGANHDSSAKKVKSRKISKGGQYLKPLLVNIAKAVVRSKNHPEITRRFNRIKNRRGYMRAIIAICKMFLTAIWNILSKDEPYRADGYMTKNNKAKKIMTTSQALALLRSRGYTIIDHNSEPLTTTGS

SEQ ID NO: 313443 - protein, 339 aa, unidentified
MKNTKYFIGLDVHKEKTTYVVRNRLGDILLEGETATLYTELYKQLKTYLKSSIIGLEASTSYYALYQNFLRNNYNIKVANTIQLRQLIAKNDKLDAKRLSEMLRLGTFPCSYIPDEKIQRLRSLLQVRHSLMEELVRCNNRIQTFLDRNGIVMPDQEAFGKKWRQKLLQYIGSGEVSLELRYEYDHFVYLEKKSEHLGQEISGYTQRHWKKEYRLIQSITGFGPVLSCYIIAHILPISRFSSNRKLRRYAGVVPTFHESGGKKSKGHIPKTSSRKQLRWALIQAANSAGRTNTKLGYYYRKKKKQKNNAGIAHVAVASSMIDIIYKVLTTNKPYNPKNC

SEQ ID NO: 313444 - protein, 331 aa, unidentified
MEREYIGIDLHKAFFQACTMRETGERQWEGRFARTPEGIARFIARGVGPHQVLAVEASGPTWAFVEALRHTGARICVVDPRKTKLKAGFAAKTDRLDARRLADAVRRDSVVSIYIPPPAIRELREVCRGRHQVVRLRTRVAQMIRALLLRTDAGDPPTDRLYSPRALAWLAQVRLSPDADCSLRRLERLFRAAHAEATAADAAVRQRAAADPIAGALGAMVGVGPVRALTIRAEIGDIARFRRGPELASYAGLVPRVDRSADRGYTGRITREGSPWLRYVLVQAALNAMRRTDATGRWARRLAVRKGTYKARVALARVLCDEVVAHWPRSL

SEQ ID NO: 313445 - protein, 401 aa, unidentified
MFYVGIDIAKNGHGIGILDDSGELAGAPLRIPNSTDGVLSLLRRFDQLAITPDNAVLGMEATGHYWLALYSQLVARGFGVKVLNPILTDAYRSMTVRKVKTDPVDAVVIARVLRLGEYKESPVAEESTLALRQLCRFRSYQVDLCSDLKRKSIALLDQIFPEYASLFSDLFGVTSRELLLHCTTPEDLAAISTRKLAALLDKASKGRFGLDKARQIKDVAASSLGITVAADAFVFQLRQMLEQIAFVEDRVDDLDREIAAYMERSGSFITTIPGIGAVLGAVILGEIGDISRFPDGARLVAYAGLDASVSQSGEFEASRMHMSKRGSPYLRRALYLAASVAVLHDPEQAAFYQRLKARGKHHSVAVGAVARKLCFIVFAVLSENRPFERRATATVEPSASG

SEQ ID NO: 313446 - protein, 312 aa, unidentified
MNEIFVGIDVSKNTLDIYVHPLQQAMQFKNDQSGIDEMVQKLRPLNPKLVVLEATGRYGHPVTVELCSAGIPVAVVNPRNVRAYARAMGKLAKTDKIDAQVIALFGERVPLKCYVLPPDDVQALAELIKRRCQLLDMRTSESNRQYDTQLANVAKSIKAILNTINLEIEKIDKQIDALVKSSKILNEKDNLLQGIPSIGKYTSGMLIAVMPEIGTLSKRKISSLAGLAPMNRDSGMFRGHRTITGGRPFVRTALYMATLSAIRCNPKIKEFYQRLIANGKPPMVALTACMHKLLIIANAVIRDNKPWCINNS

SEQ ID NO: 313447 - protein, 346 aa, unidentified
MSYSTTVGVDLAKNVIQISVVSSRGKELSNRSLTRKKFAEFLGKQKPSRVAFESCASAHYWARAAQRHGHEARIIPAKAVAPFRQGHKTDSNDALAVAEAARRPNIKEAPMKTVEQQGLQAIHRSRELLIQECTALSNHLRGLLMEFGIVIPKGFASLLKAVPEILEDGDNELPDLYRPTLHRMHSRLLELREDIEAMTKEVDRLAKAHPICSKLMALEGIGPIGALLLYATMGSGAAFSGSREFAAYLGLAPKQYSSGGKTNIVGLSKKIGNSRLRSVLILGARAYTYRLKEPKSSKDKWLKANIERNGECRAAIALANKNVRTAWAMVTQGTEYQRRVQLEMAA

SEQ ID NO: 313448 - protein, 495 aa, unidentified
MEHAARRVWHILFTQELHPLLQHQQEMLMGCMLITRGSSHLTQPGINSLLQVPQIPIGKDGDTMLKINFMSTLFVGIDVSSKSNVVYAMDFYKNKYISSSFANNQPGAEELAGMILDCLHKHPDLTTVVAALESTSVYSVHIANYLSTCERLMSYKPYVFCLNPKMTANYRKSFIGLSKTDPLDAFVIADFARAGRIECEPWRGSQYLALKRLTRHRLHLAGCISREKTYMVSNLYLKFSELQLLQDDDRPFSNLYGAASSAVLTEFMSVQDIIDAPEEELLQFLAQKSRNRIQDLSKTSALLKKAARDSYRLDKCMYEPINISLASSFNCIETYQKEIKAIDKAIEKTIRGMTPNALTILQSIPGIGPVWAAGMIAEIGSISAFHSSDALAKYAGLTWRRNDSGDFEAEDTPVTKAGNSYLRYYFGEAANSVRRHIPEYQAYYAKKYAEVPKHQHKRALALTSRKLVRLVFGLLAKNQLYTGEQLDAEPNKESN

SEQ ID NO: 313449 - protein, 278 aa, unidentified
MATDTIGIDVSKDRLDAFWHSRDEMRSLPNTAEGFEQLCSWLEQNDDVLFVFEATGAYHRGLERHLSLEAQPFIKVNPKQARRFAQAIGRLAKTDRVDARMLARMGIALDLAPQDVESEDIHDLRELLTARRALVKDQITAKTRLATALNPVVREQLGRRIDDIAADIQALDKVIAQIARQRGTLEDRICRLMTIPGIGRLTATTMLIDMPELGHFDSKKIAALAGLAPMTQQSGKWQGKERITGGRSSLRRAIYMPALVAIRFRARTHKGIPIMSGL

SEQ ID NO: 313450 - protein, 321 aa, unidentified
MQKDLLYCAIDVSKDKLDLDAAALALPAQLGNDHASFRQLIKAAKKYPGAVQFVFEATGPYHLGLALALWEAQIPLSVLNPARVRHFAKAQGKAKTDPLDTQVIGDFARSFRPQPTPAPDPVRRELTELLQRRDGLVSSRAAEQNRLSQCRHKIIKSQIGRLMAQLAEQIDQIDGLMKKLVNSSEELKAKVKALCQVKGVGHLTAVTLLITLPELGTLGRNRIVRLVGLAPLNDDSGTQKNKRYIQGGRARPRCALYMPALSASRHNPVLKEVYERLLKAGKLKKVALTALMRKLLICLNALLRKLADQHPSPQGLCLAKP

SEQ ID NO: 313451 - protein, 347 aa, unidentified
MNSVGIDLHRNRSHVAVIDGQGELSLSRRIVNSRETFLELLGELEGESRIAVEATYGWEWLAELLEDAGYEIHLAHPLRTRAIAAARVKTDAVDAKTLAHLLRADLLPEAYVAPRELRDLRELLRHRIALTGMRSALKNRVHAILAKHGITRQHSDLFGPGGRRFLSEVRLREAPRRRLDSLLALIDDFDREIEATTKEIEQRAKADDRVDVLTQIRGVGRYTAMLIIAEVGEIDRFPDARHHCAWAGLTPTVRSSDGRARLGHISRQGSPALRWALVEAAQKCTTGGGPLRESFERISKRRGRKIAKVAVARQILTLSYYGLRDGEIRCLARRSRASAKEKLAVAR

SEQ ID NO: 313452 - protein, 316 aa, unidentified
MENIKVQTVVGMDVAQDSLDLFDTRTQQGMSVQYSTAALQSLIESLGTDRPDLIVCEATGGLERRAVAQLVAAGFAVAVVNPRQVRDFAKATGRLAQTDRIDAQVIAAFGLAVQPAARPPKDELAQHLDDQLRRRGQLIEMLTAEKNRLARASRPVSKNIKLHITWLERQIDNVDHDIDTTVKGSSVWQAKLDLLKDFKGIGPVTRASLMAWLPELGQLNRKQIAALSGVAPFNCDSGTLKGQRHIWGGRQTVRNVVYMATLVGVRHNPTLRAHYRQLRARGKAAKVALVACMRKLLVILNAVFRSGLPYVERATT

SEQ ID NO: 313453 - protein, 370 aa, unidentified
MGNASTLHVGLDVHKDSIAVAYAPTDGGVAPIPFGTIGTRQCDIDALVRKLQSKGARLVFVYEAGPCGYWLYRYLTKKELPCFVVAPSLIPRKPGDHVKTDKRDALTLARLARSGDLTPVYVPAVPDEAIRDLARAREDALHDLNAGRFRLKAMLLRNDIRYTGRANWSAEHLRWLARLVLATPAQQIVFQEYVRTVTERTELLQRLEAELLEQAKTWRLAPVVSALQALRGVQFTVAITTIAELGDLTRFDTPRQLMSYLGLTPSEYSSGDRRRLGGITKAGNSHARRVLIEAAKAYRHRAKVSEAIQARQQQLPAAIRDLAWRAQVRLCGRYRRLLARGKHPNTVAAAIARELAAFMWAIAKAQPLPA

SEQ ID NO: 313454 - protein, 409 aa, unidentified
MRIIGLDIHRAFAEAVAWDDGRLKRLGRVDMRRHLLEAFARKLTKEDVVVVEATGNAASVAAVIAPHVKKVVIANPKQVRIIAHAKIKTDTIDASVLAQLYASGFLPEVWVPDEPTQALRRQVTRRNQIVRQRSRLKNIIQSILHSHLIPSCPHADLCGASGRAWLFHQVLPEDERLAVERHLREFDRLGEDLKVIERDLARSALADEGVKRLMTIPGIDMIVALAIVAAIGNVGRFEQSQKLVSYLGLNPSVRQSGPGPAYHGRITKQGRGHARGMLVEAAWASARAPGPLRAFFLRVRARRGQHVAAVATARKLAVIIWHLLRKGESYAWARPALHAKKLRDLELKAGYKAERGQKGAAYVYNIKSHRDQERRWVEQAETAYARFVAGWNPRGPKRARTGAANEERQ

SEQ ID NO: 313455 - protein, 375 aa, unidentified
MGEITRSAIARVGVDLAKNVIQVHAVDATGRRVTARSIKRDQFLAWCAQLPAGCLVAMEACSSAHHWARALRAIGLDARLIAANFVSPYRMEGKSGKNDMTDAAAVCEAASRPSMRFVPVKTAEQQGVMSLHRVREGLKEERTACINRIRGVLGEFDLVFGKSPKVLRARLADVIEDASNELTALARLVVQRACEHWRELDEHLHWCDQQVGMHVRANAAARRAARLTGIGELGASALTASVGDFKQFKSGHQFGAWLGLVPRQNSSGGKAVLGRITKRGDDYLRTLLIQGAKAAVMSAPKRDDPISRWLVQLSARVGWQKACVAMANKNARILWAVMTREQVFDPHHVSVKPPAKQSTRQTAAAAPPLAAACPA

SEQ ID NO: 313456 - protein, 349 aa, unidentified
MDFYAGLDVSLEATNICVVDGDGKVVRETKLDTDPDAIELFLAEWSIHLKRVGLEAFSYSAWLFTALSEKGLPVICIETRHAKAALNAMLNKTDRNDAKGIAQMMRTGWFRAVHVKSEGAQTLRALLVRRKALLGKVLDMENMIRGLLRPFGLKVGEISVGRFDARVREIMAGKKELEAIVTPLLDARSAMRLQLAKLHRLALAAARSDSAVRRLMSVPGVGALVALTFRATVDDPARFKKSTNVGAHFGLTPRRYQSGQTDRIGGISKCGDELTRAMLYEAAVAILTRIPKNFKLRLWGLRLARKKGLKRAATAVARALAVLLHKIWVDGTTFRFGAGGKRGRVAAVM

SEQ ID NO: 313457 - protein, 368 aa, unidentified
MSNYVTAIGLDVHARSIKACALNPMTGEVERASFGYDPASVAEWALGLESPKAVYESGVTGFHLCRALRALGLDCAVGAVSKMQRPAADRGRKTDRRDAEFLARLLATRNVVEVWVPDERTEAARDLSRALADARGDLQRAKQRMSKFLLRHGHVFDEPTPTGGRRGNWTRAYWRWADAIEFVEPDDAAAYEHYRDCVRRCEEARDALARRVAESAGRPEWKPAVDALRCVKGVDVATAFLLACEMGDPARFPSAPSFASWCGLAPSEHSSGETSSRGGITRAGNAHVRRALVESAWHVPMSSRDPKPLAPGQEVAPAVRRHATKCNRRLIERREAMAAAGKRPCVANCATAREMACWVWAIARMATS

SEQ ID NO: 313458 - protein, 359 aa, unidentified
MQEITRVGVDLAKRTIQVFAVNAAGLRVTGRALPREKFLNWCAHLPAGCMVAMEASSSAHHWARKLTAMGLDARIISAHLVTPYRMQGRSGKNDANDAAAICEAASRPQMHFVPIKSVEQQSMLSVHRLREGFKTERVACINRIRGLLAEFGLVFPQKPAVLRQALPETLEDASNELGGLARMALQRALTQWRELDEHLQWCDQRIAAHHKANEQVRQAQQLMGVGPITASAMVATVGDFRQFKDGAQFGAWLGLTPRQNSSGGKNSLGKITKRGDMYLRTLLIQGAKSIVQTAQKRDDPISRWALRIREKSGWQKAVVALANKNARILWAVFVRGRAFDVNHISVKPGAVTQTGAVPA

SEQ ID NO: 313459 - protein, 448 aa, unidentified
MFGGCSVIRTHHKPKPMSKRKRENNKTNRAAAAQTPLSCFINPDAAGIDVGAQEFVAAVPRGRDGEGRDVRTFSSFTEGIHALRDWLLECKIKTVAMESTGNYWLCACAALEDAGIEVCLVNARHVKGVPGKKTDVCDAAWLQQLHAAGLLRASFRPRQDILPLRYLMRHRADLITQAAQQVQLMQKVMTEMNLHIHHVFSDVDGVSAQAIITAILSGQRDPAALAKLRDHRSRTPLAKIKAALVGDYREEYLFVLRQCQARWQEISASITQADEEIARRTAAIGSENAAPLPEAPAGQRRVQKNMTTAMPVYAEAHRILGVDLSAIPGVSGGVLCTLISELGTAGQIREKFRSANAFASWLGLCPDNRISGGRILKAKTRKVANRVANILRMAAQAVSRADGKMGDYVRRFKGRLGRAFNLTPATAARRLKNLQNQAQALNMKLVPA

SEQ ID NO: 313460 - protein, 406 aa, unidentified
MEDNSANFSLRRCFTISLYFVGIDISKYKHDCCIISSADQQVVSKFTFKNNKDGFSELLTTLHSLSNPKNIRIGFESTSHYALNLELFLEKAHHSFMEVNPVLISQYKKSTTLRRTKTDRIDCESIACWLMTVEYKPHPKGFYHAYSLKSLTRLRDKLIRQRSFYLVKITNVLDHTFPEFKPFFNEHFSKTALYLLENYGSAEKMAHMNTASYERLYSLSRGKFSPQQFLELKSLATNTIGVNNSIFEMELNTLLTLYKATAEQICILEAQITELIEEIHPHYMSIPGIGPISAAVIYAEYGDISNFSKPSQMLAFAGLEPGVNDSGTESHGGRMVKRGSSQLRYVLMNCALPLIRFDVTFAAYYAKKRSEGKPHRVALSHVVKKLVRVIFALERQNTDFIPQSLR

SEQ ID NO: 313461 - protein, 359 aa, unidentified
MFTERTSVGLDVHARSVSAHAMDEVTGEVLASRLSPGTEVWEWISRLPGPVAVLYEAGPTGFGLARELRAAGIRCEVAAPSKLQRPSGDRVKTDARDAEHLCRLLRLGEFTAVTIPDAAAESARDLVRCREDCRTDLMRARHRLSKLLLRHQLVYSDGNAWTGKHLAWLARQRFDDPNLQCTVEEYLDQVLATTARRDRLDARIEQLAADSSWTPVVHKLGCLRGISTLTGFALAVEIGDWTRFDGNSIGAYLGLIPSEHSSGASKQRGGITRTGNSHVRRLLIEASLHHMQPYRRGKVLRARWELAPPAARARADAGNRRLHARWVGFQARKKLHHVATVAIARELAGWCWSVATIDD

SEQ ID NO: 313462 - protein, 328 aa, unidentified
MKYLGMDVSKDKLDCCLLRDAADTRRKTKVVANSPAGLTTLLGFVEKEGILPDELHVIMEGTGVYHQLAAETLSDAGMTVSIANPAQVKDFGRGMAVRTKNDTKDSFVLARYGALLKPAAWTPPPPAARQLQAYIAREDAIKKDILREQNRREKSVIGRAPDDVLASIDETIGFLNAQLKAIRKKIDSHIDRHPDLKDDMTLLTSIPGVGPETGHHMLSVMHTHQFHSAEQLAAYLGLVPVERQSGTSLHAHPRLSKAGPKGMRAALYMPAISALTWNPHIRALKQRLAAKGKCPMAIVGAAMRKLVHLCFGVVKTRTKYSPEHAQAA

SEQ ID NO: 313463 - protein, 309 aa, unidentified
MDLFIGIDVSKDRLDVCVRPSGETFVVTRDDEGLERLVERLRALAPVLVALEATGGYETVVASALATAHLPLAVINPRQIRDFARSTGKLAKTDRLDAAAIAHFAEAIRPPARPIADAEAQALGELTARRRQVIEMIVAEKNRRRLAGQPRVLKAIDRHVDLLQAELSELDRDIDGAIRKSPAWQADADLLASVPGVGKATLRTLIAELPELGRLDRRKIAALVEVAPVNRDSGVARGRKTIAGGRAPVRTALYMAALVASRANPVIAPYYQKLRASGKPAKQALTACIRKLLVILNAIMRDRKPWLPA

SEQ ID NO: 313464 - protein, 357 aa, unidentified
MNSEKYIGLDVHQATICVAVMDPKGKVVMESILETKATTILEFLAGLRGTLSVTFEEGTWAAWLYDLLKPHVANLVVCNPRKNALLKHGNKSDKIDARKLADLLRLNDLEPVYHGETGVRMLRELARSYLTIVKDVSRVMSRLKAIYRSWAIPCAGRDVYYTRHRGEWLGKIPEAGSRRRAEQLYQQLDMLQPLRQQARRELLAESRKHTITAKLRQIPSLGPIRSALAVALIQTPHRFRTKRQLWTYSGLGLETRDSGEYHYVQGQVRRRKKQVFIRGLNKDHNHDLKGLFKAAATRASVQPGPFQDFYQRSLAKGIQPTMARLTLARKIAAITLTLWKKGARPTSSRWLYDSETG

SEQ ID NO: 313465 - protein, 420 aa, unidentified
MHSGPDVKPTVFVAIDIAKAANDVVVEFPNGKRKCFRVANCSDDFHKFRHYLTRLSERVVIGFEATGNYHRPLAFFLSQQGFELFLISSIAAARTREALYNSWDKNDPKDAQVILHLLKTGVTQHYHDPVVNDVNDLQELSKTHFQISLRKVRVQHSIMTHYLPLYFPEMEKYFHTSRALWFSRLLQRFPCPSSITKLTLEEFHEQAWDIVGRKVNKRGFLNDLYATAQSSIGVPVAEDSESMRMFRIVLSEHQHLCEARAAIELEADKSLSGNLDYQRLRTIPGIGPVLALTILAEAGNLRRFAHYRQFLKFCGLDLSTQQSGQSRGQSKLSKRGNSRLRYAFWMAANGAIRMGENSFRYKYERYIKTDPKNPDRKRKAYTAVAAKIARVAHGLIKSENDYRPYFEEAIPSGKIPSLGP

SEQ ID NO: 313466 - protein, 391 aa, unidentified
MGAGGETAKLVASINRAIDRSSLMQKHHDDSKACLTAFVQDNTAIAVIEMSLASWVVAGLIPGVNREPLKKIAADPEELLRLLYRWRDQAIKAGKDITRIAVAYETGRDSFWLARWLRDRGIDAHVIHATSVAISREHRRAKTDRIDTAMLRRGFLGWLRGERGHCSMAVVPTIAEEDAKRPHRERESLLKERTSTINRMKAILAQFGVRNFKPSLRKAAEKIDAVRTPEGVPLPPNTAAALRRQIERFRLINEQIKTVEKTRMQRLRQNPAGKYNTMVFLLVRIIGLGVETAEQLVHEMLSRNLRDRKAVARYAGVTGSPDESGASRREKGLSRSGNGRVRKILIQLSWRMLQFQPDSRLVRWFKNRTANSQRSRKPMIVALARKLIIAL

SEQ ID NO: 313467 - protein, 317 aa, unidentified
MEQGKTSTKCAGIDVGKRWLDAAVHGLEASIRVANDAPGLAELIAWLRAHEVARVGLEASGGYERSALETLAGAGFELVLHQPLEVRLFARLKRLKAKNDRIDAALIAAATAQVDAVKAAVDPRLQDLAERLTAYEQISDQLAQLRGFMEHVSLKDLTATLRRQIAALAKLKQQIALEVLRRLKAHQDLLARYKLLLSLPGFGPIVAASLVVRMPELGQMRRGQAAALLGVAPFDRDSGQRKGLRFIAGGRARPRRLVYMAALSASRCDPTFRSVAQRLLARGKPAKLVLVAVMRHLIEAANLVLARAQPWISHAQP

SEQ ID NO: 313468 - protein, 395 aa, unidentified
MANAIRVAVDVGSQFHQVAIGDESGRLLDEFLIDHRRDGFEHFFSRISLHQATDVRVAMEGYNGWARPLDQQVLTRGWRLFNVNNLKLARYKEIFPAPAKTDAIDARRILELFSFDGHRSLARNALQEIVVAAPAQRELKYLTRRRRYLVAERATRLTRLRCDLQSICPDLLALTGAADNRWFLRFLTCRDRLTALPGLHTKTVAGIRGIGVKKLPPILAWQKTAAFGANIDLADEDIVADARAILALDDIIKSLNSRIESAAADCPMTQRLRSIPGFGSTGTAELAGEIGTLRRFGGEASLAVYLGMAPLDCSSGLSRRGAPPKCVNSRCQMAMMTCVARHMQCVPESRAYYDRKRAQGKRHNQAIRALGRHLTRVIWKMLAGDRDYVCKTEKT

SEQ ID NO: 313469 - protein, 380 aa, unidentified
MKTNSDTTAKLYIGLDVHKEQTSVALAEPGAKGEIRSHGNCATSQIALERIIRRITKARGCALPEIHVCYEAGGCGMWIARMLLRLKVQCTVVAPSLIPSKAGDHVKTDKKDAIKLVRLLRAGELTAVHIPDETDEAIRDLCRARVDTLDDLRRCKVRLLAMLRRMGFNYSGKTHWTEAHKRYLRDLRLPLLAHRIIMEENIGQIDQLEARIERIENHMEMLCEEWSRKPVVHALMSLRGFARIASMMMVSEIGDFVRFTHPKQLMSYLGLTPGEYSSGGKQKQGAITKCGNSHLRWLMVECATHYRSEPRIGSALSIRQQGQPAWLKEISWKAQNRLYARFTKLRQRLMHHNKIKVSVARELTGVIWEIGVKMQSSFKP

SEQ ID NO: 313470 - protein, 340 aa, unidentified
MNVTTIGIDIAKSVFQVHGVDAVGQVTVTKKLRRAEVMRFFEAIPACLVGMEACATAHFWARELSALGHQVRLMPPSYVKAYLRRQKNDAADAEAICEAVTRPTMRFVPIKSAERQGVLVLHRTRELLVRQRTMLINAIRGHCAEFGIIAPQGARRACELVEHVRQAPATEPPELARSALLRLAEQLSTLATEIHGLERRLLAWHRQDQASQRLATIPGIGIITATALSAAVTDPGLFRSGREFAAFLGLVPRQNSSGGKDRLGRISKMGDGYLRKLLVVGATSVIRRARTSTSASASWINALLERRPARVVTVAMANKNARIAWAVLKRGEVYRPPVMA

SEQ ID NO: 313471 - protein, 343 aa, unidentified
MKLSRIGVDLAKNVYQLHGVDRHSKTVWKRRLRRGQWLQALLDKTEPSCEIGMEACAGAHHWARELQCRGYTVRLIAPQFVKPYVKSNKNDANDAEAICEAMSRPNMRFVTVKSVEQQDIQATHRVRSEIKDQRNAKANQIRGLVAEYGLVAPTTLLALRRAIPCWLEDADNGLTDYFRSLLHGLWGDLVALDDRMAELDKQIKTLADSNEVTQRLQQLRGVGPLVATALVATVGTGEQFKKGKQMAAALGLTPRQSSSGDKQRLLGISKRGDVYLRTMLIHGARAVVSQAKHRDDRLSQWVTSIAKRKHPNVAAVALANKTARMAWAMLRNDSNYDPDFAIS

SEQ ID NO: 313472 - protein, 362 aa, unidentified
MQQFIGCDVHKKYSVFVSMDETGKAGRAVRVAHGNGELERYLKSLPAGAPVAVETTGHWYWLLDAIEAAGLEPHLAHALAAKRMMGGANKTDKLDAKGLATLLLNGTLPEVWVPSGGVRDLRGLLRSRLALRRMGTGLKNRISAALARYGLAQQFRGDLFGKGEPARACLTRSIAALPPQSRFATEQEWKLLDAVEERVEALLEQIGGSVGKLGWVRRLQTLPGVGEILGPTIYLEIGEVGRFPTPAHLAAYAGLVPRVHSSGGHTRLGRTRRECNRFLKWAFVEAAEAVVCHQESLSARHVVRLFRRIKNNTPERPNKAVVAVARHLAESAWHILRRNQDYREPQPTPGMIQRFHTVGRPL

SEQ ID NO: 313473 - protein, 310 aa, unidentified
MDAIYVGIDVSKDRLDVHVRPSGEAFAVPRDGKGLDALVERLRALTPTLIVVEATGGFETIVAAAIGGAGLPLVVANPAQIRHFAQALGKRAKTDPIDAAVIALFGEAVKPELRRLPDEAQRVLAELVSRRRQIIEMIVAERQREKRVANAGIRKGISRHIRVLEKELPEIDGDIGTLVRGSPAWREKEDLLKSFPGIGDVLARTLLAELPELGTLTRREIASLAGLAPFTRQSGRWKGKSMIAGGRGTARWALYMAALVASRHNPLLKAFYRRLLAAGKPKALALIAVARKLLTTLNAMLRDNKKWQHA

SEQ ID NO: 313474 - protein, 426 aa, unidentified
MKTLINDVRPPHIENTLYVGIDLALKTNHVVIVDSMGNQLSSFPANNDLAGAKSLREQILLLVEQYKVTTVEIGMEATGLLWHHLHQFLLEEPILNKVCTVKVYTVNPVIIKGFKKSFKKLDKTDPIDAYIIAQRVRFGELEPTPLIDSVYEPLKRLTRFRYHLVSQLIHEKQYFLAHLFLKYSSWQKEKPFSDACGVTASEIITELDMDQLASMTIEELVSHIITVSKNTVADPKKAAELLKKIAASSYTVKTAMKEPLDVILTNTLENVRYFSGKVSAVDTVIEKEFNRCPNTLKSIPGIGPVFAAGITAEMGSATRFQSEKHVASLAGLTWRKNQSGESSAEETPGNHGNPYLRYYLVEGANSVRTHDEDFRKYYQKKYNEVRLHQHKRALVLTARKLVRLCFTLLRENRLYVPESVYLTRRK

SEQ ID NO: 313475 - protein, 369 aa, unidentified
MENRSMFVGLDVHKETIDVSIAEGHRNGEVRHYGVIASDLEPLDKVVRALRAPNRRLQFVYEAGPCGFGIYRHLTKRGEACVVVSPSMVPKRSGDRVKTDRRDSVTLARLHRAGELRAIYVPDDADEAMRDLVRAREDAVVVGTQAKYRLKAFLLRQGRRYPGREGWTLPYRRWLTDLSFPTAPQHITLQEYRDTIDETERRIERVTEQLRQLAPTWRWAPLVAALQALRGVSFITAVALVAELGDLTRFGRPRELMAYLGLVPSEYSSGPSVRRGGITKAGNPHVRRLLAEAAWAYQGVPRIGRQHAYRQEALPKVVCDIAWKAQLRLTARFRRLVARGKAKPKVATAIARELTGFIWAIAQKVSPAS

SEQ ID NO: 313476 - protein, 359 aa, unidentified
MAVIEGRERHIVGGVDTHKDLHVAAVVDEQDRILGTRSFPTTRQGYRQMLAWMLSFGELQRIGIESTGSYGAGLLRFMQQAKVTVLEVTTPDKQDRRRRGKNDDLDAQNAAHAAFAGQRTVTPRSRDGMIESLRVLKACRKTAVSARRIALQMIHNTIVCAPDGLRDQLRSLTRMQLVRTLASWRPDLTAYRDLDSAYRIGLKSLARRYLELHDEIADLDAMIAAIVDELAPNLVARNSIGHTGAAQLLLTAGDNPERLRSEASFASLCGVSPVPASSGRTVRHRLNRGGDRAANSALHIIAIGRLRTDQRTKDYVARRLAEGHSKLDAIRALKRYLAREVFTLITQRRKEINATRIAA

SEQ ID NO: 313477 - protein, 466 aa, unidentified
MEKAKESSKLRRGGVPMALTAIRPLVAGVDIGSRENWVCGPARSDGKPNVRVFGTTTAELKALVDWLAEEGTESVAMESTSVYWIPLLELLEARGIEAVLVNAHQLHNVPGRKTDFHDCQWIQLLHSCGLLRASFRPGPTVVAMRAIHRQLANLVEERTRCVQWMQKSLDQMNVQVHRAVTDLTGTTGMAIVRAIVAGERDPMKLSALRHHRCRKSVEDIARYLTGTWREEHLFNLASALQLFDTVEKLIATHESRLLEAMAALQPDERKEASPPPHPNPLKEKAIKGRGDQPVRTELWRFAGLDLMQIDGIGVGAAKIVLTEVGPDLSAFPSENHFVSWLRLCPRRPISGGKPLKKRRNSMGANRIAGALRMAACSLQRTKTALGAAYRRIARYKGADVAIFAIARKLAQLIYRMLRYGQDYLDLGEAAYDRQFEARRLAALQQTAKSMGFELTKESAQPQLSPG

SEQ ID NO: 313478 - protein, 331 aa, unidentified
MAKSITYIGLDVHKDTIAVALAEASLRGEVRERGKIPNSPAALKALAVKFASTRRDLRFCYEAGPCGYGIQRHLAGMGHDCAVVAPSLIPRKPGERIKTDRRDAINLAKLHRAGELTAVWVPDQAHEAIRDLVRARQAAVRTLRQARQQLSGFLLRHGYHYHRPAWTQLHRRWLASLKFEEPVHHIVLEDCIATVEAATARRDRLETHIEAALPEWSLASVVQALQALRGVGLVAAATLVAELGDITRFTNPRQIMAYLGLVPSEHSSGGTRRQGGITKAGNGAARRMLIEAAWSYRFPARISREQLLRQERLAKPIRDIACQIARRQRCC

SEQ ID NO: 313479 - protein, 405 aa, unidentified
MNRFAGLDWASRLHAVCIIDNTGAVREQFEAPHNAAGLCELLARLRRCAPLPVQLPIAIERPSGLLVDALLEAGYPVVPIHPNIVKATRPRYRSHGAKSDATDAYLLADLLRTDGARFRPLQPQSDAIRALRAMVRGRDDLVATRVQLANQLRSLLESFWPGAAAVFAEIDSPIALAFVQRYPTPASATRCGEKRLAVFLAQHRYCGRRTPAALLERLRAAPPGHAAELEVDAKRALVLALAATLTALVEQITHITARIEHTVAESPDGQLIMSLPRAGQVCAAQILAELGDVRDRFPTDVQLAAEAGVAPLTYQSGKSRSVTFRWACNHRLRRAITCFADNSRHASQWAATVYASARARGCDHPHAIRILARAWTRVLWRLWTDRRTYDPARHRAALRFNAPGG

SEQ ID NO: 313480 - protein, 339 aa, unidentified
MFYVGLDVSVARTSVCIMDALGQIVREQSVASTPEAIAGAIRAAGTNVERVGLEAGINSGWIARGLLDAKLPVIVIDATHAAAALKTGFRNKTDKNDARGIADLMRVNKFRAVWVKSPGAQRDRAMLTVREQLRRQSLDTRNTIWSILQVEGLKPPKLTNPAFDALVARSLEDKQLAPLLRPLVAVVEHVDRQVAELDKLIAARAKASAVCKLLMKVPGVGPLVAMTYTAGVDDPARFGNSRSVGAHFGLTPRRFQSGEMDWSGGISRAGDASVRRALYQAANVLIHHSGGWCALKSWAVRLAKRRGLGKAKVALARKLAVVLHRIWLTGEDYRLTAAV

SEQ ID NO: 313481 - protein, 367 aa, unidentified
MTVYIGMDVHCKKTVYVVQENSGQVIAQGSVPTSVQGFRSVLDRLGTPGTRKVGLESGPQAKWVSGVLSELGMRPVVIDAREVRAKARRINQKSDSRDAFEICDGIRRGIYTSIVYVPEPVIERLRQLLSRRRHFVRLCTSQVNAAKYLLRAVGLSAEAASLKSDAAWQRLMKRPAVGSLRTYLAMHRDLWLVAQEKVSALEGESTGALKPFQQTAELLQTVPGVGLITSASYIAVLGTPGRFADSSRVVSYIGLAVSTYSSREKERYGHITKRGSGELRMLLCEAAHHAANSRHPLNPYFRRTAARHGYKKAVVAVAQRLARILFQMWRKGQAFDVRQLNVVAESALRARRVYWRVRQPNEERIKA

SEQ ID NO: 313482 - protein, 435 aa, unidentified
MEEVEDEPLFCDRVAGIDIGKATVMVTIRVPSEARAKGRQQETREFGTTRRELLALADWLRGWQVERAGMEATSDYWKPVLFTLEQEGFDCLLYQASQVKALPGRPKTDKLDSVWLARITEQGSLAGSFVPPEEIRRLRTHTRCRRKLVQMRTAQKERCEKLLEDAHLKLSSVISDIHGVSGRDMLRAIAAGERNPKVLAQMARGVMRSKIARLEQALDCSFFTGEHAFILTMMLDSIDSLTAQAGVLDARIADMCQPYQRQLEQLDEIPGFGTTTAQDLIAEIGTDMNVFPTAGHLASYARQAPRVKESAGKRKGKNATGRGNPYIGGALGEASISAGRTQTFIGEKYRRLTRRMPKRKAQVAIMRSQLVIAHALLSDPDARYQDLGPDYYERKADIRRRARNHARALERLGYKVTLEAIDPGTGELHLLATAG

SEQ ID NO: 313483 - protein, 350 aa, unidentified
MPKSMSKQYVGLDVSLAETSIAVIDENDKVVWRGKVASTPEAIAEALKKHAPRAERVGLEAGQLASWLYHGLKDKGWPVFCIDARHAKAALSLKVNKTDANDALGLAQIMRVGWYREVAVKGHDCQALRALLIARAQIVSQITSLKNCVRGILKVFGHVLPRKLRATFIASVRETIDGNATLEPILDPMLRTLAATMEQLQVYDRAAIRHAREDATARHLMTAPGVGTIVVLGYMTGVETPARFSRSTSVGAYFGMTPKRYQSGEVDKAGRVSKCGDGMVRGLLFEAAKVLLSRSAKPSDLQAWGRALAKRIGSKKATMAVARKLAVILHRMWTTGEPFRWTATPVPTAA

SEQ ID NO: 313484 - protein, 335 aa, unidentified
MKNYSHYVGIDISKNTLDVVLLNPDEKIVQKHFKIENSKEAISKFIVTLKKEHVQIDNILFCCENTGVYTYILSDCLSLKKIDLWVVPAIEIKRSKGISRGKNDKIDAKDIALYSYRNIDKLQLYKVSDANIQELKVLHSEREKIVKSIKLFGMTSENEIFIPKKIYKSTKRINAKIIKGLRKHLLDIEKQMKAIIIPNEELSNQFQLIKSIPGIGEQTALYIIITTKGFKTFKNWRQFACYSGVAPFEYSSGTSVKGRTKVSHLADKKMKSLLHMCALTAIKYDPQLKEYYNKKKAEGKNSMLVLNNIRCKIISRVFSVINRQTPYVNTYKFAC

SEQ ID NO: 313485 - protein, 315 aa, unidentified
MSANLAQTAGVDISKHALDVHLHPQAESARFSNDAKGFKAMIAWLRRREIERIVYEATGAYHRSFEQAMAQAGFILAKVNPARARRFAEAIGQLAKTDAVDASMLARMGALLKPRSTVAPSENLDAMQQLLAARRALVKDLVAAQNRLQIRSLALLRRQLKERLAQIERQIAAIDRALRERLKAAPAMKARFDILTSIPGVGATSAVTMLLEMPELGSLENKGAASLAGLAPIARDSGRWKGERRIRAGRAHLRRALYMPALVAARWNRDFKAKYDALVAAGKPKKLALTVLMRKLIVLANVLLKENRPWRPKPA

SEQ ID NO: 313486 - protein, 389 aa, unidentified
MAKVVIGVDPHKRLNAVVVINLKGKVLARRQFPNSAEGFRELRSFGRQWRPRTWAVEGCNGVGKYLAQRLVAAGERVVDVSTRRAALVRVFAGGNGRKNDDVDAHSVALVGLHTRDLPEVRKDDRSASLRLLANRRKELVDLRTQCVNRLHRDLVGLISGGAPQALTAVKAKALLASIRPRDEMGRLRRRLAADQLADLVALDKKLAAVEAEIRSMVKRTPTGLPDIYGIGPVITATVIGEVGDVARFQDRHHFASYNGTAPDDKGSAGRPVHCVNLKGNRRLNHAIHMAAITQIRNRRSPGRTYYERKLAETKTNKEALRCLKRRISDVVYRQLLADADRQTKAGPGGQTGTTLQSSVTSPTPTAGSSDKPQPGPATEATPTPLRAAG

SEQ ID NO: 313487 - protein, 453 aa, unidentified
MAARNARVSRKLGKSRAALTITHPNAAGIDIGSASHFVAVPPDRDNEPVREFRSFTVDLNAIADWLEACGVDTVAMESTGVYWIPLFELLESRGFTVLLVNARHVKNVSGRKSDVLDCQWLQQLMSYGLLSGAFRPAEQVCVLRALWRQRGMLLKSQARHVQHMQKALTQMNVQLANVISDVVGETGQKMLRAIVAGERDGQVLGAMKNARIHASVEEIAKSLQGNWRAEHLFALKQALDAFDFIGTQVAECDLEVEQQLQNLQAHTGEPAKGKKRGRARNAPKFDLRTQLFKMCGVDLTRIDGIDVTTALAVVSETGANLSRFPTVAHFASWMGLCPGTKITGGKVMSSKTKRCANRAAQALRLAAAALRTSQSALGAYFRRMCSRMDKPKAVTAAAHKLARLIYTMLTKGEDYTDQGQDYYEQRYRERVLRNLSQRAQKLGMQLVAAEQPT

SEQ ID NO: 313488 - protein, 359 aa, unidentified
MAIVAHLYRFIVGVDTHARNHVLSILECATGAEIVCQTFANTSQGHVRAQAWITKHTRADLREVLVSMEGTASYGTRFRVALEQAGYRVVEAPRLLVRGRKKLAKNDVIDAFQIAARTLGKDETELTIPKQGDYREALRILVAARKQLTRATTVNINSLTALTRCTDLGIDARRALSVKQVHQIAALEEQPGDAIDVLVAKQEAKRLAKTIIDARTQLAENQNQLAMIVQLVTPALLEMPGVGPVTAAQMIISYSHVGRIKSEAAFAALAGTSPIPASSGNKVRYRLNRGGDRALNNALHTVALVRLRNDDQTRAYMKKRLAEGKTKRETIRLIKRYLARKIYRLLTKELTRTQVTLAA

SEQ ID NO: 313489 - protein, 420 aa, unidentified
MKDWKEITHYAGFDWAKDHHMVVILDGQGQIVADFEFEHSLEGWKAFSEKTAPWPNLAVAIETNQGAAVDQLLQREYTVYPINPVASESYRKRKAPSGTKTDHLDGWSLADALRVEGLGWKALKPMDPMTQKLRLLCQDEVSLIEQRTLLVNKLQQTLLEYYPIALQAFDNWTASFTWDFVIEFPTPQVLVKAGKRRWEKFLHTHKLWRPETVERRLALFAQADQFKASDCILEAKSQLALSLCKLLRTLDQQLELYRQQIEKLFKDHPDHDLFGSLPGAKKMLAPRLLAAIGSDPDRYGSQQVLQCYAGTAPVNYQSGQIHKTKIRWACNKFMRHTIHLWANSFRNSSAWGQTYYQKKRKEGMSHACALRCLGQRLLKILFRMITDRKPYDAELHALNQKKHGSWVLALVEKPTPEPCE

SEQ ID NO: 313490 - protein, 335 aa, unidentified
MQIYGIDLSKEKFDVCYIDGRGIERMKEVKNHLKGISKFIEELPKGAYLCAEHTGCYGDLLVFICNQMHVPISLVPGYTIKHSLGLVRGKSDPIDSRKMKEFGVRFFDKLRLTEYHSEEIAELRELHALRSQFVKSRKLLLTSENGRKHLPFQSINVNKHTKNALDTLTQEIKDIEHEIISIILNSKELSKSFNLATSISGVGPVITIELIIKTGNFKVIDTAKKASSYAGVCPFPNSSGNMMGKSKTSHLADKRLKSLLYMGAKAAVKHNPEFRLYFQRKTLEGKHYFLIMNNISNKMVRTIYSVIKNNKPYDKNYSQRDPREKLIKSSEKNVA

SEQ ID NO: 313491 - protein, 343 aa, unidentified
MERYYYIGLDIHKKIIAYCVKAIDGSLIDQGKITADRQSLEIWVKGLPGPWMGAMEATIFTGWVYDFLKPHAIVLKVAHPAMLKAITAAKKKNDRADAEKIADLLRVNLLPECHMLSEEIRELRRILRYRNHIVRTAVKMQNKMSGLLMEVGVTYSKKRLHGKKYFRELLERVDEIPPSVKDLLQLSRSSYEMFRSFQKRLVETLRTNQLVRDRVHRLMTIPGVGEITALTWTLEIGDPGRFSSIRKAVSYCGLCSAQKESAGKEQRGPISKKRNKHLQTMLIEAAKLAPHWNEQLAIVHERELKKGNRNRATLAVARKLVAYMLAVDKKQADFKLPAETQAA

SEQ ID NO: 313492 - protein, 351 aa, unidentified
MLLIGVDYHPSFQQVAFSDQETGECDELRLNHSDGEAERFYRDLKSRGISVRVGMEATGYSRWFERLLAELGFELWIGDPAEIKAKRVKKQKYDREDARLLLRLMRENNFPQIWVPSAENRDLRQLLWHRHRLVQMRTRIMSQLQALAMNENKCWKKKLWSERGRAEFEKLPLGFWAGRRRQELLELLDRMNPKIEELTAAVEQEANKRPDALRLMTHPGVGPLTALAYVLIIGTPARFSRGKQIGAYVGIIPREDSSGGKQRLGHISKQGSSLLRFLLVEAAQAAARSHPEWRRRYIRLAMRRHKSIAKVAMGRRLAVQLYWMWRNGCEYSQSVKCGSYVGQLGSGHGVK

SEQ ID NO: 313493 - protein, 387 aa, unidentified
MCYYVGIDVAKFKHDFTVVTSDGEVIVESTTFKNDLKGFETIKDSLSNLDHSQEIKIGLESTGHYHKNLVKFLTEQGYKVSVLNPYLVHGFIKSRTLRKQKTDNLDCMWIAKYLQSEDFKAYQSKLYPCEELKSLTRNRNKIVRERSNQLVTVTNCLDCIFPEFKGFFDGKLSKSALALLFEYNTVESIKNLTASKIQKVRDKHKGIRIGKFFDIRDAAKITIGVPNDSVSFIMKQAIYQIFSLDEILKSYDEQINKIMDDQNSVLESIPGVGRSSVASIIGEYNNFQGFPDADKLLAYAGLECSRYQSGESDYHGHMVKRGSPFLRYTLMNLAISLKNHNAIFKEYYLKKRDEGKNYRVALNHVVRKFLRIAFKLVSTNQKFNIDK

SEQ ID NO: 313494 - protein, 410 aa, unidentified
MLSIVYPNCCGIDVHKTFVVATIAITDDHGITHYYQKRFSTFTKGLRALNEWLDYYSCFDVCMESTGKYWIPVFNLLESSRHVCLAHPKYLKAIKGKKTDKKDSKWIADLFKHDLLMSSFIPELPIRELRDLTRYHFKLTNIASSEKNRLQNSLTVSNIALSSVLSDTLGVSGRRIIDAILEKPIDEIDLPALIHSRLKNKLSDLELAIDGKITPEQAGKMRIIKGHYDSLMASKDQLTQLILTTATPYERERELIQTVPGCANPLTAVKILSEIGVDMTHFPTAGHLCSWAGLTPTNNESAGKKKSVRISRAGQYLKPLLVQLANAVVRSEKHAEHRQKYLQLKKRRGHKKAIIAIARRLLTAIYYMLLRGEPYNASLYKTEGLRPGREMTVEQAISFAKSHGFAITVS

SEQ ID NO: 313495 - protein, 352 aa, unidentified
MRVGVDLAKRVIQVHAVDAAGHVLASRALARDKFIAWCAQLPAGCIVAMETSSSAHHWARKLGALGLDARIIAAQPVSPYRKQGASGKNDANAAAAVCEAAGRPQMHFVPVKTIEQQSMLCVHRLREGFKAERTACINRIRGLLAEFGLVFAQSPAVLHAVLADVLEDASNEMNTLARLMLQRAQRQWRELDEHLAWCDERIAVHARDNPAVKKAATLMGIGPVGASASVATVGDFKQFRCAAQFGAWIGLVPRQHSSGGKNNLGGITKRGDTYLRSLLIQGAKSAVMTAHKRSDPISQWAAALRDRVGWQKAAVALANKNARILWAVMTKGEAFDARHVSRKPNLPTTKPL

SEQ ID NO: 313496 - protein, 322 aa, unidentified
MAQETIKFNQVIKCGCGLDVHQQVILATIRQSDTEEETREYDAYTSSLTSLREWCKSKGVTHIAMESTGIYWKPVFNILEEDFEIILVNARHVKNVPGHKTDKKDSRWISKLLLSGLLKGSFIPPQDIRELRDLVRYKRKLTNQAASEKNRLIKMLEDCNIKLSSVVSDVNDGVSATKIINDIIRGVTDIDKLMLHLHGRIKANREDIRKALEGRVTEHHRFMLKIIKESIEKTERIISKVEKQIDKAVKQYEVEVDLLQTVPGIGKDSAISIISEIGVNMDQFPNEQHLSSWTGMSPGSNESAGKKKVPEPPTEINISDQL

SEQ ID NO: 313497 - protein, 392 aa, unidentified
MEHRLYIGVDVSKESFTVCIKNPNGKTVFQGSFPQSLEGFQNFLNTVNNLSTDPVIVGMESTSIYYLNLFSFLLEKGINTVIINPSVIKNFSKLGVRDAKSDRKDAATIAEYLLYAKPELSDKEKLSDLKLLSREKEKLSKELSHLKDEILRCLFNLFPELERNFNVFSKGMLNFLLKFPSARKIRRSKRKTVEYEFNKAFEGRGKKPSFTADDIIELARRSIGIDSVALEEILVTKINMLLTIEEEIDKFDKLISERIEEIQIDKIDIITSIPGIGKSLATSFICEVPEAEMFKDGKSLVAFVGVDPVVKRSGQYVGKHGISKKGNRHLRRIIYLMAINVIRFEGRFREFYLRLRARGKSYMEAVIAVANKLLRTIYAMLIHRTYYSPNYS

SEQ ID NO: 313498 - protein, 414 aa, unidentified
MDTIYARVAGLDVHQKFTTVGVRCRLETGKLFAEVRTFGTMTRDLLALADYLEALGVTHVAMESTGILWKPVWNILEGRFTLLLVNPRRVKQVPGRKSDVSDAEWIAHLLQCGLLQGSFVPKRELRELRDLTRCRAQLVSEQTRVANRVHKVLEDANIKLGAVASDILGKSGRAMLWALNRGERDPDKLADLALGRLRAKIPELKLALEGHFREHHQFLVEHLLGHLDDLERRIEEISQRIAEHLPSILDDERLRRLDAIAGVNRTTIENVVAEIGVDMSQFPDEHHLSSWAGICPGNEESAGKRLRNRTTRKNRWLRRAITEAAWAAGRTKNSYLGALYRRLAPQRGKNRALIAIGHSLLVIFYHMLKYDVEYQDLGVDYFDKREPERLRNYLVKRLQLLGYQVCLTPQTDAA

SEQ ID NO: 313499 - protein, 315 aa, unidentified
MKSYIGIDISKNSFDVYCTQDQEHTSYENSSAGIKEFIKYCQKQEPQLIVLEATGGYESLLVSSLIAKDFIVSVVNPRRIRDFARASGQLAKTDKLDAKIIAKFAATLEPRPTTIIDKQRLAIKELVARREQLITMRTAEKNRMDRAFNKITYRSNESVINVLDKQIDKIDKAISDHIDKQPELKQKQEILESIPGVGSKTASMLVATMPELGILNREQIAMLVGLAPINRDSGQLRGKRTTGGGRKNVRHKLFMPSLTIVRYNPALKIFYERLVAKGKPKKVALTATMRKLICIMNVMLKNNSFWENRLLIKDA

SEQ ID NO: 313500 - protein, 309 aa, unidentified
MKEELVYVGVDIAKAYLDAAIGNEKRRFANDALGHRQLINWIKQMPASVQVICEPSGGYERALVRALVAAQLKISLVPANRVRQFARAAGILAKTDRIDAEVLCAFAEAMQPGTLSASELEQEQLRELESQRRHLTHLLVMEQNRAARMSDLWVCKLNRRLITQIKKQIEQLDLRIEGQIKASPELSTKAEKLTAISGVGARTAALLLAQMPELGQLNRRQVAALVGVAPFNRDSGRMRGKRAIYGGRRPVRHGLYMAALVAARHNPILRAFYLRLRAAGKPAKVALTATMRKLLIVLNSALKPELNYA

SEQ ID NO: 313501 - protein, 370 aa, unidentified
MLNTTTFVGLDVHARSIKAVALDAMTGEVRSATFGYDAAEVAGWVSSVDPSAKCVYESGVTGFDLQKRLSSMGIDCVVGAVSKMIKPPADRKRKNDRNDAEFLARMLSVGNVVEVWVPDDGCEAARDLSRALDDAREDLKRCKQRLSKFLLRHGYVFSETTPTGRRKGNWTAAHWAWIKSISFPEKADDDVLAYYVDAVRQAMEDKARLERLVEAEASKPRWKKRVDSVRCLKGIDVTSAADLVFEAGEFSRFKSARSFAAWIGLTPSEHSSGESVRQGGITKAGNKHLRRVLVESAWHYLGCSPHSKDLAKGQVPDPAARRHAAKGVRRLVERRRAMLERGVHKNKANVATARELACWCWAVGRMIENG

SEQ ID NO: 313502 - protein, 470 aa, unidentified
MLYLYKPPGCVSAFWKWMPAGKDKYMKYQKVLMMLNSIPYLSVGLDVGADFTWMSIMLPNGTLTGKPFKILHSDPHSRNLAVTKIKEAQEMYSLGSRCFLESTAIYHIPLLYFLRDKGVDCSVINPIITKNSTNMNIRKLHNDKFDSKKAAKVGLDASLKTSIVPDDDVVDLRNLVRDYYYFKDLQSAVILKLNAELKVSFPAYLKVFSKVTTQCSLKLLEAYPLAADMLAAPKEEIVKMIRSTARFGEKYALSKYDAICAAAEDAAVFGRALKSNAVRIRLYISIYKEYQKHLDDLLAALQESVDKLQGTAVYERVCLLQSLRGVGFLSAVVLIAEMGDFDLFSSPKKLYAYFGLDPAVKQSGKFNGDKVHMSKRGSSLARRILHMVALNNLKVDKGTKEPVNPVIHSYYTDKCRSKKKNVAVGAVMHKICNILFAMLRDNKPFEVITPQEHCERYAARHPDKTGMNAA

SEQ ID NO: 313503 - protein, 432 aa, unidentified
MKNKNCKYLSVGIDIGADFSLMAIALPSQELLGKPYRIFHNSKRSLNGAIDRIYSVMKQFDLPVRVFMESTGIYHFPVYHKMREAGLDTYVLNPLVTHASKDINVRNIHNDKFDAQKIALLGLRPDLKISIVPSDDVAAMKAILREYYAMKKETSMYVCRLKDQLRQVFPQFIPVFSKVNGVAAMAVLYEYLTPDSILAAGVDELATFMKSVVTKGPLHIRRKAEALVEAAQDAQNFGHGNTGVFYLIRHYIEMIRLLDAQTKQLLAQVKVLLKEQKNSQMAKQVRLLQSIPGIGFLSAVTLVCEIGDFSAFKRPKQLFAYFGLDPAVKQSGNFNGADLKMSKRGSPYARRCIYVLAIQSVSLRVDGTAKNPVLRSFYEEKCKSKSKMTALGAVMHKVCNIIFAVLRDERPFVLITPEEHRAAYFAVDLKAA

SEQ ID NO: 313504 - protein, 442 aa, unidentified
MSGRALSRGDRRRNERLARLRSIVRRDYAIVAVDLASAKQAAVVTDHDSIVLGRRMFTGDAWVIDDILDWAETIVATAGFAGVVLGCEPTGHRWKPLLDRARARECELVCVNPMLVHRGREEEDFTRDRSDFKDATIIAKRVAELRCYVPQALEGHWCRLRHLGARRNDVLVAAGSARQRLRDLLECAWPTVLSAAADQLDALTWRAAMAVSADPEVIAAMGIDAFAAAVREQLPRWGGTRRNMRVLRAVFAAALAPGGVASERAAACERAAYAVDDWHHALHQLADVEARMSDVLDALGLAELVTSIDGLSIVGAAAILAETGDPARYDCARTWAKHAGLCPRANESGNFHGTTTVSRRGRPALRTAAWRAIWGALRHNKVYADRYAHLTTRPDNPLRDGQARAAIAAALLRQLFVVVTRRIAWDPAIAAGIREGVAPRAA

SEQ ID NO: 313505 - protein, 368 aa, unidentified
MGRKSSKLYVGMDVHKESIDIAVAEEAGEARHHGRIGGELTALGRAVRKLESLGKELVFVYEAGPCGYGIYRMLKARGHQCWVVSPSNTPRRVRDRIKTDRRDSLKLAGLARAGELEPIYIPDQADEAMRDVVRTREDAVAMQRQARHRLAALLLRNDIRYAGKTAWGEAHRRWISRLTLSNAPQRIAFEEYVGAVEEATERVQRLTQAIEQELAHWRWQPVVAALQACRGIQLIHAVRIVAELGDLGRFGHPRELMAYLGLIPSESSSADRRRQGAITKAGNRSARRALVEAAWAYQHAAAVTPVIARRQTGLPKAAIQIAWKAQLRLCARFRRLAARGLNRNKIVVAIARELAGFVWAIAQQVKPN

SEQ ID NO: 313506 - protein, 337 aa, unidentified
MNEAITIGVDLAKSVFQLHGVDHNGKSVFRRQLRRSQMLEFFQKQPGSLIGLEACASAHYWARELGKFGHDVRLMQPSYVKGYVKRGKTDAADAEAICEAVSRPSMRFVPVKSEETQGQLVTHKTREFLVRQQTQIVNAIRAHLGEFGIVIPKGIQNVGRVIEACDSAKLPTAARKALNLLADKLIDTQKKIAELTTDIRADATSNEAAQRLQTIPGVGPIAASAFVATLPDIADFKSARDLSAWLGLTPKPHSTGGKERLGRISKMGNKYLRRLLYLGAMAQVSARRRGEPGDDWLWKIIQRTKPKQAAIALANRMARRIYALLKHGTEYQANYAR

SEQ ID NO: 313507 - protein, 359 aa, unidentified
MQRNKISFKGQKIYIGIDVHAKTWEVCVLTESGYRERHPQQASAKTLFDFLKKHFPDGEYHAVYESGFSGFATYYALKEYGIDCVVTHAADVPTTQYEEVMKTDKVDAAKLARSLRAGDIRPIYIRERENIDDRSVIRIRKTIQKQLSGYKSRVKHLLHCNGVEMPDRFASPGTHWSKAFIKWLKENVVLLSPSKLSLDLLVKQVETIRHTLLDATKAIRRLAQADSYRSNYEILMSIPGIGVSVAMCILTEIYDVKRFRNENQFASYLGLIPTCHNSGERTSSGEKTSRGNKHLGPMIIEAAWIAVYRDYGLGLAYTRYKQSMKPQEAIVKIARKMSNIIFSVLKNGRKYEPYRWDKE

SEQ ID NO: 313508 - protein, 344 aa, unidentified
MNDTKYIGLDVHQATITVAVRNSAGKLVMEAILETKAETILQFLRGVHGSLHVTFEEGTWAAWLHDLLKAHVTRVLVCDPRKNALLKVGNKNDRIDARKLSELLYLNRLSSVYHGEQGIRTLRELARSYLTITRDLTRVMSRLKAIYRGWAIPCAGQQVYAPHYRAEWLAKITEAGVRRRAELYYLQFDTLAALRQEVRRELLAESRKHQATRLLRQIPSIGPIRAALLIALIQTPNRFRTKRQLWAYGGLALRTYTSGEYRFVSGELKRSKKVLAVRGLNLNYNHDLKNIFKGAATRAAATAGPFRNPHLARLTLARKIAAITLLVWKKGERFDAEHLKQQAA

SEQ ID NO: 313509 - protein, 401 aa, unidentified
MHAVIGIDVSKATSQVAVAVDGKVVQNFKITHDVFGFNQLNTVIMQFNTFPDIVFEATGVYSRRLKTFLEAHNYPYTCLNPLTAKKQLDQLRPNKNDLNDAKHLAETQFILKRAKSYVQNPIYIELQDMSRFYQQLNHDIVSAKNRLHRLLQLTFPEIETLFSTTDSQQYWEIVSLIPHATMAKHSRQTLSDTIQSSVSRQIGVARLTRLVDKLVALGSLSAPAVAVASYNVTEVRYYAQRLIALSQSKANVLATMVDQAKDLPEYDIYQSIPGFSDKTVVSLIAELGDLHRFATSNKLNAFVGIDLRFNDSGDYKISGFITKRGNTIARKVLFKAISNIASTATYGHQNHINDWYQKKKQSSMSKGTKKIAIGAMSRLLRTMHYLVLNNQLYDYDTASKR

SEQ ID NO: 313510 - protein, 373 aa, unidentified
MESTSEQVYVGLDVHRKSVYATAFDAAGSRVSHERFGASDAELIAYLDRLPGRKHVVLEACTLWEHFFDAAKTTGASVVLSNPYKTRLIAEASLKTDKLDSEALATLLRLNSVPESYAPPPEVRALRNVVRERVFYRRKATSVKNHIYSFLLRRGIEYEDRILNLRRKREVLRDLQLDEVDRGLDTLTALETTCRQLDQKIHLAWASSEEAQLLSTIPGVGEIISVALAAFLCPIERFSSPDKVSSYVGLAPTTHQSGESENHGHLKRDSVTLVRWLLVEAAWVHRHRVPRGTVAKVARRVSRRRGKGKGSVAGAHALLKVIFAMLKNREPFRVDAPRPPTAETTLRHPRVTAGKRVQRTVLGPSTAKCLPAL

SEQ ID NO: 313511 - protein, 323 aa, unidentified
MSKDNIVCGGIDTSKCKLDVALDGRSEQLQVDNTPDGHRALSAWLRRHRVERIGIEASGGYEQAVVIQLRRDGFLVILFQPAQVRAYARFHLQRAKNDKLDAALIAACAAASKKIHAPADPRLAPFAQHLTFVEQITDQIARLKTCRESCRDPRIGRIWSDEIARLKRLERLELKQLAAAIRQHRDLAERLELIASVDGVGLRTAVAILVRLPEIGRVSREHVAALAGLAPFDDDSGDQIGARHIAGGRERLRASLYCAALPAAFRWNRQLIVIYRRLIAAGKSHKVALVACARKLLIYVNTVVERGTPWVKTPPIPSALATG

SEQ ID NO: 313512 - protein, 390 aa, unidentified
MALFVGIDVAKDKFDACGVTEGGERVFSLCAPMDRKGFEKLILYLKGNHSLLLGVESTACYHIALFSYLTARGYRVVIINPLLISNFVKLQLRKTKTDKKDALTIAQFLLLRKEALKNQTVSADLMELRDLARRQERLTDQVTKLKGNMKRILSVTFPELEHLTGVFAKSILQLLIRFPSADALRKADVETVAALVVPRSWGRKSRAWVDRLMATASSSIGISSPAKELVLTQDASLLLYVEEQIKETTKVLRSLCTQRMKEDVEILTSIKGIGQNTALNFLVEIGGEVSLYKNDKKLIAAAGLDPSTYQSGKYEGSSKIRKRGNRHLRRVIWLMAKGVVFSNTLFRTYFYKRKSEGLCDKMAILATAHKLIRVMFAMLVHQTCFEEGAR

SEQ ID NO: 313513 - protein, 354 aa, unidentified
MIIIGCDYHPGFQQIAFVDTETGELQERRLEHREGAEKFYRDLGAQGASVRVGMEASGHARWFERLLSELRFELWIGDAAEIRTKRVRKQKTDRQDAQLILRLMLEDRFPQIWVPNWENRDLRQLLWHRHRMVQARTRIMNQLQAVALNEGLRCKKRLWRDAGREQLESFRLAPWASRRRCDLLELLDRLTPTIAELTQAIEQEVEKCPAAQRLQTHPGVGALTALAFVLILGRADRFQCGKQIASYLGLVPLEDSSGQRRRLGHITKQGNSLLRFLLVEAAQVTVRSDPEWRSKYFHLAMRRGRKIAKVAMARRLAVRLYWMWRKGWDYGQLTKFSSHAGQLGHRDGVQSNTE

SEQ ID NO: 313514 - protein, 376 aa, unidentified
MEHDSTLYVGLDVHKDSITVAYALGAGEVELLGKIGTTQTDIDRLCKRLQSKARRICVVYEAGPCGYGLYRQLVEKGFDCMVCAPSLIPKKPGERVKTDRRDAIKLVRSLRAGDLSAVYVPTVEDEAFRDLSRAWVSAKDDLKRARQRLKAFLLSHGVRYTGRADWGPAHRRWLSAYAFDSAWQQLAFEEYRRTIEDRLAQCDRLETALHDAVINWRFYPAVLGLQTMRGVQFTTAVGMLAELGDLSRFAHPRQLMAWLGVTPSEHSSGNKRRQGSITKNGNSYARKLLVEAAWSYRHPARVSPEIQRRHEKIPKPIVDRAWDAQLRLCRRYRKLVARGKEKNIAVVAVARELSGFIWDISRLAMSLSIPREELTA

SEQ ID NO: 313515 - protein, 320 aa, unidentified
MLSFCGIDVSKDRLDVMVLPDEYSSSVPNDPAGWAILVEQLRGFSITAIGIEASGGYERGAVRSLQAAGMPVRQVNPFKLRQFAKASGVLAKNDPLDARMIASFVGIMPTRPAQRTTPAAEQLVEMLAVRRQLSAEKIAAENASRLLEDPMLQRLSRRRIARLAADIELLDKRLVEIVATDATLAHRYRLLTSMPGVGPVLACTLIALLPELGGMSRKQVAALVGVAPYAFESGTLKGRRCIWGGRANVRQVLYMAAMSASNWNPALKLFHDRLKGTGKLPKVVIVAVMRKMITTLNAMVRDDIAWADRLSGRHSVTTAR

SEQ ID NO: 313516 - protein, 431 aa, unidentified
MVDGDLTHESSGFHNRQTKGEKQPMGDQPTATDVDVFVGVDMAKEDHYAHAIGPDGNELYARTVRNDQADIEAAIDTASEAGKPVLVIDMTASSAHLLLATAAARRVPVAYVTGLQMRRAADLYAGSAKTDPRDAFILADYARRHVDRLTWLDIDDELLVRLRVLNGRDVDLAGDATRTINRCRDALVAISPALERVVGPKLTHGGVQDLMGRWATPTALRTAGKTRVRTLIAKRSPRLADKLTDQIWDALDAQTLTLPAEDTWGEVIADLAGDLTKISSRRDALKGDIEEAFLAHPLGKVLVTLCGFGPRTGARTLAEIGDPHRFATGGHLASYAALAPVNRQSGRTLDTATRQRRGNHRLKNALFLAAFVATQHDPDARAYYQRKRTEGKKHNAAVICVARRRCDLILAMLKNQEPYRQPQPQNLPQAA

SEQ ID NO: 313517 - protein, 353 aa, unidentified
MKIQERADFVIGVDTHKLSHTASVVALNGAELATKTVPADAFGYRRILAFAKERAPGERLWAIEGTGSFGGGLTTYLLEQGEPVAEIDRPARPARRNGAKSDELDATRAAREALSREFLAQPRRRGDREAIRVLLRTRQGAVNAKSRAICHLKALVVTAPEQLRNHLRALGTDELVQRCARLRTAVHHDPEHRATVVAIRCTARRVLMLEAEANDLESHIEVLVKNLAPELLQEPGVGALTAAQVLCSWSHAGRLRSEAAFATMAGVAPLPASSGQVTRYRLNRCGDRHLNCALHTIVLSRLAHHEETRRYAARRLTEGKSDREIRRCLKRFLARRLFRLLEKLSPRPPLNPI

SEQ ID NO: 313518 - protein, 372 aa, unidentified
MGKKSSTLYVGLDVHKDSIDIAVAEAGREGEVRHVGTIGGELGALDRALRRLQSAGARLHVVYEAGPCGFVIYRHLAARGIEVEVVSPSSIARRPGERIKTDRRDSLMLARQSRAGELTAVAVPEAADEAIRDLIRSREDAVRAQRNARHRLKALLLRNNIRYAGKTAWTGAHLRWLAELTFEDAARQFAFQEYVHAVTEATERIGRLEAAMREAVAGWRMAPVVEALQALRGIAFIAAATLVAEIGAIERFAHPRCLMAYLGLVPGESSSGERRRQGAITKAGNSHARRMLIECAWLYRYPARVAPILQKRVERVSPAVREIAWAAQVRLCSRFRRLAARRLPHNKIVVATARELTGFVWAIMMEMQAGAR

SEQ ID NO: 313519 - protein, 391 aa, unidentified
MSSLAVRTPEPTIATPTPARSIIYLGMDVHKDSITIAVLPAEAKAPTRLERLPNDLPKLKKWIARVARDGEIRACYEASGAGYVLHRALREWGYACEVIAPSLTPKRPGVQRKHDKRDATDLARYYRAGELVVVRIPSEAEERVRDVVRCRETFQREILKSRHYILKFLARRGFVYREGTNWCTPHLKWLQHLTTDGSPLAPDDRLVFREYHALLEYKLQRREELDRKIEQLALLPSLAPMVQTLQCFRGISLHSAMVLATEIGDWRRFEHPRQLACYLGLVPKEDSSGDRIRLGAITKAGNTHCRHVLVQASWSYRHRPQTSVDLKRRQAGQPPAVITHAMKAQHRLHARFNHLSYRKRSQIAVVAVARELVGFLWAVMQDVVVADQQSV

SEQ ID NO: 313520 - protein, 343 aa, unidentified
MGIVILGVDLGKNSCSVVGVDGTGAVVVRRTMRRQTLIDYLATLPACVVAMEACCGAHHLGRLFAAHGHEIRLMSPEYVRPYVKAQENDDRDAEAIAEPASRPTMRFIDLKSQEQLDIQTLHRARSRLVAERTNLINQLRAILLERGVIFPVGRRKLELGVEGFLAEGDDTLSPRMSRLIAELRAEWKELDTKIEALNGEFVEMARRDARMRRLTSIPGVGVLNATALVAAIGDGSGFAKARDLGAWLGLVPRQHTTGGKPRLLGISKRGNTYLRTLLIHGARAALPSLSQSDTPLGRWLRAMIDRGAHRNAVVVALANKLARIAWAALRKEVTFERGYAVAA

SEQ ID NO: 313521 - protein, 375 aa, unidentified
MKNKVRFLGLDVHAETIAVAIAEPDGEVRSLGTIANRAESIRKLVKKLGSAEQLKACYEAGPTGYVLYWQLAELGVACEVIAPTLVPMKAGDRVKTDRRDAERLARSYRSGDLTAVWVPDEGSESLRDLARAREAAKQDQLRARHRLSKFLLRMGQRPAVGMKAWTAPYMAWVRQVHFTQVAREATMLDYLHEVDHMSERVRRLEQAITEAVKLATPAVQEVVKGLQALRGIAEISAVTIMAELGSITRFDTPRQLMGYSGAVPSENSSGKRTQRGSITKTGNAHLRRIVVEAAWSYRLRPAIGPRLRKRQEGVSEPIKEIAWKAQVRLTKRYARLAAAGKDQRKIVTAVGRELLGFIWAIGIKAETASKLQMAA

SEQ ID NO: 313522 - protein, 420 aa, unidentified
MKSASNTLPEEPVNAVTGGIDWARDDHALAVVDARGREIHRCTVEHSITGLREMLAVLARTGAGEVAIERPDGPVIDTLLEAGITVVVISPNQVKNLRGRYGSAGNKDDRFDAYVLADTLRTDRARLRPLTPDSAATVSLRRACRARKDLVTHRVGLANQLRAHLRNVLPGAVGLFAEIDSPISLAFLSRFDTQDRADWLTPTRLGKWLASAGYSGRTDPTVLHTRLTAAPRGALGDEGTANAPITRALVGVLTSLLEQIKTLAAQIDTQLTAHADAHIFTSLPRSGRVRAARLLAEIGDCRARFPTPESLACLAGAAPSTRQSGKLRAVTFRWACDKQLRDAVTDFAGDTRHANPWAADLYQRARTRGHDHPHAVRILARAWLFVIWHCWQDNTSYDPTRHKALQRILTEQKKIENAAA

SEQ ID NO: 313523 - protein, 302 aa, unidentified
MAEYVGLDVSMKETAVSIRRDGKRIWRGKCGSDPKLVAEVIRRRAPDAARVVFETGPLSVWFFHALTAEGLPAICIDARHAKAALDMAPNKTDAHDADGLAQLAEVGFFREVRVKGFDSMLGRTLVAARNRLVQITTELSNQIRGLMKTFGLVVPAGKGSRFEAHVRALLADQAGLAPILLPLLDAWRAVRVRAAELGRQLVASARRSEACQILMSVPGVGAVTATSFATAVEDPENFRRSRSVGAWLGLTTRRYQSGEVDYDGHISRRGNTHLRGLLYEAATVILTRTSARVWPFRLSSTV

SEQ ID NO: 313524 - protein, 512 aa, unidentified
MPLVFRLKSHVNDCHAHAAKQADGRVRQGSTGPCTILLVEVTHVLGCLAGSAGGTQCSQHLERSRAPARSAVVHVQWGVAPRAPVQGRTRHHGESRVRKGGSVSESPYAFYVGVDWASETHQFTVLTPERRLEAERRIEHTGRALSEMADWLTALADGEPARIAVAIEVPRGPVVETLLERGFHVFAINPKQLDRFRDRHSPAGAKDDRRDGFVLADSLRTDRPAFRQVHVDDPLLIQLRELSRAEEELQTELRRLSNRLWEQLQRFYPQVLRLSPAVDEPWIWALLQLAPTPVAARALRRATLARLLARHRIRRVTAATVLAELHSPALRVAPGTTEAAREHIALLLPRLQLLHEQRGRCARRIEQLLDALEGPDAEHRDVTVLRSLPGVGRVIAATMLAEAARPLAERDYHAVRTQGGVAPITRQSGKSVLVSMRYACNHRLRNALYHWGRVSAQHDPSTRRHYRALRQRGHGHARAIRGVIDRLLVVLMAMLRTGTTYDPARRRVPAAA

SEQ ID NO: 313525 - protein, 340 aa, unidentified
MKKLYAGFDLHSSSSYLGIMNEDGRRLLGRKVANDPGGILEVLEPYRRGIAGVAVESTYNWYWLVDLLMEHGYRTHLANPSAMKQYKGCKHRDDRHDAFWLAEMLRLGILPEGYIYPKQTRGVRDLLRKRGHLVRLRTSLIISLQHMITRTRGTKLGVNDIKRVREDRVRPALDGDEDVLLAGSVSKETIDYFTRQIRKIETAVEGRIRLSSPYLRLPSLPGVGKILAMTIMLETGPVSRFPTVGDYVSYCRKVDSKWESNGKKKGKGNKKSGNRHLAWAFSEAAELARRYDPRARAFYQRKARARNFMVAHQALAHKLARAAYCMMRDDVPFQPEKLFR

SEQ ID NO: 313526 - protein, 427 aa, unidentified
MNNTQNEKIAQVTNETMVIGIDIGSTNHWARAFDNRGMEISKKAFGFHNTAEGFASFKVWYEGQRRAAGLTRIMVGLEPTGHYWFNLNQFLAGNGVKVVLVAPQHVKHSKELDDNTQRKDDLKDPRVIAKLVTEGRYFLPYRPSGVYTDLRDGFNRRCGIVESMTRAKNRLNRWFCINFPEYLSAYGSVTAKTGLMVLKKAPLPKDIVELGVEGIVKIWRDAKVRGEGIKRAMTLVALAEQSIGEKTANEAARLELWQLLEDYEHYAHQYEVIEEMLERKVHEVPHADKLLQIPGIGYFTVIGFFAEVGVIDRFDDPKQIQKLAGLSVVENSSGKRKGLPGISKRGRDRLRWVLFQAAMSAVKNNQEFKEIHLYFTTRKDNPLKKMQSLMAVAAKIIRVFYGMLKNGTEYDPERLLRDIRRLEKAAA

SEQ ID NO: 313527 - protein, 387 aa, unidentified
MSRLDDLSSCLVPFGQNNTLVVVIELSQESWLVAGTVPGVERQPLKKMEPNETALLRLLHRWRDEATRAGRTIERIVVAYESGRDGFWLARWLASQGIEVHVIHSSSVAVSREHKRAKTDRLDTAMLSRVFLGWLRGERGHCKMVVVPTLAEEDAKRPNRQLENLTGECTRIVNRLKAALARLGIRGFNPKLRKAAARLEALRNPEGEPIPQNLLEEMQRDLAHLAFLREQKREIEQLRLERLQQAPKTGTNVMVLMLASVIGIGIDTADLLVQELLSRNLRDRRAVGRSAGLTGSPDESGSKRREKGLSKCGNARVRRTMIQLAWRWQQFQPDSALAKWYKIRIEGAKRVVKLKLIVGLARKLLIALWRMVNTGEIPEGVVLRQPA

SEQ ID NO: 313528 - protein, 287 aa, unidentified
MENVSTVGLDLAKHVFQAHGADKEGAVVFRKKLRRSQVLPFFEALPPCTVAMEACSGSHYWGREIGKLGHLVKLIAPGYVKPFVKRQKNDVSDAEAISEAAQRPTMRFVAVKSEGAQAAAIVFRTRDLLVRQRTQTINALRGHLTEFGMIIAKGPQHVSKLIAIVEDPVSGLPEAARMILAFLVEQLRSLDERITKLDKEIARRAKEDEVVQRLMTIPGVGVLTATALTALAPSAATFKRGRDFAAWLGLTPLQRSTGGKERLGRTSRMGERTLRRLLIIGASAVAS

SEQ ID NO: 313529 - protein, 363 aa, unidentified
MNEITTVGVDLAKEVIAVCAADRSGKTVFTRVFRRDAFAAWAVQLPPCLFGLEACGAAHHWARWLASHGHTPRLMAAEFVQPFRKSRAAKNDRNDAEAVLTAVRQPNMRFVAVKSIEQQACLSWHRLRQGYSEERTALINRVRGLLGEFGVWRGRSAAVLTRALPALEHDEALPLMVRRLVGEARQHLARLDEAIAGCEVEIKNHVKGNVAAHRITAITGVGPLTAAAMLATVADVRDFKNGRQFAAWQGLVPRQDSSGGKARLGRITKRGDSYLRGLLTQGARSALQAALIKEPLRRTRLQGWIVQLHARVGYHKTLVAIANKHARMIWAILAKGEAYDPDAWRRWSRTAPTSAPAMTGVTP

SEQ ID NO: 313530 - protein, 385 aa, unidentified
MKPNSQMTLDKYFRQCVGIDISKDKFTACLYMYDMASDAGCCTESIDFPNNRTGFNQMVKWSRKGSQKGFPLVYLMEPTGSYYEPLAYHLHKIGQTLYVVLPNKARKFCEYEGIKTKTDAMDARCLALMGCKNRKLRPWEPPLPIYRELRQLTRLRADLVKMQTQMLNHMESIDHMEDVAPEVRKSYEKLLDTIEKQLEKNEKDIAAKLAQDKELETKVKRIATAKGIRVGTVTCIVAETQGFHLISNRKQLTSFAGLDVKARQSGKDDPRHHITKKGNAHIRAALYMPALSAAHCNRQMAQAYGRICAKHPDVKMIGVTAIMRKMLLLVYSLWKSGEEYDETRDNTHTPRKKEPQPTNSPEDCLKPNADPPDWNAADKEGNPPF

SEQ ID NO: 313531 - protein, 323 aa, unidentified
MNTIDYSETNIGIDTSLSALDVYVRPGGQFQSFQNTPDGVRSAIRFIQPFKPARVSIEATGRLEMGFFCAADKAGFPVCVCNPVQVRQFAKATGRMAKTDKLDAKDIAHFGETLKPGLTRLKPENIHHISNLLAIRGQCLEMSTMQKNRLQRMHRSVHTPIRNALKSIQKEVGAIDRQLTKLIAEIPQWQARVDQLTSAKGVGKVLAHTLISKLPELGHLNRKQIAALVGIAPMNRDSGSFEGKRYIRGGRHKVQRVLFVSMMSAIQCHPKLKPMYQRLVTAGKPKKQTIVACMRKQLIILNTMIKNGTMWYENMTRILDFEP

SEQ ID NO: 313532 - protein, 408 aa, unidentified
MKALHRRCAGLDVHQQEIVACRRIVAGRKVQTEVGRFPTTTRGLLELADWLEDGKVTHVAMEATGVYWKPVWHVLHGRFTLILANAAHIRNVPGRKSDVNDATWIAELLAHGLIRASFVPPQPIQELRDLTRTRKELTREIVRHTQRIHAVLEEANIKLASVITDIVGFSGRRMLKAIVAGETDARRLAELGSSRLAAPREALVAALDGRIRDHHRFLIDQHLKTIEQIETTIGEFDARIEAALAPFRDAVERLKGVPGISRTAAQIVIAEIGVDMSQFPSADHLISWAGLCPRLDESAGKRRSTRVRKGATWLKPVLVQSALAAGRKKNSSFKTRYHALKGRVGPKKAAVAVAANLLRVVYHMLKDGTCYQDLGEGYRRPHNPARAAANLANRIRALGYQVDISRAA

SEQ ID NO: 313533 - protein, 334 aa, unidentified
MHYYGIDVHKKFCAFTCMDDAGRVLRRGKVANTAETLAQMVAPSGGDAMAVLETTGNWSYIYDTLEPWVAKVLLAHALRVKAIASAKVKTDRIDADTLAHLLRADLIPQAYVPPPEVRELRDWLRSRAAVVRMSTQLKNRAHALLARNGLTSPYADLFCQGGREWLQQVELRPMHRRIIDRYLAILDALQADTRAVTAEITRQAKADPRAKLLMSIPGIGPLTALLFLAEVGDLRRFSTAAQLVSFAGLAPRVRSSAGRVHMGPITKQGSAWLRWTFNEAAVRIGRTDGRLGEFYRNVQARHGKQTAATALARKLLTIAYFVLKAERPFDERMG

SEQ ID NO: 313534 - protein, 392 aa, unidentified
MSQQHCHFDASRSLTALEQDSTIIAVIEMSQSKWLVAALVPGVKRHPLKKLDAQEEGLLKLLHRWRNEAGQAGREIKRIVVAYEAGRDGFWLARWLRGRDIEAYVIHPTSIAVSREHRRAKTDRLDTELLMRAFLGWLRGEKRHCSMVAIPTIEEEDARRPNRERQNLVTEQTRIVNQTKAIFARFGIRTFRPTLRKAEEKLKGLRTAEGTSLPENTRAELCRHLARLRVVCEQIRAVERERLRKLAAAPAAEKGSHAMVFLIARVLGIGIETADMLVSEVLSRRWRDRKAIARYAGLTGSPDESGKRRRERGLARAGSARIRCGMIQFAWRFLRFQKDSALAQWFAARTADRRASTRKTMIVALARKLLIALWHLATRGEVPQGVILRPAS

SEQ ID NO: 313535 - protein, 366 aa, unidentified
MDAIYIGVDFHARQQTICYLKTETGELVISELKHQDKEQVRTFYQQFPSPVIVGLEASGYSPWFEALLEQLGYEVWLGHATEIRRRARWRQKNDRRDAELIWDLMVHDEFPRLHRPTVASREVLRMLRYRQKLIKLRTMAKNSLQAIALQAGLAKGKQLFTRAGQAEFKSAVMSPVLQWQREHWLQLLQPLNAQLLETMVWFKAHSKDDAGIQRLRTHPGIGLLTALCLQHTLQPVTRFRNTRKVVAYAGFDPVERSSAERQHFLGISKAGSRMLRYLLVEAVHTAIRYDEDLKRFYKRLAERRGRPKAKVAAARKLLIRAYIMMRDEIDYAEFRRRAVAARLARTGQGPNNVPVVLIGQPASSGA

SEQ ID NO: 313536 - protein, 350 aa, unidentified
MVEYHVGVDLHLNVAQIAVVDGSGELVHEARVEIPDLPAGEAMLDGLAPFLKEGRLAVEALGCNRWFVDRCQARGWDVLVANAAKLQLKREGRKTDRRDAREIARRLYLGDLHRNARTYYPTQTEFAHRKLLRTRHNQVEKRTQTELEIYAILRAFKLVPPKKLLRSRASIAWLRSVELPHPDLRVTLDVLIEDLVSVKKRIYVLDKAVTAAAKSVAEARLLEETLPSVASQTSLTLICELGDVKRFNDSRAIASFAGLVPRVTASADTSHHGKMTKHGNPELRWILGQLAVRLLSRDPVVKAWGARMRRRVHKNKVRVALARRLLVGIWVMLSRGEVFSMERCLGARAA

SEQ ID NO: 313537 - protein, 447 aa, unidentified
MLQEGMKAATWRELETNGKFTKNDKLTFISDDMLIIGCDIGSEMHYVRAIDSRGRELSQDAFPFSNSSEGFQSAKAWALELAAANDKHQIVLGLEPTGHYWFCLAAWMVSNDISVVQVNPYAVKQTKELEDNSQRKDDRKDPKLIANLVKDGNYGMPYLPEGLYADLRRLSMLRDQLTEDRIRNINRLHREMKIYFPEYRDAFGKLDGAFTLEALKAAPFPEDIVRLGVDGLKDIWHRAKLRGRGYSKADQIVQYAKESIGLEHGRAGGRKAVKIFAEQIESLSEALEEIEAELHQKCREIPYAENILEIRGIGENILAGILAEMGDITRFDDASEIQKLSGLGLVACSSGKHKGETKISHRGRKRLRYWLFQAAKSAVSHGEEFKELHAHYTTRKDNPLKKMQSLIVIACKLLRIIFTLLRTGCRYDPMKMLRDIKRPERAAAQAA

SEQ ID NO: 313538 - protein, 317 aa, unidentified
MAQNRTIVGIDVAKDKVDVALRSGAEATFANTPSGRRQLVKWVKQHQVSKAVLEASGGYERSWARLLQDAGLEVWIVDPKRVRRFAQSAGQLAKTDRIDARMIAWFGETFADGIGRQPDRAREELDRLVSARTDLMDLRARFAHLGEDDQPDEVRRCYRKIEKNMREQVSVLEAAIEARVEANAQFAERARLICSVPNMGKISSAGLIAFLPELGLVSNKQASALVGVVPYEDSSGKHQGRRFIQGGRRKLRNLLYLPIVGAATRGNPVLKAYYKRLRERGKEPKVALIACMRKLIVILNTMVARGQTWDPQKHAIA

SEQ ID NO: 313539 - protein, 313 aa, unidentified
MSTEHFIGIDVSKDHLDIAIRPTKDQFRLLNTDEGVDALIQHLRPLKPTLIVMEATGRYHRLVLSRLLAGGLPAIAINPRQARDFARAIGRLAKTDAIDADVLAEFAEKIRPELRSIADEATQELEAICTRRRQLVSMLSAEKNRLHTAAKKIGSEIQKHIHWLEKQISQLESDLDKRIRSSPAWREKDDLLRSCKGIGPITTHTLLSCLPELGTLSGRRIAALVGVAPFNDDTGRHKGPRHVRGGRLDVRAVLYMATLAAIRHNQTIHDFHSRLIAAGKAKKVAITACMRKLLTILNAMLRDKKPWQPDFVA

SEQ ID NO: 313540 - protein, 409 aa, unidentified
MEVLHPRAAGIDISKRDAKVAVRIPGQRAGSFPVTVTTWAATTGAILELVVMLQRAEVTTVVMEATSDYWKPFFFLMQDADLPVVLVNAAQVKKLPGRKTDVSDAQWLAELGAHGLVRASFVPPEPIRELRDLTRARAVAVRDRAKQVQRLEKFLESSGIKLSSVATDLTGVSARAMLEALIAGERDPQVLAEMAKGALRKKTPELVEALIGRFTDHHAFMVRQHLNQIDTITAMIDALTARIEEAMAPFRLAREVLTTIPGVSTRIAEVIIAETGGDMTAFPTAAQLASWAGVCPGSNESAGRVKSSHTRDGNPYLKAALGQAAMAVIRTKNTALGDRYRRLAYRRGPLRALVAIEHDILTAVWHMLTHGEAYMPTAPRPRNPNRTRDRALHDLKQLGYQVILQPEAA

SEQ ID NO: 313541 - protein, 346 aa, unidentified
MQITRVGVDIAKNVFHVHATDRHGKKIWQAKLSRNKWVAALIERVPQGCQVGMEACGSAHHWARELQKYGFDARLIAAQFVKPYVKSNKNDKVDAAAIAEAMSRPDMRFVTPKTCAQQDMQSLHRIRSERVRQRTAKANQIRGLVNEYGIVAPLGISSLRSAIPVWLEDADNGLSFQFRELLDQLREELANLDELIERCDVRVKRLVEQDPVVSRLTALRGVGPLTASALAIALGDGSAFKNGREFAASLGLVPRQYSTGGRDSLFGISKRGDAYLRTLLVHGARAVQRFTANKEDELSHWVNELSKRKHRNIVSCALANKTARAAWALVHHQQDYNPSLIAARAN

SEQ ID NO: 313542 - protein, 415 aa, unidentified
MDVVEERCAGIDLSKTDAKVCIRLPGSGKRARREVRTFSTMSDGLLELRDWLVDNQITRVGMEATASYWKPLFYLLEATEGVEPWLLNAQHIKTVPGRKTDVKDCEWICRLVEYGLVRPSFVPPRDIRQLRDLTRYRTETTRDRVRDVNRLAMFLEDAGIKLSSVVSDITGRSARAMLDALVAGERDPQVLAELALGSLQGKVPLLTRALTGAFSEHHAFMVASMLRAIDEADARIARLSEEINRQLLPLRAQTELLITIPGISLTLAQILIAEVGVDMGRFATAGHLASWAGMCPGNKESAGKRLSGRTRHGDTWLKTALFLAGATAARSKGTYLGAQYRRLVPHRGSKRATVAVGHSILVAAWHILRDMVPYQDLGPDHFTNRLGKERHTRRLIAQLAALGLDVTVTPREEAG

SEQ ID NO: 313543 - protein, 342 aa, unidentified
MQVSTIGLDIAKNVFQVHGIDAAEKVVVRKQLRRSQVLEFFKALPPCLVGMEACATAHYWTRELTKLGHQVRLMPAKDVKAYVKRNKNDAADAEAICEAVRRPTMRFVQVKSAEQQGHLMLHRTRDLLMRQRTQLINALRAHMAELGIVAAQGYAGLKELLKIIAGERDARLPVDAHASLVVLAAGLHAVQTMIGSIDRRIIVEHRSNEASKRLRSIPGIGIVGATAIAATVTDPKVFRSGRDFAAWIGLVPREDSTGGKHKLGPISKQGDRYLRRILVVGAHAVLKLARQKPEKYPWLTQLLARRPFKVVAVALANKMARVAWALLAKGGVYRAPALAVAD

SEQ ID NO: 313544 - protein, 356 aa, unidentified
MPMLADIVDAVIGVDTHRDTHHVEITLPTGAPIATCTITNDTRGYAALLTFIAEHAPGPAGQARLAVSIEGTRSYGVGVARAVTAAGLAVIEAEQPTRKARRGRGKSDPIDAHLAATYALRLDVDRLPTPRADGDREALRILLVARGDLTLTSTAQTNRLRALLRDGDDTDRRLARGALTVTILAALARRPHPRDASHAQAVRHSEIRRLAVALREAGRALAANRTQLQTIVDELAPGLTDRRGVGPVVAAQVIVSFSHPGRVRSDAAFAALAGASPLEASSGQTVRHRLNRGGDRALNRALHTVALTRLASCPRTRAYAARRRAEGKTPREIRRCLKRYIARELYRTLTATMINN

SEQ ID NO: 313545 - protein, 416 aa, unidentified
MNAVGIDVSSRKSTVAVLRPLGEVVCLPFDVTHDIAGLASLVEKLKALDGETRVVMEHTGRYYEAVEKALHEAGLFVCAVNPLLIKEYGANSLRRVKTDKADAIKIARYALDNWADLRDFTPMDAIRYDLKTLNRQFQLASKQRTASANNLIALLEQSFPGIRKCFDSPVRSDGTQKWVDFAHSFWHVDCVRKQPFAAFCERYRKWCKRHAYFFKLRNAEKVYALAKSAVVLTPKSKVMKVLVQEAANQLSSISRSVEVYRAEMDRLAAMLPEYPVVMAMYGVGKSYGPQLMAEIGDVRRFERKQALVAFAGIDPMPNQSGDKNVRSNKSSKRGSPYLRKTLFNVIRTYLQCAPQDEPVFQFLNRKRAEGKPFYVYMLAAANNFLRRYYAKLRDYFASLDTLQPVAPIPTILKATL

SEQ ID NO: 313546 - protein, 343 aa, unidentified
MEQISTIGLDIAKSVFQVHGVDAAGEIGICRQLRRRQVLTFFSKLPPCLVGMEACATAHHWAREIAKFGHEVRLMPARYVKAYVKRNKNDAADAEAICEAVTRPNMRFVETKTVEQQSVLMLHRTRALFVRQRTALINAIRAHLAEFGIVAGIGRNGVEALLEFIARGDDARIPSEARDCLMTLVEQLGLVKRQILDADRRILAWHRSDELSKRLEAIPGVGPLIATALVASIPDPHAFRSGRDVSAWIGLVPKQNSTGGKDRLGPISKAGNRYLRQLLVVGALSVIRRAKQLGTTRHPWLVTLMQRRPVKVAAIALANKIARIAWAMMARNESYRTPLPTPA

SEQ ID NO: 313547 - protein, 452 aa, unidentified
MAQGSGLTRGDRNRNRKIAVLRQVVRRDRAVLAVDLGEDKQAAVLVDHEGRVQARKTVTAKAHRLGALLEWAAGQAARAGFAGLVVACEPTGHRWKALMGLADAAGAGFVCVQPLAVHREREKDDYTRDKTDHRDAYLIGRLAVRLDCYLPERAEEAWARLRHLGARRSALVADVVCCTQQVSDLLACAWPAALATAARPLESTTWLAAMGVVTDRCCGDPARLRTMGYEKFLAAVRRELPRWGAKRVYHKIVTGLWDALADRGGVAAQRRGALERVHLVMADWRSLLARQADTEGRMCAVLDELGLTGLVTSIDGLSAVGAAVILAETGELSRFATSRAVVKHAGLNPAENTSATLAGRTRISRRGRPGLRTAAWRAAWPGLRHNRVLAARYAHLTGRDSGTRLSDGQARAACAAALLRWLWAVVTRRQAWDARIAAGLIPARAVTAPAAA

SEQ ID NO: 313548 - protein, 356 aa, unidentified
MEPIKSNCIGCDAHRRYSVFVVLDDKGQIRKEVRVEHGRELYRYFLTTLPPGAPIALETVGNWYWMIEEMERAGHQPILAHAKKAKLMMGLTNKTDKLDARGLALLLRNGTLPSVWIPPGELRDQRELPRMRMVFARIRTMLKNRIRSTLAKYAIEIDEVSDLFGVTGRDLLEKRYQQLPQETQRSVKEQLALLDHVLEQVETTEKRIREVVKESAQMKLLMTLPGVGFILAIVIALEIGNIDRFPDAPHLASYSGTVPTIASSGGKTYYGRVRVDVNRYLKWAFIEAANAIVVHQKTMADRHVVKLYQKILKRKGHAKAVVAVARHLAEATYWMLKRNEAYRERSLSISISPTRK

SEQ ID NO: 313549 - protein, 347 aa, unidentified
MVIIGCDFHPGFQQIAMVETDTGEVRELHLAHKQEAEQFYGSLRGREVLVGMEACGYTQWFEQMLDKMGHRFQIGDAAAIRASYVRKQKTDRRDAGHILRLLVEGRFPALWVPTAADRDVRQLIVHRHKRVELRTRVKNQLHALALNQGLRLRWKLWTRAGLQQLKALELLPYGSARRADLLRQLEEMDAEIARLDKTVGKEAAARPAAVRLMSHPGVGPVTALAFVLTIGDVERFRRSRQVASYLGLIPSERSSGGKQRLGHISKQGNPLLRFLLVEAGHIAVRGDAELRRVYTRLQHRHSTGVAKVAVARKLAVRLYWMLRKQIDYAQFRVGPYAGKPVSFCGRK

SEQ ID NO: 313550 - protein, 365 aa, unidentified
MKIMHWVGNDDHADKWTIAHYTGNEAKPTREFELVPDSKGYRSLLSYLKGLKGEVRVVYEAGPCGFEQYRRLKAAGVNCQVAAPALTPRKPGEKVKTNRRDAAKLGRELRSGGLTMITVPEPEQESLRDLIRARQTIQKDVGRLRKQIIQLLLRYGHRFRDGQSWTKRFWVWLKAIKLTGSYSSFVLADKIVELEHRIEQLARYDEEIEGAAQKPEYQTYVAAMRTLRGVETLSAMTILSEMGDLRRFATAPQLMAAVGLVPSESSTGDKTNRYGITKTGNAHMRHIAVQAAWQYQRHATANAKIKARRKDQLPEVVAIAEKCEARLNRRFHRLTSRHKKSTVAVVAVARELIGFIWAIGQIVHP

SEQ ID NO: 313551 - protein, 365 aa, unidentified
MKSLFYVGMDVHKDSVRIAVLKGTEKQTVYEATVKNDISKIVKIVGGYKKKGTVVAGYEAGCMGYTLQRSLGAVKVDCRVIPPNKVPRLGSERIKTDARDAVLIARMLKNNEGESIYIPTADDEAARDLLRCREDIRAELHRTKQQLQKQLLRTGFIFDEEKRLWTKAHRDWMAKLEFPHELQKETFTQYYSHIQELENRLERIDAKIITVAEAEPYREPVARLRCFKGIDYITALAFVCEIGDFRRFGSAASFMAYLGLVPSERSSGPKRRQGGITKTGNTHLRKLLIESSWHYRYRGAASAALQARRAGMDEQVIVYADKALHRLQSKFAHLLFKGKSSKTAIAATARELAGFVWGTMVRAYC

SEQ ID NO: 313552 - protein, 337 aa, unidentified
MNRVTIGLDIAKSVFHLVFQQTNGKVVNKKKLKRHQVQTFFATLEPAVVVMEACGSSNYWAQIIQGLGHEVKVIAPQYVVPYRKGNKNDFNDAEAIAEASQRANMRFVPIKNIEQQDIQLVHRIRERRVKFRTAIVNQTRGLLAEYGISIAQGVNNVRKAIPDILEDAENKLTALSRRHISSLYDELIELDKQLKELDAEIKALSNSKEECQRLETMTGIGSIIATAFYSSVGDGKAFKNGRHVSAWLGLVAKQYTTGDNPNLKGISKRGNTYLRTQLINGARAALVKSGNKNDKVSQWANSLRERLPFNKAVVALANKMARMAWAMLVKQENYKFA

SEQ ID NO: 313553 - protein, 434 aa, unidentified
MFRPLEHHQNHQLEEPQMENFAALIAIDWADKQHAVSLYDEATGGREQTTIKHTPEALQQWALGLRTRFQGQRLAVCLEQSRGPLIYALLKYDFFVLYPINPVTLAKYRQAFSPALGKDDPSDADYLLDLLQHHRDRLTPWRADDEKTRTLRYLVEQRRRLVNDGTRTTNRLTALLKSYFPQVLGWFSDLRTLIVCDFLDRWPTLAAVQRAQPTTVNKFLRSHHSVRRETNQRRLSEIKTAVALTNDAAVLNSSQLIVKVLTAQLRTTIKALAELDRHIEALCLTHQDYELFSSLPGVGSIYAARLTAAMGSDRTRWTRVEDLLCFSGVAPVIERSGKQNWTRWRYFCPKFFRQSFVEYAEQSIQHSFWARAYYSMQRAKGKGHYAAVRALAFKWIRIIWKCWQTRTPYNEVIYLESLRKTGSSLLKFAAENQT

SEQ ID NO: 313554 - protein, 409 aa, unidentified
MDAIVERCCGLDVHQATVVACFLVGRADAKPRKEVRTFGTMTRDLLALRDWLHAAGCTHVGMESTAVYWKPLYALLEDTFTVIVGNAHHIKNVPGRKTDVKDSEWIADLVRHGLIRPSYVPPKPLRELRDLLRYRRKLVESRSAERNRLLKLLETANIKLSSVASNVFGVSGMRMLTALVAGTATPDEMAALARGVLRKKIPDLERALEGRMEEHHRFLLQLQLCRLEQVDDALTPLDHRIDQQLAAYRDVHTRLTQIPGVDRIGAAVLVAEIGTDMRVFHSPAHLAAWAGVAPGNHETGGKRQHAKVRRGNVHLQSTLFEAAKGAAKTKGSYLKDKYHRLKARRGAQRATMAIAHKILIAAYHMLATGTDYADLGAAYLDQLDNTRVTANLVRRLERLGYQVDLRKAA

SEQ ID NO: 313555 - protein, 413 aa, unidentified
MSVTDVPEPPRPTAGVDWSKDDHAVSVVGPDGEQTHRFSITHDAAGLRSMIKRLLGAGVAEVGIERPDGPVVDALRAAGLVVYVIPPGQLRNLRSRYGSAGNKDDRFDAYVLADVVRTDRRRLRPLLVDTPATTALRQSVRARRDLVVHRVAVANQLRAHLQICFPGAVGLFRDIDSEITLRFLERFPTPERAAWLSVKRLTAWLASIGYCGRTPPETLYQRLTTAPAAATGADADTAAAVTAAFVAVLRTLTTQIEALAARISEQLDLHPDQAIFTSLPRSGRVRAARLLAEIGDARGRFPTADSLACLAGVAPSTRQSGKVEVVSFRWGADRQLRDAICDFAGDSRHANPWAADLYQRARNRGHDHPHAVRVLARAWVDIIWACWTSHSPYDPDRHGALQRILNQDQPAAA

SEQ ID NO: 313556 - protein, 355 aa, unidentified
MNSVRYVGLDVHRDTISAAVLNESGRMIQQSILATRAAAILDFIGGMRGTLHVTFEEGTHSAWLYDLLQRRVARLVVCNPRMNSLLKSGNKSDAIDARKLAELLRADMLSPVYHGEKSAMEVQHLARSYALLTEDTTRVMARIKAIFRGQAISCAGQKLYGHKHRHEYLEQLGACALRRRAELLYEELEAVRQLRRQAKREMIVECRKYPETKLLCSVPFLGPVRAAVLIGRVQTPHRFRTKRQFWAYCGLALEMRDSGEYRVVDGQVERRKKPAQIRGLNWNHNHELKNLFKAAATTASFSNGVFREFYLGLLKNNMQPEMARLTLARKIAAITLKIWKKGEAFDAELMKLQAA

SEQ ID NO: 313557 - protein, 343 aa, unidentified
MSGAYEGRQIVGMDLHRRRSVLVRMSETGEHLETVRISNDPEYLREVMTRAGEAPEVVLEAAYGWYWAADALAELGATVHLAHPLGVKMFGLRRVKNDERDAADLADLLRMGRLPEAWIAPPATRELRGWVRHRAKLVALRSGLRCQIHAVLASAGMQVPMSDLFGVSGRELLTTATLTVESRSRVESLLRIIGALDFEIDLYTKLVASRLRTDPGYHAIQAIPGVGPVLAAAFVAEIGDITRFHRPAELASWAGLTPRHHESDTTVHRGRITKQGSRLVRWAAVEAVQRVPARTRLGQRRDRVAERRGHNIGVVAAARDLITLVFYGLRDHHVRCLPTKAAP

SEQ ID NO: 313558 - protein, 367 aa, unidentified
MYIGVDTHKQDHVLVAIDDLGRRCGIQHSANTPEGWTQALAWARDRGQEGTTCWGIENSGGLGKGFAQFLLAQGEADVREVSPHRTAQYRRRGRTQDKTDETDALAIARLLLAEGADLPRVQVDDLSTELRVLSDHRDSLLRERTRLINQLHAQMLQFDPTYKEKSGTLTSTRGLTYCRDLTSAGVDRLTATRLLVVGQLATQALSLDSMIAALTAELERRVAESQTPLLALKGVGTIGAARLLADLGTTPRIPAAKALAALSGVSPVAVSSGGHTGYRLNRGGNRQLNRVIHTMALVQRRYEPRARAYYEKKRAEGKTNRAAMRCLKRRLVDVLYRTLQHSGPTPASLTGAPEVSPLSPASDGAAA

SEQ ID NO: 313559 - protein, 352 aa, unidentified
MKGMALTIVEIPTVTGGVDTHADVHVAAALNHIGGLLGVESFPTTPAGYGRLLAWLQSFGTVALVGVEGTGSYGAGLTRHLTAAGVRVVEVDRSDRQERYRSGKSDPLDAESAARAALSGKAKGAPRGRDGTVEAIRALMVVKRSARGERTRSINQARALVVTGPDDLRARFEGHRTDDLVADLAGLRPRPGDVVGYATRVALRELGRRAEYLGAQIDHLDSLLLPLIELQAPSLLDMYGTGPHIAAILIIAAGDHPDRLRSEAAWAHLCGACPIPAGSGKTTGRYRLNPGGDRQANHALWRIIFTRLSSHQPTQIYVERRTKEGKSKPEIIRCLKRYVAREVYHHLLATAT

SEQ ID NO: 313560 - protein, 423 aa, unidentified
MPVSTLYVGIDVSLKTNQVCPINFNQDVFFNEKFDNSPSGTERMTVKILDILNKNKDLNKVLFCMEATSVYHIHVSSILASDSRLLAYGCKVYAENAKSIQKYKETFLDREKTDPEDAYLCADYARIGKCKDSHPVIGYQKIALQRLTRQRKHIAEQLGKEKQYLSSNLFLKFSALKVNPEDNPFSNTFGKTSSVMLTDFLSNEEIVKADLGDLVVKISEVSNNRISDKDEVARKLKRMAQHSYHLDSYASDSVSMAMASSFRLIETYQNELKKLDKEILRLIEGYDNKYCAILTSVKGVGNVYAAGIIAEIDDIHYFRNDEHLASYCGLRWKKNDSGNKRSDHTRQPNTCNTYLRYYIVEATGSILRFNDEYASYYCRKKSEVKVNSHKRALVLTSRKFVRLVYGMLRDHKLFDDHYLAHRS

SEQ ID NO: 313561 - protein, 352 aa, unidentified
MTLVGCDLHSRKQQVAVLDTDTGEVLEQELLHEGDAVERFYRGLPRPVTVGIEATGYTLWFHALMQKLEYTLLVGEAAKIRAMVVRKIKTDRRDAQHLLDLLKHDRFPTVWMPDPATRDLRALIAHRVRFVRMRTMVKNGLHAIALNHRVALGPALWTKRGLAQLQALALPPHTAQRCGENLELLTWLTTRIAQLDAQIAAAAAADARAQLLLTHPGVGPLTALITVLVLGPANRFPTSKHVVSYVGLAPAINASADTYHLGKITKQGNALLRWILGQAAPLAARADGELKRSYFTVLHRRGRPKAKVALARKLLVRLSIMLRDQIDYDEFRRRGGARRSQPAWHPVAAPTM

SEQ ID NO: 313562 - protein, 473 aa, unidentified
MIKSVGIDLGGIGEHRVRCLDERAQMCDGFGFDTTGVGLAKLEERIFKDGSNPVIIFEPTGLAWLLVAVYLKSRHPESRLVRVQAQKVVALRKYLNRSSKSDKIDSLTLAKMPFIDPEKLEEIYLPPGKIYAIQRLSRQRKRLESEIAGHKKRIGSIVDGHYPGIRSAFSDSWSAHARAFLRSRLNPITVVRAGEKTLCRFLIKARKHGRIEASVESHGVYLVCRELASLYKASSSVEIIDNDFFLALQEEISRELKLMEIKEAESAAIAKRLEKLYLEIHPSDNLRTIPGVGDITAPVFLATIGDPARFHSQSAFANYCGIVPGANQSSGSEAKGLRMTKAGPPIMRWALFQAGGIGRAHDPQLACVYYREMVHNGKNHMQAMGAVMSHMSARVLAVLREDKPYQLRDIDGRSISREEARRIILEKYQVPEEIRRERRRRKTPGSPSLQKKLREMLVPRVHEAAAAPQPVMT

SEQ ID NO: 313563 - protein, 441 aa, unidentified
MHRLAPVSTACLVFVGEKGYAQLLRKGQFMKKYVLAIDIGKGTSKIGLYGLNTENMRTIKIMKPRNFKHSIEGLDGIGKALAGIPMDQIGVMMESTYVYQMPVVEYFKRKGFDEITVVNPLKIKRTCGDIQKVKTDMVDCDRISAYYFFSQWEKPLPVSKEQREARELSRYIDFLQKEATRVGNKIRQTLSNVFPELERIGDSKGSLFKAGFLNLIEKTPHPLSIRKKTKAGIISTMAGKGRRDSSYAEYASLIIEAAKKSLFSAPEGGIEASLILPDLARRLRELSKQIEDAEDKLESMTKEMPLFKVLQSFKGIGKGIASHLTAEIWSTEQYATPQKLIASAGINPSRSQSAASIDRYGRIVKAGNRYIRHWLFTAVGCILQQNGLGRGDKRLAEYYIKKHSSERDHHYVATIACANKLLRQVFYRSRDLAKTGQLIVK

SEQ ID NO: 313564 - protein, 425 aa, unidentified
MNHITNQKINQVSDNTLVIGVDIAKKTHYACPIDDRGRVLQKAFPFGQSGSGFEKFKHSIRTLQDLHEKEQVIVGFEPTGHYWMNLAAYLVQHDIPYVFVNPMHVSRTKELDDNLQTKNDQKDARVIAQLIRDGRFSYPRILTGVEAELRNASMLRTKIVEDITALKNRMIRWLDRFFPEFHQVFPSFGKNACAILEKTPLPQDVVGIDLEDLVTLYIQVEGLKCPSRPKIKQIQFLAEQSIGIREGLEMARFEIATLLNQYKLLQHQLENLDSHMKELAIQLIDFEYVQSVDGIGAHSITMLLSEIGSFTHYKHPRQLIKLAGLTLRENSSGQHKGQKKISKRGRKKLRAILYRMTLPLIRHNSAFSSLYNYYISRPNNSLRKKEALVVLCSKVLKILHALVNKQLYFNEEAMMNDLHCLQEVA

SEQ ID NO: 313565 - protein, 427 aa, unidentified
MQSLTQRILERMEQIFMIKENYMYVGIDLHKETHTAVIIDCYNQKLGEITFPNRPADFPKLVAKVKKCNTAGKEVVYGLENAYGYGRALAVWLIDKGYFVKDVNTAISHRQAKHRGAMYRKSDSDDAKAIALATLNMLDKLPDACPNDAYWSLGQLVHRRDNIMKQRTRLVNQLHEQLCIAYPSYKQFFNDISRPTALYFWENYPSRKYLKGKSVEDLRAELVPVSHNKCSTKTCEKILDAVASDKVKNNNFQDARDMVTLSIVSDLQHYDSQLAEVDKMLEQMYKMLGCTLTTIPGVNVITAVKILAEIGDIKRFGNANKLAQFAGIAPLHLSSSGKGKDVATKQGNRRLQATIYFLAIQMVQVSSKGTPRNPVVRAYYEKRKAEGKTSQQALICISRRLISIIYGMLKNGTEYRMPEVENAGENM

SEQ ID NO: 313566 - protein, 412 aa, unidentified
MKDLLEISCGLDVHKDKIVACILTGPLGKPTCSEIREFTTLIPDMIALRDWIVSHDCRHVAMESTGIYWMPVYEILEDAFAGDITLLVVNARHMKNVPGKKTDMRDSEWISTLLRAGLLNGSFIPEKRIREFRDLNRYRKSIIRDITSQKNRVEKFLQSSGFRLSSFISDIFGASGRNIILHLIEHGQIDRAALDSCLKTKTRNRMDEILMSVNGTLSEHQKGFLKILMDHYDSLKKHLSEIEAGLDADMAPFALQVEQLSSIYGISTTASCAIIAEIGIDMKPFKTAEHICSWAGLCPGNNESAGKRKSTSITKGNPYIKSMLCEIAWVIAGKRNTYLSAWYWRIKQKKGAKKAIVALARKLLVIIYTMLKQGTLFDESCFEARRKSCEQKQLSRYIRELEKHGYRVEAQA

SEQ ID NO: 313567 - protein, 388 aa, unidentified
MGKEDEETTMSGKETVQAEPEFVAFVGIDWADQKHVWCLQKANSTQREAGELEHRPEAVEAWVGELCRRFGYGPIAVAVEQVKGALVYMLRKYECLHLYPVPSTMSASMREALYPSGAKDDPRDADVLLELLVLHRDKLRRLTRDNEATRRVQNLVEERRKLVEEKTAQLNRLTGYLKVYFPQMLEWFAKLDSKLVCDFLERWPSLEELQKVPSAELKKFFRHRRGRHGELTEWRMHGIGQATPAIRDRAVIEAKQTVVQVIAQLLRTLLEGIATLERKIAEAAEVHPDFFIFQSLPGAGAALAPRLLAAFGSQRDRYSRAEEVQKYSGIAPVTERSGKKKWVHFRWACSKFLRQVFTNGRDTRSRSRCGRVPTTSDSASAARNTMPR

SEQ ID NO: 313568 - protein, 287 aa, unidentified
MRIIGLDIHRVFAEAVVLEDGTYRRLGRIGMTRDHLEAFAATLHPTDHVVVEATGNATAVLEILAAKVEHVAVANPVQVHLIARAKTKTDKIDARVLARLYATGFLPEVWIPDEMTLARRRQVTRRNQLVKSRVRLKSIVQSILHTHLVPRCPHTDLFGTKGRTWLRAQVLPEDERAAIERHLEDYDRQTAAQKDVERDIAAVALEDVDVKRLMTIPGIDMVVAVGVMAAIGRIDRFASPEKLVAYIGLNPSVRQSGDGPAHCGATIRMRLRIASLELFPDGLILPH

SEQ ID NO: 313569 - protein, 351 aa, unidentified
MVISELQIIKTCKPFPVYNTAKSFNKFWEKLCSFKNKYMLDEVVIGFESTGPYAEPITNYLRKKPVKLVQVNPMHTKRIKELTGNSPNKTDKKDPRVIADVISLGHALTVVVPEGSAAQLRRLTHARERAIERVTAMNNQLQDLVFVIFPELGTIIKPSTKTGMYLIKNYPDPESIASAGIGTICNIVRKISRGRFGTDRAEKLYNAAKQSTGITEGKESVILETSHLVSNIANENRYIESLKEQMIEHLEQIPYSHSILSIKGIGHVTAAGLIGEVGDFNKFNTISEITKLAGLDLFEISSGQFKGQRRISKRGRPVMRKLLFLQPLTWSNRLGSCMKNINKCWTGVCSK

SEQ ID NO: 313570 - protein, 350 aa, unidentified
MYFAGLDAHLKYVTVAVLDRLGALVLETTVPTREPERLLAGLAPFRPLEVVVETCPFWPWLYDLLVPAGIRFHLAHAKRLRAIATAPQKNDRVDARLLARMLLSGLIPEAYPRPGDQRELLRLLRHRTTLVRSRTRLAGRIHSQLHQQRLLLPREQLLRQATRGWLRETAWPRLTAEQQAIVTTHLELIDHLTPLIQALERRIATAAGANPTAALLATIPGIGPYRSLLLAAELLPLTRFSRVEHLASYAGLAPVTRSSGGHTRHGSIPQGANRWVRGALVSAIPSHVRAAPHSPVTRAYAQLTARLGWRVARVAAARKLLRIVYIMLRRGEPWRGAGRVEDDVRDEVHA

SEQ ID NO: 313571 - protein, 412 aa, unidentified
MEVLYRSCCGIDVHTQFLVACLLVVDEKGRQHKELRRFSTMTGELQQCVDWLEAARCQAVAMESTGVYWRPPFNLLEGHIETVMIVNAEHLKRVPGRKTDKKDAEWIAELLQFGLLKPSFIPSQEQRELRDLTRLRTTLTAERTRLVNRLHKTLEDTNLKLSSVLTDIMGKTGQQILFALLRGEEDPAVLADLALGRAMSKRDALTQALRGHISDHHRLLLQELLSLIERHTRGISQLDREIEERLRPYEALITRLDAIPGCSRRIIEVLLAEIGWEVSAFPDAAHLASWVGICPGNNESGGKRKSGRIRKGNRWVKAMLVQAANAAARTKNSYLSAQYHQIAARRGNKRAVVAVAHSILVIYYHMLTTGEPYQEKGANYFSELDRKHAERRATKQLERLGYQVTLTPAQIA

SEQ ID NO: 313572 - protein, 377 aa, unidentified
MKKELYLGLDVHKDCIITAVAEEGRKGEVRESGAISNDLHAVEKWIGRLRKRHGKGTLLRACYEAGPCGFGLARRLRQLGVECEVVAPSLTPTRSGDRVKTDKRDARKLARLLRAGELTPVYIPDARDEAIRDLCRARSDAVDDRRRSRHRLKGFLLRHGYRYQGKSSWSAAHERYLRELVLPHPAMKVIMEEYLQGIAAATERIERCEAAMGDLLEKWRLAPAVRALMAMKGFQTVAAMILVSELGEVHRFSHPRQVMAYLGLVPTENTSSDRRRQGHITKCGNAHARWLLVECAQHYATPPKVSKELSRRQEGQSAQVRAISWRAQNRLHSRYTRLLARRLLRNKAIVAIARELCGFIWELLRTQDCYQAQSTPV

SEQ ID NO: 313573 - protein, 349 aa, unidentified
MQHIGIDLHKRESQICWLDDATGEVRQQRIQTRRDRFEAVLGHHAPGQALIEAGTESEWVAQVVEGLGHRVWVVDPSYAPMYPRRRGGRHKNDPRDAAALAEASLRGTYRPVHRVSRGRRVVREALTVREALVRTRTRLIATLRAAVRAEGLRVVSGAAEGFAARLRAVALPSDLAATVAPLLMVLDGLEAALAVADAQVAAHVAQDADMQRLQTAPRIGPVTSAAFVAALDTPTRFAHAGQVVSYLGLAPRDDSSGDRRRAGHISKAGPSRIRWLLVQAGWGILCGPETQGWPLRTWATALAARRGKRIAAVALARRLARILYAMWRDGTEFDRTAPRTTTAAGALAA

SEQ ID NO: 313574 - protein, 331 aa, unidentified
MWHIGVDLHRKTAVIAAIKDSGEVFDPVTIPCVEQKAIIKTFKKLTPFRAVVEASATYRWFHDLVSEHGTVLLAHPLKLRAMIQRRSKTDKLDSMLLAQLLRINQVPLAYVPSERYQYLREVTRYRVRMGREHSQLKVAVQALLARNNRYAPYRDTCGVRGRKWLSGQDFGISDNHIRDDLIERLSFMERQIKSLDERIECLREDYPEVCSLLDIYGIGLYTALLVIGELGEVERFRSAGQVGAYAGLTARVNQSGGHCYYGHITKHGSNWLRWALVQAAMKVIRKDAKLGNFYNRVRKRSSSKIARVAVARKLAEICWKRLRSWHRRNAS

SEQ ID NO: 313575 - protein, 319 aa, unidentified
MKTTKCTVNKVSGTNVGIDIGKDAFDVCVYESDQCWQESNSEIGIRRLVKRLGKLSITRLLVEATGGYERALVEAAIEYSIPVIIVQPIQVRQFAKAQGVFAKTDKIDARLIAEYGVKLQPEVKTLPGDKVRRVKDLLSRKRQLNEMRTQELNRSHRAQKITAASHRRLIKLLDKEIAEINTKLAREVADISEWQRTYDIISSVPGLGDGVAFTLLGELPELGQLTNRQIAALCGLAPFNRDSGRLKGKRRIRGGRAPIRTVLYMAMLSAIQHNPIIRCFYRKLVEQGKHKKVAIVACMRKMMTIVNAMVRDNREWAMS

SEQ ID NO: 313576 - protein, 387 aa, unidentified
MRVLYERCAAVDVGKDVIAVAVRLPGDGPDGRQSVKRTFKAFYGVLAEAARWLVSLGVTHVAMEATGIYSMPVYHALIEHGDFAQVLVCNARHVKNVPGRKTDLADAEWLAHLLECGLLAGSFIPPAEIKAARDVVRYRAKIVQSRTSELQRLGNVLQDAGIKIDSVASSITTKSGRAMIEALIDGERRPAVLAELAKGKMRAKIPDLAMALEGRFGAHHALMCRLHLDHIDHLEAMTAALDAQIEAMMAPFRAARDLLTTIPGIGPLAAAAIISEIGTDISQYFPDAAHLASWAGLCPGNHESAGKRHSGRRRPGNQHLQPVLVESAWAAVRHDGYLRSLYHRHVMKWGGYRSQLAKKKAIMVVAHALLVIISLGDLGAGLVNERK

SEQ ID NO: 313577 - protein, 520 aa, unidentified
MASTRTRGRPSRRGTPTSVGKPRGVLHPRVQQVGPEHFGIVCFDCAKARSKFLLADFYGRLLIAPTVVAHTRAELDAAVAQIRQAFEQHQLGDGLVAIERTGRYHRVVQRTFAAAGFETRILHPFVTKQYRQPVDPGNKTDDTDLTAIHRATVTGCALLESTRDEAWTTLQLVIRHRRDLVRKGAALNCQVRDHLEAALPGFAACFDKLWESPIPWHLLRHFPTAAQLREAGLTTLCQSLRTADIRFQQRTVQAVLDWAEQAAPGDVAASQHLRIALALYDDRRRKTEEIQALEREIAGRLAQTPYVLLLSFPGINVVSAADFAGEMGPIEHYANAKSITGRAGLRPSRYQSDQVDKANGPLVRNCNRALRAAILGIADNLIVCNHHFGVLATQWHAQGKAPRHSRVKVGMRFCRIAFQMVAGRQVFRHPGIQGRHCILDKLNAFHRAHETGMVEVLRDLQAAVAHVPPREYATEAQPLSEELKKIQDGRRRGPQLRGDILPIILARLGVGVVQSTESGE

SEQ ID NO: 313578 - protein, 412 aa, unidentified
MQTLVERGCGLDVHQATVVACLLVALKNGKITKQIQTFNTTTRELVKLREWLLAEGCTHVAIESTGVYWKPVFTILEGSFELVVANAQHVKKVPGRKTDVKDAEWLADLLCHGLLRSSFVPPKPIRELRDLLRYRRKLVESQSAERNRLLKLLETANIKLSSVASDVFGVSGLLMLRALVEGKATPAEMAQSAKGRLRNKVQDLELALEGKIEEHHRFLLQLQLHRLQTVEKDLDELEQRIQEKLQPYATQQTLLQEIHGVDRTVAAVLIAEMGVDMSVFPSVSQLASWAGLCPGNNESAGKRKSSHIPKGNVYLKTALVEAANAAARAKGTYLRDKFYRLKARRGYKRAAVAIAHKILVAVYHMLSQQVSYNDLGDLYLDKLNKSHLTRNLVHRLERLGYSVTLTPQQEAA

SEQ ID NO: 313579 - protein, 312 aa, unidentified
MESKQVHFEQVIARGCGIDVHKKTVVATIKGQGLKKETREFSTFTSSLTELKEWLLANQITHVAMESTGVYWKPVYKVLEPSGLKVWIVNARHIKYVPGHKTDKRDSAWICKLLLAGLLKPSYIPPKAQRELRDLTRYRMKLIQQIASEKNRIIRFLEESNVKLSSVLSDTQGVVATKLINLLCEGKPVTMKDIDNVYHHKLQCTKEELYEACNGVMSENTIMLLGIIRKNIAHTQTLIESINQRIKSVLSEYENVIELLKGVPGFNQKTVEDLVAEIGFDMSVFPTEKHLASWAGMAPGNNESGGKKKVDV

SEQ ID NO: 313580 - protein, 466 aa, unidentified
MENNYILYVGMDVSKGKADAAILKVSDRRSVKPKFLRKKLSFKFVKSEVSSFLETVRSYSDVNCTSICFALEVTGIYSTNVYDYIKANLYENESIKFLNTDFVNQWRIAHNIAKSDPLDAQTISTIIGTDSDVQYVNDNVFENKNGYQDLKALVHRHYQIKKIYFQEINRLIAQCDCLFPELQYVFEPKSAAFIAVLSSYPTTHDIINASRVEVFDVVYEATKHRCSMDKVDKLFELCQDTLVPDDISSYGKSIILDLVENIKNIKGQLKSIERYIKDIASLNPAYKLLLTITGCGPITAATVIAETGNIRRFKNADCFVSYSGTSPRNKRSGTSVETMGKISKKGSRYLRHAIYMIAEFARRHNPVLKHQFERIKNGNKKRHKLANIAIANKIARYIYSIMKNKSSFVILHDHIMRLPEETRDTFFNSISLDFPKNTRKQIYQYSDINGELHRFVYIKTDEMIPA

SEQ ID NO: 313581 - protein, 340 aa, unidentified
MNVTTIGIDLAKSVFQLHGVDAQGEVVFRKKLRRSAVLDFLRELRPCLIGLEACATAHFWAREIGALGHDVRLIPPAYVKPYVKRQKNDAADAEAICEAVTQPHMRFVPIKSTERQGVLMLHRTRDLLMRQRTMTLNAVRAHLAEFGIITAQGSRKLLTLIRTIRTGEVPGLPRIARIALESLATQLDVLTDEIRKLERQLMLWHRADKTSQRLKTIPGVGVITATALAASVPDPGVFKSGHQFAAFLGLVPRQNSSGGKDRLGRISKMGDGYLRRLLVVGATSVVRRANSNTSATGAWVRCLLERKPARVVTVAVANKTARTAWAILARDETYRASMTP

SEQ ID NO: 313582 - protein, 427 aa, unidentified
MSEIGSIQPEPEFAAFIGIDWADQKHIWCLQAAGSAKRESGELEHTPEAVESWVAHLYQRFAQRPIAVAVEQSRGALVFMLSKYELLHLFPVAPQMASSMRQALYPSGAKDDPRDADLLLDLLLQHRNKLRRLSPDSEATRRVQNLVEERRKLVDEKTAQINRLTDHLKIYFPQMLEWFGRLDSDVVCALLERWPALEELQKAPPASLRAFFRKHRCRDREQIEHRMEAIRQGVPAIHDRAVIEAKSAAVRVIVRVVRVLGEGIEDLDGQIEEAAAAHPDFFIFNSLPGAGPVMAPRLLAAFGSQRERYRSADEVQSFSGIAPLTESSGKRKWVHFRWACPKFLRQSFHEWAGHSIAQSEWARAYYQQQRSKGNTHHEAVRALAFKWIRIVFRCWQDRVAYDENTYLAALVKRGSPLGAIVAMGKTL

SEQ ID NO: 313583 - protein, 369 aa, unidentified
MEKGTTYVGLDAHQASTSAAMILASGEVVEDRFATTPDGIRRWMRRLKRRCPGRIVCGYEAGPLGYGLQRTLVSLGVECLVIAPSLIPSKPGDRIKTDRRDALKLAELLAAGLLTAVHVPTPEQEAIRDLCRARGSVKEDQKRTQHRLSKFLLRRDIRWTSGRKMWTRAHREWLRGRRLEHAADQAILDDHLLALEQNEGRLAALDEKLENWSTQEPYAQAVGWLRCFRGIDTLTALSVVAEIHDWRRFPSPRALMAYLGMVPSESSSGGKFQRGGLTKAGNRRVRRLLIESAWHYRHRPSVGYRLAKRRVGQPAEIIAIADRAQQRLHSRYARLSARGKNHNRVVAAVGRELVGFLWATMQRTEISPD

SEQ ID NO: 313584 - protein, 360 aa, unidentified
MTGTMTWAAMDVHARSTYAASLDVLTGELTRRRFDTGALEPVVEWLAGLPGPVRACYEAGPTGFGLYRAAGAAGIDCQVIAPSKTPRASGDHNKSDRRDTDLLLRQLMAGALTQVAVPSPTFEAARDLARAREQVRADLMRCRHRVSKLLLRHGRVYDRKAWTQAHTRWLAAQSFEQVNTELAFIDNLAAADGLVARKQALDERLSRIAREPEFWPLVSRFRCFRGLDTLSALILVLEVADFTRFARAVQLGSWLGLVPSREQSGESDRHGAITKTGSKYARRILVEAAWHYARPPRIGQALAERHDGQPDHILQIAWRAQHRLHRIHKRMRERKKPGNVITVACARELSCFLWAAATAP

SEQ ID NO: 313585 - protein, 337 aa, unidentified
MSVKTIGIDLAKEVFQIHGTDEHGKRLFNKQLKRAKMLSFFANIPPCLIGMEACASAHFWAGKLISIGHNVKLMAPQFVKPYVKTNKHDAADAEAICEAVTRPNMRFVPVKTPEQQAVLALHRSRQSFIKQRTAQANQIRGLLAEFGIVVSRGIQQLQLQLPEILEDANNSLPSLFRVQLNLLQHHMTYLFDVIATLDKQIEQCYRQNALCKIPGIGPVTATTLIATIGNASNFENSRQLAAWLGLVPRQHSSGGKQVLLGISKRGDVYLRTLLIHGARTVLQSVKRKQDAVSRWASRLLARRNNNIASVALANKNARIVWALLSKDQEYCAAVINV

SEQ ID NO: 313586 - protein, 349 aa, unidentified
MKIIGCDFHPSYQQIMMLDSVTGEVMEKALSHERKEEVRAFYAGLGGPARVGIEASGQSQWFERMLAELGHEVWIGDAAKIRASCERKQKTDRRDAELLMRLLAEDRFPRIWVPTAAERDGRQLLLHRHKLVRMRTQVKNQLQALALNQGVQQKQKLWSEAGRKQLESLPLLPWASRRRAELLQLLDQLEVPIGELDRAVAEQAHARPEAQRLMTHPGVGPVTALAFTLTMGPAERFQRGKQVASYLGLIPSEHSSGGRKQRLGHISKQGSPFLRGLLVEAAQSAVRHEPEMRRAYQRLAQRKCRALAKVAMARKLAVRLYWMLRLQVNYAQLIQGSHAGQPGKFCGRG

SEQ ID NO: 313587 - protein, 411 aa, unidentified
MEKIHAHAAGIDIGSRQVFVGLEEGPVRSFETFTGGLAEVRNYLLENKVITVAMEATGVYWYILYDILLDAGLDVWLVDGRETRQVPGRKTDVKDCQWIQQLHSYGLLKRCYVSDGLIKELRSYQRLREDHLRSASMHVQHMQKALIEMNIRIPEVLSQVHGKSGIALITAILSGERDRRKLVSLCDKKVRENKGEELLKALEGHYTDYGLFALGQAYQAYLFYQTQMRDCDRKMQVLLEKINKDKGLPPGMETGYRKPIRHNKPQITNLGEHLLKVFEGRDATKLPGITDYNWLQLYSELGSDLSKWPSEKHFNSWLGLSPGQNDSGKRKKSKKKGKPTVGQIFKEIAHGLLNSKYIGLGAFAKRLRGRKGPAIAIKATARKLATQYWRLMVKGSDFVEKGAIAYEQMLK

SEQ ID NO: 313588 - protein, 344 aa, unidentified
MEITTVGLDLAKNVFQVHAIGSTGGVVVRRSLRRAQVIPFFSKLPPCLIGMEACGTSHHWARELVGLGHEVRLMPPAYVKPYVKRGKTDAGDAEAICEAVTRPTMRFVPIKSVEQQAALALHRTRDLLVRQRTQLVNVIRGLLAEFGIAIPKGITNALAFVGRAVAGEANEVPDLATKVIAALAEQAIEVQCRIRQLERDLLASFRSNDLARRIATVPGVGLLGATAIAATVTDPTQFRSGRQFAAWLGLTPLNNSSGGKERLGRISKMGDQYLRRLLVTGMTSLVRRNKHHPGSADPRINALLARKPPRLVTVAMANRAARAIWAIMVRGEIYRVPTLGSAVA

SEQ ID NO: 313589 - protein, 432 aa, unidentified
MKVLYERVAGIDVHKDMIKVAIRSPGEKPWTRKTEILEFRTFYGVLQAMARELRKRGVTHVVMEASGIYTDPVYYALCEQDFEQVAVINPAHAKALRGHKTDARDCARLAELFECGLLRGSCIPPAELREVRDLTRYRMKTVQARTSEIQRLAKALESAGIKLGSVASRITGVSATAMTGSLIDGERRGTVLADLARGRMRTAGKLADLSMALTGRFTGHHALLCRLHRDRIAVFDAAVADLDERIAGKAARWQREAGLLTSVPGFGDVVAQAWLGEIGPAPHRHFATHGKLASWVTLCPGNNISAKKRKHGRTGDAGTYIKPMLIQAAWAAIRVRGRLQARYNRLVRRFGGDKNPAAKKKAITAIAHTLLKIAYQVLKSGTPYQEPGADFYTRRESPEQKQAWLERQMQKLHPGCTITITISPEAALAPGA

SEQ ID NO: 313590 - protein, 382 aa, unidentified
MDLMYDCCAGLDVHKKTVVACIRRVGPDGAVSSQVRTFATVTAELLALSDWLEEQGVRQAAMESTGVYWKPVFNILEGRVPVMLVNAQRLKTVPGRKTDVKDAEWIAQLLQYGLLSPSFIPPPAIRELRELTRQRTELIRDRAAVVNRIHKVLEDANIKLASVASDVLGVSGRAMLGAIVAGCEDPEDLAELAKRSLRGKIPELKQALHGRITEHHRFLLKALLDQIDALEGLIGRFAVRIEEAMAPFAEEALRLRGLPGVGKQAVEVIVAEIGTDMTVFPTAGHLSSWAGVCPGNDQSAGQQRNGKTTKGSQWLRSTLVQAAWAASHTKETVFSACYQRWVKRLGRKKALVAVAHKLLVVVYHMLKRRSEYREQWAPPKVA

SEQ ID NO: 313591 - protein, 380 aa, unidentified
MGKIIRIGIDTSKSVFVLHGVDEKEQPVLRKRLRRSQFLRFLATIEPTRIGLEACGAAHSWARQIRALGHEVVLLPPQYVKAYVKRGKNDDRDAEAICEAMSRPTMRFVPVKTAEQQAALMLAGVREGLTRRRTQLANTIRGYAAEFGLVAPKGLAHIKPLLARVAEDGDMPDLAKALLATLAQEYDRLQIEIKAIERKLMAWHKGNATSRKIAKVPGVGPIGASLAVMKVPDPHAFRRARDFGAWVGLTPKDHSTAGKARLGVITRAGDEALRRALVVGATAVINEVRRGKGPRWPWLIELVRRKPPKLAAVALANKNARIIWKLLVSGEDYDPTRGLVSGARRARREERVAALRGGSAPHSSLLATPTIAEASAMTNA

SEQ ID NO: 313592 - protein, 347 aa, unidentified
MDNITLTGIDLSKDVFEVRCENHAGRLVKRQTLRRTGLLAFIRELPAGSTIAMEACGSSHYWATEFKSLGFEVLMISPQFVAPFRKSQKNDANDAQAICEAARRPSMRFVPLKTREQLDLQMLHRIRERLMRQRTALMNQVRGLLLERGTAMPKGVSSFKRNVLKAIDESGEQSMLAFSLRHLWSEFLRLSEQVEAFSKQINSAARTNESCKLIKDLEGVGVIGCTALVAEIGAPNSFQNGRNFAASLGMVPRQFSTGGKTKLGGITKAGDGYLRKILIHGARAAVRAAVIRKKTDPLSLWIRNLHERNGMNRTAVALANKTARRAWAILAGRPPYTASSQRQAQVA

SEQ ID NO: 313593 - protein, 356 aa, unidentified
MNKSNKLDFTGQPIYIGLDVHKKSWSVSIFTQHCEHKTFTQPPEVDKLAYYLGRNFPGAQYYSVYEAGFSGFWIHDQLRAKGIDCIVVNPADVPTRDKERTKKRDPVDCRKLARSLRSGEIEGIYVPSRGKLEDRSLIRTRQSMVRKQTRCKNQIKAILFFYGVVIPEEREMGHWSRRFIRWIERIRMERTSGDIALKAHLEELSHLRQLIASLNRAILRLAKTEEYRSLVRLLKSVPGISTLTAMILLSELGEVTRFPSLDELSCYVGLIPDTQGSGEKEYVGGMTQRRHSQLRWLLIEASWVAVRKDPALLMAFQEYCKRMRKTKAIVKIAKKLLNRIRYVLKNQAEYVPCVIE

SEQ ID NO: 313594 - protein, 399 aa, unidentified
MQYIAFDAHKHYTVASVARPDGQVVREERIEHERGALQAFLARCEPGSPVAVETIGNWYWIVDEIEAAGCIPRLVHARKAKLMMGKINKTDRLDVRGLNRLQRNGTLPTVWIPSGELRDQRDLPRTRMVLVRQRTQLKNRLHATLAKYALHHFEVSDVFGARGRAVLRQRLELLPPHTAYASGHLLKQVEDLGSQIREFEQRIHTTFKPTAAIQHLMTVPGVGLTLAVVIALEVGDVVRFATAEKLAGYAGTTPRVHASGGKTRFGRSRPDVNRYLKWAFVEAANAICLTRRRARSRHVSRLYERIARRKGHAKAIGAVARHLAEATFWILSKQEPYREPKLATVSSTGDKREIPPELAEARPLIATSPETTIMPLTTAKIWLRRNGPMMHGTGTERRC

SEQ ID NO: 313595 - protein, 341 aa, unidentified
MEEYIGLDVSMKETAVSIRRAGERIWRGKCASDPSIVAELIRKRAPSVKRVVFETGPLSVWFYHSLRTEGLPAICIDARHAKAALDMATNKTDANDADGLAQLAEVGFFREVRVKGFDSMLTRTLVAARTRLVRITTELSNQIRGVMKTFGLLVPAGKGSTFEKNVRNLLADRDRLASIVLPMLEAWRGIRIRAAELGRQLVRDARQSRACRILMTIPGIGAITATSFTTAIEEPDNFRKSRSVGAWIGLTTRRYQSGEVDYDGHISRRGDRPLRGLLYEAAAVILTRSSTHSTLRTWGLQLRERIGFKRAAVAVARKLAVIMHAMLKTGELFNPNAGAAA

SEQ ID NO: 313596 - protein, 395 aa, unidentified
MCCVRVPHESRLGARRQEVRTYGTVTPALLELRDWLVCQGVTRVVMEATSAYWKPPFYLLEDDIECWVVNARDVKNVPGRPKTDKLDAVWLCKLAERGMLRPSFIPGRPQRQLRDLTRYRRTLTQERTREKQRAEKLLEDAQVKLSSVISDIFGVSGRDMLAALIAGQRDPHALADLARKRMRAKISVLRQALTGHFTEHHAFLLAMMLDRVDTLTAQIDTLTTRIDQAIAPFAAQVAQLDEIPGIGVTTAQEILAETGTDMSRFPTPGHLVSWAKFAPKARQSAGRSKAAATGKGNPWLGGTIGEAATGAARTSTFLAARYKRVVKRRGKKRALVAVGNSILTICWHLLSDPGAHFTDLGPDWHDRLAPQRRKHQLIAELERLSGKKVTLNDAA

SEQ ID NO: 313597 - protein, 342 aa, unidentified
MKTKNITPSNVPTTPATVSGFTLGLDLGDRQHHVCVLDAAGNIVREAALPNTRPALAQLLVEFPKATVALEAGTHSPWISRYLTEQGATVLVANPRKLHAISRNERKCDRRDAQMLARLARVDAALLHPIQHGSAQAQHDLLGLKLRDALVRNRVSLINAIRFTLKSLGHPVRNPSSESFHKTVLADIPADCLPVVQPLLTVLAQVTEQIKAMERDLVRRSKQDYPATQRLQQIAGVGPLTALCFVLKVGDPQRFSRGRDVGAYLGLCPRRNQSGGTDKGWLRAVNKLSKLAKSTHGRQAAKKFEIRWPEILPLTEIAQAKNEKIISFRKNQMARGFGLESE

SEQ ID NO: 313598 - protein, 315 aa, unidentified
MYVGLDISKEEIYVGSNLNKSTFKVENNEKGFPKLLEFINSLDSLEAVVMESSGGYEKAVCYFLLENKIPFAVVNPKNVRRYADAMGILAKNDSIDAYVIACFAFAIKPKPVTLLDKDIVELKELLRRREQIIGHISSEKNRSYLTDANIKKSINRVIDFLEKELKVIEYEIDTLLKKRGDLSQKVKVIESIPGVGRVLSSTIIGFLPEIEQISKKQTSSLIGIAPFGKESGKVKKKGKIVGGRFQVRKALYMATISAIRFNKPIKEFYLKLKAKGKPGRVCIVACMNKLIRIIRACLVHNTLWEESYALKQGAA

SEQ ID NO: 313599 - protein, 375 aa, unidentified
MKETVKYIGLDVHKKSISIAISDKGRNGETRHYGQISNTMAQLDKVLRKLISQGATLDCVYEAGPCGYQIYRHLNGNGIKCSVVAPSKIPRKSGDRLKNDRRDAESLARLHRAGELTTVYVPHPEDEALRDLVRAREDHKKALRRAKQQLGAFLLRHTIIYSGKTPWSNAHFNWLADISMAHPALQVTLQEYINTINDCQKRVDRLTKQILELSEESRLLPLIKALQSMRGISLIISATLAAEIVDFQRFKHPEQLMAYLGLIPSEYSSGEKVKKGPITKTGNSHVRKALIEAAQAYRLPARVSRAILKRQEGVSEEIRQIAWKAQNRLCSRYKRLTGRGKKANVAKTAIARELAGFSWAIAQTLTQSASSTNVS

SEQ ID NO: 313600 - protein, 383 aa, unidentified
MENRPLKFGAKRIFGLDLSKKTLKACRLDEDSGFEKQFIFDEKMTDEGRYHLASRLCKGDYVAMEGGSSTSFLARFLMENTEAEIFVLNPCKLHIIFESACKTDKQDCIKIAKYIRDTNPSNWCLIPVPTYEETSMRSLINSHISTKQERTRAINQLHAFFNLNGISFLKKSDLEDSNRRHSLVDHYFSQENIRGMQASLMLQDIDNIELSADCYEEMVRLALLSRPRESLIWMSIPGVGPLTALACVAYIGDGKRFSSPEQLRNYVGLVPMINQSGIRESIYGVNHYGCMPVRRNIIQAAWSVMNLSFDCKFKQRWSELKATGKKSQKIAVKVANDMLTMGWTLLKKGELYNGLEDYSYLKRKLRTYKMTAIDSSCFGECLK

SEQ ID NO: 313601 - protein, 400 aa, unidentified
MKGFLHMKLIGIDIGKNKHFFCIMDQQTGEIISQPISFSNDKEGFDFLIQKIKSYSKDSVLIGMEDTGHYHFALLKYLLDLQYTVALINPKTTDFNRKMQGGITKNDKLDTINICDVLDTPERKKQYRISKVNSFDLYEQKQLTRHHHNLKEEENVYKNRLQKCIDIVFPEFNKLFNSKYGTVYMNILKTFGSAENIANTDIRTIRKCFEIEGRGNRISLTPERLKECARSSIGISSSAEVIQIKHLTAQIELIEEQLTEIDKKIEEFSIQNNSPILSIPGISHFSGTSILAELGDISNYSKPSQIIKFAGVAPLHYESSQFNAQHTSITKKGSKYLRKTLYQIILPVIRHNQVFYKYYQLKISQGKGHRCAQGHCVRKLLRIIYHLLKTNQQFDPQLLR

SEQ ID NO: 313602 - protein, 342 aa, unidentified
MYYIGLDVHKKTISYCVKDASGQIERQGTIGATGNELDVWMKYLPQPWTVAMEATIFTGWIYDHLLPHAAQVKVAHPVMLRAIAAAKKKNDRVDASKIADCLRCDFLPECHMVSRAIRDRRRTLRYRHLLVRQMVQMKNRVSGLLLETGVSHNKQRLHQVKYFRELLENSPEVQASIRPLLKLSRETIVRLQKTEYALISFLERDPLLCERIKNLRTVPGVGPITALTWALEIGDVSRFRSVKQAISYCGLCGDEKSSAEKVLRTPISKKRNKHIQRVLIEAAHFAPRQSPELALVYEKEKQTGHANRATLAVARKMVAYLLAVDRENRAFVPSENRGEAVA

SEQ ID NO: 313603 - protein, 322 aa, unidentified
MTSSKLATRVIGIDVAKDKLDVSDPHGKIKKEIQNSNACIVKQLIGKIDQPDKTFVVCEATGGYERPLVKAVQDAGIAICVANPFQVRQFGKGIGVLEKTDPIDAALLQRFGEVVDLQPTPPKSPEHQYHEALVRRREQLMNMINQEQNRRAQADNKPIIKLIDQTLKLLKTQQTSVDAEIKAFLEKEAETNVAVAIIQSVPGVGVVTTSTLLSDLPELGTLNRGEIAKLAGVAPIANQSGTRDLKRCIFGGRSHVRRVLYMAALTATRFNPVIKKFYGRLVAAGKEKKVALVACMRKLLTILNCMVCNKESWREEMVVTGT

SEQ ID NO: 313604 - protein, 387 aa, unidentified
MTVRTVNNLPAATHGETVRCLFAIELSKQSWVIGFNTPLSEKISRRTLSGCDWKGLLELIEDVRARVSREMDRAVAVMSCYEAGYDGFWLHRQLEAHGVRNYVIDPASLQVDRRARRVKTDRIDAERLLRSLMAYLRGEPKVWSVVRVPSVAEEDARRLHRERDRLVLERVQHVNRIKGLCALHGIYDYHPLHPQATARLEQLRTAQGGELPPRLKSEIKRELHRLELVVEMIATLEAERDAIVEDEASTHLNAEKIQNLHKLKAIGPEFAAVLVGEIFHRSFDNRRQLASYVGVTPSPFQSGSMAHEGGISKAGNRKGRTTGIELAWLWLRYQPDSDLSIWFRARVGIMKGRIRRIAIVALTRKLLVALWRYLETGLVPRGAVLKG

SEQ ID NO: 313605 - protein, 457 aa, unidentified
MGHARARKVPARLVEDEDYQLRHERVAGIDVAKAKADVCTRLPPAREGGRRASKVEEVPATAGQVLALAGRLLADGVELVVMEATSDYWRIWFYLLEAAGLSVQLANPSHARQLAGRPKTDRLDAQWIARLAEMGLLRPSFVPPPEIRALRDLTRTRLQLARDRTREWQRLEKLLEGALVKLSSAVHSLAKTQTARNILEAIAGGQDDPRALAALAHGGVKGGRAAIGQALDGMTLGAHHPRLIRIHLDHITFLDRAVAAIEDEIGAALDAIPAAWGITAAGVPSPDPGPDAAVLTAASRLAEIPGVSPKLAIAIIAETGLDMTQFPTAAHLASWAGLAPVARQSGPRNRKPGKGQGDAYLKGYCTQAANGAAKTETFLGVRLRRLSRRLGGNRAKCAVARSILVVIWHLLASPEARFTDLGPDWHDRNDDRDRKIQAHLRQLRAFGLDVTLTPAAA

SEQ ID NO: 313606 - protein, 343 aa, unidentified
MEYYVGLDVSLKQTSICVVDQTGSVVREGVVDSDPEAISVYVRSKAPGAVRIGLETGPTSTWLWTELKRFGLPVICIDARHAKAVLKMQINKNDRNDAIGIARIMQTGWFKEVHVKDIDSHSVRALLASRALLVKIKRDLENHVRGLLKNLGLVIGRATFNVFAARAEELIEGRPDLVAAVRPLLEARNAVEQQVSELDRKVMKLARRDAQVQRFMTVPGVGPITALAFKATIDDPARFARSRSVGAYVGLTSRRHASGEVDWSGRISKCGDAMLRSYLFEAAGVLLTRVPKWSTVKAWGTRLAKRNGLRKAKVAVARKLAVILHRMWIDGTEFNWSKKEIAA

SEQ ID NO: 313607 - protein, 429 aa, unidentified
MNMNTNTLPQPATAPAAAAPPPVAWIGLDWGHHTHAFALQDRSGPPAEGTLLHSAEALHTWLRDLEKRFGGRPVALAIEASRGAVIHALVQYPWLTVYPINPVTSARYRSAFTPSGASDDLPDARVLLELARDHAAKLRPLETQDAQTLKLTGLVEARRDTVDRRTQVLNQLTSLLRAYYPQALELVGELDTELAVAFLSRWPDLITLKAVQPGVLKRFYYAHHLRRPERLTARLQFIQQAVALTTEDARVSVAVLQLRCLLDQLRAFRKHVAILDAEIKTTFAAHPEVALFRDLPGAGPALAPRLCVAFGTLRTLYPDPASLQKHAGVAPVREKSGPSLWTHWRGLAPTFLRQSFVEWAAQTVVYSAWAKIYYQRMKARGKGHHAILRALAFKWIRVLWKCWQTRTPYDETHYLKQLVHRKSPNAIPA

SEQ ID NO: 313608 - protein, 402 aa, unidentified
MNCVGIDISKGKSMIAVMRPFGEVVVSPFEVLHTDSELSKLARLLKSLDGETRVVMESTGNYHAPVAWLLHDAGLYVSVVNAMLVHDYGNNSLRRAKTDKKDAVKLANYGLDHWLTLPRYVPEEDTRLMLKSCYRQYQQYSKVRTMLKNNLISLLDTAFPDANRLFTSPPRADGSEKWVDFVAAFWHCECVCGLSEKAFTAKYQKWCKKHGYNFSEDKALGIYASACGHFGVMPKTDTTKLLVEQAISQLRATSAALAALKQEMQSLAASLPEYPVVMEMFGVGPALGPQLMAEIGDVRRFHSKKALVAFAGIDAPPYQSGQMDVRSRSISKRGSASLRRTLFLVMSVILQRAPMNEPVYQFMNKKRSEGKPYRVYMMASANKFLRIYYASVKAYLDSLEHD

SEQ ID NO: 313609 - protein, 365 aa, unidentified
MINDKLSSNGISVPSLVNCLNGVLHLGLDMHYQQVTVAMQENGGRIKAAGKMNHVGFLNWVRKKLEEGWEIHSCYEAGACGYWLHRELVKLGVKNLVVVPKAMGQGGKKQKTDKRDAGELCDCLDRYLRGQDKALSVVAVPTEEQEEKRALIRYHRQIMADRGRCEARGKGLLCAQGIEVHGRWWHSNAWIEVQSDPRLKDWMKEQLIGWRNKILSTDEEQGGLRERIAALAPAILPKGVGAYSAAVLHYEMRGFERFKNRRQVGSMTGLCPGIHQSDGRGKEGSINRCGIGIVRWTLVEMVWRLMIWQPQYPPVRRLATGLVKGKRARKRLVVQAARRLAIDLWRLSTGQTTPEELGLIMHCAK

SEQ ID NO: 313610 - protein, 374 aa, unidentified
MEVRIENTPSARTNNDPVHCFVAIELSKSSWVVGFQTPLSKQTSRYQVKACDAEPLLELIERIRTRVAREVGRPVEVTSCYEAGYDGFWLHRVLEAHGIHNHVLDPASLQVSRRARRPKTDRIDADRMVRALIRHLRGEPEACSVVRVPSPEQEDARRLHRERRRLITERVGHVNRIKGLCATQGIYNYEPLRSDRLERLDKLRTGDGRALPARLKTEIVREIKRLEVVLEMISTVEAERDAILKDKKSTHINADKIKMLAKLKAIGAEFSTTLVGEVFYREFANRRQLGSYVGLASSPFCSGSLDRDQGISKAGNSKARAMMIELAWTWLRYQPDSALSRWFQARVGNLKGRPRRIAIVAMARKLLVALWPSQ

SEQ ID NO: 313611 - protein, 383 aa, unidentified
MRSIGLDLGARHIAYCEVRNGEVVDRTSVKRLEQLRSRLGPDTAPARIAFDASREGWHVHDVLVSWGHEPKMIDTTRVRAMGVAHHKRKNDALDAEAAARAVEQGRVPEAHILSPARRAMRAQLSVRGALVETRAQYVTTIRGLGRAAGVLLPTCSTENFVSKARESALDDATRALIAPLLAVLVEIERELAKVEHLLSEMARAEPITSLLATAPGVGLIVACTFVSVIDEAKRFRNAQAVGAYLGLVPSEMTTGGPEKRRLGSITKQGNTYARKMLVQAAWHVLRSRDTGDPIRQWGERIAKTRGKRIAVIAIARKLAGVLWAMWRDGCAYDPVGQAAASAKGTRKEARSKVAHAEALERAAKKIQRRTPRRDKTSEANVMT

SEQ ID NO: 313612 - protein, 445 aa, unidentified
MGKSKKKNLNEFNVINPNAAGIDISSKDHVVSVPQDRCKNNIRTFGAFTCDLESIALWLEACKIDSVAMESTGVYWKQLFVVLQEHGIEAFLVNSRHVKNVTGKKTDEDDAHWIMRLHTCGLLTNSFQPDEQVRTLREILRHRKSLNKTKTIAVNKMTKALNTMNIKLNIVLSDLTSVSAQRIISAINSGERRPKELIKLVHHRVKAPKQDILMALKGVWREECLFELKQATDHYNFLQRQTVECDKKIETQLEEIVANKKEGEIPNLKEKAKKKTSRKNEINFNVRPYLKEILGIDVCQIFGFSDEVALTLFAETGSSLSCFPTANRFASWVGLAPNNKISGGKLISSHLPKKKHAIKKVLIQAANSLYRSDNALGDCYRRLKSRLGPKSAKCALARKMAVIYYTMVTKKEEFDIELLNLHQKSYKEKRIKFLENQLTQLKSVA

SEQ ID NO: 313613 - protein, 429 aa, unidentified
MDPPTAAPARFVALDVHRHSITVAAVDARQTVVLKPRRLAMPDFARWCRQQLTSADAVVLEATTNAWHLYDQVAPLVATVTVCHPLMVKLISAARVKTDPRDALSLARLLAAGLIPAVWVPPVEVRELRALVSHRQRLVRQRTQARNRLHSVLHRHNLAGPAGKPFAAAQRAWWEALDLVPSERLRVRQDLAILDSLEPLLAEVEDELTRLSTQEPWASQAAFLVQLPGFGVLNAMVVLAAVGDISRFPTAAKLVGYAGLGASVAASGPTRRTGGITKQGRRELRAVLVEAAWVAVQTHPHWQAAFARLEDRIGRNKAIVAIARKLLVVIWHVLTARVADRQARPSKVALKMLTWAWKIGAEQRGGLTPGQFVRQELTRLRLGEELEQVTQSGRRLRIPPLGEELEQVTQSGRRLRIPPPERPSALVAP

SEQ ID NO: 313614 - protein, 349 aa, unidentified
MSIVAEIVEHVVGIDTHARTHTYCVVHARTGAVIDTATFPTSKSGNARAISWITRRCPDRVLAAVEGTSSYGAGITAALLEQGFDVTEVRPAARSTHAHAGKSDTLDAEAAARSVIGRDYDTVARPRQSGPRAALRVLLAARSIIDQQRTANRNALTALLRGVDLSVDVLKPLTDSQIRAIATWRAGRTASPDAWVIARREARRLAVTVLEQTELLKVNHRQLHQLTEQLAPGLQDVPGLGPVTAAIIVCAYSHRGRVRSEAAFAALGGVAPLPASSGNTTRHRLSRAGDRQLNRAFDIAVRSRMSYDPTTRAYATRRRTEGRSNREIRRCLKRYVCRSVFRQLQTCMP

SEQ ID NO: 313615 - protein, 403 aa, unidentified
MNAVGIDVSKGKSMVTILRPFGEIVLKPFEVKHTSSEINALISRIKTLEGESRIVMEATGRYYEPMAHWLSQSGLFVSVVNPKLIKDFSVNSLRKVKSDKADAVKIARYTLDNWHDLDQYTPMDDIRNQLKLMNRQFHFYSKEKTASKNNLIALLDQTFPGCNTFFDSPARDDGHQKWVDFSETYWHVDCVRTMSLSAFTEHYRKWCKRKGYLFQTHKPEEIYTAVQDIIPVLPKNDLTKMLVKQAVEQLNATSKVVEELRSQMNEMASLLPEYAVVMSMKGVGSSSGPQLMAEIGDVTRFTHRGALTAFAGVDPGVNASGSYTQKSVSTSKHGSPLLRKALFQVMDSLIKTSPDDDPVYAFMNKKRAEGKPYYVYMTAGANKFLRIYYGRVREYLSSLPDTK

SEQ ID NO: 313616 - protein, 341 aa, unidentified
MGESIGLDVSLKETAISVRRDGKRIWRGKCPSDPSLIAEVVRKHAPEPKRVVFETGPLSVWFYHALRAEGLPAICIDARHAKAALDMAPNKTDANDADGLAHLAEVGFYREVRVKGYDSMLVRTLVAARSRLVQITTELSNQIRGLMKTFGLVVPRSKGGTFEAEVQRLLVGQDELARIILPMLEAWRSVRTRASALGRQLLACARQSAACQQLMSIPGVGAITATSFTAAIEDPANFKTSRSVGAWLGLTTRRYQSGEVDYDGHISRRGDAHLRGLLYEAATVILTRTHADSDLRRWGLMLRERIGFKRAAVAVARKLAVIMHAMLKSGEVFNRAVSAPA

SEQ ID NO: 313617 - protein, 332 aa, unidentified
MKKSLFVIGIDVSKEKLDVYFYTTGFHFIVLNSTRGFAKLIENIMQNAGCALTGVLICFENTGKYSKQLAVFLEESKIKFHMSPALAIKRSLGLVRGKDDKIDSKRIALYAYEKRETLIPTKLPGQKIDQIKSLLTLRAKLIKHRTSYKNGLSDLKDCYQEGETKFIREVQKNLIEQISQQIENIEGEIMQIIKSDKAMKKNYLLMLSIKGVGKLTAFHFIAYTENFTAFANAKQFACYCGIAPFPYSSGKMIGKSRVHVFGNKKMKSILDLIAKSTIRYNNEFKTYYDRRVNELGKSKMSTINIIRNKIVFRIFAVVNRETPYVDLHKFAA

SEQ ID NO: 313618 - protein, 350 aa, unidentified
MTSVARHFIGVDLHKKALQFCVLDDRGNLLHEQAVKIAPDAAGEMVFNSFRPWQGTCRVAVEAVGMNRWFVNGLQARGYDVVVADPIKLNLKVLGKKTDKRDAREIARRLWLGDIDRDAKTWYPDDDVYGDRKLVRTRRQLMKHRLGLNNEIRAQLRAYNISPPATTLHSKKGIDGLLAIQMPTASLTVSLHVLAHSLAGIEAQIAVLTEQIEKRVASDERLRKLQQQLPSMGAITTLTLVCELGDVHRFRNAKAIASSGGVVPRVYQSADTAHHGRMTKRGSRSLRSVLGQWSVRLMAHDDLVSAWAAPKKQRLHKNKVRMMLARKLLVGVAVSLRRDEPFDLRRCLGR

SEQ ID NO: 313619 - protein, 403 aa, unidentified
MNMNAVGIDVSKGKSMVAILRPFGEIVSTPFEVKHTVSGIRSLIEHIQAIDGESRIVMEHTGRYYEPIVRELSQADLFVSAVNPKLIKDFGDNSLRKVKSDKADALKIARYTLDSWTELRQYSFMDEIRNQLKIMNRQFDFYMKHKTAMKNNLIGILDQTYPGANTYFDSPAREDGSQKWVDFATTYWHVDCVRKLSLNAFVDRYQKWCKRRKYNFNQSKAVEIYEASKEIVSVLPKDDLTKLIVKQAVEQLNTASQTVEQLRAMMNEAASKLPEYPIVMAMKGVGRSLGPQLMAEIGDVSRFTHKGAITAFAGVDPGVNESGSYEQKSVPASKRGSGTLRKTLFQVMDALIKTKPQDDPVYLFMDKKRSQGKPYYVYMTAGANKFLRIYYGRVKEYLSSLSK

SEQ ID NO: 313620 - protein, 343 aa, unidentified
MYYIGLDVHKKTISYCVKDAAGRVHQEGRIGSTRRELDAWIRTLPQPRTIAMEATIFTGWIYDHLLPHAAAVKVAHPLMLRAIAAAKKKNDRIDAGKIADCLRCDFLPECHMAPTAIRERRRVLRYRTLVMRQAVQMKNRIAGLLMETGVSYNKLRLHRMGYFEQLLATSEEVSDSIRPLLKLSREHIDRSIRMDAALLRSLEHDPLLTDRLRRLRTVPGVGPITALTWALEVGDTSRFRSIKQAISYCGLCSAEKSSADKVMRTPISKQRNKHIQQVLVEAARLAPRYSEELALLYERERQRGNSNRATLAVARKLVTFMLAVERRGTDFVAAEEFRRTAAA

SEQ ID NO: 313621 - protein, 349 aa, unidentified
MPDTILAIDLGKYKCVACAYRRDTAATDFRSVSTSRAEVQRLIRAADPAVVVIEACSLAGWVHDLCGELGVPCRVANTASEAWRYKHAKRKTDRDDALRLAQLEALGQLPEVVIPEKRVREWRALIAHRQALVGQRVAAQNRIRAVLVGQGLPAPRGARAWTTTGLAGIAQYARPLAECGPEDLWRGILDSALTAYRQAEELVVGAEAKLDALGKADHRVRLLNSMPGLGPRTAEAVVAHLDDPRRFKSGKQVAAYGGLVPRQYQSGEDDRRGRITKRGPAVLRKLLVQCAWAMLRYNAWARAVFERLSRGKARRKQAVVALARKVLVRCWAMLRDGAPWRSDVVPATA

SEQ ID NO: 313622 - protein, 415 aa, unidentified
MKNYAELTHFAGLDWAKDHHDVSIMDRQGQVVARFRFAHTGPGWQQWREKIREYPALGVAIETSQGAAVEQLLASGVTVYPVHPQAAKAYRQRQAPSGTKDDELDAWSLGDALRVDGAHWRALSPQDAIIEELRLLCRDEEELIGQRTALVNQLQAALHEYYPAALEAFEDWTAAYAWAFIEAFPTPQRLVQSTVHRRRVFLHTHKLWRPGTAERRLEIFARADKFCGGEAVTRAKSRLALALCRSLDALQLQLDEYRAAIEKLFAEHPDHDVFGSLPGVGVTLGPRLLSGIGADREQYSEAQGLQCVAGTAPVSFNSGQIRRAKIRWHCDRFLRHTVHLWAGCSLKSCAWAAAYYAAKRKDGMSHACALRCLAQRWLKILWKMWQTHTPYDPEFHARNQQRHGSWVLQFNPKTT

SEQ ID NO: 313623 - protein, 342 aa, unidentified
MKNLVSLELRVSVDIGCRSHNVAIGLSSGEILDEFSITHEPEGFRQFFSRIEKQERRFGCPVAVAMEGYNGYARPLDTLVRARDYRLFNINNLKLARFKEIFPGAAKTDEIDARKGLELFQICDHLPMAKDVLQEVRKTPQENEILKRLSRRRRRLVDERVRVLNNLQSDLHAVCPGLLEITGEADNLWFLNFLTSTDDLRKLVRMREATIRKIPGIGKTYASVILQWQKQAQFSHDVEWVGEMIQEDAVRVLELRDKIESLEAKMEDVALGSDIAQTLATIPGFGAICTSELAGEIGTIDRFNNEASLALYLGMANLDNSSGKQKGSKPPRQVNPSSAVTA

SEQ ID NO: 313624 - protein, 399 aa, unidentified
MVAASTDGVPLSTGPLGRRLTARARLLSMVKEVSPLIFVGVDWSEDHHDIEVLAEDGSRLATRRVGHSVAGVAELHELLASLADGPAEVKVGIETDRGLVVQALVAAGYEVFAINPRVADRYRDRHAVSGAKSDALDARVLADIVRTDRHRHRPVAGDSDLAEELKMMARGHQNLIWSRTRLVLQLRSLLLEYFPAMVTAAGGHVGTRDALAVLGAFPDPAATRRLTRARLVAVLRKAGRSRNLEPTAQRFLLALGGPHLEATPGVTAAGRANAMALLAVITAINAQIEHLEAALADRFDTHPDAEIVRSLPGIGTILGARVLGEFGDDPNRYLDARARKNYAGTSPITRASGKTHVVAARFIRNDRLGDACDRWAFAAISFSGYGDGLRLNSTVWQPV

SEQ ID NO: 313625 - protein, 356 aa, unidentified
MTKVTTNFAEQTIYVGLDVHKRSWNASLYLNDQYLRNVHQPPSTQALYKYLHSQYPGARYVCAYESGKFGYWIQRQLLEKDIECIVVNPADIPSAQKDDLQKTDPRDARGIAKALQRGLLKGIYIPCEQQEGDRSLVRQRKKIWGDLVRCKNRIKNFLDYTGIELPDKFNNSNWSRNFIQWLSNLPFEQWGHRSTLNYMIKEMELLRKELLSISNDIRKLMRSAFYKKRYYLLRTVTGIGPLTAASLLTEIWDMKRFPSFYELNSFIGLMPMEHSSGERELKGRLTIRKHRQLRSDLVECAWTAKRTDPALQLYYHQQLKKGKEPKLIIVKIARKLLSRIRYVWLTEKPYQIAIVK

SEQ ID NO: 313626 - protein, 415 aa, unidentified
MEPVLDSCAGMDVHEKKVDVCIAHGPLEKSPKFEIRTFSTMTSDLEDLKSWLKKYNVTTIGMESTGVYWKPIFNIMEGEFKIVLANAQRLKAIPRKKTDIMDCKRIAKLLRYGLLPNSFIPPREIRELRDLNRTRRKLVGMMTSEKNRLTKVLESSNIKLSSVVSKISGVSSMAMIRSLLEKDKLSKEEISQLAKGSLKKKVDLLEKALDGKLTDHHRFLIKMHMENLDHLARQIEKIDEQIERKMIPFQKESNLIQSIPGISKVSASAILAEIGTDMSQFPDEAHLSSWAGVCPGNNESAGKKKSGKTQKGNSFLKGTLAEAAWAASKVKRSTYNAFYQNIVRRRGKKRALVALAHRMLMDIYRVLKTGTPYQDTGAEEANERATKRKERSMIRLLEKAGYAVVRTCTSEIAAA

SEQ ID NO: 313627 - protein, 412 aa, unidentified
MDVIVERCAGLDVHRDSVVATVRVPGTGKSRRRRAQQTRTFGTTIAQLEQLVDWLEGFAVTLVGMEATGVYWKPVFSVLERRFECWLINAEHLHNVPGRKSDVIDSRWLCELLELGLVRPSFVPPPEIRRLRDLTRLRSTQAEERTRAIQRLEKVLQDAGIKLSSVASKTYSVSARAMLEALLGGVSDPVCLAELAKGRLRAKIPQLTEALANRFDTAHHGVLVAGLLAHVDALDQAVATLDARIAAATDAELIELLSTIPGVKRHTAEVLIAECGLDMSVFGSAQRLVSWAGICPGTNQSGRRRRRSKTRPGDSWLRTALTQAAHAAARSKNTYLASHYWQIRGRRGDAKAIGATRHDILIAYYHITRDRVPFRELGPDWLARRHSPEHRTRRLVKQLEALGHTVTLEAAA

SEQ ID NO: 313628 - protein, 338 aa, unidentified
MPLYAACDLHSSNTVLAVLDEAGAVQLRQRIPNDLELIDAALAPFRAQLHGVAVESTYNAYWLLDGLAQAGYPAQMVNTLAVPQYAGLKQADDHSDARHLANLMRLGLLPTAYIYPRAQRGLRDLLRRRMLLVQQSVRLLQSVQGYWARATGKRLSANAFRRLSRQQLADTFTDPDELFAVASLLQCWLSLQQRIHAIEGWLAKDTRQREDLAALRTIPGVGIILGLTVALESGQVERFDHVGQYTSYCRLVPADKVSNGKRKGTGNRKCGNRYLAWAWIEAANFAIRFSPPVKTWYQRNAARKPRVVALKAVAHKLARAGFHLMRDGGRFEVHRAFA

SEQ ID NO: 313629 - protein, 409 aa, unidentified
MSKLYVGIDVSSRNNVAYLMKPDGSKHSNFSVENSPRGSAELVKQIVKALTSYNLTEVTVGLESTGCYGDHLVYFLKENAELAKFNRSIHVLNPKQVKKFKDTYNDLQKNDYIDSFVIADCLRFGRINKEVYMDDARFKALQILTRQRFFAVRSLTVEKQRFLNVIFKKYSSLAQNKVFSNTFGASALALYEEFDSTDTLAYMDLHELTDFLVKKSKNRFSDPEAVAKAIQKAARSSYRLPKTVNDSVNQVLSSSICLIRALEQQIKVLDKAIAEQLELIPTTLQSIPGIGPVYSAGIIAEIGDIHRFKNQSALGKYAGLAWTQNQSGDFESKKTKLIRSGNKFLKYYLCEAALSLVRCDTEYSRFYHLKYNEVNKGQHKRALALTARKFVRLVYALLIDNKLYTPSEL

SEQ ID NO: 313630 - protein, 349 aa, unidentified
MLADQVDYVVGVDTHRDEHVLAVVVAPTGAIVVQRSVRASARGYAQALRFAEEHADGTRVWAVEGAGHYGVGLARYLSGHGEAVCEIGRGPRDERRLRGKDDSLDATRAARTALASETLSLPRAGQRREALRLLLLARRSAVDVRREALAQLRSVIVTAPDGLREQLRGLPAGRLIQRCSRLRRSSSRTPDELATILVLRSLARRIEAATAEAGELEAEILAHVRALAPQLLDEAGVGPIVAAQLIITWSHQGRVRSEAAFARLAGVAPIPASSGQTNRHRLSRGGDRQLNRALHTVILHRRQHDPATKAYIARRVSEGKSRRDATRLLKRYLARHLYRLLRHPEPLMT

SEQ ID NO: 313631 - protein, 379 aa, unidentified
MRTVCGLDVHKDSIFVCILNENGILFQDKIGVLTPDLERLVVVLHEHGATEVCMESTSIYWMPVWRILEPYFSLKLVNPYFIKQLPGKKSDVKDAEWIATCLLKDLIRGSYVPEDRIQQLRQYDRRIFDLNKDIVYKLTKLDAALQRCNIRISNYVSATDGKSYQKVVEKIAEGTTDPKILAGLIHGRIMNRVGKDVITASLTGVITQTDIDVIRQIRDEVMLAQKHRKECLDKLEELCNKWFPDQMKNLQTVPGVSLRSATSVIAELGTDMSSFEDAAHLVSWSGLKPRNDESAGKIKSRKITHGNKFLRKTLIECSWAAAKMRGCFYNTFSYHQTVVRRKNKMKVQVAIARKMLAAIWFILHDNVPYRDYTPDIVAE

SEQ ID NO: 313632 - protein, 341 aa, unidentified
MEEYIGLDVSMKETSVSIRRAGERIWRGKCASDPRTIAELIRKRAPAVKRVVFETGPLSIWFYHSLRTEGLPAICIDARHAKAALDMATNKTDANDADGLAQLAEVGFFREVRVKGFDSMLTRTLVAARTRLVRITTELSNQIRGVMKTFGLLVPAGKGSTFEKNVRSLLADQDGLASIVLPMLEAWRGIRIRAAELGRQLVRDARQSQACRILMSIPGIGAITATAFSTAIERPDNFKKSRSVGAWIGLTTRRYQSGEVDYDGHISRRGDCHLRGLLYEAAAVILTRSSTDSTLRTWGRKLRERIGFKRAAVAVARKLAVIMHTMLKSGELFNPNAGAAA

SEQ ID NO: 313633 - protein, 412 aa, unidentified
MKRFSKAGNTPVWVAVDIAKARHEVLIERADGTRSCITIANTQSGFEKLSTFLSMLSRTCEVGLEPTGDYHRPLANFLLRRGHRVQFVSSIATNRTREALYNSWDKNDPKDAQVILHLLKGGITQHFSDPLEDGTHDLQELLGTYRRIVDRKVRVYHALMTHYLPLYFPEAEPFIASSRSEWFLDVFHLAPCPADVLAFTKAAFLKKTVKGDEGHPTVRRRLVAEYYETAKQSVGIPVLPGSVAMQMFRLVLEEYIHLAKMRRGLEKEIHDHLERHADYQRLRTIPGIGPIVALTILAEGGDLRRFSHHRKFLKFCGFDLSTSQSGQRRGVPQLSKRGNARLRCAFWMAGRVAVAQRRNGFRKKFDDYVRANPKDTDLKRKAYTAVAAKMARVAYGLIKTNSTYRHFLQEAA

SEQ ID NO: 313634 - protein, 324 aa, unidentified
MRLENGREYLKQWQLEDLSKFATKLRPTDPIAVEVTGNTRLFHDAVSAHVERVVAVNPNQFKVITHSVKKTDPNDARNLALYLSKDLLPEVRMKDKTQAQIASLTQTRDTMVKLRTALKNKINNLCSAHGVNLNKESLASEKGLRAVLDMKFDVLVNLELKIIVDQIRSLNKSIAELEETISKEGTKLKGHRNLTSIKGIGGLSGSILLSIIGDINDFAEEGNLAAYFGIVPRVSNSNETEHSGSITKRGSKLGRTTLIQCALIAQRYSPYLKKYYERIKNRRGTGKAIVALARKFLGIIYRTLKNNWVFADFPNFVLAEPAKA

SEQ ID NO: 313635 - protein, 394 aa, unidentified
MKLVGIDVGKNSHHFCVMDKETGEFNVAPSSFSNNKEGFDFLINSLKPYSKKSILLGMEDTGHYHVALLKFLLSNGYTVALINPKTTDLTRKMEGGITKNDKLDTITICDVLDTPERKKQYRITKVDRFDLYEQRQLTRHHHNLKEELNVYCNRLQKSIDLVFPEFNTLFSSKYSIVYMNLLKTFGSAEAIASTDIRTIRKCFEIKGRGNRISLTPEKLKECAKNSIGISSEVETIQIKHLVSQIMLIKEQIAEIDKKIEEFSIKNNSPILSIPGISHFSGTSILAELGDIGNYSKPSQIIKFAGVAPYHYESSQYNAQHTGITKKGSKYLRKTLYQVILPVINNNPVFKKYYRLKISQGKGHRCAQGHCIRKLLRIIYHLLETGQSFDPALLR

SEQ ID NO: 313636 - protein, 407 aa, unidentified
MQEATQHDAVDVFVGVDVDVGVDVGKGQHHAVALDRNGKRLYNKALPNDEVKLRALIAELKTHRRLLFVVDQPSTIGALPVAVARAEGVLVAYLPGLAMRRIADLHAGEAKTDARDAAIIAEAARSMPHTLRSLRLADEQLAELTMLRGFDDDLAAQVTQTSNRIRGLLTQIHPALERVLGPRLDHPAVLDLLERYPSPSALAAANEKTLANRLTKLAPRLGKNWAAEIVQALNEQAVIVPGTQAAAIVMPRLAQQLAALRKQRDEIAAEVERLVLAHPFWPVLTSMPGVGVRTAARRLTEAAPKAFATAAHLAAYAGLAPVTRRSGSSIRGEHPSRRGNKVLKRALFLSAFAALRDPVSRAYYSRKIQQGKRHNQALIALARRRCDVLFAMLRDGTIYPPKSAPDA

SEQ ID NO: 313637 - protein, 371 aa, unidentified
MNSIVYVGMDVHKEQYTLCCYSYDTDKVEYKQTIPSDYKLVLKYMEQIRSRYEGEVSFVCGYEAGCLGYSLYHQLKDHAVDCKILAPSTMAITNTHHVKTDKRDAANIARCLAFHTYSEVYVPDNDDNDVKEYIRMRDDQKLYLKKVKQQILAFVLRQGKRFEGGKTYWTIAYLKWLKTLELSDLQREALDEYLLTYEYLTEKISRFDERIEELASVERYEEKVKHMSCLLGIKTHTALSMIVEVGDFERFEKAPKFASFLGLVPSEDSSDTRVNRYSITKAGNSHLRRLLVEAAQSYTRGNVGHKSVALKQRQKGNPPEVIAYADKANERLRRRFYKMTLNKGVNRNVAATAIARELACFIWGMMTEHVS

SEQ ID NO: 313638 - protein, 344 aa, unidentified
MKKIVKQVVGIDVAQKELVVCLGRMYDDWTPELYANKTFANTPKGAAALTVWVKKLTEESNPVRYVMEATGVYHELLAYFLEEKGHEVSIVLPNKISNYFRTLEIKTITDKTASEAIARFGLERKLDSWKRPTEIFRKLKQITRERDQLVGERTLVKNQLHAEETEAYPGKESIARMKARIKLLDKQVMQIKEEIDIFLKQDKAINKSVKLITSIPGIGILTAVTALAETNGFELIRNKRQLTSYAGLDVKEKLSGTSVKGKPRISKRGNRHLRKAMHMPALAAIGNDERFKALFTRLVSRHGIKMKAVVAVQRKLLEMIYTIYKTNTSYDKNYLKEEVIAQAA

SEQ ID NO: 313639 - protein, 341 aa, unidentified
MDKELYFGVDVSKKTLDLAYYDGETIDWKNAHIKVSNDDAGFKKIGSWVAKVGKDFDTFLFCMEYTGLYNQNFRLWLESKGYIYGMVEPRKMHHFEPDLDDDQRSLDRIKTDELDAFRIAIYCEQNHKKILRNPSKLPSPVYFKLKRLLAERKQNTKQSTLYKQQLHDICAYDTDLSVERKKLLLKNMKENQKAIDREIDSYMNEDASISKNYDLLTSIPGIGRIIALETIVLTENFTAISNPRKYACYIGIAPFKKESGTSVRKKTGVSKKGFSEAKADLSIAVLSTIRNNPSIRDYWIRKRKEKCGGIVLNAVKFKLVLRMFAVIKRGTPYVETDAYKN

SEQ ID NO: 313640 - protein, 341 aa, unidentified
MHKTKYFIGFDISADDFSASCITSPDNLVFSTQKFSNSIDGSNEFLALLSKHDIKQSEAIICMEATGVYSENISYFLASKGFTISIEAPHKIKNKTKDSPRKNDFIDALSIAEYAYRYFDKLPIWKPSNEIIEQIQVLLTTREHLSVQVIANINALKTLKHKYYQTPLANQIYEQTISKLKEHIKQIDQEIKTLIDKDDSFKNNISLAKSVPGVGLLLAANLLVLTKGFTEQLDYKHIASYSGICPYEQISGTSLHKPPRSRMCGPAKIRKLLYLAALSVRTHNQNFKKYFLRKVAEGKNKRLVLNNIENKLLKIICAVINSGTAYTENFKSINPELLKTA

SEQ ID NO: 313641 - protein, 321 aa, unidentified
MSPHLPVAYGIDIGKQFLDLARSDTAETLRVANTPAGHLRILELVGERPEALIVLEPTSRYHRQLVATLTAAGRQPAAINPYQARHYAKGMRKRLKSDAADARVLADYGARVQPTPRPLPSETEDLVADLITRREDLVAAKAAEQTRLDVASRDWERASIERHIAFLAGEIRSLDQMLKATIRQDQNASKRNAILISAPGISHTTASVLIGLLPELGTLTRKTAAALVGVAPYDRQSGASDRSRHISGGRSRVRKALYMMAITAVRKDPTIKARFLKLRATKPFKVALIAVVRQMLGVLNAMLRDNITWHETKIGRGEFLP

SEQ ID NO: 313642 - protein, 402 aa, unidentified
MNAVGIDVSKGKSMVAIMRPFGEIVSAPFEIKHTASDIHSLVELINSVEGESRIVMEHTGRYYEVLAHQLLEANLFVSAINPKLIKDFDNDSLRKVKSDKADAVKIARYALDKWQNLKQYNVMDELRNQLKTMNRQFGFYIKHKTAMKNNLIGILDQTYPGVNTYFDSPARSDGSQKWVDFASTYWHVDCVRKMSLNAFIDHYQNWCKRKKYNFSQSKAEEIYGKAKELVPVLPKDAITKLIIKQAVDQLNSASTTVESLRTLMNETASKLPEYPVVMAMKGVGTSLGPQLIAEIGDVSRFTHKSAITAFAGVDPGVNESGSYEQKSVPTSKRGSSDLRKTLFQVMDVLIKTHPQDDPVYQFLDKKRAQGKPYYVYMTAGANKFLRIYYGRVKEYLSSLPES

SEQ ID NO: 313643 - protein, 340 aa, unidentified
MSEITTIGLDLAKHVFQVHGIDAQGTTVLRKRLRRGQVLAFFSRIPRCVVGLEACATAHYWARELGALGHEVRLMPAQYVKAYIKRNKHDAADAEAICEAVQRPTMRFVPVKTAEQQASQLLHRGREQLVRQRTMLVNALRAHLAEFGIVAAQGLRNVGELIAIVRDGEDTRLPDVARQVLQVLACQLEQIEAAVTALERQLLAWHKTNPVSQRLASIPGIGPIIATAIATTVTDPNVFRSGREFAAWLGLVPRQNSTGGKTRLGGITKRGNRYLRRLLINGASANLLRSRATKADPWVIGLRRRRPPLVVAVALANKTARIAWAVMLREKEYQPRAMAA

SEQ ID NO: 313644 - protein, 337 aa, unidentified
MGNITMGLDVGDRFSQLCVVDQDGVVIQEDRIPTTRVALRKRLAGPPARVVLEAGTHAGWMSRELTALGHEVLVANSRKLRWLYHNEHKTDRVDATYLARVGRWDPTLLAPIRVRSAGADGALRLVRARASLVRARTRLINHVRGAVKSVGGQLPPCDATSFARRVAAHLPAELHAALEPLLAQIAGLTQTIARYDRLVEHLAAQVYPETARLRQVAGVGALTALAFVLTVDDPRRFGDGRAVGAYFGLCPRRADSGAHRPQLGITKCGDGLVRQLLVQAAHYILGPFGPDCRLRRWGLELARRGGKNAKKRAIIAVARKLAALLYSLWVHDTRYAP

SEQ ID NO: 313645 - protein, 339 aa, unidentified
MKLIRVGVDLAKDVFQLHGVDRSEKTVWRRRLRRDDWIKVLRERVEPDCEIGMEACAGAHHWARTLQSLGYRVKLIAPQFVKPYVKSNKHDAADAEAICEAMSRPGMRFVPVKSVEQQDTQAMHRVRSELLEQRTAKANQVRSLAAEYGLVAPRELVQLRLAVPRWLEDQENGLSAGFRRMLEGLRTDLALLDERMKELDREIEQLAQRDTTAKRLMELRGVGPLTATALVAAVGDARQFANGRQMSAALGLTPRQHSSGGRERLLGISKRGDAYLRTLLIHGARSVIRTAANKDDRLSQWVTRLAARSHINVAAAALANKTTRMAWAMLSRGTNYQPA

SEQ ID NO: 313646 - protein, 397 aa, unidentified
MIAVGIDISKAKSTVAVIDSDGTVLASPFTMAHTQPEMEAFVSYLKGLGEPTTILMEYTGHYHYPVLKKLQDEGFPVCIVNPYQMKKYGDVEIHKAKTDKKDALRIAAYALEKSYKLVPYSSMEQKYEDLKFLSRQYNQRISYVAKLKVQLIALLDQTMPGITRILPLNSRNPEKCALLLFIKRFKSFDEIQRIGKARFLASYDVLAKKASERSASSKGLSIYELAVDSITTRGENPYIWLSQNQCVDLLSATQNAADEIISQMRNIAETIPEYKVLRAMHGVGDRLGPIILAEIGDVHRFHSGKALNSYAGNDAPPYQSGQFESRNRHISKRGSSALRKACYEVMQALKLIKPQDDPVYLFMLKKEQEGKPFNVAKMAGVNKFLRIYYARAMELYK

SEQ ID NO: 313647 - protein, 429 aa, unidentified
MNSTRNKKIEQVKETTMIVGIDIGSEKHYFRAFNWRGIELTRKPVAFSNSMEGFNSFYNTIVELMQKSELEEALVGIEPTGHYWFDLGQFMGEKNIKFVMVNPHHVHKSKELDDNSPSKNDRKDPRVIAGLVRDGRYFYSYMPTGVYAELRNASNRRFVLVEEQTRAKNRLQKWIAVYFPEYKGIYTRIDAKGGLLVLKQAPTPEEIVRLGVEGIIKIWKDAKLRGNGHKKAMLILAAAMRSIGLKAGLTEARMEIQDLIEDYELQTKRLERVNDLIKELCQQIRYADKLLEIKGIGITTIAGFIAEVGDITRFDSAKELQKLAGLELVADSSGKHNGKTKISKRGRKRLRYLLFEAAISVVGKNEEFKEIHRYYTTREKNPLKKMQSLIVVACKLIRVFHAILTKGIRYDASKMLKDIRHPGEQLKAA

SEQ ID NO: 313648 - protein, 380 aa, unidentified
MDVHSTNFTLCSFEPGYGFEADKIFGQTQIKEDIFNSTVKYINKLKSMRPDVDVVCGYEAGCLGYNLHRKLKAKEIESVILAPTTMAVSRNCSKKKNDYRDAITIAKCLASSAYKAVYIPDDKDEDVRDFIRMRDDHKTALKQIKQQLNAFCLRHGHHYDKTKWTGLHLNWLRKLELSKLQRETVEEYLATYETLTSKITALDIRIEDIASEERYAEKVNKLKCIKGIKTHTALSFVCEIGDFNRFKSADKFAGFIGLVPGECSSGNTERMLGITKAGNRHLRRLVVEISNTYRRGTVGRKSAALKERQKDMPKDVVAYADKAINRCQRKYQRMMFKGKNSNQAVAAVARELCCFIWGMMTGHHSRTAQAEASVYRSELD

SEQ ID NO: 313649 - protein, 366 aa, unidentified
MKKTSTVRVNGNVIFKGHKLTIGVDLGDRWSCYCVLDEAGIIILEQKVATTPEAMKQAFAKIPRSLIALETGTHSPWVSRLLTELGYKVIVAHAQKVQLITKSNRKDDRHDARTLARLARIDPELLGPVRHRSAQAQIHLTVIRARAELVSARTALVNAARGLVKSYGQRLPKCGTQQVSRELGAGLNAELREVLEPLLKEIESLNERIQEYHERMEKIAKESYPHVELLKQVKGVGTQIALTYVLTLEDPHRFPKSREVGCFLGLRPGRRDSGESQPQMRISKEGDRYLRTLLVQGAHYILGPFGTDSDLRRWGLKLAARGGKSAKKRAVVAVARKLAVLLHRLWVSGEVYEPLRNSQKAMRAVA

SEQ ID NO: 313650 - protein, 352 aa, unidentified
MAKVRSWAGLDVHARSVLAVTLDADSGELRSARLPGESAKVVELLAKLPGPTRVAYEAGPTGYGLARALVAAGMGCVVAAPGKIERPAQDKIKTDQRDAERVPRLSMIDALHAVRVPTVEEEALRDLVRAREDVRGDLMRARQRLSKLLLRHDIVYEDTSSTWTQKHRAWLRAQELGGGAQATLLDHLGAIDTLELRRGSLETTIAEFVPGSPWAQTIARLRCLRGIDTLSAVGLAAEIGDFERFDRPGKLMSYLGLVPSEASSGQTRRQGAITKTGSSHARRLLVEAAWHYRKTPARGHLERWARWKYKRLARSPKRGRAWLQGVRTRNPELFAHWRYCGAAPSSQTARAV

SEQ ID NO: 313651 - protein, 360 aa, unidentified
MRTEQSNALDFKGQNIYVGIDVHLKSWSVAVLSEHSTLKKFSQSPVPEALHKFLTTNYPGANYYSVYEAGFSGFWIHESFRRLGINNIVVNPADVPTMLKEKLRKTDAVDCNKLARGLRSGDLRGIYVPEPQKLEIRSLIRLRNSIVRDSTREKNRIKSLLRFHGIQIPEEFASTSTHWSKHFVQWLRALNLSTEYGRKALDLHIEQFINLRGILLQETRVIRKLSRSETFREPIRLIMSVPGIGITTGISFLTEIDDISRFQNADQLASYVGLIPMCHSSGEKDGTGEITIRKHAILRCNIIEAAWIAIRKDPAMTMAYEEYRKRMKASKAIVKIARKLVNRIFFVLKRRREYVPCIVK

SEQ ID NO: 313652 - protein, 415 aa, unidentified
MKVHRNCCGLDVHKQTIAACLIREDGNGHTWKEKRLFGTMTQDLRELAQWLREAEVGAVAMEATGVYWVPAWNVLERAGLHLLLINPEHYKAVRGKKTDLKDGERIAELLQDGRLEGSYVPPSELRVLRDLTRYRVKLVEHQSSVACRIQKLLEQCNIKLGSVASNVLGVSGTAMLHALASGETNAEHLANLAKKQLRRKLPALRLALDGCLMPHHRFLLREMLDELSHIETQLARLEAEIEVQMRPFQKALQAWISIPGVKHRVAWTLVAEIGPDVQPFPSPAHIASWVGVCPGNNESAGKRKSGKTRKGNRWARRALCEAAWVAAKAKKSYLAAQFRRFAATRGSKRAIIAVAHTILTIGYHMLQRGTVYQDLGANYFDQRHILRTTKRLVKRLEALGHRVILQSPVPDPQTA

SEQ ID NO: 313653 - protein, 352 aa, unidentified
MSKQVSTSPPKLFIGLDIHKKRWKFHFTTDLVLGSGHSFPPKSALVFNYVMKNYPGYEVSIAYEVGCCGYKPARNFISFGWDTFVVNPADIPRPSKNRFMKTDKIDAKNIARQLRSGNLKKITIPDLHRESLRALTRQRTALVRDYSRIKTRIKSLLLYLQIDIPEAMDSPKWPLKFLAWLDALDLGYTNSNQTLKSMLSHYRFIDLELKSLSNQIRLYCKQNHKKDYTLLRSIPGIAGLTASYILAEVGDIRRFTSFKKFASYVGFIPSMQQSGEVFYTGGATPRANRHVRNMIIEAAWIAVRTDPVMQDYYRSHAGKNSKAVIFKVGRKLLSKVMAVIKTEIPYSKGVLN

SEQ ID NO: 313654 - protein, 399 aa, unidentified
MKIPCVAVDVSKGKSFFQGFIDLDKPINKATPINHDLEGFELMTKIGDKLKQEYNDVVYIFEATGIYHKNLQSYLDNRKEKYIILNPLEAAKVRKSHLRSTKTDKRDCLSIAKAYFLRDYPIHQKQDDIYQELQSMNRHYEYLVKKLRLMKTHFRTLLDVVFPMFDKLFENIYTSIPITVLKLFSHPIELKKRKLESITKHLVHNTNHRDSYCRKEAIRLKQYATTVVSGVNYDNYLVSLLKSEVIQIENQLKELDLCINKMKTLAENIPLYYQLQTIPGIGEVLAVRLIAEMGDLSRFTSKWKLVAYAGLDPTVYQSGQMTGEHLRITKKGNKRLRTLVYLAVSSNIKSKKPNSIKEYYKKKRQQANPLAHKAALVACANKLLRIIYSMSKSGTNFHY

SEQ ID NO: 313655 - protein, 371 aa, unidentified
MEQPTRFVGMDVHKDTIVVAVTTTGEVGKATLYGTIPNTTSALEKLVKRLRKASTGLLKFCYEAGPCGYGVYRTLTRLGEDCLVAAPSMIPRRSGDRQKNDKRDAADLAVLHRGGLLTSVWVPDAAHEAMRDLVRARLAAVRAVRAARQQLSAFLLRHERLYTAGRKPRTRTHRHWLADQRFERPAQQIVLEECIEGVRWAEQHRDRMDAHLRTELPSWSLFSLVQRLCALRGFDVIAAAGAVAAMGDPTRFINARDFMAYLGLLPSEHSSGQRRRLGAITKTGDVRARTVLIEAAWSYRFPARIARGKLPAIEAAPEAVRQIAWKAQTRLCQRYRKMIAKGKPKPLAVTAVARELAGFVWAVAQLPGDVV

SEQ ID NO: 313656 - protein, 420 aa, unidentified
MSSTAYAGVDWASEKHDVLIADEAGEEILAATFAHDEAGVRGLCRALVRHEVTLVAIERPDGLLVERLLDAGLRILALHPKQVAAARDRFRASGGKSDRFDAFVLCELARTDHHRFRVLEPDSDQTKALRALTRAREDLVGSRTALVNQLRAELARFWPGPLGLFTSLHSQISLAFLERYPSPTDAHGLGAARLHAFLVRQHYTGRQTPAQLLAKLRRAPVARVGELELGTRRELVRSMVTIIKTLNEQIRQLERQIAAAIREHPDGAIFTSLFKQPKSVICAAQLLAEMGDCRARYPTRDTLAADAGQAAVAIESGKRKTACFRWACNKRLRQAFVTLADTSRHRNPWAQDLYAAAIGRGHDHPRAIRTLGRGWWRIVWRCWQDRVPYDPARHRALQRHVTVTIPTASGPVPDLAATSG

SEQ ID NO: 313657 - protein, 410 aa, unidentified
MPKIVYPTCCGIDVHKSFVVACIATTDEKLVTTYGRKRFSTFTGDLRRLADWLAQNNCRDVCMESTGKYWIPVYNILEPNCHVVLAHPKYVKAIKGKKTDKRDAKWIADIFKHDLINGSFIPPADIRQLRDLVRYHIKLTSYTTGEKNRAQNCLTVSNIKLDDVFSNVFGKAASAITERLLENNEPFDVRPYLTKGLKASPEEIQAAVDGAMCANQAEKLRIIRSHMDSLERCKSNLESEILTIAEKFLPQVNLVSTVPGIQTFAAVAVIGEIGTDMSVFETSRHLCSWAGLAPQNDNSAGKKKTTRISRAGVYIKPLLVQCALAAIKSNKHPEVRNRYQAIKKRRGHKKAIIAIARMLLTAIYNILKKSEPYNAELYRQADKPPIQREVTVEQAIFILQRQGYLVTASD

SEQ ID NO: 313658 - protein, 384 aa, unidentified
MHQATTLPERTCSRGDCATLLVSLELSRSTWVATALAPGSGKMSKYTLVGGDGHKLLDLLARLKSRAEQRIAAPVKVVAIHEVGLDGFWIHRLLEANGVESHVVDPASIAVPRRHRRAKTDAIDGETLLRTLMAWQRGEPRVCAMTVPPSPSEEDRRRISRERATLLQERVRHTNRIRGLLFGQGITNYNPLHKNRRENLEALRTGDGRSVPAHLKSQILREIDRLELVLRQIGEVETERDQMLQLAQPSSPAALLMRLKGIGAEFATVLYLEGLFRQFENRRQLAAYAGLAPSPWKSGSIDQEQGISKAGNPRLRTTMVELAWMWVRYQPASALSCWFRQRVGSERGRTRRISIVALARKLLIALSRYVSHGEIPAGVVMKAG

SEQ ID NO: 313659 - protein, 347 aa, unidentified
MRFYTQEHPHYCGIDLHARSMYLCILNHAGAIVLHRNMKADPDSFLQAIAPFRENIVVAVECIFTWYWLADLCAREKIAFVLGHALYMKAIHGGKAKNDKIDAHKIAVLLRGGMIPTAYVYPAEMRATRDLLRRRMHMMRQRAELLAHIQITNHQYNLPDIGKKIAYRSNREGVAERFADPSVQSNVTFDLKRIGFYDDLLNQIELEILRHAKKHDANTFHLLDSVPGVGKILGLVLLYEIHDISRFPSVQDFASYCRLVKSKKESAGKVYGSSGKKIGNAHLKWAFSEAGVGFLRNNPQGQAYLARLEKKHGKAKALTALAHKLARAVYHMLRRKEAFDMKRFLNR

SEQ ID NO: 313660 - protein, 393 aa, unidentified
MFLGVAGNGEALPATPSGDFAGVWLSVMRAKPVKHWSGELVGEHMVNAQRTSSSNRVTRTVADVMNVNSQGREAVTAPRLNAGIDVSKDWLDVAFESRSERFSNDAAGMESLTALLRQENIDLVVLEATGGYEAAGAAALQAAGIAVAVVNPRQARDFAKSMGVLAKTDKVDAKVLRAFADVIARHDKRDQFLREVPDEQRLHLAALVTRRRQLLDIRTAELQRMAMAHKAARKSLNAVILFLDKQLSEIDHDLEQHIREHFRDLSKLLSSAKGIGPVTANTLAAALPELGQLDRRAIASLVGVAPLACDSGHRRGSRHIWGGRGEVRHALYMATLSAARYNPAIRAFYERLLAKGKPFKVAMVACMRKLLTILNAMVRDGTPWNAQLHVKNP

SEQ ID NO: 313661 - protein, 346 aa, unidentified
MNAITIGVDLAKSVFQVHGEDAKGQIVFQKKLRRGQVEAFFAKHPRCVVAMEACGSAHHWGRTVAALGHEVRLIPAAYVKPFVRRNKTDARDAAAICAATGRPDMRTVALKSVAQQAMRSVERGRELLVKQQTQLTNCVRGLLTELGIVAAQGRRGFAELRALVETGDARVPELLAATLRELMRQLDSLAKGIAELEARIVATAKQDPAMRRLCTIPGVGVLTAHAIVAAIGDGRRFDTARDFAAWAGLTPRESSSGGKTTKLGITRQGERRLRSLFALGASTVMRNARASEARATPWQRGILARRPVKVAVLAQAAKTARIAWAVLVSGEAYRRPAEPQAQAVAA

SEQ ID NO: 313662 - protein, 399 aa, unidentified
MLDDGSQPVKLFNVDNSQLGADVLVERIYSIAKEHCVSDILIGTEATSMYDWHLLEYLAESKLALEFSLKLYRFNAKWIKNFKKSLAPRGKTDPIDSFAIAERLRIGRLPKEYVPDTKYQPLRKLTRFRFHLMQQIAREKDFFLANLFLKASAYSRVAPFGSTFSATSLSVINDFFSVDELAAMPIEELTEFILEKGKAHFSKPSEIVDNLKRVARESYRLKPELAPTVNLILASTFNNIRCYKEQVKLVDSAIAENLKAFKHTLDSIPGIGPVYAAGILAEISDVHRFPNDSALAQFSGLTWPKHQSGKFQAEETRMSHTGNQYLRYYLVEAANSVKRCDATYKAFYEKKYAEATKHHHKRALVLTARKLVRLVWTLLTRQVLYQPGYCSFEDLSKIG

SEQ ID NO: 313663 - protein, 323 aa, unidentified
MKKFVGIDISKETFDIYFEQEDKGCHVKLQQTEEDYKVLLHLISKDAICIMEATGNYHLNLAHYLHQAGIKVIAENPLKIKRFSQMSLQRTKTDKADARLIYEYGRVILSSTEPHFWQPDKTEIGHLKQYDTVRSQLIKQRTALSNSEEALNALTHLNDEVTQVLNDMVTAVDKAIKQLDKGMLKLVKEHHAETFDLVISVPGVGVKTATMMICLTDGFKKFSHDQVKQFISYIGMSPRTFESGTSVKGRAHISKVGNSRMRSMLYMCSWTAKRKNHQCAALYERLSGKGKPEKVIKVAIAHKLIRQIFGVIKSGEPFSKEYA

SEQ ID NO: 313664 - protein, 337 aa, unidentified
MKKNQEIRLFSESVGIDVSKLTIDVFLYNKKSHRQFGNTAKGFILMQKWIKSEVNDFNDLIYCFEHTGWYCILLSHFLHEESLFYCCINPLELKRSMGFKRGKTDKTDSYEIARFAWLRKEELNASVPMPLKLIELQRLMSIREQFVKQSTALKNLEKGLLVTIEKLTNDIGLKMIRQSILQLEQQVTKVEKAMEELIKLEPEMTTNYKLSKSVKGVGKILAIQMLLHTHNFTRFNEWRQFSAYCGLVPYPFQSGTSINGRKKIHSISDVKMKSLLSMSAISAIQHDSELKMYYHKRVEEGKPQMVALNIIRNKIVSRIFATVKRGTPYVELNKFAS

SEQ ID NO: 313665 - protein, 417 aa, unidentified
MNSPPETTVIDRYIGVDIHKYYVMVGGQNRHQEWTLRPRQIQVSRFRDWAEKNFRKSDAVVIEATGSVWDIYDIIAPHVGEILVANARSIRQIAEAKVKTDKKDIERMLTQLISGTVPEVWVPPVPVRELRSLISFRWRLTKQITMSKNRLHSVVQRFNLDPPEGGLLTEKNRGWWEEQEFSDLTGFEVEHDLEIVETLEAQKEALDQKLAELSNSEPWASDMVYLMQIPGMGLILSMVVLSAIGDISRFSHAKKLVGYAGLSAGVHISGETYRSKPITKEGRKELRWAMVEAAWRAKESDPYWKAQFKRLEKRMPKNKAIVAIARRMLVSIWHILTKRETYLHFDEEDIAYKMLIWAWAMDKRSRKGMTPQQFAKYGLLRLGIGQDMQRIVRGGAPRRIAPTEEILALKPELAPPR

SEQ ID NO: 313666 - protein, 489 aa, unidentified
MNDKRRLVGIDLGIASAHTVRVLDGEGNTVAKRKAWPTVESLTDVENAALAGCGAGTRLEVIVEPTGPAWMPIAVFFSARGHVVHRVSSAKAHDLRRFLSRHTKTNGIDADTLARLPLFDPAGLQPLVLPGVERAALDRRVRATDRLTQAGAEHKRRIKDLVRQVLPMTPLTGDLGVADLAVLERFADPNTLVRLGLKRLTALIAKSSKGHLGVERARQWLDAAESSLELYAGHPAVAFVDLAAEVATEVRLLRAVQTELAAHATERERCYRWVDPTGLARSLPGVADIGGPALVAAIGDPARFKRAKQFRSFTGLVPKASETGDTDRKGQPMSKAGSSLLRTTLVRAADNARKTEPQLARIYHVQMVERGKDHLGALCVVAAHLAERFWAVMHRAMPYVICDTDGRPVEPDEAIAIIAEHWTVPAEARARRRSKKVGKAPQNVLAGQSKPHAPSAGTRGDLPQQASSPPRNGPVKHHRPDAGADDAVA

SEQ ID NO: 313667 - protein, 369 aa, unidentified
MNHTTSIGLDVHARSIAAAALDPLTGEVVTKTFAYSPGEVASWALGFDSPKAVYESGVTGFHLCRELNALGLECAVGASSKMQRPPADVKRKNDLSDAQFLARLLATHNVTEVFVPDAETEAARDLVRAHADARADLTRARQRLNLFLMRHGHVFCEKGPTGAPVGSWTKAHWAWIRQISFPDEADEEALAFYIAQVRHMEGQKRELEKFIRAHAREPRWRGRVDALRCLKGIEEITAFALVAEAGVFSRFDSARAFSTWAGLVPSEHSSGPRRRTGGITKTGNSNVRRLLVEASWHYARATAARKPAPSPDVPLRIENHAAKAVKRLVARRREMSARGKRPSVANCATARELACWCWAIGRMAEGADA

SEQ ID NO: 313668 - protein, 340 aa, unidentified
MKKQTGSFLGIDVSKLWFDISLMQVLNFQKQQMITERFNNTINGLALLKKWLKVQKVTFDNDTLLVIENTGIYHRLLWKFFSENNIPIHIGNAAHIKKSFGIARGKNDKIDSQRLCSYAYKNEDELKATPALNPVFISLKDLITSRTRLKTQLGANKVYLKELKNINDKATQKMMENIYKMAINGLQKSITEIEKQITFVIKSDSSINANYTFLLSVPAIGPVTATYILCCTNNFASKITGKQLSCYAGVVPFSDRSGTSLKGRNKVHKMANKELKSLLHMCALSSLKNHKAFKEYYDRKITEGKHPNSVLNAICNKILLRAVAVVNNQKSYVENYKKAA

SEQ ID NO: 313669 - protein, 340 aa, unidentified
METTIIGLDLAKNVFQLHAEDASGKVLWKQRLRREALEPFLRKQPPALIGMEACGSAHHWARVLRALGHEVRLMHAKYVKAYRKRGKSDVRDAEAICEAVRRPNMRLVPIKSVEQQIDRSLERSRELLVKQRTQLMNATRSLLAELGIVAGVGLRGFKTLADKIDAGDATIPKLLLTAVKPLLEQWRGLQASIEALEARLVKRAKSDERMCRLMKIPGVGPLTAHALVTAIGEPRRFSTGRDFAAWVGLTPLTDSSAEKTRIGHISRQGDHSLRRLMVLGAANMARHAKARPSEARAWLLGVMARRPVKVAMIAQAAKTARIAWARLCSGENYRGSTAAA

SEQ ID NO: 313670 - protein, 429 aa, unidentified
MNCTQNKKIEQVKETTMIVGIDVGSEKHYFRAFNWRGIELTRKPVAFSNSMEGFNSFYNTIVELMQKSELEEALVGIEPTGHYWFALGQFMGEKDIKFVMVNPHHVHKTKELDDNSPSKNDRKDPRVIAGLVRDGRYFYSYMPTGAYAELRNASNRRFVLVEEQTRAKNRLQKWIAVYFPEYKGIYTHIDAKGGMLVLKKAPTPEEIVRLGVEGIIKIWKDAKLRGNGHKKAMLILNAAMKSIGLKAGLTEARMDIQDLIEDYELQTKRLERVNDLIKGLCQQVRYADKLLEIKGIGITTVAGFIAEVGDITRFDSTKELQKLAGLELVADSSGKHNGKTKISKRGRKRLRYLLFEAAISVVGKNEEFKEIHRYYTTREKNPLKKMQSLIVVACKLIRVFHAILTKGIRYDASKMLKDIRHPGEQLKAA

SEQ ID NO: 313671 - protein, 335 aa, unidentified
MQIYGIDLAKEKFDVSFFDLTSKKVSNQPSHKVVKNNFKSIGRFLETLPSDAVLVAEHTGVYGDTLLKCCMDSNVKIAFVGGYVIHRYRATPDRAKTDVLDCALLRDFGERYPDKLKYKTFPEEALYELRQLARHREMLVEQRKQLITADKSEDCRPIRSLAVKRSMDRIKEMLDTEIAETEKEMLKVINGHESIRHNYELVKSVDGVGLITAVELLVKTENFTKITTARQYAAYAGTAPYEKSSGKMDKGAHISKIGNRRSKTLLYICAESARLHNKEIKLYYERRTLIDKKPRHYVLNAIANKLLRIIFTLVEKGEYYDANFIRQDPRVVKYN

SEQ ID NO: 313672 - protein, 331 aa, unidentified
MNTNVHLQGREPVAAARPCAGIDVSKAHLDAAWGDRLERVANDAEGWDALVAKFKADAIDVVLLEASGGYENGVACALQAAGLAVVVMNPRQARDFAKAMGQLAKTDRVDAHMLRQFAEVIARHPERARYVRALPDAQRTHLAALVMRRRQLTDMRTAESNRLAQAHQAARKSLQAILKALDKQLGTVDGDIDQHVRRHFKEVAAWLDTIKGVGNVTLATMLGLLGELGQLRHRSIAKLVGVAPLSDDSGKRKGKRSIWGGRSEVRAVLYMATQSAIQHNPVIRAFHQRLIAKGKPKKVAIVACMRKLLTIMNAIVRDQTPWDDSKHLKLA

SEQ ID NO: 313673 - protein, 413 aa, unidentified
MDAIVERCAGLDVHLDTVVACVLYGKLDIKPKKEVKTFSTTTKGLLELLDFINQKECTHVAMESTGIYWKPVWNILESGAFELIVANAKKIKNVPGRKTDVKDAEWIASLLRCGLIEKSFVPPERIRDLRDLTRLRKELLGEVNRNKNRIHKVLQDANIKISSVLSDVFGETGKSILNQIIGNQCITEEFIYSLYEGRGKSKLKSTPMEMYEALNGKIRGHHVILLGMHNSNIVFLEKQINELEKEIDILLQKERDSLELLETIPGISKISASSIIAEIGTSMDVFKTEKHISSWAGLCPKNNESAGKKKRSGIKSGNNWLRSMLCECAWSATKKKDSRFKNKYWSMVPRMGRKKALIAIANMMLRLIYHLLKTKSTYKELEIQYFIDKDKRREDRIIKELKSKGYLVEKDSL

SEQ ID NO: 313674 - protein, 349 aa, unidentified
MDADMNVVYERCCGIDVHKDEIECYLFIGRNKSASKKYGTLTKDLQEMAEWLKSEKCEMVAMESTGSYWKPLYNVFEMEGLAAMVVNAQHMKTIPGRKTDKNDARWIAKLLRHGLLKASFIPDREQREYRELTRYRNSRIEERAREKNRLQKMLEGANIKLSSHVSKITGLSAVRLLELVMGDDDLTVGKIEELRHGRCKSSAEEFLDALTGVITPLQRELFAQVLKTIREQTVQIERIEALIQKHTTAAYDEAAKALEAIPGIGRISAEQIIAEIGTDMTRFPTAGHLCAWAGIAPGNNESAGKRKKGKMRAGNKTLKKTLIHSAGNAKNNKNTFFHAQFQRLGIAQK

SEQ ID NO: 313675 - protein, 394 aa, unidentified
MRWIGLDCHATSITVAMLDEGSQKARHRRFDNTEAAWTAFCRDEVDATTHLVLESSGGAWPIYDRLSSAGAAEILVAHPLRVKAIAAARVKSDRVDARTLAELGRAGLIPLVWVPSRQERTLRTLVRRRVSVARVATAQKNQVCAALRRQGIRAAKPRLFTGEGQRFLAQLALPQGEDAIVAGAQDLLQRCDVQQTALEAEIAAIVRAGDPGFRADVERLMSVPGVDLLTAVATRARLGDVRRFRNGRFAAAYVGLTPRVRQSGATQRTGAITKQGDRVLRALLCQAAWAAVRSRDRFRWRFEHLCARKGPKIAIVAIARRLLMLLFTLLRTQTPYHAARPSNVRQKEKRLARLPRGYWDAIRQTRPHDMGRRTRSAEPPSHLLHDHPVLAMQA

SEQ ID NO: 313676 - protein, 449 aa, unidentified
MSQTAMEIPDEEHERVIERVCAIDVSKSSGTVCTRVPSQGGSGRRVSRVWDVTATTITVIELAAQLVAAGIEKVTVESTSDYWRIWFYLLEAAGLDVQLVNARDVKNVPGRPKTDKLDAIWLAKLTEKGLLRPSFVPPAPIRMLRDYTRLRIDLTHERTRHWQRLEKLLEDALIKVSSVASTLTTLSVRDMLEALIAGERDPRVLAGLARGRMRSKNTELVAALNGRFDDHHGELARMLLDQIDALATHIDTLTTRIEDLITALPEAAAPDPGDNPDGGHPAADGGLSVLQRLAEIPGFSDRAAQVIVAELGLDMTRFATAGHLASWAKPTPRTIQSGATLRNGKTGKGNPYLKGVLGEVAAAAAKTDTFLGDRYRRLVKRRGKLKALVAVARSILTIVWHLLADPTARFHDLGADYHTRNLDHAKKLRNHVRQLQALGYTVTLEPTAA

SEQ ID NO: 313677 - protein, 348 aa, unidentified
MTIAMIGLDTAKTVFQVHGVDKSGRAVLRRKLHRSELVRFFEQQPQCTVFLEACGAGHYWGRLLSGFGYEVKLIAPEAVRPFVKRGGKNDAADAAALCVAGTRPETRFVPIKSVEQQAVLALHAARSLLVKQATMLANALRGLAAEFGLTVPKGLHKLEELMTLVSAEESIPAAGRQAMAELYAQGQAVAERLATLEAKIASHARQDATARRLATIPGIGPITASLIAATVGDNISAFKSTRHFAAGLGLVPRQHSTGGKTRLGLITKAGNTESRRLLVLGATSMVWRAAHWNSKAGLWVRGVLTRRPVRLVTVALANKMARIAWALMTRKQVYQAQGHAQATAEAAA

SEQ ID NO: 313678 - protein, 340 aa, unidentified
MSIVCGFDVHREQITFDLVDQVSGEVRSGRITPVTRAALSAWLAALESARLRVALEATTGWRFVVEELEQAGAQAVLAEPAETRALRGPKRRAKTDRADARHLRELLERETVPRSWVPPAHLQELRTLVRLRHSLAAERRVWLQRVQAQLFHQGAPPARGRLLGPGGAAASAELSPAGRELVACAERVCTALESEIAQLDGRLAVWARRHPACRALQTLYGVGPTIAVTLYAEIGDARRLRSSRKLVRLAGLDVTVSESADKRSPGRLSRQGAPILRWAAYEAALSASRRGSPDQGDYRLLRERIGHGRATLTIARKLLRRAHHVLVAVGDDLLVPLPHP

SEQ ID NO: 313679 - protein, 421 aa, unidentified
MSTPACAKFAAQIGLDWADTKHDFCLQPGRGGPREFGRFSHQPDEIDAWVQGLQARFGGPIAIALELARGPIVYALQKYDFIVLFPIDPSLLAKYRVAFKPSRAKDDPTDAELALELMLRYPERFHPLHSQSVAMRTLGYLVQQRRMLVDDRKRIVNRLCNALKQYFPQALDWFDHRDTPLFCDFLSRWPTLQQIKRSRVATLERFFHDHNVRRPALVTQRVDGVQRAIPLTEDAAVIQSFQLLATTLVDQLRILLQAIARFDAAIAAVAPTLPDYKLFSVLPGSGPHLAPRLLTAFGEQRERFQNAGQLQRYSGVAPVTQRSGKKSWVHWRWQCPTFVRQTFIEWAAQTINKSFWAGTFYQQQRAKGCPHQVAVRALAFKWIRILYRCWVTRTPYDESRYLKALQLRGSPLLAGLRPKTT

SEQ ID NO: 313680 - protein, 336 aa, unidentified
MENIALIGIDLGKNSFHIHCQDRRGKAVYRKKFTRPKLIEFLATCPATTIAMEACGGSHFMARKLEELGHSPKLISPQFVRPFVKSNKNDFVDAEAICEAASRPSMRFVQPRTESQQAMRALHRVRESLVQDKVKTTNQMHAFLLEFGISVPRGAAVISRLSTILEDNSLPLYLSQLLLKLQQHYHYLVEQIKDLESQLKRKLDEDEVGQRLLSIPCVGILTASTISTEIGDGKQYASSRDFAAATGLVPRQYSTGGRTTLLGISKRGNKKIRTLLVQCARVFIQKLEHQSGKLADWVRDLRHCCKVSDEAAFCLIQRPYISKTLLTRRISPRGSP

SEQ ID NO: 313681 - protein, 376 aa, unidentified
MVRPCSCPASDKLARGTKTRSTPCLQQHRPIAAIGIDIGKNSFHVVGQDTRRQIVLRQKWSRHQVEARFANMPPCLIGMEACVGAHHLSRRLKALGHDARLMPATYVRPYSKGQKNDFRDAEAIAEAVQRPTMKFVATKTADQLDLQALHRVRERLVSQRTGIINQIRAFLLERGIAVRQGQRFLRAELPRILATPPDVLSPRMLRMIEDLAGDWRRLDERVEGLSNEIEAIARQDTGCERLMSVPGIGPMISSAMVAAIGAGDVFTKGRDFAAWLGLVPKQLSTGDRTILGKISRRGNRYLRVLFVQAAWVVLIKPKIWERHGLKPWIEAARKRLHHNVLAIALANKLARIAWSVLAHGRAFEARKINQAANQSA

SEQ ID NO: 313682 - protein, 401 aa, unidentified
MKQGASENGLIARRKKRPASRSTLASGEQISPGVARAQRRPAAGAAAGQTDRAVLGALSSSRSKDRCSAPGLTRTAGRASSSHCKKESTMPAQSPSEYIGLDIAAVQLDYCIGEKEEGSCENRPEGRQSLIKRLKKLAHPRVVCEASGGYEKAVVAELLAAGIEVCVVQPGRVRAFAYAEGLLAKTDRIDARLLRRFGQKMTLRLAEPADPAAATLRELLEHRRQLTEQISEVEGRLHLAGPTLAKLLQEQLTFLRQQIDTVEQMIREHIDQDPDLRKKAERLQEMKGVGPVLAATLLAYVPELGKIDSAKVSALVGVAPHPDDSGTTPKPRHVRGGRAQVRHVLYMAAITATRFNPILANFYRRLKARGKPAKVCFVAVMRKMLCVLNRMIENPNFALAQ

SEQ ID NO: 313683 - protein, 355 aa, unidentified
MAGLVPAVDRQPLKKQEPDPRALLRLLERWRAEAAKTGRMIERIVLAFEAGRDGLWLARWLRARGIEVYVIHSTSVAVSREHRRAKTDRLDTGMLMRVFLGWLRGERGHCRMVAIPTLEEEDAKRPSRERESLVGERTRIINRMKSALARLGIRGFKPALRKAPQRLEALRTPEDTPIPPNMLDEVRRDMIRLAVVREQIDAIERARLVRLEQAPASGSHPMVRLLARVIGVGIETADMLVQEVLSRKLRDRRAVARYVGLTGSPDESGKRRREKGLAKAGNARVRRGLIQLAWRFLRFQKDSALAQWYRARTEGPKGVRKTTMIVALARKLLIALWRLVMTGEIPVGVVLRAAA

SEQ ID NO: 313684 - protein, 431 aa, unidentified
MDEVHDIRLQEFKQVKAAIRGSAQYLIVGIDVAKEKHNAFFGTATGRTLHKGFVFDNTLDGFEKLLTQTKALRVQHSLRKVVFGLEPTANYHKPLGEHLIRCGYMVVLVAAAAVKNNRSLLDGRWDKHDTKDSANVADLISQGKCLYYEYPDSIVQDLRSLLSLKRRLKKEEHGLRVRIRNQLLAQYFPEMDRYFGTAVSLVVVGRCLDPSEIAGLDFEEFLRIVTDRKLSLPQQRQLKAIWRMAPDSVGCHVGDAVPFEAQVMVSGLRDVRETIRKVEEKIEELCVQFPEYPYLLSIPGFGPDVSSKVIAAISYPFRFTSGKQLLKMAGLDLCANRSGNTSHSATPVISKQGKADLRYALYQAALVASSSNRAFMAYYTNKLSGRQKENGIGTKMRVKLAAKLLIIAWTLMKKKESFDPTYLNLKDDSQV

SEQ ID NO: 313685 - protein, 342 aa, unidentified
MDEYDGRQFVGIDLHRRRSVIVRQSESGEQLSAVRILNDPVALQLELERAGVDPEVVLEATYGWYWAVDLLQACGARVHLAHPLGVKGFRYRRVKNDVRDAGDLADLLRMGRLPEAWIAPPATRELRELVRYRAKLVAIRSGLKAQIHAVLAKAGVLIAVSDLFGVGGRQRLAKVPLGSAYAQRVRSLMELIDVLDDHEARFAGLIAERLKAHRGYHAIQQIPGIGPTLAAVFAAEIGDVHRFAGPSYLCSWAGLTPRHRESDTVVHRGHITKQGSKLVRWAAIEAVQRQQTTAKISADKDRIEARRGKNIAKVAAARKLLTLVYYGLRDGQIRALDRARVA

SEQ ID NO: 313686 - protein, 341 aa, unidentified
MKPELSVVGIDLAKSIFHLVGMDERGTIIVRKRLARGEVMPLMAQLPRVLVGMEACGGAHYWARQLRAQGHEVKLMAPPYVKPYVKTNKNDLRDAEAIAEAVTRPTMRFVPIKNVAHQDLQALHRVRERLMGARTALVNAMRGLLAEYGIVWPTGINALRNALAAKLEVEQAKLTPLSQELFGKLCAECKKVEAEVAYDDEKLQALATMHPESQRLLTIPGIGPSTATALLAAVGDGGGFTNGRQFAAWLGLVPKQHSTGGQTRLLGISKRGDRYLRKLLIHGARATLRWARTKTDSRSQWIRGLLERRGWNRTAVAVANKHARIVWALLYRGGVYGESTN

SEQ ID NO: 313687 - protein, 391 aa, unidentified
MIFVGIDVAKDKHDCFILNSEGTVLADVFTIANNRIGFETLLSRIQSCSQGESKIKVGLEATGHYSYNLLGFLLDSGLATYVINPLHTNLYRKSLSLRRTKTGRIDARTIAMMLMSDVDLKSYSNTAYHNEELKSLTRYRFDKVKERAKLKSSVARLVNILFPELEKLVSSLHIAVVYALLSNYPGASYIANANTEELAEILCTASKGRYTKSKTAEIQVAAGVSIGSKMPAKSMELKHTIALIRELDKEISEVESAIDKITSQMDSPIFTIPGIGRHMSAMILAEVGDFSNFASADKLLAYAGLSPSTYQSGQLQNCYAHMEKRGSRYLRYALFNAAKYVCLWCPTFSAYLEKKRSEGKHYNVAISHAAKKLVRLIFAMQRSGKAFLADY

SEQ ID NO: 313688 - protein, 357 aa, unidentified
MESQEVKYVGVDCGKKSIEVVRINSENSLERRQFSTTESGINNFLQWLTLNDIVGLEAGSQSFRIAKSILNKGVQVIVLNPGNLATIYQSLKKTDKEDSLKIARLIQRHPIEELPTVPIPNDEEEDNRRLCSEHENWTKQLTQGKNRLHSLFTQAGLTQITKKHLRTKANREISVALLPSRYQKEAERILKVLDLVEQNLKLIEKEIQEALKKNKAYVQTIMSMPGIGMITSLAIMSYMGDCKRFSSAKQAAYYAGLVPRVDISGDTVRYGRIINRGCHSIRRVIVQAAWSLVRCQHGGKVKEFYQRLYLKKGAKKSIIATSRKMIEVLYVMIRTGKLFDSMPENILNRKLTQYGLM

SEQ ID NO: 313689 - protein, 347 aa, unidentified
MRFYNQQHRHYCGIDLHVKTMYVCILDAAGQVLVHRNVVSTPAAFLEIVAPYRDDLVVSAECMFTWYWLADVCAAEGIRFVLGHALAMKAIHGSTSKNDKIDSHKIAHLLRGGLLPQSYVYPAAMRSTRDLLRRRLHLVRKRGQLLAHIQHTRAQYQVPEFARRLAYPANRDGVAERFLDASVRKSVEVDLALLERYDSLITDLEYTLVRTAKQHDADAFHRLRSVPGIGKILALTILYELHDVHRFDRVQEFASYARLVKGRKQSGGKTLGTSGAKMGNVHLKWAFSEAAVLFLRHATGGKRFLARIEKKHGKGKALSILAHKLGRAVYYVLARDTVFSLEKFMAA

SEQ ID NO: 313690 - protein, 315 aa, unidentified
MTQTNIITAGIDTSKAKLDIAVHNRSERWQVANALPGWRMLAANLAKAGVTRVGIEATGGYERGVVEHLRAAGFTVLVLQPMQVKAFGRVHLRRAKNDALDALLIAACTAAIDQPRIVPDPRLAELAGHLTFLEQAEEDIARFKTRLEHIDEPALRRMVDSDIVKLKARRASQIRGIAKRLRVYGDLAMRLDLVLSIPGIGERTALAIIIRMPELGQVSREEVAALAGLAPFNDDSGQHKGQRRIAGGRGRLRRSLFAAALPAAFRWNKALIALYARLVASGKAHNAALIACARKLLIYANTVVQRGTPWTEKAA

SEQ ID NO: 313691 - protein, 312 aa, unidentified
MADMVRLAGIDVSKEKLDVHVTPSGESRTVSYDRRGLAGLRRWLVGLGVALVAVEASGGYEREVSEVLEEAGLIVHRLNPLRVRRFAQLKGRLAKTDSLDARTIAEFARAHPQERQLRRDPRRERLAEHLLVRRHTQEAIHDCINQLEHLRDGRLRRLVTARKASMDRTLAKLDRCLVELIAEHDDLAELSERLRSVPAVGPVLATTLIALLPELGSLTRRQVASLVGVAPFDRSSGRKIGAKSIQAGRVFVRNTLYMAAMVASQHNPVITAFAKRLAAKPGKVRLVACMRKLIVTLNAIVRDATQWQPRTA

SEQ ID NO: 313692 - protein, 409 aa, unidentified
MQQLLERVAGLDVHRKTIAVCVRVPAEGTERTQHVRTFGTAAPDLLALRDWLEAHQVTQVAMESTGVYWKPVFYVLEESLTCLLVNAAHVQKVPGRKTDVQDCVWLAQLLEHGLLRGSFVPPPPLRELRDLTRYRKVLIQERTREANRLHKVLEDAGIKLATVASDILGVSGRDMLHALVAGTTDPAILADLARGTLRKKLPALRQALTGRFRAHHAFMVSQHFGHLDYLDEAIASLSTRIEQALRPFAAEQQRLDSIPGVAQRTAEVLIAEIGVDMRQFPTAQHLASWAGLCPGQNESAGKHKSGRIRPGNRWLRMTLIEAASLAARSRTTAFGARYRRIARHRGHKKAVVAVAHAMLVTAYHLLDRHLDYREPGIDYFERRHAERTTRHAVRALERQGYRVTLEPAA

SEQ ID NO: 313693 - protein, 334 aa, unidentified
MLYAAIDIHKRMFHAAVLDLGSGETVERRFAATREELNNWAMPLQGRLAAVAIEATTGWRWVWRELSARGFDVRLVDPAQAKALRGRIKRAKTDRLDARWLCVLLAKEMLPESWLPPAEIQTLRDQTRLRKALAEDRTRWAQRLHALVTHEGWSCQRSRLLTLEGRRWVAALSLSPAARGQVDRLLRLIEAVEGELRSLETELRRFARADRRCLALETIYGVGPILACHLLAELGEAARFRRARQAVRAAGLDPVVDESGETRRRGRLAKHGAPALRWALVEAAQHAQRANSPDRALHAQAAARVGGKRAVLTVARKIGRRAYHVMRELEAQAA

SEQ ID NO: 313694 - protein, 376 aa, unidentified
MEHNSEAFIGIDTSKLKNAIAIAESGRDGEVRYLGEIETTDAATRKLVKKLATKYCKVTFCYEAGPTGYGLYRLITSLGHECSVVAPSLVPKKPGDHVKTNRRDAVGLAKNLRSGELTAVWVPDTRHEAMRDLSRAREAAVDDLKSKRQQISSLLLRLGLHYPGKKTWGKSHRRWLASLKLDQREQRIVIEELFGAERQAQERVDRLASAIIDAVPEWSLAKIVTALMAVRGIDLVAAVTIMAELGDLSRFASPRELMAFLGLVPSESSTGDSVKRGGITKAGNRRARRILVESAWSYRYPPRISRDKLAKVAAAPEPVRAIAWKAQTRLSSRYRALIKRGKRPTIVATAIARELCGFIWAIHRAVTAPGGRQIVP

SEQ ID NO: 313695 - protein, 343 aa, unidentified
MIRNKPSAAVYGIDLGKNVFHVVGTDAAGNVIQRARFRRDTLLAFFERAERALVGMEACPGSQWLARKLQAIGHSVRIIPAQFVKPYVKSNKNDTIDAAAIAEAVVRPTMRFVQIKEPDQVDLQALHRIRDQLVGSRTRLICQMRAFCLEYGVAIRQGAGVFKLDLPRVIADESNDLTPTMRRLLAELFDDLSRLEKRIGGVTREIEGLAATDELARRLMTVPGIGPLVATALLAAAGNAQQFKKARDMAAWLGLVPQQYSTGGRTQMLGISKRGNRYCPPATDPWGQVLHDASRSLSRPTRRLDRQASITHARQQGHRGARGKDRAYCLGGHQSARGYLRTS

SEQ ID NO: 313696 - protein, 330 aa, unidentified
MTGFAWLGIDIAKQKFDVALTWSTRRRAKVFRNDGEGWQALLRWLKDLGVGHVHACLEATGRYGDGLAIALHEAGHRVSVVNPAQIKHFGRVKLGRNKTDRADAALICDYCRLFEPAAWTPPSAALRQLRDLVRTREALSASRVEWANRRASGQETAVADAAMAKVIAQLEAEIAALDQAIDDALGQDDDLQAKHDRLVSIPGIGTHTAAVILCELPGPDVLRTAREAAAYAGLNPSHRQSGSSLDAPSRISRIGNATLRAALYFPALAAIRWNPLVLRQRLKDQGRLKPKQIVGAAMRKLLHLCFGVLKTGKPFDPDHATSTEQTAVTT

SEQ ID NO: 313697 - protein, 355 aa, unidentified
MEPKYIGVDFHARQQTICYLTTEDGEVRTHELKHQDKTEVRAFYAQFTGHVVIGLEASGYSPWFEQLLEELGHEVWLGDATEIRRRARWRQKNDRRDAELILDLMAHDEFPRLHRPCPQSREILRMLRYRQKLIKIRTMGKNSLQALALQSGLAKRSQLFTKTGRQELRTAAMSPVMQWQRDQWFQLLEPLNERLLETMLWLKLQTKDDPRISRLRTHPGIGLLTSLCVVHTLWPVTRFRNQRKVAAYAGFDPMERSSAERKHFLGISKAGSRVLRYLLVEAAHTAVKKDDDLKRFYQRLVERRGRPKAKVAAARKLLIRSYIMLRDEIDYAEFRRRAVAARLARQSTRPLVPEA

SEQ ID NO: 313698 - protein, 365 aa, unidentified
MQYVGIDYHKQYSVVTSIDKETGERKTARVSNTLEAFQGCIPHIDESHVVFEASRTWPYIYELLKSHVGQISMAHPLRVKAIASARIKTDKIDSRILAELLAADLIPEAHIRDDANRTHQSIVRQRIFFVESRTRVKNRFHVLIDRQPNPVKKQVAGLSDLFGKAGREWLRHHAPLSHVDRILMNQLLAIYDTLTEVIGQSDRQIDRMYREDPVAQLLASIPGIGKFLSVVISVELDDISRFADANKLASYTGLIPSTYSSGSVTRHGRITKQGNKWLRWAFIEAAVTAKNHNAQLNEYYTGLLARKGNMKARVALARRLVKIAYSIITHNRAFQPYMKAGFHAIPLESPCCGTNGTKGSRSQKG

SEQ ID NO: 313699 - protein, 371 aa, unidentified
MSRLARVDRFFKNVNLTSDDEVFVGVDVHKKSYHVALFLNDTPAIDFRMAAEPKQLNKKLGSMACSIKEIVYEAGPTGYGLARDLRKNKLPANVVAPSRIPRPAGGEDKTDRFDSRKLAEYSAKGLLSPITIPTPKQEADRQLYRMRHRQALQFAKVKTQIKSFLLMHGIKEPGGLANWTIAGVAELRDIRLIGALRLSLDELLSDYDYFNNRIKVLNKILAENLDKGKLGQRIALLKTHPGVGSVVACQFATELYHYSDFVSTRQLYKYLGLSPRISQSGEKSSSGSINKAANGRLRNNLIQAAWVWVRSDIEAKKCFWRICDNCGGIKQKAIVAMARKMSGHLWAMLMNDQPYDKNKAKCRHELRKVKK

SEQ ID NO: 313700 - protein, 320 aa, unidentified
MRNTVGLDISKLTFDATAIVGNAEYSAKFDNDSKGLDQFSDRLKSLGCQNLHICMEATGNYYEEVADYFAQYYSVYVVNPLKISKYAESRFKRTKTGKQDAKLIAQYCRSAQESELVKRQKPTDEQYRLSRMIAAYAQIKSECAAMKNRHHAAKDEEAAKAYAEIIKAMNEQLEVLKEKIKEQTEKPNCKEGVKRLETIPAIGRMTAAVLFHHLTSSKFETSNKFAAFAGLSPQQKESGTSVRGKGKLTKFGNRKLRAVLFMPAMVAYRIRAFPDFIKRLEEKKKPKKVIIAALMRKLAVIAYHVHKKGGDYDPSRYKSA

SEQ ID NO: 313701 - protein, 397 aa, unidentified
MTARIQDGTDSAAALYVAFELGWSKWLLGFSVGLGQPARRIEVHARVLGRVSEEIAKAKRRFGLQATAPVVSCYEAGRDGAWLHRWLVAHRVANHVVDAASIEVNRRYRRAKSDRLDVEKLLAMLIRFAQGERRVWKVVHVPPPAAEDLRQPERELLTLKRERTQHVNRMKGLLAGLGLDLVVDKQLPQLLSDLRQWNGLPVPPHLHSRVLREYARVELLDRQIADLENAQRRAARDDQARQVGKVRNLLGVRGVGAQSALLLVRELFGWREIKNRREVAALAGLAPTPYDSGQTRREQGISKAGSKRIRWLMVELAWDWLHWQPESRLAVWYKKRFGEGGARLRKIGIVALARKLLVAFWRLADEGEIPEGAVLTDWYKKVTGRLAKRRATQPAPA

SEQ ID NO: 313702 - protein, 468 aa, unidentified
MERKGGEGSAAAAVPGRSKSGRGRRKRARKASFELAHPDCAGIDVGSASHFVAVPPDRNAQPVREFGSFTDDLCRLADWLSACGIKTVVMESTGVYWIALYELLESRGFAVYLVNARHVKNVSGRKSDVLDCQWLRELMSFGLLRGAFRPSQEVCALRAVMRQRDTLLAGQARHVQHMQKALAQMNIQLANVISDVVGETGQRIVRAIVAGERDRSRLAALRSPRIHASEQEIARALEGTWRAEHLFALKQAVALFDAYAQMLAECDRELERMLAELARHDGDPGKPKRRGRQKNAPRFDVRASLFRACGVDLTRIDGIDTTTALKVVSETGPDLGRFPTQKHFTSWLNLCPNTRITGGKRLKGRERNRCNRAGQALRQAAVGLSTSKSALGAYFRRMAGRLGKGIAIKATAHKLARLIYAALTKGMVYVDRGMAAEEERYRLRALQHLAKRAAALGYSLSPTLREAN

SEQ ID NO: 313703 - protein, 368 aa, unidentified
MSEIIRIGMDTSKSVFQLHGVDAAEQPVLRKKLRRRDLLAFFERLPATKVGMEACGGTHYWARELTALGHEVKLLPPQHVKPYVRRGKNDRNDADAICEAMSRPRMSFVAIKTADQQAAQMLMTTRERLVAYRTQLINTIRGHAAEFGLTAAKGPAHVEPLLARVAEDARVPEFAKELFAMHGQELNQLKIELRQIEAKLKAWHRQNEMSRRLAEVDAIGPIGGCLLAIKAPDPKAFRCGRDFAAWMGVTPKDHSTAGKMRLGVITRAGDEALRRTLVVGATSVIKQVRNGKGNASPWLRDLVARKPPKLAAVALANKVARIAWKLMVSGERYDAARAGIVSPIARIAPCSRRQGRCAPPAAVASGQP

SEQ ID NO: 313704 - protein, 327 aa, unidentified
MNRIIGIDVSKHKLDCGYFVNLETGKVKTKVWPNDAAGHAQLIDWAQRQSGAQIEALTFVMEATGVYHEALAYALHEAGATVVVANPAQIRDYAKSLAVRTKNDRKDSLVLARFGETQSWRAWRPEPKEIRELRQLLARHTAVQNDLQRERNRQEKAEVSRAGEQVQHSIGLLIEALEQESRRLEKLIDDHIDRHPRLKHDRELLETIPGIGPVVARHILALYHSRDFRSARQMAAYIAVHPVEHQSGSSIRGRPRMSKAGNALLRAKLYLPAVVASTYNPTLKAFYQRLINKGHAKKSALGAVMRKLVHQCFGVLKHQQAYSPTAA

SEQ ID NO: 313705 - protein, 523 aa, unidentified
MASKQLSKKSRSRAAAYLQKPRGVIHPRVQKVGPEHFAIVCVDCAKARSKWMLTDFYGRVLVPPTEVAHNRVELAGAVAQVRAALTQHDLRDCLVAIERTGRYHHPVKNTFAQAGFDTRLVHPYATKQFRQPANPDYKTDDADMAAMQLAAVNGFALREATPAESWVQLQLCIRQRRDLVGKCSALACQIRHHLDAALPGYAACFDKLWDSNVAFRLVRDFGSATAIAEQGVTALCHYLNQQKVRFQERTLQTVVLWAKNAAAADVAGDLHRQIALAYEDDRQRKTQEILALERDIAHRLAQTPYVLLMSFPGVNVVSAADFAGEMGPIEHYANARAITGRAGLFPSRYQSDRVDRADGPLVRRANRSLRAVILGIADNLMLCNRHFRTLAVAWKIAGKDPRKSHVKVGMRFCRIAYHMVAGRQVFRHPSLRERGYILDKLLAFHLEHRTPYEQIMRDLHLATNQIPTKEHAAEAKPLADRLRITRAAGKPGPQPLNEILAIVLARLGVGMIPSKPSEERDLT

SEQ ID NO: 313706 - protein, 347 aa, unidentified
MKQRSTTVKVFAVDLAKRSFQVAGEDRHGVVVFESRYRSREAFREFLGTLQAGQQVLMETGPGAQAWARVVQSHAAQARLLPAQRVREHRSGAKNDRKDTLALLRAGRDTAIHDVPVKSVEHLALQALHRVRRGYIRRRTALSNQMRGLLLEHGVAMARGDAALCACLSGALADASVPLPMCLREILAELWAEWETLGKRLARLSGQIEQTVVHEPLAQRLMTIPGIGPITGSAMACKELPIERFASARQFAASFGIVPDQHSSGESIRLGKMCKRGDRYIRSLLIEGAHAVLRRVQPEAQGNRLQRWVLRHGRRGAAVRLANRNARIAWALLRRQTTYHTEKPSMR

SEQ ID NO: 313707 - protein, 340 aa, unidentified
MQVTTIGLDLAKNIFQVHGVSEDGTVLFNRSLRRAQLLRFFELQPACLVGMEACATSHYWARELTALGHEVRLMPPNYVKPYVKRGKSDAADAEAICEAVTRPTMRTVPVKSANQQALLCQHRTRELLVGQRTQLSNAIRGLLGEFGETIRKGATCVREFAESVSGGMRLDLPELAQDVIVSLCCQLLSVQQEIARLEKSIFAAARTDHRIRLLKTIPGVGPITASAIVATIGSADLFRSGRDLAAWIGLTPLNKSSGGKERLGGISKKGDRYLRKLLVVGMTSRIAAAKAHPEKADPWVVSILQRKPARLATVAIANKTARIIWAVLSRNEPFRATAKA

SEQ ID NO: 313708 - protein, 368 aa, unidentified
MEKIGVSEGVRQEGVPAPKRPPEGTAVWMAIDISRSKAVYCLRWEGSEQRRLSTPLGIEHVRAVVEHYRDCQLHVAYEACGFGYELAWWLQEHGVAVNVIAPSRVERVPGLQVKTDRVDVGKLARKLEKGDLKAIYIPSRTVHEQRQIGRTYAQSLKERKRAQVRIRSLMQEQGRLGPLPAGGWTVYHAWLSEQHLPEPVRLCVEAHEQMRRVADQQAERMKAELYKLARRAEYRPLVTALSAQAGVGWQSAIRLVLELGTIDRFRTTDALPHYLGLTPSQYSSGELDHRGHILKCGPGVLRALLLQCAWSAVRQGRDTELQERFANLAPRIGRKRAIIAVARKLAIKLRGRWRDHLLASEPAQAVAV

SEQ ID NO: 313709 - protein, 343 aa, unidentified
MEAYSAKQYVGIDLHRRRTVIVRTTEAGEVLETVRIVNDVQRLASVMARAGDCPEVVLEATYGWYWAVDALQAGGANVHLAHPLGVKAFEYRRVKNDFRDAQDLADLLRMGRLPEAWIAPPATRELRELVRHRAKLVSLRSHCKAEVHAVLAKCGVQVLMSDLFGLAGTELLDRLELPAPYAARIASLRRLMDDVDFEITVFSGIIRGRMAQEPGYTAIQKIPGIGPTLGAVLVAEIGDITRFTSASKLTCWAGLTPKHHESDTHVRRGRITKQGSRLVRWAAIESVKTVPAASVVGVLRERVADRRGRNIGSVAAARRQLELVFYALRDGHVRALEHLPRVA

SEQ ID NO: 313710 - protein, 347 aa, unidentified
MTVYIGVDFHARKQTVSYLTTEDGTIQQKELEHEKDYVRTFYEQFRGQKVIVGFESSGYAAWFEELLEELEYETWVGHATAIRQFARRRQKNDRRDADLILELMVRGDFPRLHRYSRESRETLQQLRYRQRLVKMRTMVINSLRFMVGSRGVTLRGTLQSRPGQARLQQVALPGPLGPQRDELLRLLVEIQQKVVTVEEWLKQKAEADPRVQRLRTHPGIGLLTGLGLVATLESIERFSHSRKVTAYVGLDPVEDSSGERKRIGSISKQGSRLLRLLLVEAGQVAARRDAELGNVYRRVTLRRGHATAKVAVARRLLVRAFIMLRDEIDYAEFCRRGVAARSSRGSA

SEQ ID NO: 313711 - protein, 350 aa, unidentified
MPKAPLPPIATLGIDIGKNSFHLIGLDARGAIVLRQKLSRGQVEQRLANMPTCLIGMEACVGAHHLSRQLLALGHDVKLIPAQFVKPFRKSQKNDFRDAEAIAEAVLRPTMRFVPTKTVEQLDLQALHRVRARLVSQRTAVLNQIRTFLLERGIAVRQGLRSLRQALPDILAQRTDVLTPRMIRLIEGLMQDWHHLDERIDAVTDEIEALVAADEACQRLMSVPGVGPIIASAMVAAIGNGAAFSRGRDFGAWLGLVPKQTSTGDRTILGRLSKRGNSYLRSLLVQAARVLLLWPAKWRQHSFGNWLTAASTRLHHNVLAAALANKLARIAWSVLSQNRTYEPRTAAAAG

SEQ ID NO: 313712 - protein, 443 aa, unidentified
MNEKPTTHLRGSRGQAFADLVRGIAPEHILCVSLDISKYFHVVMIHNGLGEIVTSTFDIDIYQSGFEQLGQAIARAKTGTQAQVVLVGMEPTSHYFENLARHLLQHAQPVTLINSFAVKHNRDQQLMRREKTDQIDVAAIGDLLRRGEGTRYRPATGVYLHLQQLDRVRLGKVKLVNILKNQIIGHLDRIFPGLILLDEAARQRYTPVFNTDFWTCQTLQDLIRLCPNPHDLCALTPQQLVQLFHEHHCRLGPQTAAKLIAHARKTLLPDIELVTIRCELLQHDLALLETVQTHLAQLETRLTALVASTPYQIWTTLKGLSAVQVASLAAAMGDPDNYPAAAPVFRRSGLVSGRNDSGNRQRRGKGNHILKAGDVYLRRALMNATATLILHQPVLARYSKHLQVTKPAGVARVATARKALGMLWAVLRDQSSNTLILNKEANM

SEQ ID NO: 313713 - protein, 473 aa, unidentified
MAVRNRKPVCVGLDVHRNNVWACVTFKDPAKGKDGLVFVTKKFESNHTDLASMCEWIYTTLPDLEDRAIDVYMESTGKYSTPVFDVCEEMGLKPHIVNPKHVRTIAGQKTDQKDCAWIAELGANGLLRESYIPVRELRESRRLSRSRTKLVQERGDTIRRIRNILTEANIRMDLVFSGIEGESARSVIEYLLTTEEPDLEEVKKRIRKSCRIMRFSTHKERKEKEEELRKAFAGAKFSSVQKFELENAYERVDRLTAQIQRYEQMMTEILEPFKSYLDLLDSIPGISGLSAMQILSETGTDMGQFKNEKHFISWCGLCPQSNQSNNKHKSVKIGKGGYYLKPVLIQCALNAVKHPYFKGKYEAIAARRGKKRALIAIARKMMVLAYHMFQTGEYFQERKKQIPAVLEKEQSEREQSMETSAEATDAPAIIRTAKEIVEMLQNTDDEMKHKIEQLLAQIGIAQCEYQTGAISTI

SEQ ID NO: 313714 - protein, 337 aa, unidentified
MEFKFFVGVDVSKETLDFAVYGEEKLLLERHATNDGTGIKEFLTELKKHFSAQPAQFVFCMEHTGIYCNHLLNHLGKQKIPVWIENPLAIKTFFGIDRGKSDRVDAQRIAEYAYYKRSKIRIWEPPRDVIKKLKNLLSIRDRLVKTRKALQVSITAADGFVDRDLVNTNRKITEPIIEKLNVQLKIVERKIQELINKDPELKQLYSILNSVTGIGSIISASMIVATNEFKDIDDPRKMACHSGLAPFIYESGTSIRGRSKVSHRANKKLKTLFHLAARAAITAKGELKDYYLRKVAEGKNKMAVLNAVGNKIIHRAFACVKDNRLYEKIYLPALVKP

SEQ ID NO: 313715 - protein, 396 aa, unidentified
MDALVERCAGLDVHQASVVCCILIGVPGRKPQKLLRRFGTTTRELKALRAWLAEHGVTHVGMESTGVYWKPVYAVLEGHVDLIVGNAHHIKNVPGRKTDVKDAEWIAQLVRYGLVAKSFVPPPAIRDLRELVRYRRTLIETRTATRNRVLKLLEGANIKLSGVASDVFGVSGLAMLEALAAGVTDASEMAGLARGRMRRKQAALEAALEGHLREHQRFLLAMQLCALKAIDHDITALDTHIEAQLEPFRAQHQLLMQIPGVDWATAAAILAEIGPDMSVFTTARRLAAWAGVAPGNHESAGKPKGAAVRRGNVFLKSVLFAAASAAVRTKGSYYRDKYNRLRSRRGPVRALMAIAHKLLIAAFHMLTTGETFRDLGESYLDQVTRKRSTTRQAVKA

SEQ ID NO: 313716 - protein, 440 aa, unidentified
MRIMYERCCGLDIHKASIAACALISEKGKPQEETRRFGTMTADLRELAGWLQQKGIRHVAMESTGVYWKPVWNILEPAGFELLLANAQEVKVVPGRKTDQKDSQWIADLHKHGLLRNSFVPPRAIRDLRDLTRTRAILTQEHTSICNRIQKVLEDANIKLGSVASDVFGVSGRAILRALMKEEHDAEALADLSKGLLRKKIPQLRRALEGQVTAHHRSLLTGQWSRMEFLEREIVDLETQIAERMKPTPEETALTLPNTAEDAPAPLSPREEAIQLWMEIPGVGWTAACSMVAELGVNMDQFPSAAHVASWAALCPGNNESAGKRLSGKTRKGNVWLRRTMCEVAWAASHTKDTYFAAQFHRIASRRGNKRALMAVAHSILVTAYHMLKHKRHYQELGADFFDAINRDKVRDRLVQRLAKLGFDVTLKSKDSIASDSQKN

SEQ ID NO: 313717 - protein, 302 aa, unidentified
MLADQLDYVVGVDPHRDSHALAVVHVVSGAVVFEANIAACSEGYADALRLVEEHGAGRRAFAIEGTGSYGAGLTRFLAGRGERVLEVGRLRRERRSGGKTDALDAVRAARSVLAQERPATPRAGGERQALQALVAAREGAVNAKRAGLCQLRDLLITTPEPLRSELRPLTRARLLQRLAATRPDGRRDPELRGSMLALRSIARRILQLTAEERELAREIETITRKLAPQLLDQPGVGPHAAAQLILSWSHRGRIGSEAAFARLAGAAPIPASSGQTIRYRLDRSGDRKLNRALHMNLVTRKR

SEQ ID NO: 313718 - protein, 329 aa, unidentified
MTTRSVAKTDRTKTKSPRESSRRPGPGVQSTLGVAKPTRKRQKETPVEQQTQYVGIDLHRRRSVIVRRNQAGETLDTVRIDNDPVVLAAELAKAGEHPEVILEATYGWYWAADVIQECGGNVHLAHPLGNNWGNRRVKNDERDATDLVDLLRLGRLAEAWIAPPPLRELREHIRYRAKLVHFRTNLKSQIHAVLAKEGVAVPMTDLFGVGGQRLLDEVHLGDAYRVRVESLRNLIEHINREIAMLEEQTAPYFAGDLGYHAVQTIPGVGPVLAAVFVAEIGDIARFKSARHLCSWAGLTPIHKESDVRCTGATSPSKGPASCAGPPSRA

SEQ ID NO: 313719 - protein, 358 aa, unidentified
MESQDIKYVGIDCGKKSLEVVRIHSENSLKERRQFSTTETGINNLLKWLTQNDIVGLEAGTQSFRIAKSILNKGIQVIVLNPGDLATIYQSLKKTDKEDSLKIARLIQRYPMEELPVVPVPTDEEEDNRRLCTEQENWTRQLTQGKNRLHSLFTQAGLTEITKKHLRTKSSRETSVTLLPSRYQKEAERILQVLDLVEQNLKLIEEETKDALKKNPAYVQTIMSMPGIGMVTSLAIMSYMGDCKRFSSAKQAAYYVGLVPRVDISGDSAYYGKIVSRGCHSIRRVIVQAAWSLVRCQHGGKLKEFYERLYSKKGAKKSIIAVSRKMIEVLYSMIRTGALFDSMPENVLYRKLAQYGLM

SEQ ID NO: 313720 - protein, 351 aa, unidentified
MKVTTIGIDLAKDVFGLHGVDGEGRVTFKRRLVRSRLLEFLSQLPRCLVGLEACSSAHYWAREIERLGHRVRLMSPRLVKPYRKSDKNDANDAEAICEAVTRASMRFVPIKSEAQHEVQALHRVREQLLKSRTALVNQVRGLLAEHGVVAPHGIARARRLLLGILADPERHGLSGLFRETLQEMAERLRFFDERVGAYDDRIERVFKEDERCRRLAKVEGVGPLVATAVVAAVGNASEFKSGRELSAWLGLVPRQHSSGNRSQLLGISKRGDRYLRTILIHGARAALRRADHKRDQRSRWAMRIKLARGYNKAAVALANKNARIIWALLTRGEAYRPAAISVASAGSVESV

SEQ ID NO: 313721 - protein, 344 aa, unidentified
MSKFNLISIDLAKNVFQVGKFLHQKLQSNKAVSRKELLTILTTSPRCKVVMESCGGAHYWARKARSAGHEVVILDPRFVKAFRVGQKTDANDVIAIAAASFSPNVRPCKSLTQAQQSLQSIERMRALAEKQKRQLANQIRGLLLEFGIVIKQSECAFRQAIPEILEDSDNGLTAGLRQCLAQCYELFKAQSTLKETLNELLTGLVKQDEQCERLLALEGVGPITAVGLLISLSDTTHFTSGRNAAANVGVTPRQHSSGGKVRIGHIAKYRGEITLRSHLFLGARAVISQLKHREPKTEKEQWLKALVERRGVKCAAIALANKTVRTAYAMLKKGTSYEPMLLAN

SEQ ID NO: 313722 - protein, 431 aa, unidentified
MLKINPLSTLYIGIDVSSKSNYVCALDFFKNKYISSSFANNQTGAEELALKILECLKEHSDLTTVVAALESTSVYSIHIANYLSSCEELMRFKPYVFVLNPKCTANYKKSYIGLGKSDPIDAFVIADYARAGNIESEPWRGSQFLALKRLTRHRLHLVECMTREKTYLVSNLYLKFSELQMLEGDDQPFCDIYGATSSSVLMEYLSPEEILNSSEEDLIAFLAEKSRNRIKDISKTADLLKKAARDSYRLDKSLYEPLNVSISSSFNCIETFKREIKVIDNAIEKEIKGLNPNAFIILQSIDGIGPVFAGGIIAEIGDITAFHSSDALAKYAGLTWKSNQSGDFDGEDTPMTKAGNRYLRYYLGEAANSMRKHNVEYGVYYRKKYNEVPKHQHKRALALTSRKFVRLVYGLLARNQLYSGVSLDTSIKDSN

SEQ ID NO: 313723 - protein, 430 aa, unidentified
MKSNTQNKKIEAVTEKTLVVGIDVGSEFHYARAFDWRGIEFSKKPFKFSNTEPGFKEFKAWILHIQTEHDKDTVVPGMEPTGHYWFNLGKFLQDNGMKPVLVNPHHVKKSKELDDNNPTKNDRKDPKVIAGLIKDGRYSYPYLPDGVYADLRTASNLRFQMQSELTRIQNRISRWLCIYFPEYKDVYGNPDAKSGMMILKAAPLPEDIVTLGVEGVNRIWREAKLKAVGLKRAKTLYEAAEHSIGSREGATAARLEIRMLLEDYESRAARLQEIMTLIESLVQQIPMAEKLMEIKGVGIKTVSGFLAEVGDISRFDNPKQLQKLAGLAIKENSSGKHKGETTITKRGRKRLRYLLFEVAMSLVSKNPEFSQLHQYYTTRRINPLKKMQSLMAVACKLIRVFYAILTKQVDYDPQKMISDIRRPEVYLQAA

SEQ ID NO: 313724 - protein, 317 aa, unidentified
MANNTTLSAGIDTAKAKLDVALHPGGQRLQVDNSGPGFKRLARVLRDAGVELVGIEATGGYERAVVRHLRANGFTVLVMQPQQVKAYARLHLRRAKNDLIDAALIAACVAALGPAELITDPRLEPLADQLTFVEQVEQDLARLKTRLEHIDDPRLRRIVLNDITRLTQRRSAELKKIADAARRHPDLARRLALIDSVPGIAERTALAILVRMPEIGRITREQAAALAGLAPFADDSGARKGDRHIAGGRKRLRRSLVAAALPAATRWNPALKALYMRLTARGRVHKAALVACARKLLIFANTVVQRGTPWVLAPAQG

SEQ ID NO: 313725 - protein, 440 aa, unidentified
MIVNSPSFAAHIGLDWADKKHYWSMKTADGKRSRGELEQSPEAIDLWIAELMARFGDRPIVIISEQSRGALITNLGKYAQVYIRIVDPARLNYYRKSVSPSGAKSDRVDADLILDFALLHSDRLRCLEPDTVETRSLQFLTEHRRELVNVHTSQVQVLTHWLKLVFPQILKWFDDLSSPLVCDFLQSWPRLAMLRKVKPATLLKFFREHNCRSEERNQERIQQIGQAVAATSDEALLRSAELMIATTIRVLTSLRQGIEAFDAEIKAVYALHPDRAIMASLPGAGPALEPRLIAALGTDRTRFKSAQDLASFTGIAPVTEGSGDTLWVHWRWSCPQFTRQTIHEWAACTVRLPGWARDHYQRQRDKGNGHHAAVRSVAFKWLRILYRCWRDHTPYSEAHYLAALRSQGAAPSTPSQSGQKAPTVQFKSCGDFSRPAAFSS

SEQ ID NO: 313726 - protein, 416 aa, unidentified
MEKEPAIFVGVDWASTEHQVCMIGPSGPVQRAFAHDAGGLGAMVDWLCAQTANPSDIVVAIEVPHGPVVEALMDRGLSVYAINPKQLDRFRDRLSPAGAKDDSRDAFVLASSLRTDRHCFRRLEVLDPVIVELREWSRMAEELKEERNRLTNRVRQQLWRYFPQALDLSEDLGAEWFLDLWELAPTPAAVDKLSEKKVARVLIAHRIRRIGAAEALVILKRPALTVAPGTTDAAKAHIAAVAERLRLVNRQLKEVTHRLEVLVNTLAVSEHDPGQRAERRDAAILRSLPGVGRIVLATLLAEAHQAVQARDYRALRTLTGVAPVTKRSGRSCRVEMRQACSIRLRTAVYHWARVATMHDARSRARYAALRGRGHSHGRALRGVADRLLAVACAMLKSKTTYDPLKTSAVKAALKSA

SEQ ID NO: 313727 - protein, 310 aa, unidentified
MDCFIGIDVSKATLDIAALPDGESWTVTNDDHGLAELAPRLVTLAPVLIVLEATGGFEMLAAITLAKHGLPIAIVNPRQVRDFAKAMGQLAKTDVLDAGMLADFAQRVRPTPRPLPDEAAQFLESLLTRRRQIVDMLTAEKNRLSFARGPVKRDITQHIRWLEKRLADVDGDLQDAVAASPLYQAKADLLRSVPGVGPVTALTLLATLPELGHLSRHQIAALVGVAPMNRDSGTMRGKRMVWGGRAPVRAVLYMAALVGRQHNPVLRVFYERLRAAGKPFKVAATACMRKLLTILNAMLHQNRRWDPQHA

SEQ ID NO: 313728 - protein, 368 aa, unidentified
MTDVTTHVGIDAHKKDLFIAMLVGTGATPVTWTVPNEPNAVRRLVRKIEREAPGPVRVCYEAGPCGYALQRQLTTTRVACQVIAPGLIPRKPGDRVKTDRRDARKLAELFRAGLLTEVHPPTPDQEAVRDLCRARDDVREDLQRARHRMGKLLLRRGLHYGGRNWTRPHRAWIDGLAWTHAAERVVVDDYLLAIDHLEARLGELDARLAEIAATDPYREPVGYLRCFRGVDTLTAMLVLAELHDFRRFPSPRALMAYLGLVPGEDSSGEKHRRGRITRTGNTLVRRLLVEAAWHYQHRASIGVGLAHRRKGQPGRVIAIADKAQQRLCRRFRRLAEQHKPAPKIVVAIARELSGFVWAALQPVATAAK

SEQ ID NO: 313729 - protein, 358 aa, unidentified
MKKIVIGIDISKEKIDASAIDVRDSQQGVVRLDYQVFDNRPMGFRRMLVWAKHLMKEATLQDVLFCCETTGGYDRSLCDYIYGKSLDIWREGALQIKRSMGVRKGKDDKADSLMIAEYAMRHMDKAVIYESPNETIRELKALFLYRHKLVQEKAEKLVRAAHLADTAAKSKSMRFILHDAKRSVKAIQKSIKECEKHILELIESDEEIQRNYGHIVSVKGLSIVNATAFIAYSNNFRGITTANKMASYYGVASFRDQSGTSVDKKAYVKYYSCSLLRATITQAAEWTVKENGIYRDYYLRLKAEGKPYGVIINNVKNKLIHLVFSLVTNDTDYEQNHESLRVKRKSEQKMSAQLENIN

SEQ ID NO: 313730 - protein, 368 aa, unidentified
MSETIVAYRSFVGVDLHKDTVTLAAVDPRGESLARLKIHTKSVGKIEAWLRALPRPSALAVEAVGFVEWFIDRFRDCVDRIDIADATELANRRGKRRKNDPNDAVDIARRLARGECPLGYIADEELMQLRKLGRHWRQLGSILARAKHSMRSILLAANLRGPKLDGASAQRWVLVHGHRLKPVQRQAFRNFLEVIQLVELQRGPLRHVILKAMRHERFAPLAELLQTVPGIGPIWACVIVAKIGPFDRFPNADALEFWAGLTADMKESAGRTQSGSITKAGSRTLRWALCQAAVTSCHCDARQEAIRQRLIRRNGGVKAKANVAMGRRLLAILYAMVRDNKSYEPGPRRNRTSAANKARARKRRKEAA

SEQ ID NO: 313731 - protein, 410 aa, unidentified
MDVIVERPGALDVHNASVVACVRLPGEKGRRQERVAEFSTTTRGLLALHDWLAAHGVTQVAMEASGAYWKPIWAVLEDDFECVLVNARHVKQVPGRKTDLKDAQWLCQLLEAGLLRASLVPPKPIRTLRNLTRYRKSQIRDRQREANRLHKVLQETGIKLDCVASDLLGKSGRSMLDALVAGTTDPALLADLARGQLRKKLPALREALDGRFSAEHSLVVGRILAHIDFLDESIAQLSEAIEQQIAPFAPAVELLCTIPGVGRRAAEVIIAETGGDMSAFPTAKHLTSWAGVCPGNDQSAGKRRSGKTTKGSKWLRGTLIEAAKAAARTKDTYLQAQYARLRIRRGANRASVAVAHSILTACWHMLQTGELYNDLGGDYFARRDPERTTKRLVAQLERLGHIVTLEQAAA

SEQ ID NO: 313732 - protein, 387 aa, unidentified
MIKKRGRVVGLDVHPDSFAGAVVAGSDPASAQVSSTSTRVELERLEQWALRHTRTEDTLVLEASGNAFSVAERLRGIGRKVEVLDSHRAGKVGKVYCANDRVDAVKIARIYLSALSPIVWQPDQKTLERREVFSAYQAVVKESTRAKQQLRSMLNEHCVRLEKGFRLCHPNAIRRLVALREWTPARTMLLQQLHGSLVSARARRTVLRRHMAQEIVADEALLRLTRLCGINLITLYGVIATVGDVRRFSHSKKLVAYLGLNPSVSQSGNFEGGGALKRHGRGALRALLIQSGKKLLEVTNPLQKWGLAVSARRGRNKAAVAVARKLCVAVWHVLMGHVVGALERLDTLETKLSKFATEMGPSALSALGYHNKADFVEKKLYVLRSYP

SEQ ID NO: 313733 - protein, 442 aa, unidentified
MSFIKNFKMAKIVNFEEIHEHGAGIDIGSREIFVSIDGEQVVKFKTFTSDYHLCCKYLREHAIESVAMEATGVYWMSLYAMLEQYGIKVCLVHPREVQQVKGRKTDVKDSQWIQKMYSAGLLRESIVAEGDFKELRLLVRERLDLIEMGSTYVNKMQKYLELMNIKLRNVIAQIHGASGLRIIKAILSGERDPKKLVELCHENIKKNKREDVIKSLEGNYNESYIRLLGENLHLWEEHQKSICQIEHLIGELLKRVNQGNSHIEVTTPSKPARHHQPNIKGLHATMVQMFGGVSLTSIAGINDSTMLRLLGEVGNDMSRFPTKKHFISWVGLSPKNKQSGKMKKRLKCPANNAGLIFRQSAQSLSTSKHNAIGVFIRRLKGKKGAKVAIKAGARKIAEAFYDALTKGIDYVEQGAAKYKEQLQQREIYILNKLAKKYNYEFA

SEQ ID NO: 313734 - protein, 338 aa, unidentified
MSAIKVIGIDLGKSTFHLVGHDYSGREQYRHKLSRSKLIQFISVHEPTLIAMEACCGAHWLARKCQEYGYQVKLIPPQYVKPYVKAHKNDFIDAAAIAEASTRPNMRFVSPKSEQAQVGVVIRRVRTGYIRERTATMNRIGSMLIEFGISFPRGHANMKKLFQWLADNKEPIPPLLVKELQNQLDYYNQLNERIKEQDRKLEKLSSEDELYTLLQTIPGVGPMTASCCLSCVGKPSDFSNGRNFAAWIGLVPFQYSTGGKQRMLGISKRGNKELRELFVHAARAVMWREETAERYFGSWLLDLKRRKPFNVALVALANKLARIAWSVMTSHKPFELRV

SEQ ID NO: 313735 - protein, 456 aa, unidentified
MTQKKQSSVGKSLPVIQPDAAGLDIGAEKIWASVPADRAAPTVRSFATFTPDLHTLAAWLNTCGIKTVAMESTGVYWIPVFEILEAAGFEVYLVNARHIKNVPGRKSDVQDCQWIQRLHSYGLLSASFRPEADMRALRAYLRHRGMLLEYRAAHIQHLQKALQQMNVQLTQVLSDITGVTGLDIIRAVVAGERDPVHLARFRNPRCKSSSDEIAKALTGNYRAEHVFALQQALALYDFYTQQLHICDQQLEQQYSALTPRFDDDLPPLPPDPKVNSHSKNAPTFDVRGRLYRLTGVDLTVVDGLDDSTVQSVLSETGTNMSKWRTEKHFCSWLGLAPHNDITGGKVIRSRTLKVHNRAGQALRLAAQSLSRSQSALGAFYRRMRAHLGGAQAIVATAHKLARIIYHLLKHRQPYHHVSAREYDQHQRNRYVKSLQRQAARLGYSLTSLPIPASVSE

SEQ ID NO: 313736 - protein, 335 aa, unidentified
MKVTKDCLGIDVSKDLLECCLGLSMKSDEQIFMGEKKFKNDPQGFKDLLSWVRQNTNNEVLYVMEATGVYYEHLAYWLHDQGLALSVVLPNKVNFFAKSHNIKTKTDGVDARVLARMGLERALDPWHVPSKAMREVKLLTREYRDIKRKLNVTKNQLHAKSSSYLCPASIVKRLKKEIRLLEGQCVEVEAELRVLVMNDSFLADQVERLETIPGVSFMTIICVLGETNAFALVKNAKQLASYCGLDVQHNQSGTKQGKTRISKKGNSYIRQALYMPALCATQHNPHLKTFYNRLSQKKPAKKIAVTAVARKLLVLIYTLWKNETEFNPEYAVKTT

SEQ ID NO: 313737 - protein, 385 aa, unidentified
MQDHKPEDQTAIRTDLGAIFVSLELSRSTWLVTSLSPGGGEKMSKHSVPGGDISGLLMLFSRLTERARKRAGEEFPIIAIQEAGLDGFWIHRALEQEGIESHIVDAASIMTSRRRRRAKTDRIDGEALLRALMAYKRGEPRVCAMVRVPMPEDEDRRRISRERNVLIAERVAHVNRIKGLLFSQGIRYEPLRRDRRARLEELRTGDGRVLPEHMKRQISRELDRLELLLAQIKAVEAERNTMLAKTNEANLAPAKMLMGFKGIGAEFAMTLWSEGLFRHFDNRRQVGAYAGFAPTPWQSGMTDREQGIAKSGNPRLRTTMIQLAWLWLRHQPDSLLSHWFQERVAGKGRRIRKIMITALARKLLVALWKYVTAGVVIERAVMKTA

SEQ ID NO: 313738 - protein, 437 aa, unidentified
MKRSRIQVGFDISKKKLDMCILEPDGQVVVRHRSFANSVSGYQEVKQTLIPILRSDTWDGMDLGGESTGYYWLPFFMQLREDGDLANYDLNTYLLNSRQVHWYKKSYAEDDKSDEKDSFYVTEKLRTQKRKHAWYPDLDWLRLRFYTRYRFHLGQNLTRMKNYFWAHMFLLCNTYSKGKPFSDGLGACGRALVRMYPDWHELQELPIETLIEQLVSWSGDRLPDPAQDAQELRKIIQQSFPLHPDLCTALHDLLTMTIEHITFIEKQIVQVEKWMENEIRRHHPEVLHLIDIKGIGIVFAAGIAAEIGNLERFFEGQKWDQPKKRYRNKNLRDVEDAVAKFAGIWWPRHDSGDFQGQERRMNKKGNHYLRYYLVEAADKLRQYLPEYQAYYQRKYAETKKHQHKRALVLTARKSVGLFVGLLHRNEPYRSQEVNLTA

SEQ ID NO: 313739 - protein, 346 aa, unidentified
MEISTIGLDLAKNVFQVHGISATGEVVIRKALRRSQMLPFFEKLPPCMVGAEACGTSHHWARELTKLGHEVRLMPAAYVKPYVKRGKNDAADAEAICEAVTRQTMRFVPIKSREQQAALSLHRVRSLLIKQRTQLVNMMRSVLAELGIAIPVGIVKALQIARDIVDGESKLDLPTEATNVVAIMAGQLLQLHAQLRKLDLRLAALQRSDDRARRLATIPGIGPIGATALAASVTDPSQFSSGRQFAAWLGLTPRQSSSGGKERLGRITKMGDRYLRQLLVVGATALVRYAKEKPSTVDPRFVALLARKPARVATVAIANKMARIAWAIMARGGVFERGHAPMLAVA

SEQ ID NO: 313740 - protein, 278 aa, unidentified
MQGKIERSAPAKIYVGIDASKAWLDVASTPISTSFRVANDKKGHKALMKKLSGLEVAAVVIEATGKYHRGVHIFLHERGLPVCVVNPYRSRKFADALGELAKTDKIDAMVLARYAELVEPEAQAPVPKAVAETAELVHARNTAVAAQTALRNRLGAAHSSLLKRELRIQLRSSAAHIKRLEKAIRVVITDNAELARRFKILTSIPGIGPIAAAGLVGLMAELGTLSSKQVAALVGVAPMNWDSGQMRGRRAIKGAGQPLGASSTWRPSALPCGAQTPT

SEQ ID NO: 313741 - protein, 375 aa, unidentified
MKNKVRFLGLDVHAETITVAIAEPDGEVRSLGTIANRAESIRKLVKKLGSVEQLKACYEAGPTGYILYWQMAELGVACEVIAPTLVPMKAGDRVKTDRRDAERLARSYRSGDLTAVWVPDEGSEALRDLVRAREAAKQDQLRARHRLAKFLLRMGQRPAAGMKAWTAPYMAWVRQVHFTQGAREATLLDYLHEVDHMGERVRRLEQAITEAVKLASPQVREVVKGLQALRGIAEISAVTIVAELGNIARFETPRQLMGYSGAVPMEDSSGQRTRRGSITKTGNAHLRRIIVEAAWSYRYRPAIGPRLRKRQEGVSEEIKEIAWKAQVRLSKRYARLAAAGKDQRKIITAVGRELLGFIWAIGIKAEAASELQMAA

SEQ ID NO: 313742 - protein, 367 aa, unidentified
MKKVSTAVAKQSRNISRQKLTIGLDLGDRNSWYCVLDEAGRIQLEQRVRTTGKALQEVFGAMPRGRVALEIGTHSPWISRLLSALGHEVIVANARKVRLIGESRKKDDRLDAQTLARLARIDPELLYPVKHRSAPAQADLMMIRARAGLVRARTGLVNTARGLAQSYGERLRGCNVRNMDPEKAEGLSPELQRALEPLLAAMEEVSERISEYDDRIEALAQASYPQVELLQQIKGVGTLIALTFLLTLEDPHRFRKSRDVGSYLGLQPGRRNSGQSEPQMHISKEGDPYLRTLLVQGAQHLLGPFGIDCDLRRWGLKLAEHSGRNGKKRAIVATARKLAVLLHHLWVSGEVYEPLHNSSSVSVAAAA

SEQ ID NO: 313743 - protein, 410 aa, unidentified
MDLIPLHERVVALDVHQAVITACAIVVDADGVRVEERSFETFKRGLRALVDWCLAIRPEVVVMESTGVYWKSPHAWLERAGLECMVVNARHVKNVPGHKTDISDPRWLATLVRAGLLKPSFVPPEKLRRLRVVSRQRQKLVGMLAAEKNRLGKVLADAGVRLGVVVSDIHGKSGRQMIAALIAGATPEEALAFASPQLQASREDIAAALEGEISPEHRFVLRRIQRHIAFLEEDIAAFNAHLIAGLDSPEEKNALALLETVPGIDLIGAAMLLVEIGTNMALFAGSDRLASWAGMCPGNNRSAGKRKNERQRKGNTYVRRLLCEFVQAAKKSPCAFQAKHRALAIRRGGKRAIMACAHKMLRVIWAMLLRNEPYRDATVDYEALSVRRNAPRWIRALKRFGYIRVSPATR

SEQ ID NO: 313744 - protein, 328 aa, unidentified
MTMNPALPAFNHVVAFEVAKDSLVIHVLPAGEQSVAANKPKAIRKTLLAELRRNAKANLGPLLVVCEATGGYERHILDLCVELGIAAHKAHGSRVRCFARYLGLIAKNDPIDARVLALFGLKTPDLHLYVQPAPEVLALKDLKTRRDQVQEMLFTEKNRLEHARHASVSRSLSAHVASLRKALAALEAEIAALVKASEILARKARLMQTLKGVGPATVAALLAYMPELGALSRSAIACLAGLAPFDDDSGKFKGPRHIQAGRAAVRKTIYMAALVAIRHNPVMRLFAEKLRRNGKPSKLVITAVMRKLIVTLNAILRSGEPWSHAKIA

SEQ ID NO: 313745 - protein, 402 aa, unidentified
MRSVYERVAAVGLDVHYKFSTVTMRDAQAKVVHRERLEHGDRARLRERLSQWPREVPMVLEASFGWGWLADLMTELGLRPELSNCFKVEQMRKAHGQAKTNRKDADLLSLLPYEADGWWKVWLAPPEVRDRRETMRYRSSLVGIQTGTKNRISALLQRHGVMHDFSDLFGVRGYRFLEELSREGRWSQGQLLPGARMGLAGLLELLDHLRRQLVQVSRRLRAELESTPLVRRLDGIPGIGLILAHTIQAEIGRIERLRNHRALACYSLLAPMSDDTGEAVPGKAPLGRHLGYRGNRTLKWAFIEAAHAAVKRGGKWRRIFEDATEGGRKNRNTGYIKVARELVKVVYVVWKKNVEYTDTPPARPGRGQPSPPPPPNREAAREFFGRTRSGTGQPSRAMAAVQ

SEQ ID NO: 313746 - protein, 316 aa, unidentified
MQTILNLGADVDSRFIVVACAAHSFAPQRISNDREGIRTWLRSVPRGSRLGIESTGSYHELLADLAHAAGLQVFVINPRVLRRYAQGVGQRGKTDRIDAEMIARYVAREHAELHAYVPPTKEQRALARLINRRGTLVAARGTVTQSLRGVADLDAELSHLEVCFDRLLRQIDILMQEALQQLPAAKQAAKQIATIPGYGPLGSACLGYTLTRLPYANSDAVIAQTGFDPRPEDSGQKQGRRRLSKRGPSEQRRILFNCARAASRTRHWQPYYAAQLAKGLSSTAATVILARKMVRVAFAVVKHDAPFDPERVYAHA

SEQ ID NO: 313747 - protein, 446 aa, unidentified
MGNGSGLSRGDRNRNARLARLRELVPLGHAIVGIDLADDTQAAVVTDHDSRVIARRRVSARAWELGGLLDWAVARAGGAGFSSVTVACEPTGHRWRVLDQLAAGRGLALVCVQPLLVYRAREGEDLTRDKSDPKDAVLIARLAGELRCYEPERADAVWARLRHLGARRGQLTTGATAAVNQIRDLLECAWPAVLAAAGSPFRSVTWCAALSVVLDRCAGDLRRVRRLGLDRFTAAVRRELPRWGGRRPCLRIVRAVFAALADPAGVAAHRPGALERAQLALGDWRDIRARLADTEARMCAVLEDLGLADLVTTIAGLTVTGAAAILAETGDPARFATPRALVKHAGLCPRDNASGAAQGKTSISGRGRPALRLAAWRAVWAAMPNNPVMAARFGYLTTRQDNRLARQQARTACAAALLRWIHVVVTRHIPWDPAIAAGTSPARRTG

SEQ ID NO: 313748 - protein, 321 aa, unidentified
MGVLGIDVSKDTLDVVWMDEQRQTHYCQVDNAASGYAKLKRWLRKRPVDGVCLEATGRYSEGVAEYLHEAGYRVSVVNPARIRGYATSQLRRNKTDKLDATLIADFCRTQQPEAWTPPPPEVRQLQALVRHLATLEEAKQQADNRLRETAALPDLVVKQLTSQRALLFAQIDQLKAAIQDHIDHFPDLRRQRDLMDSIPGIGKLTAAKLLAECRSVSRFDDVRQLVAFAGLNPAHHQSGSSIKKKTTISKTGNSAIRAALYMPAVSAKRHNPLLRPLAQRLLARGYCEMQVITAVMRKLLHLVFGVLKSGKPFDPNFQAAP

SEQ ID NO: 313749 - protein, 369 aa, unidentified
MKKIVKYVGLDVHKDSITIAIADQGRDGEVRVYGKISNDLDQIDKVMRKLISQNAQLHCVYEAGPCGYPLYRHMTNKGIDCAVVAPALIPKKSGDRVKNDRRDAVKLATLHRSGELTAVYVPDQDDEAIRDLVRARADTQKALRKVKQQINAFLLRHGISYHGKTKWSKIHLTWLTAIKMAHPAQQIALTEYLDAMENNEARVTRITKQLESFCHSWRLRPVVQALQSMRGISFVSAVTIIAELGDLNRFDKPPQLMAYLGLIPSEYSTGNSIKKGPITKTGNTHARRALIESAQAYRLPARKSVAIRKRQQGVSEEVLSVSWDAQLRLCSRYRNLKAKGKHHNVVITAIARELAGFIWAIVRLVPIAA

SEQ ID NO: 313750 - protein, 367 aa, unidentified
MKKHNSKKEQTAKPGVYPEGCTVGLDVSDEFTYAAVINKDGALLIEDRIKTREPELRRWLMAGPPAVVALETGTHSRWMAKVVRECNHQVIVANARELRLIYAGTNKTDRVDALKLARLARVDPELLKPIQHRGDQEHADLAVIVARELLVKMRTEAINMVRGMVKSDGGRVTACASVSFTRWAAEQLTEALRNALAPILEQIDNLSERIREYDERIEHLAQTTYRQSLLLTQVGGVGTLTAMTFLLTIGDPWRFERSRDVGCYIGLRPKRDQSGERDPKLGITKTGDSRLRRTLVNCAHYILGRFGPDTDLRRWGLKLAGQGTNGKKRAIVAVARKLAVLLHRLLTTGEVYEPLRNAGRQVIAAAS

SEQ ID NO: 313751 - protein, 341 aa, unidentified
MPIYVGLDVSLKETAVSIRKDGQRIWRGKCPSDPKLLAALIRKRAPEVERVVFETGPLSVWFYHALTAEGLPAICIDARHAKASLDMAMNKTDANDADGLAHLAEVKFYKEVRVKGFESMLTRTRLGARAQMLKVSTQLSNQIRGMMKTFGLVTPKGAGGVFDANVRELLATNAGLEQIILPLLDAWKAIRVRTAELSRQLIASARNDTQCQLLQSVPGVGAITASTFVAAVEDPDNFARSRSVGAWIGLTTKRYQSGEVDHNGHISRRGDARLRGLLYEAATVLLTRTSTESVLRDWGLKLWKTIGYKRAAVAVARKLAVIMHKMLKTGELFDAGKPAIV

SEQ ID NO: 313752 - protein, 386 aa, unidentified
MQASNAGTPITGNISTIFIAIELSQKSWLVTMHCPDRDKISRRKLDGGDHAGLLALIDRMRDRAARALAATPAVVSCYEAGYDGFWLHRLLLAAGITNYVFDPASIAVDQRARRVKTDRIDGEKMLRTLMAYLRGEPRAVRIVRVPTPEQEDARRDARERHRLTKEQTAHTNRIKALLRLQGIAVGNPRHRDWLSWLATQRDWQDQPVPPRILAEIEHEHARLMLVSNQLDALAQPPVPAKLTPAAAEMAQRSDLLLRLKSLGPAFATTLTHEVFYKDFHNRREVASYFGLTPSPWQSGGIDRDQGISKAGNPRARCAAVELSWLWLRHQSESALSRWYRQRTLNASKRIKRIAIVALARKLMVALWRYLTTGLVPEGAVLKAMNA

SEQ ID NO: 313753 - protein, 402 aa, unidentified
MSERENKKACIGIDVSKGSSHFQAFYSAGVPASEPTYIEHTKRGFSHLYSIVSDLEKELGYAPYVIFENTGTYSKPVEVFCQRNNLRHYIIAPLLSAKMRKSEIRPTKTDKIDCATIANVYYLKRLRVAGKDNELYSELKYLCSYYNYITGIMVSMKVKYREYLDLVYPRIDTLFGVYTESFLKLMTRYPNPHKLNRKSKKDLASFFHKSDYCGLRKAERLAILVKGYFKETKIPVLENDILITLFSKHLKDLIKVMNENQEILDQIILLGMKTKEYPYLISIPGIQKNTAARIAAEIQGIERFESASKLCAYAGIDPTVHSSGKYDGQHLSITKKGNKRLRSLLYLVVAGTSKSKAPNNPVRDFVQKKKSDGLAPKAAIIAGCTKLTRIIFAVCSKEEFFV

SEQ ID NO: 313754 - protein, 388 aa, unidentified
MEVLYGICSGVDVHKKILVVCLRSGRKTEIKEFGTTTRELLECGEWLQSRGCEMVAMESTGSYWKPLYNVLEAMDVKAIVVNAQHMKAVPGRKTDVKDAEWIADLLQHGLLKASYIPKRDQRELRELVRYRKSLVEDKGRELNRLQKMLEGGNIKLSGTVSEIDGKSALNILARIVEGEKIDEKTYDEMYARKEIAHNLKGTREQILDDLNGILSQTQRHMMKVLLAHLDELNQHIQELDNEIDGSMKQDEKDACKAIEDVPGIGESSAQAIISVIGTDMSRFPTEKHISKWAGVCPGDNESAKKRKSCKTTKGNKVLRTTLVSCAHAAVKVKDSFFSAQFSRICAHRGTKKAYMAVAHSLLIAIYHILSTGEVFHDLGANYYNQFNR

SEQ ID NO: 313755 - protein, 342 aa, unidentified
MNHYAGIDVSLECSSVCVVDSSGKIVREAKVASEPEALIGWLCSLGLRLERIGLEAGPLSQWLYAEMQKAGLAVELLETRHVRNAFMTMPVKTDRKDARGIAELMRLGWFRPVHCKSMEAQETRAVLTARKLVQSKLHDVEMSLRGILRGFGLKVGRTTPKQFEARIKDLVTGHPSLEIVAEALLAVRTVLLREFNGFEKRVRSMARSDVRARLLMSTPGVGAIVSLTYASAIDDPSRFRSSKMVGPHFGLTPKKHQSGETDVTGRISKIGDKGVRTALYEAANVILTRPVKASGLKSWAARLAKRAGMKKAKVALARKLAVIMHRMLVDGKPFNPAAAAAR

SEQ ID NO: 313756 - protein, 357 aa, unidentified
MEASPRPPGARKPETELGAVSTTAVPHPDSRSGPSPHLQGRVMDEQRTVFVGIDVSKDRLDVHLRPSGEAFFVPREGKGMDDLVIRLQGLSVALVVLEATGGFEATVAAALAGVGLPLCVVNPRQIRDFARAMGRLAKTDTLDAEVIALFAERVRPQARPLREPERVHLAELVGRRRQIIEMIGMETNRGRQAIDKPLARRLARHVAYLQKELDAIDHDIGDAIKHSPAWREAEALLKSVPCIGDVTARTLLAELPELGTVSRHQVAALVGVAPINRDSGLMRGRRAIAGGRTSVRAVLYMAALTAIRRRSPFRAFYDQLTARGRPKKVALVAVMRKLLTILNAILRDHTPWRPLNA

SEQ ID NO: 313757 - protein, 344 aa, unidentified
MSEYDGKQFVGIDLHRRRSVIVRQTVDGQQLGAVRIANDPMRLAEEIGKAGECPEVVLEATYGWYWAADVLAEAGARVHLAHPLGIKGFTYRRVKNDVRDAADLADLLRMGRLPEAWIAPPATRQLRELVRHRAKLVTLRSGVKASVHAVLAKQGVHIPVTDLFGIRGRAELATVPLDDAYRARVNSLCRVIEMFDFEIDTVTRRVAGDLARDPGYLAIQQIPGVGATLAAIFVAEIGDVHRFASARHLCSWAGLTPKHRESDTTVHRGPITKQGSALVRWAAVEAAQKTPAWAGWLARRRAGIAERRGRNTATVAVARKLLTLVYYGLRDGHIRALEHDRQTA

SEQ ID NO: 313758 - protein, 348 aa, unidentified
MHYIGVGYHKKYSYVVVKDKDGKVERRGKVNNSKEEFRQLLKPYHSGKAVVEATRNWGLVYDWLEEILDDVALAHPLKVRAIAEARIKTDKISADILCDLLRSNLLPEAYVPSKETREAKNILRQRMFFVRVQTMVKNRIYTILDRHPGILSQAPGVSDLFGVSGRAWLKQVVLPGQDNQLLACELELLEVLKQKISESNGIVKELAKGDKRVKLLRSIPGLGSFFSVLVAIEIDDISRFTDEKKLCAYAGLAPSTYASGGKVFHGRITKTGNKWLRWAFIEAAQPAISSDADLYAYYHRLRIRKDANAARVATARRLITIVYRVLSQERLYKRRATRRLAPAALVTS

SEQ ID NO: 313759 - protein, 411 aa, unidentified
MRIVHPRCCALDVHKKSITACVLVWDGKQLIEERKKEFGTTKRQLGRLRFWLMACKVTEVAMESAGVYWKPVWHVLEKQNQFRLKLVNAQHYHGVDGQKSDQIDASWLAELLQCGLLKGSFVPEQWQRELRDLTRLRVALLQDQNRIQNRIEKLLEDANIKLGSVVSNTLGTSGRKILKALIAGDKDPGWMADYAQGRLRGKRPELTEALFGFVTDHHRTLLDMLLRQIESLDRDIASLEAEIRRRLDPHQDLVERLAEIPGFGEITAWTVIAELGLDMNVFGTPERAASWSGLCPGNRKSAGKRGHGRTRKGNRWIRRGLTQSALAASHDQDSYLRSFYWRISSKRGPKKARVATAHKQLTIAFFIIRDGVRHNDLGPDHYDRRQPERTQRYLIKRLEGLGLKVTVEPAA

SEQ ID NO: 313760 - protein, 307 aa, unidentified
MSEKIYFGVDVCKESLAFCGAGIAGQVSNNAPGQRRLLARLPEGAHLIIEASGGYERELVRVAQQSAVCVSVVNPRQVRDFARGVGRLAKSDPIDAVMLARFGAEVNPPPDAVPTAAEVALQELVSARQQLVEERTVLLQQQIQHLSSIVRRLDRARLKLLQRQIAQLELAIGSILEEQSALKQKVERLQQVKGIGLITAVTCVALCPELGSLSKRQTAALVGVAPYDDDSGARKGWRHIAGGRPRLRCALYMAALSAIRSNPILRRFYQQLRQRNKPSKVALVAVIRKLAILLNQLLRNPSFLPAS

SEQ ID NO: 313761 - protein, 322 aa, unidentified
MSGSSVTVGIDVASEHVDVAAQGAELPASLSHVGNDAEGHSALAIALARLQPELVLMEATGGYEAALACALQAAGLRVAVVNPRMARDFAKAMQRLAKTDRIDAVTLAEFAAVLTRRPDCERFIRPVSEPEQQDLAALVTRRRQLVTMQLSERPRLRLARPVAQPSIEALLQAIARQLDDVEAQMVAHVAEHHAQMSKLLQSVAGIGKVAAATLIAELPELGRLNRRQICALVGVAPFANDSGASRGRRRITGGRFEVRRALYMAALSATRYNPPIRAFYLRLVAAGKLKKVALIACMRKLITNLNAIARDNLNAQNRAINA

SEQ ID NO: 313762 - protein, 364 aa, unidentified
MSNCITWVGIDDSLNKLNIAICYGQESNPRDELVFANDSTGLGRLARKLKELPGVRCVYEAGINGYHLHRFLSRHGICCDIAAPSLTPRRSGKRVKTDRLDAKSLARLYRAGELTSIAIPEKEQESLRDLMRAREDALEDQQRARHRLVRFLTRRGLRFIGGKNWGVGHLRWIKSLTFDDNKDQSVLDEYRLALDEETERLKKLETIIEGIADQELYRRRVRYLIALKGVRVLTAMTIIAEALDLRRFKDASAFMAAIGVVPSEESSGDRERRGGITRTGNSHLRRVLIESAWNYQRGAASGKTIQKRREGLPPEILEIARKADRRLNHKFRHLINRGKDRRKAAVAVARELAGFIWAIGQVTA

SEQ ID NO: 313763 - protein, 314 aa, unidentified
MTLAPCFIGIDISKSQLDVCIHRGGRDRRFCTGSDAAGLSHLCRRLKALKPALIVLEATGGYERGTLAALQAAGLPVARVNPRQVRDFGKASGILAKTDRLDAALLARYAQAFQPAPTAAPGEDVELLRALVQRRRQLLQVRAAETCRKAQASLPTLRARIERLIATLSQEIKLINRELSSLIAEQKELANRARLLRSAPGIGPVVVATLLAELPELGTLSKKQIAALLGVAPFACESGQWRGRRHCTGGRKSVRDALFMATLSAATRTSSPLATFYDRLRKAGKAHKCAIIAVMRKQIVALNAMIRDGRAYGH

SEQ ID NO: 313764 - protein, 341 aa, unidentified
MQAIRFGIDLAKSVFQIHGVDGSGQVVVQRQLGRAQMLTFFAKQPPALIGIEACGSAHYWGRELEKLGHQVKLMPPAYVKAYVKRNKNDARDAEACCEAVSRPTMRFVPIKTVEQQGQRALHRARDLLVRQRTQTSNAIRGMLYEMGLISSKGRCGTLALIARIEAGAADIAPGLLIPLAALARQWRSLEAEIATLDQALKAQVRDCADAQRLMHIPNVGPVIAHAVIAAVGDGRQFASARDFAAWVGLTRKNHDTGGKTRLTGHVSKAGDRALRRLLVLGASAGLRHVRANPDKGSPWIRGLLARRPVKVAVVAQAAKTARIIWAVLTSGQDYRTQPHRA

SEQ ID NO: 313765 - protein, 365 aa, unidentified
MNEKLNHLGIDVGKRKCRVAVKDDKGNILDEFFFGNDANGISNLLSRVKTNGTHYTTTQAVLESTGNMWMRIHDILEENGIDTVLANPYKTKIIAEAKIKSDKLDARILSDLLRTDLIYESYVPKQEDRDKRSLVRHRITLSRTKTKLVNKVHSILDKYDYKTELTDIFGVAGIRWLKSLLPMVSPIDEIILTTAIESIQTINHQIDVVSKEISKYACRNDKDVKILMSITGIDTFAAMLISAEIVDVRRFSTPWKLVSYAGLAPSTRESAGKTITGRITKQGSPWLRWILVQCALVAIKYDSRLSMFYNRIKNRKGHGKAIVATAKELLVIIWYMLTRNELYRNMNKQRYQQKLRKLEHTYTAK

SEQ ID NO: 313766 - protein, 328 aa, unidentified
MVAKVSDAIVGIDVSKETLDAYCAKGQRKQGRTFANSPDGWKLVRTWLKAMGSKQARVCMEATGRHSLGVALALHEAGHVVSVVNPAQIRDFARTKLGRNKTDKVDAALICEYAELFKPEPWTPPSPAMRRLCELQTVRAGIIRSRAEWKNRIGSGLGDTTATKLAAATIEHFTTQLEAIDRAISETIDQDAELHARCALLVSVIGVGDTLAALLMAKMPEPGVLRRSGEIVAYAGLNPSHHRSGTSIDRPTRISKIGNATLRSSLYMPALSAMRFNPAVAILVARLKSAGRLKPKQIVVAAMRKLLVLCFGVLKTGKRFDLAIAMPA

SEQ ID NO: 313767 - protein, 409 aa, unidentified
MATSTDGLSAEPVFAGIDWGGTCHQLCIVDATGQVLVQRRVRHDVAGLAELDEQLAGRADVKVAIERGEGLLVEHLQQRGLPVYCVSPKVSARARERYRLAATKSDAFDAFVLADTLRHEHPHWRPLSVPAALTAELAAVTRDRERIVVSQRSVESRLRAILESYHPAPLHLFSSLDRDIALAFIGDYPTPAQAGRVGEARMEGFCRRHGYSGRVEPAVLVERMRPHLLTAAPGTTAGKQFTAGLFVDQLRLFNGQVRACDKRLAELLDAHPDAPIFRSFPGIGPVTAAVLISEMGDDRARYPHPAVLLAETGLAPVTRASGRMHQVRFRYAANKRMRHAIDWWAFTSTRETDWARQAYEDARARGHGKYRALRGLGARWTRILWRCWTDHVPYDAAKHPAAQQDNTAA

SEQ ID NO: 313768 - protein, 343 aa, unidentified
MYYIGLDVHKKAISYCVKDAAGHVQGEGKIGSTRRELDGWIRALPQPRMIAMEATIFTGWIYDHLLPHAEKVKVAHPLMLRAIAAAKKKNDRIDASKIADCLRCDFLPECHMASTEIRDRRRTLRYRSLVIKQMVQMKNRVSGLLMETGVSYNKQRLHKLGYFEALMTSNEDVHDSIRPLLKLSREMISRSRKLDYALISSLERDPLLTERLRRLRTVPGVGPITALTWALEIGDFTRFTSNKQAISYCGLCGEEKSSADKVLRMPISKQRNKHIQRVLIEAAKLATRESPELAMIRARELERGNPNRATLAVARKMVIYLLAVERRQQDWVAAEQFRRTAAA

SEQ ID NO: 313769 - protein, 323 aa, unidentified
MDKSTKFSGIDISKDVFDVMDMRDQHFIFQNSSKGFREFKKVLATDSVCVMEATGYYHLKLAYFLLENKIKVSIVNPLSIKRFVQMKLSKIKTDKADAKMIRLYAQNNELKLWKGNSKNQIESLQVARLLDVYTKQSTALKNKVHGEQTLGNPSSIVVRSLKRGLKLIQQEKKLLEDRLTELVKGEYAAMLTNLESIPGLGRKTATMLIVFTDGFNRFDSAAALCSYSGITPIIRKSGTSVNGRSRISKMGNRKLRNLLFLCSFTACVHNKACSDIYQRITNKGKSKKLALIAVSNKLLKQAFAVARSGMPYDENYRSVLTVH

SEQ ID NO: 313770 - protein, 553 aa, unidentified
MEIESRFDSCFRDCSHGSFRSEQASRCYESPRQTLEVYAQSFEQRDALCFQNESSDVVWSLITRLYYKAFAEAKPCLLLCRTRRKGDAMNPSTPSTVEFGAFVALDWADQKHAWALQALGQGRRQHGELENTPEAIEVWASELEQRFGGRPIAVALEQPRGAVVAVLSKYAHLVLFPVHPSTLAHYRQSFYPSGAKSDPSDADLLLELLVQHRDRLRPLQPDTMETRLLQFLVEERRRLVDDRTRYSNRLTACLKQVFPQVLKWFDDVTCPLVGDLLQRWPSLTELQRARPDTLRRFFQEHNCRDQERIEERLRLLPQAVPVTHDPALLQAGSLAIRSFVQVIAQVREGIARYERKIEEVAQSHPDFLLMDSFPGAGPALAPRLIAALGTDRSRFQSAQELQCYTGIAPVLAASGQQRWVHCRWACPKFVRQTIHEWAQHSIGGCDWARDYYQAQRSRGKSHHTAIRALAFKWLRVLFRCWQDRAPYQEQIYLAALGRRASRSPVAGAPPPPAHQPTPEPGAPPAPAQPPTASAVQLRWESCAGFFKLGVVSS

SEQ ID NO: 313771 - protein, 343 aa, unidentified
MDKDTMIGVDLAKNIFQLHIATMTGKVLSKKKLSRQRFKEFMETHAPAVVVLEACGSAHYWAETLCKMGHAVKLIAPQYVKPFVKRQKNDAADAEAIVIAAQRPEMRFVEPKTKEQRAKAVLFRSRERLVHQRTEQINALRAMLYEYGYIIPQGIASINRIEELLSEPNCDLPNLVCDECRDLLGLIATNTKLIRTKTELIKELAKQTDLARQLQTIPGVGPMTAMAIEAFAPPMNVFKNSRALSAWLGLVPRQYSSGGKERLGRVSKAGQADIRRLLIIGAMSRLTWLGKKSISEGSWLAQMMARKPKILVAIALANKMARMIWAMLKTGTDYRDPMKTATV

SEQ ID NO: 313772 - protein, 312 aa, unidentified
MPANAQPHYVGIDVAKDRLDYCIDEATEGTCPNTPEGRSQLIDKLRKVPQPRVIIEASGGYEKVVLAELWQASIEACLVQPGRVRALAHAEGLAAKTDRIDARLLRRYGEKINPRLSVPPNPVASTLRELLEHRRALTIQRVEVVGRLDMAGPTLHPLLIVQRDFLDQQLAKLDQLITTHIDNDPDLRAKSKRLQEVKGVGPVLAATLLAYVPELGQVEDAQLSALVGVAPHPKDSALTAGPRHIRGGRIQVRNVLYMAAVCASRHNPILAGFYRRLHANGKPARVCLVAVMRKLLCLLNRLVQDPSFVLVS

SEQ ID NO: 313773 - protein, 356 aa, unidentified
MSRDIKYIGMDVHKEAVVIAVLNSGGELVMESIVETKASSILQFIHGLRGELHVTWEEGTWAAWLYDLLQPQVKRVLVCDPRRNALLKEGNKSDKIDARKLADLLRTGMVRPVYHGEHGLRTLRELGRSYQTIGQDLNRVMNRIKALYRGWSISCAGTQVYAPRYRAQWLQKIEHVGVRRRAELLYQQLDGLQALRRTLRPELLAESRKHKASKLLRQIPCIGPIRAARLIALMQTPHRFRSKRQLWAYSGLGIETRDSAQYCYVHGQLQRTKKPQQIRGLNRNHNHEMKEIFKGAATRASCGVGPLHDFYVALVAKGMKPEMARLTLARKIAAIALTLWKKEERFDTEQLKPQAA

SEQ ID NO: 313774 - protein, 444 aa, unidentified
MAARTRQVFELKHPNAAGIDIGSASHFVAVPVDRDDEPVREFKSFTEDLIAMADWLKACGIDTIAMESTGVYWIAVYELLESRGFTVFLVNARHVKNVSGRKSDVLDCQWLQQLMSFGLLAGAFRPGDAICGLRALSRQRELLIQGQATHIQHQQKALTEMNVQLANVLSDINGKTGQAIIRAIVAGERDPAKLAELRDKRVHASKEAVAKSLQGNWREEHLFSLSQAVKLCDAYQEHIDACDRQVEQKLITLACHDGEPAADGKRKGRAKNTLNFDARAALFRVCGVDLTRIDGLDVGTALKIMAEIGPDLSKFKTVKHFCSWLGLCPGTKISGGKRLSGRTKRCANRVTQALKMSAMGLLRSKSALGAYCRRMAARMDKPKAIKATAHKLARLVYTMLTKGEEYVDRGQDYYEQQHHQRVVANLQRRAKDLGFTLAPMPKTA

SEQ ID NO: 313775 - protein, 460 aa, unidentified
MSRKQPQVHDWEGLKVIHPNAAGLDIGSEEIWAAVAPAALPAAVRKFGTFTPDLATLADWLVGCGVDTVAMESTGVYWIPVYEFLEARGLRVYVVNARHLKNVPGRKSDIQDCQWIQGLHSVGLLRGSFRPEAEIVALRAYLRHRAALIEYRAAHIQHMQKALQQMNLQLTQVITDVTGVTGLAIIRAIVAGERNPQQLAALRQPTCKQNAETIAKALTGNYRREHLFALEQALALYDVYTEQMRACDAEIACQFANLKPIADDLPPLPPLPKSDSHSKNGPAYDVRTLLYQLTGVDLVAISGLNASTVQTIIAEIGPNVDAFPTEKHFCSWAGLAPHNDISGGKRLRGRTLKTNNRAGQAFRMAAQSVAKSPNSHFGAFYRRMKGRMGAKQAIVATAHKIARTFYYVLKHRVPFHDLGGEEYERQAQERERKNLQKRAAKLGMVLVDAAPTPALAVGSF

SEQ ID NO: 313776 - protein, 351 aa, unidentified
MASSITVGMDMGDKNHSVCVLDSECEVQQRTSVTNTARAIQKYFAKLPPCRIALEAGTHSGWVSRILEGMGHEVLVGNPRKLRAIWDSDEKDDDRDAEMLARIAKLDPHLLYPIHHRGQEAHTDLAVIKARDMLVKSRSILIAHARGAVKTLGQRISSCSAEAFHIRLLEQMPAELLPALEPVMKSIEELTTRIRHYDRLLENLCTAKYPETAGLRAISGVGPITALAFVLTIEESSRFDKSRAVGPYLGLVPKRDKSGQTDKQLGITKAGDAYLRCLLVGCAQYILGPFGPDCDLRQFGLKLAARGGKNAKRRAVVAVARKLAVMMHHLWKSGAAYDPFYRQSLKQKKVA

SEQ ID NO: 313777 - protein, 385 aa, unidentified
MKILALDLGKNKTVYCEYDTDACTGTGTASPGAKAGPKAGVVYGKVRTTPQDLHDLVARLGPARVVFETCSAAGWVYDLAAALEVEVQVANPNHEGWRWRHVKKKTDRVDALKLAQLSAAGQLPLVHMPAPDVRQWRSLIAYRHGLVDRRTAVKNHIRAVVERQGGSLPPGKAAWSEGQLAVLASEARNAAEVKDEELWRLELHEELRCLADLEARVEAVEAKLAAVAESKKAVALLRTAPGVGPRLAELVVSALDDPGRFKSGKQVGSYAGLTPRQFQSGQSDRQGHISRMGNGLLREVLVEVAWLGLGTSAWMRRVYEQVRRGSDQRKKVAIVAVARPLLVRLWAMLRDGRPWEEEPAPRPRPTPTGPASAPASAPAACGVVG

SEQ ID NO: 313778 - protein, 403 aa, unidentified
MDRTAGIDLASEEHRLVVVEADGRRLDERRYLHSEEGVTALVRRLLALGVARVALERPNGLVVDRLLEACIVVVAVHPNQLAAARDRYRSGGGKSDGFDAFVLAELARTDMHRLAALEPDGDETRALRALTRAREDLVEQRVALANQLRAQLDAFWPGASRIFSEVDSPIALAFLERYPSSQDARRLGEKRLAAFLARHGYCGRKSAGELLERLRSAPEGRAGEVETEARRQVVLALAAALKPLVEQIRLLTSEIRGLLADHPDGEIFRSLFRDPKSVVTAAELLAEIGDRRDRHPASSSLEAIAGQAPVAVESGKKKVACFRWACNKTLRSAVSVLADSSRHHNPWAADIYQRARARGHDHPHALRILGRAWLRIIWRIWQDRTPYDPARHGSLNRLLAAQG

SEQ ID NO: 313779 - protein, 391 aa, unidentified
MICVGIDVAKDKHDCFILNSEGEVLADVFTIPNNTEGFSCLLRRIQDCATDQGKIKVGLEATGHYSYNILGFLLDSGLDTYVLNPLHTNLYRKSLSLRKTKTDRVDARTIAAMLMSDASLKPYTDTAYHNEELKSLTRYRFDRVKERAQLKQSIARLVCILFPELEKLVPTLHMASVYELLDECPGARQIANVHLTRLKTILHEASHGRYGRDVAVAIRDAARGSIGSVMPAKSLELRHTIRLIRELDTEIEEIEAAIQTIMDELHSPITTIPGIGFRMAAMILAEVGDFSRFDSPDKVLAYAGLSPSTYQSGQLSNCYAHMEKRGSRYLRFAIFNATKYVCLWDTSFAAYLAKKRAEGKHYNVAISHAAKKLVRLIFALEKSREPYHQIA

SEQ ID NO: 313780 - protein, 341 aa, unidentified
MAPMYYGGIDAHKTYLTLAVVDKDAELVLQRKRVPIGTGEALLEALRDFRPLKVVVETCPFWPWIHDLVAGTDIEFHLAHASRLEAIARSKKKTDRVDAELLARMLQSKLIPEAYPKPPAQRELARLIRHRATMVKDRTRSINRIHNQLHQKGIQGERETLLRDKGRQWLEQSVWPELSTQQQAIVGTQLELIDFFTTKIEALDEEIEREARNDPAAILLQTIPGIGPYRSLLLAAEVLPITRFPSPGHLVSYVGLAPTVKQSGSGRPRHGAVPRGANRWVRGALVSAIPSHLRAEPDSSVATYYQELKERLGWPTARVAAARKLCRVIYAMLSTGEVWRG

SEQ ID NO: 313781 - protein, 413 aa, unidentified
MDVLHSRCCGLDVHKSSISACVLLREAGRVQKHQRRFGAMTQELQELAEWLRQFGVTQVAMESSGVYWKPVWNILEGQFTVVLANAQHIKNVPGRKTDQKDAEWIAQLLQYGLLRASYIPCEIIRDLRDLTRMRASLSQEASRISSRIQKVLEDANVKLASVVTNVLGKSGRAMLEDIITGEDDPEHLASLALGHLRVKIPQLRLALQGKIRSHHRFLLRRLLDQIQFLEHEIALLDERLEDIGRQRPDLAQAVARWDTIPGIDQVAAWALLAEIGNNMAQFPTADHLASWAALCPGNHESAGKRLRGTTRQGSTWLCRMACQCAWAAARTKNTYLSSQFRRLAARRGKKRAIIAVAHTLIVIGYHLQKNQSNYEDLGGDYFDRIHSDGLKRYLVKRLQQLGHKVTLEPMEAA

SEQ ID NO: 313782 - protein, 335 aa, unidentified
MQVYGIDLSKEKFDVSFIDAKGKEKKQKVKNAVASISRFLSSVSEDGILCAEHTGVYGDLLVYLCNQMNVPIALVPGYTIKHSLGLVKGKSDPMDSKRIREYGERFPDKLEYAEYPEENLTELKQLYTLRHQLVKQRKSLRTLDKGEEHHPMQSISVHKHMHTALDGLDKEIVDIEEDIEMLIRKDQEMNENFELVTGIIGIGPVIATDLIIKTGNFRIIDTHRRAASYAGVCPFPNASGKMVGKSRTSPFADKKLKSLLYMGARAAVKHNKEYKLYYQKKELEGKPYFLIMNNVSNKLLRTVYSVVRNKTPYVRDHVCLDPRERNINSSTKKVA

SEQ ID NO: 313783 - protein, 313 aa, unidentified
MMASQDVFVGIDVSKDRLDVHVRPLGVGFSVDNEAAGYAALIARLRPLRVKRIVLEATGGYERALWLALSEAGLVAAVVNPRQVREFARAAGRLAKTDRLDAAVIAHFAETFAPRIGKPDAVADRLGEHVLYRRSLQDELVALEHQRRRLETPALRERADRRLAALRAEVKEIERAMRAIVDGDPAKKALFACLTALKGVGLVLACTLIANMRELGSLSRHQAAALIGVAPLNHDSGTRRGYRAIAGGRRRVRNVLYVATLSAVRSNPPIQEFYRRLSASGKPPKVALVACMRKMLVMLNGRVRDELAAVTIP

SEQ ID NO: 313784 - protein, 439 aa, unidentified
MSNLNKQKEATPFAAHIGLDWADQKHFWAMRTADGTQHCGPLINTPEAIQVWAGELAQRFGGQLIAVALEQSRGAVIAMLSKYAHLVLFPIHSTTVANYRKAFCPSGAKSDPGDGRLILELLWTHPDKFRGLYPDTVETRKLQFLTEERRQLVNQHTSEVQRLISWLKQIFPQIVTWFEKPSCEMVGDLLKRWPTLEALQKASPKVLRKFFHQHNCRSEERIEERIDQIGHAVVATTDEGLLQTGLLCIRHSVAMLEILRASIDTFDQQIAEVYQNHPDRFIMESFPGAGPALEPRLIAAVGTMRDRFHSANSLASFSGIAPVTESSGKSVWIHWRWACSKFIRQTFHEWAGCSIRSCDWARAFYEKQRGKGKGHHAAIRSLAFKWIRIFFRCWRDRVPYSEELYLKALQRHAPKPTSAPVEITWKTAAGFAKLSALSS

SEQ ID NO: 313785 - protein, 351 aa, unidentified
MPRRSTVRAVATIGIDMGKNTLHMVGLDSCGAIVLREKVSRGRIASRLANLPPCLIGIEAGMATHYVARELAALGHDVKQVPPAYAKPFRQGHKNDFRDALAVAEAVQRPTTRFVPPKSNEQLDLQALHRVRSRLVSQRTAVINQIRGFLLERGIIVRQGLRFLRQLLPDILAKRTDVLSPRMVRIVSDLAGDWRQLDDRIETVTDEIETLAKADDSCRRVMTVPGIGPIISSAMVAAIGNGSAFSRGRDYSAWLGLVPKQMSTGDRTILGRISKRGNSYLRMLFIQAARVILLRPANWPKHGFGAWLVRAIQRLHPNVLAAALANKLARIAWTVLAQERSYEARVTKAEA

SEQ ID NO: 313786 - protein, 347 aa, unidentified
MDITTIGIDLAKLVFQVHAVNAHGKVVLKKQLKRNQMAEYFVNLKPCLIGMEACGSAHHWARKLQSYGHTVKLMPPQYVKPYVKTNKNDAADAEAICEAVARPNMHFVPIKTLEQQGILTIHRIRQGYVKARTAQANQIRGLLAEFGIEIPLGIGYITKRVPELIEDASNDLPGIVRIEIQELLEHFKHLEERVNDCEKKIVCWHRKDGTSKKLEAIPGIGPITASALVASIGDSKHFKNGRQVAAWIGLVPKQHSSGGKQTLLGISKRGDTYLRTLLIHGARAVIHHSVGKIKPTGTQSWVNQLAARKNKNIAAVALANKNARIVWALLNHDRDYQDNHKTLRVAA

SEQ ID NO: 313787 - protein, 353 aa, unidentified
MQQRYIGIDAHSSSCTLVVMGATGKRIKEVQVETDRGTLIDAVRGIAGERYICFEEGTLSDWLYEILEPLAKNVDVVHPPKRVRGSKNDSSDAWVLAEAMRVQSKQVVRVFKQPNKYTMLRKAARAYEVIQRDVVRVKNRIHAGYRARGISGLGEAIYDPDRRQECMAQLPAGQQCLVEHYCRELDGLNAAHDEARRWLLEEAEKQPIVALLQTAPGIGAIRASLIVATLLSPERFRTSRQLWSYCGLGIVTRSSSDWTRDGDGWRRNHVLQTRGLNRNRNPLLKEVFKGAAFTLTSPKMASHPLHQAYRRLLNSGTKPNLARLTLARRIAAAVLAMWKKKEAYDPTRQAAIA

SEQ ID NO: 313788 - protein, 370 aa, unidentified
MLDTTTFIGLDVHARSIKAVSLDVMTGEVRCATFGYDAGAVAEWVRSVDPKARCVYESGVTGFDLQKRLSGLGVDCVVGAVSKMIKPSADRRRKNDRNDAEFLARMLSVGNVVEVWVPDDECEAARDLTRALEDARDDLSRSKQRLSKFLLRHGLVFDERTPTGRRKGNWTRAHWSWIESIRFAEGADNDVLAYYVDAVRRAAEEKARLEGLVEAEARKPRWRKRVDSLRCLKGVDTASAADLVFEAGEFSRFRNARSFAAWVGLTPSEHSSGESDRRGAITKAGNKHLRKALVEAAWHYLTCSGRPKDLAKGQAPDRGARRHAAKGVRRLAERREALLARGVHGNKANVATARELACWVWAVGLMAEEA

SEQ ID NO: 313789 - protein, 458 aa, unidentified
MAQRTKKRKKRSSRKMSTLEIQNPNAAGIDIGSREQWVAVRPDQNEQPIRCFQSFTKDLNELADWLFDCNVTTVAMESTGVYWIPLFQILDARGFKVLLVNAHKIKNVSGRKDDESDCEWIRKLHSYGLLQGSFQPEDNIRALRAYLRDRDTLVSCSGSHVQRMQKALTQMNLQLHHVISDITGVTGMNIIRAIVDGEHDPQELAVYRDKRIKVSKEIIAKALEGNYLNEHLSSLKRYLQLYDFYQGQIEDCDRQIEDLLRTFPSLDDCPTDIKDVDNKSAKRPKKKAANAPKFDVEKYTRQITGVDLFAVDGFAGSNLLGIIAETGVDMSKWKTEKYFTSWLRLSPNNKISGGRVISHHTQKTKNRANKLFRLAAQSLANSNSALGAFYRRLRYRLGPAKAIVATARKLAIIFYRMLYYKIEYHDIGAEQYDIKYRAKQIKYLEKKAQALGLKLVKA

SEQ ID NO: 313790 - protein, 342 aa, unidentified
MKNMKYFVGLDVHKEKTSYCVRDRLGNILLEGEAATLYMELSQKLKSYLATSKIGLEASTSYYTLYQNFLKNGYDIRVANTIQLRQLIAKNDKLDAKRLSEMLRLGTFPYSYIPNERIQHLRNLVHVRHALMEEKTRCNNRIQAFLDRSGVVMPMCKAFSKKWREALVQYMGTGDVSTELRYTYDHYVYLEKKQEQADQEMIGYAKKHWNQEYWLIRSVTGFGPILSCYVIANVLPIERFLSNRKLRRYAGVIPVFHDSAGHTSKGRIPKESSRKLLRWALIQAANAIAKTETRLGMYYRKKVKQKKNKALAKIAVASSLIDILYHVLTTKKPYNPSLLLNE

SEQ ID NO: 313791 - protein, 525 aa, unidentified
MIATTRRRSATSSPAFDYLGKPHGILSPRVRAVGPEHFGIVAVDCAKASSKWMLTDFYGKVLIAPTVLDHRRDAFDHAFAQISQVMASHQIQDHVVVVEQTGRYHKPAQRAFTAAGHDVRVMHPMISRHFRHAAHPGEKTDDTDLEGIVQATCNGYGLVEPPWEPIYCQIQLWARYRRDLVQKSTQLRCQILEHLESCLPGYARCFDDVFKSGIALVIPGAYGTPQAILEAGLPGLVELAGRQGVRVQQSTLIRILAWAQDAPSPDREAILHQRLLGELNRDRITKEEDIQASERELVALLVQTPYVRLLALAGINVVLASELAGELGPIVHYATARVITGRAGLFPRRHQSGPVDYRRGLVCQGNRRLRQVLLLAAETLCRCNHHFQVLSQRWLSHGKDPRDVYVRVAGRLSRITFQMVAGSAAFRHPACQGPPAVLEKLMEFHDEHEINLTTTRTNLQHAAAQLPGAERARERGVWKAKQAEIRGKRGRGPKRLAAILPAVLKQLVGGELAGLIESKASGETP

SEQ ID NO: 313792 - protein, 376 aa, unidentified
MKQFNDIYVGLDVHKDTIAVAIVRGLRSKPIYFGEIPNTPAAITKLLHQLSPDGEVLNFCYEAGPCGYEVYHQLTKLGQSCSVVAPSLIPRMPGVRIKTDRRDAMSLAKLHADGSLTAVWVPGKEQEGIRDLSRAREDFKQTETKARQRLGAFLLRNGKIFTGKSKWTVAHWRWMETLTFETPMQHIVMQEYVEALKEASRRLLGIEKQILLAVRGWSLEPVLNSLLAMRGVNTITAVTLLAELGDITRFDNPKQLMSYLGLVPSEYSSGSKRQQGSITKTGNGHVRRVLVEAAWNYRFPARKSRTIEMRAEKTSDRVQAIAWEGQKRLCGRYQKLLSLGKLKQKVCTAVAREMVGFVWAIACEASGRVHASRATA

SEQ ID NO: 313793 - protein, 410 aa, unidentified
MTEAAYQIYVGIDWGSHTHQVAVLDTARRLIGERAVSHDGLALQALASWLADLAPPGAVAVAIEVPHGAVVDTLLERGIEVYALNPRQMDRFRDRYTVAGAKDDRRDAQVLAAALLTDRPAFRRLQPDDPLVVQLRELTRMDAELHEEIRRLANRVREQLLRFYPQALTLCPAADEPWFWALLTLLPTPMAAARRRRGPVAALLREYRIRRVTADEVLTVLRRPPLTVAPGTIEAAGAHIALLLPRLELAATQRRLCAHRLEALLETLAAAGEHQGHRDVTILRSFPGVGRTVAATMLSEASQLLATRDYHRLRTYAGIAPVTRQSGTHRGVHMRYACNLRLRNALYYWGFIAARHDPATHQHYQTLRARGHSQGRALRGVADRLLLVLMAMLKSQTLYDAARRRAQVAA

SEQ ID NO: 313794 - protein, 340 aa, unidentified
MGDKYARYAVLEDGNDFIEQDRLPMTKAAFGSRFGHWKPARMAIEAGTHARWVSELLRAMGHEVIVANPRELKALTQSAHKSDGEDARKLARYARADVGLLKPVQLRSEATQLELLKLQTRDALVRSRAQLTTTVRGWTKAFGANIRQCTTQGFALRAEQELPEALRCTLQPVLDVIALLTELIKKADRQVEKMVAEHPVAARLDGVAGVGVVTAMAFVLTIEDPGRYRRSRDVGAGLGLTPRKDQSGDSDPQLGITKQGNGLLRRLLVQCAQQLLGPRGRDCAIRQWGLKLAGEGKNKRLKKRAVVAVARKLAVVMHRLWITGEQFVAFPQGQPAKVAA

SEQ ID NO: 313795 - protein, 352 aa, unidentified
MRHFIGCDVHTRNQFVAWIEEETGETKKRRLEHEGKEVREFYAQFPRGTVVGIEATFPAHWFERLMGELGHELWVGDATKIRASEVRRQKTDERDAELLLDLLRTGRFPRIWVPSLEERDLRQLLVHRMKQVRARTQVKNQLHALAISQGVCRKGKLWSVKGRKELESLALLPWAARRRKELLETLDRLDEQIRELDRAVEEAGREREEEALLRTHPGVGMVVGLAYVLTVGPVERCRNSRKLVSYWWLNRRESSSGGRQRLGSISKQGNTMMRWLLVEAAQTAARLDPPLGRIYQRLKKKKTSGVAKVAVARRLAVRLFWMLRTRNNYTQLVHMSGSPSSAVIPPQAGSNT

SEQ ID NO: 313796 - protein, 392 aa, unidentified
MSQHFRFDASRSHTALDQDSTIIAVIEMSQTKWLVAALVPGVERQPLKKFDAHEEMLLKLLHRWRREAGQAGRNIKRIVVAFEAGRDGFWLARWLRARDVEAYVIHPTSIAVSREHRRAKTDRLDTELLMRVFLGWLRGEKRHCSMVAIPTIEEEDARRPNREHQNLVTEQTRIINQIKAILTRFGIRLLQPTMRKVAERLDDLSTAEGVPLPQNTLAELRRHLTRLRFVRDQIRAVEQERLRNLAAVPAAEKKSPQAMVRLIARVIGVGVETADMLVNEVFSRQWRDRKAVARYAGLTGSPDESGKRRRERGLARAGNARVRCGMIQFAWRFVRFQKDSALAQWFAARTADGRAGTRKAMIVALGRKLLIALWRLVTRGEVPQGVVLRPAS

SEQ ID NO: 313797 - protein, 441 aa, unidentified
MVAVMIGIDPHKASHTAVAIDPAEVPLGQLRVRACAAQAERLLAWAQAWPQRIWAVEGAGGVGHLLAQQLAAAGERVLDVPPKLAARVRLLATGNINKNDPNDARSVAVAALRSAGVREVRRDDHAAVLKVWSKRYRDLGRARTQMACRLHQVLCELIPGGVPGEITAGQAERILASITPAEAVEAARWELAAEFTEDLRGIDARIRQTRNTLAAAVRAAGTSLTGLFGVGPVIAAAVIGDVRHVARFPDRDHFAAYNGTAPIEVSSGGRKIWRLSRRGNRRLNHAIHMAAVTQIRYRHSPGHAYYQKKLAEGKTGKEALRALKRQISDAIYACLQADAQRAAARTKSPGGQPGNGSDSSAAGSHPGHRLFGQATPGPATYPTTTTASFPALPCQASGRPGQGPGAARPRQRRQQGVLDPAAREPIMPAAGRKATGPAAHR

SEQ ID NO: 313798 - protein, 373 aa, unidentified
MCKVIMIGCDLHSKTMLLKIGQGRSKPETQLVKNTPSGRAKMIQGLKKRAAAAGGTRILFAYEASGQGFGLYDELTDAGIECHVLALTKIARSQRHASQKTDEKDAQQLLELLRGHVLAGNELPSVWFPDATTRDDRELIRTRLDVGEKITTIKLQIQSLLKRNHVARHKSTGKGWTLGFRHWLQHELCESAASPLGRNSRSTLTSLIRQLHFLEKEERRLDELVGALAAHPRYAAAFEEMVSLCGVGCLTALVFLTELGDLSRFANRRQLAAYLGLVPRSFESGDANDRKGHITRQGSSRVRKMLCQATWVRVRWHEKEQQVYQRIVQKNPKKKKIAVVASMRRLAVRMWHRGKAFQGKPARRMILMGAAPG

SEQ ID NO: 313799 - protein, 349 aa, unidentified
MKRLLKQVVGVDVAQKELVVSIGRIHDDLVPEIYGHHTFANTPKGFDALLTWVSKRSDASIAVHYVLEATGVYHEKLTYFLHEGGYAVSVILPNRISSYQRTLDIKTVTDKTAAEAITRFGLERKLQHWEKPKPVFKKLQQLTRERDQLIQTRTLVKNQLHAEQAQAEPNSGSVKRLQQQVALLDKQEKEIQLEILSLLDSDESVKRAVKNLCSLPGVGILTAVVVLAETNGFELIRNKRQLASYAGFDVKEKQSGTSVKGKPRISKRGNRHLRKAMHFPALGAIRRDERFKAIFARLVSKHGVKMKAVVAVQRRLLEMIYVLYKTGAVYDENYHQHARLADPQNIENE

SEQ ID NO: 313800 - protein, 351 aa, unidentified
MSQKTNAVAVRTIGIDTGKNTFHLIGLDEQGTIVLREKLARGRIGKRLANASPCLIGIEAGLATHYVARELLALGHDVRQVPPAYAKAFRQGHKNDFRDAYAIAEAVLRPSTRCVPVKTDDQLDLQALHRVRSRLVGQRTAVINQIRSFLLERGIAVRQGPRFLRQQLPEILAKRIDVLSPRMIGMIEDLAGDWRRLDERIECITEEIEQLAHGSESCRQLMTVPGIGPLIASAMVAAIANGAAFAKGRDFAAWLGIVPKQRSTGDRTILGHISKRGNRYLRTLFIQGARVILLRPANWARHSFGPWLTAAAKRLHHNVLATALANKLARIAWTVLAQRRNYETRVVTEAA

SEQ ID NO: 313801 - protein, 343 aa, unidentified
MTHYVGLDVSQKLTAICVVDDTGRRLWRGQCTSDPEQVERAVCRHGGDGARLGIETGPMTPWLVHELRGRGLDVTCLDARHARAALKMQINKTDQNDAEGLAQIMRTGWYRSVHVKSFDSHRARALLGARAQLVGMTTRLSNHIRGVLKTFGMLPGQMRGLPFDRRVEILLADRTEVAPIVRPMLAAWRHLREQITAFDKAVRVLVKSSPTCRHLLGVPGIGALSVLAYVSMVEDPTRFRRARSVGAHMGLTPKQYQSGEIDRSGRISKCGDMLARTLMYEAAVVLMTRVKRASGLKEWAQAIARRSGAGKARVALARKLSVILHSMWRSGEPFRWSEQPATA

SEQ ID NO: 313802 - protein, 346 aa, unidentified
MQVDLGDRNSWYCVLDEAGQIQLEQRVRTTAKALGEVFGAMPRSRITLEIGTHSPWISRLLSELGHEVIVANARKVRLIGESRKKDDRLDARTLARLARIDPELLCPVKHRSAQAQADLTLIRARAGLVRARTALANTARGLAKSYGERLRGCNVRNMNPEKAEGLSPELQAALQPLLAALESLSERIVEYNERIEKLAQQSYPQVALLKQIKGVGTLIALTFLLTLEDPHRFRKSRDVGCYLGLQPGRRNSGQSEPQMHISKEGDPYLRTLLVQGAQHILGPFGVDCDLRRWGLKLAERGGRNGKKRAIVATARKLAVLLHHLWVSGEVYEPLHNSSQTTVAAAA

SEQ ID NO: 313803 - protein, 344 aa, unidentified
MNVTTIGIDLAKSVFSIHGTNPHGKLVVRKRLSRSKLLVFIAQLPPCLIGMEACSGAHYWAREMTRLGHQVRIIAPRFVVPYRKSSKNDPNDAEAICEAVGRPTMRFVPIKTADQQAVLCLHRIRRGLIKERTAQINQIRGLLAEFGLIMPQGRYAARQRIPDVLEDAENGLPMLARRLLDNVNQRIRQLDEEILAYDREIEAMARDDDQAKRLMAVPGIGPQTATAILASAPDPTQFKSARHFAAWLGLVSRQYSTGGKVRLGRITKRGDKYLRMLLIHGTRAGLAGLAEKNDPLSCWARALVARRGYKRAAVALAAKNARIVWALLMHQTDFRKPKTGSENN

SEQ ID NO: 313804 - protein, 356 aa, unidentified
MKYYTSTSEYNCGIDLHAHQMYVCVMDRQGKKLVHCNVKDNDFEYFLKLVKPYRHDLTICSECMFGWYWLADACQEQGLTFVLAHALYLHLIHGGKNKNDRIDSEKLAHLLRSNLIPPSYVYPSAKRPLRALLRQRISYVWRRSELLARIHSHQLAYNRTPPKQTRRTRDFWEEQLLKAENHPLRQLALKNDMAMIRHYDTQIFQLEEELQRQTKRVACREFTLLKSIPGIGEALGLTILYEIGDIERFPNIKDFLSYCRLVKGTVASAGKIKGLRGAKLGNPYLRWAFGEAAVISKRDHYQLKPLAQQLEARMNGNKFKANTVIAIKLARAAYFMLKNKTVFDPERLTAALAKAA

SEQ ID NO: 313805 - protein, 412 aa, unidentified
MEIIHRCCCGIDVHAKSLVVCRIKNGKKQIRTYSTMTDDLLVMLDWLVSEGCQQVAIESTGVYWKPVFNILEGTLEVVLVNARHVKAVPGRKTDVRDCEWLADLLRHGLLRASFIPPLPIRELRELTRHRHTLVRDRTAVGNRIIKLAESGNIKLAQVASNALGVSGRAMLRALSRGEEDPTRMAELARGRLQAKEGQLRRALRGKLTRSQQFVLRELLDQLEQLEAAVARVSAEICEQIEESRDPFVKEAVCLLQTIPGVGEQGAEVIASEIGTDMTRFPDDQHLSSWAGMCPGNNESAGKRKSGKTTKGSNYLRAALTQSAWAASHSKATYLAAQYRKLARRIGKKRALVAVGHSILVIAYHILKNRASYQELGGDYFDRQNIELQRARYISKLQALGLKVSVEPLSEAA

SEQ ID NO: 313806 - protein, 343 aa, unidentified
MKLNRVGVDLAKNVYQLHGVDRSGKTVWKRRLKRHQWFKALLDKTEPGCVIGMEACASAHHWARQLQSRGYTVKLMPPQFVKPYVKSNKNDARDAEAICEAMSRPNMRFVTVKSVEQQDIQATHRIRAELITQRTAKANQVRGLVAEYGLVAPKRLSSLRAAIPCWLEDAENGLTGDFRTLLHGVWEDLLVLDERVGGMDKTIKQLADNNEDCVRLQQLRGVGPMIATAMVASMGDARQYHKSRQMAAAIGITPKQHSSGDRDRLLGISKRGDVYLRTLMIHGARSVVANAKHKDDRLSRWVTAIATKRHPNVAAVALANKTARMAWAMLRNETDYDPDFAIR

SEQ ID NO: 313807 - protein, 419 aa, unidentified
MKSIETKKVKTVNNKTLIVTVDISKTTNVGYCRCPDGTDTKPFRFNNNGQGFNYFWNRITQMKNTYSMEKVVFGFESTGPYGEPLIHFMKKRDVELIQVNPMHTKRVKELQGNSPNKTDEKDPKVIADIIELGHALNVVIPEGPAAELRRLTVARERAMQRRTSLFNQLQDLEFIIFPEFSQVFKNVKIKSAMFILEHFPEPQDIAKFKLECLTVVLKRVSRGKLDEDRVKKLHEAAKTTVGIKEGRRSILFEIKETCATIETTERFIAEIETEMSRHLKDIPYSKFLISIKGIGEITAGGLIGEVGDFRNFNTIAEILKYAGLDLFEISSGIHNGQRRISKRGRSLMRKLLFFVAINVVRKGGIMHEQYQKHLRGGMLKMKALIAISRKMLGIMFALVRDHSNYIENYVEIENLKKAA

SEQ ID NO: 313808 - protein, 347 aa, unidentified
MAIVGGFDIHRRQVIFDYLDTVSGQVRRGRIDPACRETLRVWLARFADRGDVTFAVEGCTGWRFVVEELQRAGITALLAEPAETAHQRGPKKRAKTDRADARHLRTLVAEGRVPVSWIPPGQVRELRVLLQLYRDLREEHTAWVQRIHATLFHQGVPGLAGRLADPQARALLEHGQDIGLSPAGAQAVAVALRRMDDLEAALGPVHAQIAAFARHQAGCKALAAELYGVGPLVAAIVRAFLGDTRRFSSSAQAVRHTGLDVTVYSSDDKRTPGHLSHQGPPILRWALFEAGHQGSRASSPDHLYYTDVAARIDANRAALSVARKLARRSHHILRRLGDQAYAPLPGW

SEQ ID NO: 313809 - protein, 367 aa, unidentified
MKQQTSATTETGIKGRNIIDFTGKTIYVGIDVHQKDYQVAKVLNGFCLGNHRMESNREKLIEHLKSHYPGATFKCVYESCAWGFTLQRTLQASGMECIVVHAADVSTTDKEKRRKTDKVDALKLAHGYASGSLKGIHIPNEETQKDRSLIRYRKQLTGDINRSKNRLKSLLKYQGIDLPPQYAGNNWSRNFLNWVEQQAEKDALLKETLMLLLEQIKLLRQLLLKTERQLREMRKTKYAQKADLACSVAGIGPTTAMLFLLETGDINRFKGFDSLNDFVGLCPDTDSSGDTHRDRGITTRRHKQLRSALIEAAWQAIKTDPALMDSYQTLLKRMKGTQAIIRIARKLLRRLRAVLLSGRPYQKGVIA

SEQ ID NO: 313810 - protein, 284 aa, unidentified
MYYIGLDVASKSSFLYVMDGRGKKIESKEIPTDKDSYRQYFKPWAKKPVEVAVEAGGHSRWIYDLLTRLGLGVYVVNPNKVKLIAESKKKTDKVDAKVLAGLLRMDGLPRRVFIVEGESRELRDLLRSRQQIIKGVTGLMNHLRGMLRQEGIKLPVRVFRNGDIFTRLKDNKDVPDHFSSILDSYEKLIAALHDQRRALDDVIADYQNKDIDLLKSVPGVGEVASKTIFAAVSTIKRFKRAKQLTSYCGLVPTVRSSGDRADYGHITKEGRSEVRRVAVQCAQA

SEQ ID NO: 313811 - protein, 460 aa, unidentified
MCLAGLAVIDAPWGVCAGCVFFRAPVQGSAKIAVARVARTGEEGVTNDKRWYAGVDWASESHHVFLTDDDGRKIGERVFRHGGEGLAEMAAWLMATSGAAEGPQIQIAIEVPHGPVVETLIEREFKVHAINPKQMDRFRDRFTLAGAKDDSRDAEVMASALRTDPRCFRLLAVADPIVIELREWSRIADDLAAERNRLTNRMREQLWRYFPAMLELEHDLGAEWFLDLWETVPTPDKAARIRRTTIAKLLKRNRIRRFDVAHVLAVLRKLPVKVAAGATEAASAHIATLVVRIRLVNRQLKQAHHQLDTLTARLIPTEEAEPGQRKQHDVEILASLPGVGRVVLATLLAEAFDALQRHDYAALRSLTGVAPVTKRSGKSCIVVRRQACHDRLANAMYHWARVAIQHDSRSRSKYSALRSRGHSHGRALRSVADRLLNVACAMLKSRTLFNPSLAAPKTTC

SEQ ID NO: 313812 - protein, 371 aa, unidentified
MEALVFTERTSIGLDVHARSVRAAALDTVTGELVEVGLSGEVTEVVAWVEGIRRRWGSVAVAYEAGPTGFGLARALAGVGIGCTVAAPSKIVRPAGDRVKTDKRDALLLARLLRMDELTGVRVPSPAEEDARDLVRARDDARVELMSARHRLSKLLLRRGLVYDGKTAWGPTHDRWLRRERVSGLAGAGSGTLAAFDAGYDAVAGILARRDRLDRLIGGMAKDSPFTPVTNRLCCLRGISTLTGFALAVEIGDWDRFTGRSIASYLGLVPSEHSSGASRSQGGITRTGNSHARRLLIEAAWHHKSRYSPGKTMRDRWALAPQAVAARGDAGNRRLNRRWNVFVTHKKKHNVANTAIARELAGWCWSLAVME

SEQ ID NO: 313813 - protein, 391 aa, unidentified
MNQTKGKRIIGLDLHPDVFAAAALVGPDAGQARAEWVQDRQATAGLEAWAKKWLQPGDVVVLEASGNSFAVAGRLHACGHTALVLESAQAGKLRDNFCNDDRHSAVKLARVYLSGLAKTVWQPDVQTREYREVFFAHRNAVKDATRCRNRIHSFLNEHCVRLPSGVRLTTASGEATARAAKAWTPLQADLVAQKFAQLREVEGRRQQLERTMVRELAAQPRRASLWRLMGIRHRVAFALMAMVGDIHRFPTPKKLVGYFGLAPRKDQSGNDRAGTDQGVGRFGRGDVRGLLLQSAHNALIQRDSPLHKWGWKLLIRKHRNQAAVAVARKLTVSIWHLLMGHFTPLVETTAHLHAKLLKLATILGKSMLLSLGFADRDAFVTAQIKSLQLST

SEQ ID NO: 313814 - protein, 307 aa, unidentified
MFVGIDVSKDRLDVHIRPTGEVFAVARDGAGLEQLVGKLRTIAPSLIVLEATGGFETVVAAALAAAGLPLAVVNPRQIRAFAKACGQLAKTDKLDAAVIAHFADAVQPPARGVPDEAARALAELLTRRRQLIGMMTAERNRRRQLTQPRLVRTVDQVLATLQLQLSAIDTDIDTAIRATPAWREKEELLTTAPAIGAKIARTLIADLPELGALTRRRITALVGVAPFNHDSGKRHGKRAIAGGRSSVRAALYMAVLVAIRRKLPLAATYQRLRAAGKPAKVAIVATMRKLLVILNAIMWDKTAWHGI

SEQ ID NO: 313815 - protein, 417 aa, unidentified
MPEGRDEQSVRAFSTFTFDLNALADWLSTCGVTTVAMESTGVYWIPIYEILEDRGFAVNLINARHIKNVPGKKTDVLDCQWIQQLHTYGLLRGSFRPDEDMCALRELIRHRDNLIRYRSGHIQHMQKAMQLMNVQLNNVVSDITGMTGSKIIRAIVAGKRDPEKLAKFRNVRCANSEEEIAKSLEGNYKDEHVFALQQALELYDFYNKQIATCDVKIEANYTAIKPQIDINEFPLKPLKIKRSPRGNEPCFDLRSYLYQAAGVDLTQIDGVSALTVQTVLTEIGLDMSKWRTVKHFASWLGLCPQNNISGGKILKTGTKKTQNRANKALRLSAQSLSNSKSALGGFYRRMRAKHGSPKAIIATAHKLARIIYHMLKYKKEYADPGEKYYEEKYKDRVIKNLKRKAATLGLQLVPATS

SEQ ID NO: 313816 - protein, 356 aa, unidentified
MRFYDQQHRFYAGIDLHARTMHLCILDATGTVVRDVNLPCRPDAFLSAIAPFREDLIVGVECMFGWYWLSDLCRKEKISFLIGHALYMKAIHGGKAKNDRIDANKIARLLRGGNFPLAYVYPQGMRETRDLLRRRNFLVRQRSGLFTHLQILNSQYNLPPFAKRIACPANRAELDIAGRFSDPSVRQNAAADLAVIDCLDEQTARLELYLTRTAKVDDVQTFHRLQTIPGIGKVLALVLLYEIHDIRRFSGVGPFLSYCRLVRCEHESAGKVLGCGGRKIGNAQLRWAFGEAACLFLRSSERAKKWKQKQQKKRGEGKALAILAARLARAVYHLWRKREAFDEDRFWQGQPANAKR

SEQ ID NO: 313817 - protein, 340 aa, unidentified
MHYIGLDIHKKTISYCVKDEGGRVWGEGTIAALRPTLDRWMETLPQPWTAAMEATMFTAWVYDPLLPRAAAVKVAHPLMLRAIAAAKKKNDRVDAGKLADCLRCDFLPEAYMAPSAIREKRRILRYRNLLVRQAVQCKNKIAQMLMEAGVSYTKEKLHHRGYFHQLLATNQEIDDSLRPLLRLTRENLVRLRRTESALLRSLRRDPLLAERVKRLMSIPAVGPITALTWVLELGDVKRFPSIKPVISYCGLCSSEDSSAGIAKRTPISKQRNRHLQTVLVEAAHLAPRLHPDLALLYEKEAQKGNRNRATLAVARKLVAYLLAVDRGERIFVMEHSQAAA

SEQ ID NO: 313818 - protein, 394 aa, unidentified
MILVGIDIGKNKHTFSIINKSSGEILLSPSDFSNNLEGFLFLIQKLNNYTKSELLIGMEDTGHYHFALLKYLLDRRYTVALINPTTTDLTRKLQGGITKNDPLDSLTICDVISSNHRNKPYRVTKLNRFDLYEQKQLTRHHHNLKEELNTYKNRLQKCIDIVFPEFNSLFHSKYGIVYMNILKIFSSAKAIANADIRSIRKCFEFKGKGKRISLSAEQLKLTAKSSIGIPSVAEEIQIRHLVSQIELLKKQISEIDKRIEEFSLKNNSPILTIPGISHFSGTSIISELGEICNYTKASQIIKFAGVAPYHYESSQFTAQHTAITKKGSKYLRKTLYQIILPVISNNEVFHAYYTKKLNEGKGHRCAQGHCIRKLLRVIYHILSTGQPFNPELLV

SEQ ID NO: 313819 - protein, 330 aa, unidentified
MEKGNVILGVDVSKNTLDFCCARRGIHIRTGNDSKGFALLGKWCRQEGIDLKATLFVLEYTGGYEYRFLQYCQSRGYRYCRIPGMEIKRSMGMVRGKSDRADSFRIGRYGEEKSARLDPEKPLNTNFIRLKQLLAFRKRLVRENAGYKTSVKERQTMYPGLRKDELVRISKEKIRANNRYIEKIEREIMEIIQGDQDMQVNYRLITSVKGIGRINACMTIAYTENFTSFTDARKYAVYVGVIPFERTSGISIRGRKRVSHLANKELKQELNQAAKSAIVHDDEIGTYAQRKLECKPYPLVLNNVKFKLILRMFSVVKRKKEYIKNYRSVA

SEQ ID NO: 313820 - protein, 340 aa, unidentified
MSEITTIGLDLAKHVFQVHGIDAEGTTVLRKRLRRGQVLAFFSRIPRCVVGLEACATAHYWARELGALGHEVRLMPAQYVKAYIKRNKHDAADAEAICEAVQRPTMRFVPVKTTEQQAAQLLHRGREQLVRQRTMLVNALRAHLAEFGMVAAQGLRNVGELIAIVRDDGDTRLPDVARQVLQVLAAQLEQIEAAIAALEKQLMAWHKTNAVSQRLASIPGIGPIIATAIATTVADPGVFRSGREFAAWLGLVPRQNSTGGKTRLGGITKRGNRYLRRLLINGASANLLRSKATKADPWVIGIRRRRPPLVVAVALANKTARIAWAVMLRQKEYQPRALAA

SEQ ID NO: 313821 - protein, 357 aa, unidentified
MPTLTERVDFVLGVDTHKHTHTAAVVTPAGGLVVHLSVSADADGYNRLLSFAREHATGRRIWAIEGTGSFGAGLTTHLLEQAEWVVEIDRPKRPARRNGAKTDELDAVRAAREALSREHLAQPRRRGDREALRVLLATRKEVVQTRTRAINHLKALVVNAPEAMRAELRPFKTGALVVHCAALQTCAGFSAEQAATLLTLGLTARRIQALEIEAALLEAELEPLVQALAPSLRAEFGVGPISAAQIVCAWSHAGRLRSEAAFAALGGVAPIPASSGQVQRHRLNRSGDRQLNSALHTIVICRLARHAETQAYAARRAAEGKSMREITRCLKRHLARRLFKLLEVGVRDDSSDRELAA

SEQ ID NO: 313822 - protein, 429 aa, unidentified
MQNESTPGARGPVFCGVDTHADSHWLCVLDWRGRRVLSRRFPADAAGYEALAGAIAAAGEPACVAMEGTSSYGAGLTRHLASLGMPVREALSPARTQRRRPGQGKCDESDAERAARAAMSGSRLGTPKSQDGWVDGVRCMLAARSGAVKARTSAINTARSLLTTAPEGLRSRFRGMGGPRLMEELPSVRAEGALGAALGALADLWAAARDAALDMELAIEASLEENCPALLAMYGCGPVSAAKLAVAAGDNPGRLRSEASFAAICGACPIPASSGKTVRHRLNRGGDRQANSALHEIARQRVMRDPETAEYAERARARGKSDREVMRCLRRYVAREAYRALMRPHEIRRPEDASELVAARRAAKVSQVRAASILGTSEKYISMLERGQRELKPIRRAYEAWVEAGLPLDWDRQAFEAERKMDSKKHLAK

SEQ ID NO: 313823 - protein, 369 aa, unidentified
MSDRITYVGLDVHKESIVVAVASGGLRGEVREYGRIANTATALDRLLRKLGVDGMTLRFCYEAGPCGYGIQRRLSAQGHECVVVAPSLIPKRAGDRVKTDRRDAASLAKLHRAGELTAVWVPDARHEAMRDLVRARLDAVHSLRRARQQLSGFLLRQGCHYGRPAWTKLHRRWLAGLKFDQAVHHVVLEDYIAAVEVAQIRRDRLTAQIETMLPDWTLAPVVAALQTMRGMALVNAATLIAELGDLSRFTNPRQLMAYLGLVPSEHSSGASVKRGGITKAGNGAARRLLIEAAWSYRFPARLSRELLLRQENQPRSIRDIAWKGQVRLCARYRRLTRAAKPANVVTTAIARELSGFVWAIARQVTVTAG

SEQ ID NO: 313824 - protein, 345 aa, unidentified
MNKLKASSTDLAFCGIDVSAATVSVAVIKPDQHLAEREFSNTASGHRSLLTWLGQCGVVVRISLEATGVYSLDLTLALDAAAHCEVAVLNPKLVNRFAQTLVRNKTDSADAVVLAEYSRRMPFTAWSRPSVEQLQLRALGRYIESLAADLTGVKNRLHAAERSAGMPRAVLHDLKQAQAALVRRLARMRQQARKLVEADKLLARRFDLLRNMPGIAETSALSILCELVMLPPEMTVRQWVAMSGLDPSHRESGTSVHKPARISRAGNRHLRRALYMPALSAARHDPHLRAFYRALRERHKTALQALVAVARKMLHAIYGIFKSEKPYDGQRLFPQLQLEVKSIAG

SEQ ID NO: 313825 - protein, 352 aa, unidentified
MTVTIVETRAPARAITGGVDTHAGAHVAAALDPVGGLLGVQEFPATPAGYAQLLGWLGGFGAVCLVGIEGTGSYGAGLARYITAAGVRVVEVDRADRQDRRRAGKSDPLDAVSAARAAQSGRAAGAPKGRDGAVEAIRALMVAKRTARSERTQTINQARALVVTGPDDLRIRFATHAPADLVAELASLRPRPGAVVGYATRIALRELGRRAQFLDRQLERLDEFIVPLVTARAPGLLALYGVGPDTAALLLITAGDHPGRLRSEAARAHLCATAPIPASSGKVTRHRLNPGGDRQANHALYRIVITRMSSHPPTRAYVARRTKEGLSKKEIIRCLKRYVAREVYPHLRGPAG

SEQ ID NO: 313826 - protein, 423 aa, unidentified
MSPDGHPEPEQRRDLIGARFCVTHHSIVRPLLLIGWKLMATAKGAADVTMIGAERSDTEVETILGVDTHLDFHVAVAIDHLGRRLGEASVPTTVKGHERLLRWAERFGPVRCVGVEGTSSYGAGLARHLGAKGIDVLEVERPERRRRGSRRNLKKSDPCDAEAAARAVLAGESSGVPKSGDGTVEMIRTLRAARRSAIKARTQAANQLKGLRVTAPEQLRQRLRELSTKEFISVAARFRLGDDPRDVPTATKFALRSVARRYEALSAEIADLDAHLDRLVAQAAPELVSLPGIGTDSAATLLVVAGDNPQRLGSEASFASLCGVAPIEASSGKIVRHRLNRGGNREANRALYMICLARMRRDRRTKEYVARRTQEGKSKREIIRCLKRYVAREVYRLLISCDARSSPTGPQAEVHIASGSSAA

SEQ ID NO: 313827 - protein, 387 aa, unidentified
MPQPNDLSRSLVALDQDSTLVAVIEMGQASWLVAGMVPGVNRHPLKKITTDQEQLMQVLRRWENEAETAGRVIKRIAVAYEAGRDGFWLARWLRARGIEAYVIHPSSVPVSREHRRAKTDRLDTELLKRAFLGWPRGEPDHCSMAAIPTLTEEDAKRPGRERESLVGGRTCITNRIKGALARLGIRNFKPMLRNAPKLLETLRTPEGAALPPNTLAELRRDMARLSFVKQQIKEVETGRIERLQRAPGERGNAMVHLLTRVVGVGVETADMLVREVFSRDLRDRRAVARYAGLTGAPDESGKKRRERDLAKSGNARVRRGMLQLAWGFLVHQPDSVLAEWYRARTADARGATRKTMIVALARKLLIALWRLAATGEVPEGLGLRAAA

SEQ ID NO: 313828 - protein, 406 aa, unidentified
MFVHDCASSMVVVAVDVGKNTVACSVTDEKRHRLLEPVDFAMTRAGLTATVAMIRAVVPSEVSVKVGIEAAGHYHQPLMSPASWPAGWQLLELNPAHVTEQRRVQGRRRVKTDAIDLEAITELVLSGQGNPVTDRAAVIGELAAWVRHRLRRVEARTAVKNQLLGQLDRAFPGLTLALPDVLSTKVGRLVAEHFTDPARLAGLGETRFIRFAATRGLVVRQPVAVRLVAAARDALPTPDAGVAREIVANDLQLLQVLDRQVAAAQEYLAALLPATPFAPLITVPGWATVRASAYGAGVGDPARWPGPAQIYRASGLSPMQYESAGKRRDGGISREGSVILRRALVDLGIGLWLTEPAAKAYAAGLRARGKKGGVIACAMAHRANRIAYALVRDQRPYDQIHWQQEN

SEQ ID NO: 313829 - protein, 424 aa, unidentified
MKRTQNEKILQIKNETMVVGIDIGKETHYARAFDNRGIELAKLLRFSNTAQGYEALDGWMQSIMQQREKAEAIVGFEPTGHYWFTLGDYLQSKGYALGIVNPFHVKCTRELDDNSQTKSDRKDPKTIAMLVKDGRFRDVYIPTDLYQELREAVSERERLQEQIIGISNQVIRWLDIRFPEFTSVFKDWSAKTAIATLKSLPTPAKVAAAGAEGVLTIWQEHLKRSSLKKAERLVKAATESIGRTAGSEAAEAALMNLLLQYELIAAQRQQIEILMAELLLRVPHAAKLLEIKGIGMMTAAVIISEIGDIRRFQDPRQILKMAGLSLKENSSGKHKGKTTISKRGRRRLREGLFRAMIPILATNEEFRAMHRRNLTREKNPLSKMQSVIALCGKLVRVSYALLTKGCVYDATKMAHDMNLSMKAA

SEQ ID NO: 313830 - protein, 414 aa, unidentified
MSKELDKGGGLDIHKKSVAAAIASEDGSILEAEFGMTIDQIYQLKKWLLENGCKRVLVESTASYWYRIDQVMRDEINVIVVNPRDIKSPSSKKTDKIDARKLASRCLSNYEIHPSRKFTSEQLSLKRLTRSRQQYVQTRSKLKNQIHKVLDAAGITLSIFISDIFGVSGRYILNCLVARKSLKELIPGIPTNRIRKRAQELPEHITVQLDDTQVFLIRKALHTMDDIQKTIDEIDAILYERADAYIEDLKILMSVPGVKFIAAITILAEIGNYKDFGDGDQLACYAGLTPDVNVSAEKNIIGKITKHGPKGLRWILNQVAHGASKTNKSRLKKVYLRLLRRKGKPKAITALSRKILSIIHHLLVNREMWEEEGFKKKRLDFDFDRKSSPSQLTWLDLVVNNVVLVGKGKPGGGG

SEQ ID NO: 313831 - protein, 417 aa, unidentified
MIEDVRWFVGIDWATRSHSVCLLDAAGRQVAQHEFDHGGAGLTELRDWLLEKTKAAPGQIAVAIEMPHGPVVEMLLEHGFAVFAINPKQLDRFRDRFTVAGAKDDRRDAHVLGASLRTDRAAFRRLVADDAAMIELREWSRLADELQQERTRLANRLRQQLWRYYPQATKLTDDVADEWFLALWQKVPTPASAVKASEKAIAGVLRDYRIRRLNAATVLGTLREAPLFVAPGTTEAACAHIRSLAARLHLVNRQIKEAHQNLDRLCAEFEGEEKPSGQSSEQCDVTILRSWPGIGRINLATLLAEAAEPLRRRDYHALRALAGAAPVTRQSGKQRFVIRRLACNRRLQSAVHHWSRVAIQHDAASRRRYDALRRKGHGHARALRSVGDRLLFALCTTLKRQTPYDADHNGTKNSANG

SEQ ID NO: 313832 - protein, 360 aa, unidentified
MIVQGTSVGLDVHALSVVAHAVDEETGKVARARLCPDHGEVLGWLHQLRAPVRVTYEAGPTGFGLARAITEAGMECLVAAPSKLQRPAGDRVKTDARDAAHLARLLRLGEITAVRVPEREIEAVRDLVRAREDARADLMRVRHRLSKLLLRQGIVYSGGTPWTCVHEEWLRRHRFDDIHLKAAFDHSFDAVLAATAARDRLDEQILVVAASPRFADPVNRLGCLRGISALTGLALTVEIGDWSRFSGSSIGAYVGLVPCEYSSGNSRVQGSITKAGNTHVRRLLIESAWHHRKSYSTSGPTLRARWAKVDPALRARGHAGNRRLNKRWRSFTERGKNPLVANVAIARELAGWCWSLATMH

SEQ ID NO: 313833 - protein, 386 aa, unidentified
MQKLNDLSRSLTALEPDGTLIAVIEMSLSSWLVAGIVPGVERQPLKKLAVDESALLKLLHRWREEAEKAGRRIERIAVAFEAGRDGFWLARWLKVRGIEAYVIHASSVAVSREHRRAKTDRLDTELLKRSFLGWLRGERDHCKMVEIPTMKDEDAKRPNREHDSLIGERSRIVNRMKAALVRLGIRGFNPKLKRASTRLDGLRTPEGEPIPPNALAELRRDMERRRLVNNQIRQIEEERLKRIEQAPCDGPHVMVRLLARVMGVGIETADMLVHEVLSRNMRDRRAVARYAGLTGSPDESGRKRREKGLARSGNTRVRRGMIQLAWRFLLHQKNSALTKWFRSRTENARGTRKPMIVALARKLLIALWRLVREGIVPDGVVFRAAQ

SEQ ID NO: 313834 - protein, 349 aa, unidentified
MLIIGCDFHSRFQQIAMVDTETGELIERRLEHGNGEAKKFYAELQKPVRVGMEATGYAQWFERMLTRLGHELWVGDAGEIRAAMVRKQKTDSRDALHILDLTLQGRFPRIWIPSPAERDLRQLLRHRHKMVCLRTSVRNQLQALAMGQGIYRKTKLWSSRGRKELESLALDPWAGRRRQELLDILDRLDPSLAELDRAVMKEAENYPAALSLMEQPGVGPVTALMFVLTIGPIERFRRSKQVVSYLGLNPRESSSGGRQRLGSISKQGNTMVRFLLVEAAQTAARYDEELRRNYRRLRFRRGSAVAKVAIARKLAVRLFWKLRMQPSPVSPARMQGSSESLLVGGSLSS

SEQ ID NO: 313835 - protein, 367 aa, unidentified
MKNHNSIEQSVSSSDLSACITLAVDLAKQVFQVAGEDVLGQVLYEQRIKSREAFYDFLRQLSPHVMVLMETGPGAQAWARQLQDQGNPVRILPAGLVATHRSGPKNDRNDALAILRAGRDEKICAVPVKSVAALAMQALHRARQGYVRRRTALSNQMRGLLLEHGVALAQGDIAISQKIPRVLEDATQPVPGLLRELIDELLAEWCHLGERINVLTGRLEVAANADMTAKRLMTVRGIGPVTATALVAKETKPERFPNARKFAAYFGMVPDQHSSGETVRLGDMTKRGDAYLRSLMIQGAHAVLQQLRPDSQQPDDRRLLHWMSRLGRKEAAIRLANRNLRIVWVLLQNDQTYRRHAGDGQPATMGH

SEQ ID NO: 313836 - protein, 342 aa, unidentified
MSEVSIIGLDLAKNVFQAHGTRSDGSIAFRMKISRAKLIAFFSSAPRCVVAMEACGGAHHWAREIGALGHEVRLIAPIYVKPFVKRNKNDAADAEAIAEAASRPTMRFVAVKSVEKQASGMAFKTRDLLVRQRTQAINALRGHMAEYGIVAPNGPVHVARLAEAVIGSDDRLPAVVIGLCKILLELIASLGEQIGFLERELRERARRDETAKRLMTIPGIGVICATALQALAPAPESFARGRDFAAWLGLTPKQKSSGGKTRLGATTKMGQRDLRRLLICGAVAVVRWALRKGAPEGSWLARMMARKPPLVTAVALANRTARIAWALMAKGGVYRVPSKVAA

SEQ ID NO: 313837 - protein, 421 aa, unidentified
MGKLIERCAGIDIGKRFLVCCVMTGAAHEEPRSETRRFDTTVPGLKRLRNWLNEERVTDVVMESTGSYWIPVFNLLEGHVTIVLANPEEVKNRKGHKTDRKDAGHLADLLRHNHVKSSYIPAEPVRQLRDLTRRRVQLTQDATRERNRVQKLLEQVNVKIGSVLTDVFGVSGLPMLLALLEGRAAPEEIAGLAHADRPSVRHQLIEALEGNRMSDHVRFLIRGCLRHLACLEEEVEELDAEILRRMQLSTFQKAFTLLQTIPGVGQLSAATILAETGPDLDSFPTVEQMASWAGLCPGNRESAGIQKGPQTTHGNPYLCTALVQCAWAATRKRDSVFRSRFQRLAPRRGEKRAIIAVAHHMLIILYCMLKRGVPFLGAEHAPKQRRRERRAHHRLRCLRRLGFSVEIRLSSESTPPDTISR

SEQ ID NO: 313838 - protein, 330 aa, unidentified
MKNVREVVGIDVSKNTLDATLYHVKQHAVFTNDDKGYAQLLSWVSDQLEVSSYFFIFENTGNYSLKLSVFLSSKDLVYVEESPMRIKRSTGLTREKTDKLDSYMIARYGWMYREELEPSKIKPKEFQELGRLLSLRDQLVRDRSGLKSTLKEQKHLLSSPSTDSCCKLLERSIKHIDKQVQHIERRMKELLETDDSLQTNYNLLRSVKGVGLILSCQLLYHTSNFMKFNNWRSFSSYCGIAPFEYSSGSSIRRRKQSHYIGDRKMKTLLSMAAVSAIQSDQELRNYYHRKLEEGKHKMIALNNVRNKILARSFAVIKRGTPFVNIAATNY

SEQ ID NO: 313839 - protein, 352 aa, unidentified
MSLHSQGKSGEDITYFEEYSPMSNIIGIDVSKANLDCAYLRDPDQKKAKRFSCHNEVSCFAALVAWTEARSGLPVQSLAFIIEPTHIYHEQLVQLLHNTGATVYLVNPGRVRKFAEGIGILSKNDLVDADLLTRYGLLARNLIAYAPVAQEINDLRSLLNRLDVLEHNLRSELNRQEKVGKTMVFHRLEQQSIARAVKRLKAEIIAFKRAIRECIKSTPSLQQSFNLLCTIPGVGAKTAWIMIVILASRPFISAPEVASFLGLNPIEKRSGNSQYRRPRLSKSGSGHYRQKLYFPAMVATRKNPDIKALYERLLAADKTKMCALGAAMRKLVHICYGVIKNQTPYQVQTKPS

SEQ ID NO: 313840 - protein, 430 aa, unidentified
MPYNIAGIDVHKKMLAVVVSDVELDGQYQFERRMFGSNPEQLRSLAAWLVAQEVEEVVMESTAQYWKPVWEALERYWKPISEKREGAGRKCGMLHLAQAQSNRGRRGRKRDFPDAERLVKRLVARELTLSFVPDPEQRVWRTVTRRKYQLTRDHVRLQNQLESLLEEAHIKLSSLVSNLLGASARRMMKALADGETNPAALAALADKQLRATPEQLCDALGACTDLKPVYRRLLKMVLEQLQFLEEQIGKLDQEMATLLSQHQDAVKRLAEVPGLGVDSAQQIIAEVGPTAATFPSAKQLSSWVGICSGDEESAGVNYSHRSPNGNRHMRRVLNQSANAAARTKGSIFEIVYHRYVPRLGHNQTIGAIAHRQCRLIWLILHKAVRYEEHGPAVTTRSKQKRTARMIRQLRSLGYRIELPSSQHPTPTQRP

SEQ ID NO: 313841 - protein, 338 aa, unidentified
MAIVMGLDQHRAQVTADWLDTASGEVSRARVAPADRAGVRRFLERFGGCELEVALEATTGWRFVVEELRRVGATVHLAEPAETAARRGNKKRAKNDRADARHLRELMMVGRLPESWIPPDHILDLRARVRLRHSLVAQRGEWQQRIQAVLYHHGFPQRRNLMTEQGRQWLAAQALPVTAREQIAVAVAMVEALDLQLAPIDKQLRAYARRQPGCRALMGQFGVGEMTAVTILAELGDARRFSSSRDAVRYAGLDITVHQSDRRRAPGHLSRQGPPALRWALFEAALCASRTGSPDRDYYRQAAERLGGTGAGLTVARKLLKRSYHALRELGEEALAPA

SEQ ID NO: 313842 - protein, 313 aa, unidentified
MAKVIVGVDVSKDRLDVATIPEESRLSESNDPAGVERLVERLASASPELIVVESTGGYERDLVVALAARQQPVVVVNPRQVRDFARAMGVLAKTDKIDALVLARFGEATKPEIRPLPDEETAALQALMARRRQLSDMIVAENNRLEVARHKHIRKAIQRHVDWLRKQLKDLDKDIQSMIRNSPIWREKDDLLRSVPGIGPVLSSTLLATLPELGKLDRKKIAALVGVAPFNDDSGKRQSRRSIAGGRASIRPVLYMATMAAARHNPTIKEFYVRLVRAGKKKLVALTACMRKLLTILNAVLRDNRFQPAYAIP

SEQ ID NO: 313843 - protein, 338 aa, unidentified
MEYGAIDLHMRYSQIRIVDETGAVLRDQRVATSRERLVKAFEGFGPMRILVETGTESEWVAQTLETAGHEVVVADPNYGPMYGDLRRRVKTDRRDVAALGEANRRGWYRAAHRTSAAQRTTRQVLRARRQIVQMRSGAVALVRSLVRQEGYRLRSCGAERVPARLADLRLPAALHAILAPLVRIIETATTEIAALDTALKARAAADPLVQRLQTVPGVGLVVALTFRAQVDDVRRFRHAGQVSAAIGLVPREDSSAERRQRGHITKVGPRELRSLLVQAAWACWRSKQSGTLRAWVDHVAARRGRRVAVVALARRLSRVLYALWRDGTSFDVKTLAAA

SEQ ID NO: 313844 - protein, 328 aa, unidentified
MCTLGIDVSKNKIDLCLLTAGPGGKKKHKVLTNEPAVARKVVDWLNAQKCVPESVTVVLEATGIYHENLAYGLHEAGVSVCMANPCRVREFAHGMDILNKNDAVDAFVLACYGELKSPAVWVPPSPEVRKLRALLRQRDALREDVQRTVNRLEKANSTSTPQEVIRSLERMKSWLNEELARIEKLITDHTDNDPGLKADLDLLKSIKGVKDQVGREMLALLKDGTFKSASQVAAYLGLTLVEKTSGSSVRGRPHMSKTGPSGVRAKLYVAALTASRWNKQAKAIYERLVAKGKAKKAAPGAVMRKLVHLCFGVLKTRLPWDENYVATA

SEQ ID NO: 313845 - protein, 387 aa, unidentified
MLYCGSDVAKLKHAVSLMDDKGEIVKASLTISNTRAGFDQLHAELQALGGAITVGLEATGHYWLALYDDLTRNHYPVIVLNPLQVAAYRKSGIRKIKSDASDAVWIADYIRIANLPPSEQNLPVFLQLRELSRFRFRLTEQVGDLKRKLLTILDRVFPEYERLFSNVFLHASRAVLQEAVSAQEFADFDLQELAQVLAEASHGRFGLEKAEKLQAQARQSVGVGFLTDAVHLEMRCLLAQLDLLDSQRAEIDQAIAELMQQIPQHITSIPGVGPVTGSAILSEIGDIQRFETLDKLVAYAGIDATVYQTGQFQASEAHMSKRGSPYFRHALWLAATAAVLHDPSLKAYYQKKRDEGKHHGTALGAVCHKLLARIFVVLKEKRAYVIR

SEQ ID NO: 313846 - protein, 343 aa, unidentified
MQTITTIGLDIAKSVFQVHGVDAAGQVVIRRQLKRRYVLAFFQKLPPCLIGIEACASSHYWSRELQALGHTVRLMPPAYVKPYVKRQKNDATDAEAICEAVARANMRFVPTKTPEQQSCLMLHRTRHLFIRQQTAVINSIRAHLAEFGIVAPVGRKGVTELLHIVADPSDKRVPEVARACLAALGNQLLSLKEQIVEFDRMIMVWHRSNETSKRLHYIPGVGPLLATALVASVADPRTFRSGRNFSAWIGLVPTQHSSGGKDRLGSISKQGDRYLRSLFVAGALAVIRYAKIHGTKHRPWLTALLARRPTKVAAIALANKLARMAWAMMAKGERYKEPVALVA

SEQ ID NO: 313847 - protein, 355 aa, unidentified
MSSMTDNPPDVSTTVFVGVDTHKSTHHAAIVDYLGREVGDREFPTTAAGHADLIAWITAAGTVERIGVEGTGSYGSTLSTALRAQDLEVVDVDRPDRRSRRFQGKSDPLDARSAARAALTGNATTIPKSHDGTVEAIRFLHNARHSAVKARAEAITQLKSMIVNAPDPIRTDLRQLTDAKLFAACASLPPAARRPVDLDSAVGAALRSVALRIQDLTAEERILAIQIEALVAAHAPHLLARFGVGASTAAQLLITVGDNPERVTSEGSFARLCGVAPIPASSGKTQRHRLDRGGDRQANRALYTIAITRLRSDERTQQYRDRRLAEGKTPREITRCLKRAIAREIFGLLKPTPSP

SEQ ID NO: 313848 - protein, 377 aa, unidentified
MSSLLFVGLDVDDKAFHVCGVTNSGEQKFQFSCKPSIGVLATKLGQHIGKDDEVKICYEATYLGFSAQRGLAKRGFDCDVIAPSLVPVVPGERVKTNRLDCQKLAVYLSRGELVKVHVPSPEEESVRDLVRTRRFMSDQLRRHKQHVLSFCRRQGWNYRAESGKKASYWTGAHFKCLEQWIKSSEFPANRFTLASEVDQVKHVRVQIESFDSEIHRIAEGPKYRRQLEALMCFRGIGMTSAMTFITEIGDANRFAHPSKLTSYAGMDICEYSSGHEKRWSITKMGNRHLRTASVECVQSAAKLPRISKRLKLQREGVDKALIDVADRCAQRLYQKSSRLLFSGKQKNKVTVACARELLSFIWESLRKAASPVEQVAA

SEQ ID NO: 313849 - protein, 337 aa, unidentified
MFVLGIDIGRDELCLRLLETPVQGSATTKGQIRVFPNSHLGYQSLLDWPAAEQAQPGVNSVMMKATGVYWERVAVALHTAQCAVSAVNATYIKFSARGTLRRGKTDALDAEIIARYGATMHPARWVPSEKRLSELRALIHERDTVVELMTIEKSRQHALDQRHEATPIALRLSRDRMTFPCTPLEHVNVAISALIAVPGELQEHVTLLASVPGMGSPTAALVLTETHHLDRGYSARQWAAYAGLFPAPRPSGAKQSKTHISKIGSARLRRALYISALSASRFKNVLGDFYRHLVNKGKPRKLALIALARKISWICCAVLRSGQPFDLTFRSTALRIP

SEQ ID NO: 313850 - protein, 422 aa, unidentified
MPPERDDQPMPYEWFVGMDWGSQQHQVCVLDRDRRRVGERAVPHDGASLARLADWLWSMSVGQPQRVAVAIEVPRGAIVEGLLERGFPVFAINPKQLDRFRDRHSVAGAKDDRRDALVLADSVRTDRPSFRRLRLDDPPLLVLRELSRAEETLLEDFRRSANRLREQLHRFYPQMLQLCSAADAPWLWDLLDLAPTPAHAALLSAEQVQRVLKGHRLRRLTATEVLACLQASALPVAPGTAEAAQAHCGFLLPCLRVLAEPLRACGQQVDALLRTMADEPGKGDRPSDVAMVLSLPGVGRKITAWLFAEAAQPLAERDYQVLRTHSGLAPVTKQSGKRRLVVMRRGCNPRLRHALYHMARIAMQRDAHFSRAYAALRAKGQRHGQALRTLGDRLLRILVAMLRDRTCYDASRMRRESVVQMG

SEQ ID NO: 313851 - protein, 393 aa, unidentified
MRYAGVDVASESHVLAVVNEDGGVLVKPTSFGEDAAGYENLFGALGSAEGCLVAMEATGHYWKNLFVALVTRGFTVALINPLRTRRFAEEDLQRTKTDSIDALGIAHFARQKKPVPTQLPDATTEELREMIELHDRLTRDSSDRVRQLHRLVDLGFPEFTRYVKHLDSQLATAVLSQYPTAQAYERLSLRRLSRLCYDGRHFVGDQLAQDLIEAARRSIGAHHAEIYRTRIVYLCEDLDVLRRRLKQLDQDIETKLAEHQVGSLLTSINGVGPTTAARLASVMGDPIRFTSAAALASYTGAIPGLRKSGKHQSDRAALTHIGNARLRTALYMPTLSAIRCNPWLHAYYEHLIAKGKLPKVAVLACMRKLLTAAFSVAKNRRPFVPHLRPCEVS

SEQ ID NO: 313852 - protein, 356 aa, unidentified
MSSNIKYIGLDVHKEAISIAVLNNVGKLVMESIIETQAATLLQFLQGLQGELHVTLEEGGWAAWLYDVLKPHVHEIVVCNPRRNALLKEGSKSDQVDARKLAELLRAGMLRPVYHGEHGLRTLRELARSYQTISKDLRRVMNRLKALYRGWGIPCAGTQVYAPRYREQWLNKIRQAGVRRRAELFYQHLDGLQALRRQVRGEFLAESRKHKAVKVLRQIPCIGPIRAALLLALMQTPHRFRSKRQLWTYSGLGVETHDSAQHRYVNGRLQRSKKPPQVRGLNQNHNHEMKEIFKSTATNASRCAGPFHDFYADLLAKGMKPEMARLTLARKIAAITLTLWKKGARFDAEHLKAQAA

SEQ ID NO: 313853 - protein, 341 aa, unidentified
MKQEMHVLGIDIAKRVFHAVGMDDRGNVVYRKRLSRHDLLPCIAKLPPVRIGIEACGGAHYWARRFRAHGHEVKLMAPQFVKPYVKSNKNDSRDAEAIAEAVTRPTMRFVPVKDVDQQDIQALHRIRERLLGERTALVHEVHGLMHEYGIVIPKGVSKFRQVVVGKLESEKDKLTPLSQEMFWKLVEEFAALEKQLAYYQEKLAALATTHPACQRRMTIPGIGPLRATALVAAVSDASAFQNGRQFAAWLGLVPRQYSTGGKERLLGMSKRGESYLRNLLIHGARATLRWVGRKTDRRSQWIRQLVERRGKNRTAVAMANKNARIVWALLTSHQAYEPAKG

SEQ ID NO: 313854 - protein, 322 aa, unidentified
MSLPNPLCVGIDVSKATLDIATTSEFAQFTTGNDADGFDAIVAELRKHSVALILMEATGGLEAAVACSLQAEGFDVAVVNPRQARDFARAMGYLAKTDRIDARVLAQMAEVINRHPERERFIRALPDSERQVLAAMVVRRRQLITMLVAERNRLHPAHPQSRKSINIIIQALENELARIDEDMNRHIQSHFKELTERLSSIKGVGTMTAAALLAEVPELGNLSRREISALIGVAPVNRDSGTMRGRRTIFGGRAGARAALYMAALVATRFNPVIKAFYMRLLAAGKAKKVALVACMRKLLTILNAMLRKNEEWNESHHHVAP

SEQ ID NO: 313855 - protein, 346 aa, unidentified
MEKITTIGLDLAKNVFQVHGVDAAGQAVFRRKLRRGDVEEFFRRLPPATIGMEACGGAHHWARVLGALGHRVLLMPPAYVKPYVKRGKTDAADAEAICEAVTRPTMRFVPVKTEAQQAAAAELKVRQMLVEQRTRSVNALRGHLAEFGIVAAKGMGRVADLAAIVRDPTDDRLPSMAREALLVLVEQIEHLEFRIERVETAIIRRSRADETARRLATIPGIGAITANALQALVPDPGGFKSGRHFAAWLGLAPRAHSSGGKERLGRISRAGNATLRAFLVLGATANLRYARRSPEAANWATRLLARRPFKVAAVALANKMARTAWALLVKGGVYKVPGGRIAAGRS

SEQ ID NO: 313856 - protein, 385 aa, unidentified
MILLGVDPHKSTHTATALHSATNQPIDSVRIDAALAGYRRLLAWGRQWPRRRWVIENARGLGRHLAQWLLARGEEVLDVPSTATARVRQLSRGGGRKNDRIDAAAAATIAATQGDACPVDAEDHTTALALLDERRTNLTQTRVRAVNQLHTLLRDLLPGGAPAQLSARAAAALLRTVRPAGPAEHARKQLARDLVADIRRLDEQLAANAQLLGQAVAEAGSTLMGTAGIGPVMAARLIARTGRVGRFPTPAAFASYCGTAPIEIASAGKARHRLSRSGDRQLNAVLHTIAVIQIRMPRTTGRAYYDRKIAEGKTPKEAKRCLKRRLTDHIWRVMTSDERHRTPTGSGGHSGATLPSSATGSTPTAGSSDKSLPEPASGDPTPAPP

SEQ ID NO: 313857 - protein, 321 aa, unidentified
MTIKTIGLDLAKSVFQAHGVDADGATMLVKKLHRKQMLPFFSKLSPCLIGVEACGTAHHWARTLSAMGHEVRLIPPSYVKAFVKRGKSDAIDAEAICEAVQRRTMQFVPVKTVVQQGILMTHRARSLLVRQRTQAANALRSHLAELGLVANPGVANLARLAEQALAGQNVLPSFARAALEIMLRQIVALGQEIAELDRQIAAWHAESEASRRLAAIPGLGVITATAVAATVTDPDQFRSGRQFAAWLGLTPQQKSTGGKTRLGGISKQGDRYLRRLLVVGATAVIRHTKDKPTPMAAWIRKLLEKKPFNSPLTKSQSPDSV

SEQ ID NO: 313858 - protein, 356 aa, unidentified
MIKRNKLDFTGQPIYIGLDVHKKSWSVSISTKYGQYKSFSQPPEVDKLVHYLRHHFPGALYSSTYEAGYCGFWIHDRLREKGIGCLVVNPADVPTKNKERKTKRDRIDCRKLSRSLRNGDLEGIYVPPRGKVEDRSLIRTRLSMVRKQTRCKNQIKSMLLFYGVVIPEEKEMGHWSRRFIRWIEGIRMERASGDMALNIHLEELCHLRQIIAKLNRAILALSRTEEYRSWVLLLRTVPGISTLTAMILLTELGEISRFPSIDELTSYVGLIPDTDASGEKEHIGGITQRSHPQLRWVLIEAAWRAVPKDPALMIAFGQYCKRMRKTKAIVKIARKLLNRIRYVLKNRSEYVPAVLE

SEQ ID NO: 313859 - protein, 345 aa, unidentified
MEPMYYIGLEVHKRKISYCVKDSGGAMHSEGSLSATRFDLDRWMKTLPQPWSAAMEATIFTGWIYDHLRPHAAALKVAHPLMLRAIAAAKKKNDRIDARKICDCLRCDFLPECYMASTAIRERRRTLRYRNLLVRQMVQMKIKISALLMEAGVSYNKQRLHKAGYFRELLASNPDIDEGLCSLLRLCRETVVRLGKTESALVRSLEHDSLLVERVERLMTIPAVGPITALTWALEVGDVQRFSSIKKAISYCGLCGAEKSSGNTVQRTPLSKQRNKHLQTTLIEAAKMAPRNSAELAMLYDKEKQKGNANRATLAVARKLVAYLMAVDRGQRNFQIAETRSNIAA

SEQ ID NO: 313860 - protein, 353 aa, unidentified
MKPNTETTAAPLAVIGVDIGKDVFHLVGFGADGKIAFRKKIRRLDLKGAFEQLPRCIVGMEACLSAHFVSRTLRALGHEPRIIPAIYVKPFLKGQKNDYNDAEAIAEAALRPNLRLVKEKSQDQLDLQACHRVRSRLVSRRTATINQIRAFLIEQGIAVRAGARALRNSLFAILENRKDEISPRTAKLILGLYEDWCHLDERIESVTEEIESLGKAEAKCQRLISVPGVGPLISTGVVAAIGSGEAFERGRDFAAWLGLVPRQHSTGGRSILGRISKRGSKYLRTLLIQAARVLLMRPHNWPRFSFGAWLKTASERLHRNKLAVALANKLARIAWSVLRYDKPFDTHLEAAAI

SEQ ID NO: 313861 - protein, 324 aa, unidentified
MSKNKEFFGIDISKDVFDVVDSSEKHHQFKNDQSGFKAFSKLLNQNSHCVMEATGSYHQRLATWLYSQSFEVSVVNPLSVKRFIQMRLRTSKTDKLDAQMIRMYGEYEQPKLWIPPSKLIVEAAELHKLIDFLVRQRAGLKNRLHALKSKGVTKSLVVTSIRRQIRNLSTEIVDLEVKLESVIKEYAPDLLTRLCSIPGIGKRTSIYLIVLTQGFEKFESSSQLISYLGLNPTIRESGSSVRGKSRISKTGDKHVRKLLFLCAFSACKHNKACHEIYQRLTAKGKSKKLALIAVANKLLKQSLAIAKSGLYYDENYRSVNVNLG

SEQ ID NO: 313862 - protein, 349 aa, unidentified
MVHTPTKEVVMNVVIGVDPHKASHTAVAIDEAEDEISSVRVRATRRQVEQLVRWAEPFEKRRWAIESAGGMGYLLAQQLVAQGEEVLDVPATLASRIRVLATGRSNKNDPNDAHSIAVAAFRAPSLRNVEPADHSQVLRLLAKRNLDLGSHRTRVVCRLHALLAELVPGGIAKELYVSDAERFLANITPETPVEQVRHDMALELLDDVRRLDAQTKESHRRIRIAIKASGTSLTEIYGVGPIIAAQLIGYSGDVRRFANRDAFASYNATAPVEFASGGRVVHRVSQRGNRRLNHALHMVAVTQIRNPGTEGRIYFERKAAEGKTKKEALRSLKRQISNAVYRQLLLDAR

SEQ ID NO: 313863 - protein, 411 aa, unidentified
MRLFVGDDWAEDHHDVEVMNEAGKVLARKRLPEGVAGMAGLHELVGRSLGEDADDAEVAVGIETDRGPWVGALVAAGYTVFGVNPLQASRYRERHGVSGAKSDSGDAHMLADMVRTDSHQLRAVAGDSAEAEGLKVLARTHKTLIWERTRQVQRLRHQLLAYFAAALEAFDDLDAPDALELLGKAPDPARARKLTRAQVSAALKRARRRNITDKATAILAALRGEQLGQPPAVTAAYAATVGSLIAVITVLNEQVKILQGQVEADFGRHPDAEIYRSQPGLGAILGARVLGEFGDDPHRYADGKARRNYAGTSPLTRASGKKKVVAARFIHNHRLVDALNAQAFASLNASPGARALYDQLRARGIEHNDALRRLANRLVGILHGCLKTRTLYDEATAWGHRQNLPQSSVAA

SEQ ID NO: 313864 - protein, 482 aa, unidentified
MKPKPQEKTKKATDHPRQQHWREMNRQQRREMMRNIRSEDISLEVVHPDAAGIDIGNESHYVAVPPSRNSQPVRRFGCTTAELKAMADWLEQCGIRTVAMQSTGVYWIAVYDVLEQAGLEVYLVNARETKNLPGRKTDVQESQWLMKLHTYGLLRNSFRPSQEIRMMRTYWRQRNDLVQSAGRHIQRMQKALTQMNIQLANVLSDVSGVTGQAIINAILGGERDPHKLAAFRNPRVKASEEQIARSLEGNWQEDLLFVLKQEQDGYEFCEKQMAECDRQLNHYLKQRADRSHGAPLPEEKRKGRLKKKSGNKPQFDLRTGLFRMSGTDLTRVDGIDVITATTILSEAGWDMSKWVTEDHFVSWLRLCPDNRISGNKVIGKGRLPTNNRVTIALKMAASTLRLSDTYLGAQFRRFRTRLGAPVAIKAMAAKLARLVYRMLCYGMKYVDKGAALYQAQHRHLQIKQLNRKAASLGYQLIPVPAA

SEQ ID NO: 313865 - protein, 338 aa, unidentified
MSLYCGIDLHANNSYVAVTSPEEEVVLGQRYPNDLGKILGALEPYREGLEGIAVESTFNWYWLADGLRESGYTVHLVNPLAAKQYQGLKYTDDRSDARWLAKMLHLGILPTGWICPPEERAVRDLLRKRTQLVRQRVASRLSLRNILERTTARRLSGNALERLSEEELAGWIEDEHVRLSMTTTLAVIETLDEQIELLEGVVFEQARKASAFSVLQTIPGVGPILASTIQYETGDLSRFAGVGHYASYCRLVRSERLSNERRKGQGLRKNGNAYLSWAYHEAAHFALRYQPSARKWYERKRSKTCALVAIRALAHKLARAAYFMMRDQVAYEPSRLFG

SEQ ID NO: 313866 - protein, 356 aa, unidentified
MQNDHQSSESVILGVDTHLDIHVGAVISQAGKLLGTHIIQTNQSGYLELLDWARTFGILERAGIEGTGTYGAALTRYLIKNGVYVVEVNRPDRSKRRLEGKSAPLDAENAARTVLSGSSKAIPKMQSGACEALRIISVARRSAVKARTQAINQLRALLVSAPQDVRDKLWKSKPHECVSACINSEMSECSPLQIALCSTLRSLAKRWMALTEESNELDESLDKLTRKYASNLRRQFGVGPQTAATLLAVAGDNPERLKNEAALASLCGVNPLPASSGKTVRHRLNRGGSREANNALWTIALVRMRSDPRTRIYVDRRTGEGLSTKEILRCLKRYIVRELYPLILSDLAYANRPLLT

SEQ ID NO: 313867 - protein, 355 aa, unidentified
MERYIGMDVHAASCTLAVISEKGRKLKDFPVETNGQALVEAIRMIPGHKHLVFEEGLQSAWLYETLSPHVDELVVAGITTSRGPKSDKRDAYGLAEKLRVGNLDKYVFKSPRQFTMLREFSRTHMTLVTDVVRTQARIKSVYRSRGVLVTGIDVYGSRRREEWLKQLPSGTKIRATRLYTHLDFLLEQKKQAEADLLREGKKHPIVKILETAPGFGPIRAARLVPIVITPHRFRTKRQFWSYCGLGIVTRSSSDWVQTADGTWIKSRVPQTRGLSRQHNHFLKSIFKGAATTVVTQRNKDPIHARYERLLDGGTKPTLAKLSLARMIAATVLRMWKNEEEYDPGRAGLPTQTRKG

SEQ ID NO: 313868 - protein, 363 aa, unidentified
MIESTTVTVGLDVHARSIRLAAVRADVLLEERTLPYDEEAVVRLLRQWPAVRCCYEAGPTGFGLYRHLVGRGIECAVVAPGLVPQRPGDRVKTDPRDARKLARLHAGGLLEPIHVPSPVLEAARDLVRAREDARLDRMRDRHRLSKFCLRHGRLLPTSGWTVLRRKWLGEQRFEHAAEQITFDTYLHAVDLVDARVEQLERAIRELAEQGPWRELVARLRCLRGVDTLTAIGLVAEIGDFERFTSAEEFMAFVGLVPSEHSSGEKRCQGAITKVGNSHVRRLLVESAWHARRRPTVGYELARRQRGQDSAVVERAWRCQQRLYQRWQRMAGRGKPHQKVVVACARELAGFVWAIATDQPLRHT

SEQ ID NO: 313869 - protein, 370 aa, unidentified
MNDIIFVGLDVHKATVAVAVAEGTRGGGVRHLGAIPNRADHIAKLSEKLGKGGRRLSFCYEAGPCGYGLHRQLSALGHDCMVVAPSLIPMKAGDRVKTDRRDAVMLAKLHRAGELTAVWVPDGAHEAMRDLIRARATAVRVLGKARQHLQGFLLRHGRVYAGTKGWTLAYRRWLTTVRFDHPAQQLVLQDYIHAVADGEARVECLTGQIEGLVPQWSMAPVVEALQAMRGVAFVVAVTVVAEVGDFSRFASPRQLMAYLGLVPSEHSSGASVRRGGITKAGNALARRALIEGAWTYRMQARVSRKLHDRIEGLPQAIRDIAWKAQVRLCARYRRLAAAGKAKVVVTTAIAREMVGFLWAIARHVEINAGH

SEQ ID NO: 313870 - protein, 404 aa, unidentified
MLTSVMVNNSLIGKSAVRLADKAGAGEASEASRASTSRRREFGRVQVFKAVTEQEPRRHRGTSPNSRLNRRRPARTASSYLQVREKTMSETVYVGIDVAKETFHVATCPNVLKTQLPNTRKGHRQLSQSLKNHTIALIVLEATGGYERPLTAELLSDSLPVVVVNPRQVRDFAKGMGQWAKTDPIDAQVLARFAQIVKPAPKTHSTPQTAELSELVRRHRQLNDLRTQESNRLLMIHHPKVKKSIQKMIKTLNFQIDEIDRLIREHIDADDNFKNKDRILRSTPGVGPQTSAMLIANLPELGSLNRQEIAALAGLAPWDRSSGKSDGKAHIWGGRKDVRSVLYMAAFTACRFNPVIRTLAERLKQKGKAYKVVITACMRKLLIILNTMVRNQTLWTPQKSVKNT

SEQ ID NO: 313871 - protein, 318 aa, unidentified
MQISGCVIGVDVGKFELQVAGHEKSIVSGVLPNNRSSIVGWLKRLPAGSVIGMEATGGYQELLARLAHERGFVVYVLNPTHVHHYAISLGNRGKTDRLDAEVIAQYIAQRHTKLHPYEPISPELQQVRALQALRTTVVRVSTSLRLSAQRHGCASVHQKKALAGLSSWAEQLERELIAKIKAQSEWAKIYGLLTGICGIGPINGVALAALFTRVHFTSSDAVVAFCGLDPRPKESGRKVGRRRLSKQGDKAARSLLYNAASSAVRTPHFKDYYAALRARGLASTAALVVIARKLLRIAYGVWRTGRAFDPDRLNLKTA

SEQ ID NO: 313872 - protein, 373 aa, unidentified
MPRYSTAFGMDVHLRSTTVCALDAETGEAVTRRFRGNPWGEVAEWMSGFPGPSLAAYESGYLGFAPQRELSGLGVDCVVAAVSKVPRSAADLSSKNDRNDAARMAKAILSHDVTPVWVPSPEIEGLRDLAAAHDAATARLAAAKQRLLAFLARRGYAYGGTTPAGNPRKYWTYGFLRWLDGIRPADDGGIRALAALRNEVEAADETREAVLAEYRAAVAAGPLSAEVEALQSIKGCGFALAAAFAAEVGDFSRFRSGRQVTAYFGLAPKQRSSADSVRLGGISGAGDALVRKLAVEGSWCYAQAGRQPKLMPKGSGVPLEVRMHGRKGSERLLRRREEMLERGMPQAKANAATAAELVRWLWGLGAMCREATE

SEQ ID NO: 313873 - protein, 387 aa, unidentified
MQVAERRSEALTALRVDLSAIFVSLELSRSKWLVTSLSPGAGERMSKFVVTGGDVPGLLACLAELQRKAKARTGSSFRIVSIQEAGLDGFWIHRILEREGIESYVVDPASIATSRRRRRAKTDKIDGEALVRALLAYKRGEPRVCAMLRVPTPEEEDRRRLVRERKALTNERVRHVNRVKGLLFGQGVSGYQPLNRDRRKRLEELVTGDGRPLPSALKAQISRELDRIELLIEQIKAVEKARDDMMVAAQTSSPAPALLLNLKGIGPQFAAVIWSEGLSRHFDNRRQVAAYAGLAPTPWQSGKVDRDQGVSKSGNPRLRTTLIQLAWLWLRHQPDSALTAWFKERVTQNGGRQKNATIVALARKLLVAMWKYVTAGVIIEGAALTAD

SEQ ID NO: 313874 - protein, 358 aa, unidentified
MAGKVTETVVVGGVDTHKDLHVAAVVDQNNKVLGTQFFSTIRQGYRQILACMTSFGALKRIGVECTGTYGSGLLRYLQNAGLEVLEVTAPDRMERRKRGKSDTIDAECAAHAAFSGIRTVTPKTRNGMIESLRVLKTCRKIAISARRVALQIIHSNIISAPDELRERLRNMTRMQRIRTLGSWRPDASEYRNVTNVYRVSLKSLARRYLELHDEIADLDVMIAAIVDELAPELIKRNAIGYESASQLLITAGDNPQRLRSESGFAALCGVSPVPVSSGKTNRYRLNRGGDRAENSALHIIAIGRLRTDDKTKEYVARRVAEGHTKMEAIRCLKRYISREVYTLLRNQNRQINSIPITA

SEQ ID NO: 313875 - protein, 364 aa, unidentified
MDVHTTNYTLCCYTVDSDDAFAVVNVKPDYHEILKYMERVRSTRGGNCDFICGYEAGCLGYSLYHQLAKHGVACIILAPSTMPQQKGKSIKTDKRDAKNIAKCLAFNLYSPVYVPTAEDDAIKEYIRMRDDVKADLKRTKQQIISFCTRHGFHYEGKSRWTQAYFKWLDSLVFENALYKETLQEYLALYYTLDEKIAVYDARIEELAHQKRYEENVRKLCCFKGVSTHTALPLLVEVGDFHRFRTAQHFSAYLGLVPGESSSGEKVIHTNITKAGNSHLRTLLVESANSYSRGVVGKKSKVMKDKQGGNSPEIIAYADKANERLHRKFYKIAIRSKKNVAKTAIARELSCFVWGMMTNHISRAV

SEQ ID NO: 313876 - protein, 394 aa, unidentified
MKLVGIDVGKNSHHFCVMDKETGEFNVTPTSFSNNKEGFDFLINSLKPYSKKSILLGMEDTGHYHVALLKFLLSDGYTVALINPKTTDLTRKMEGDITKNDKLDTITICDVLDTPERKKQYRITKVDRFDLYEQRQLTRHHHNLKEELNIYCNRLQKSIDLVFPEFNTLFSSKYGVVYMNLLKTFGSAEAIASADIRTIRKCFEIKGRGNRISLTPEKLKECAKNSIGISSEVETIQIKHLVSQITLIKEQIAEIDKKIEEFSITNNSPILSIPGISHFSGTSILAELGDIGNYSKPSQIIKFAGVAPYHYESSQFNAQHTAITKKGSKYLRKTLYQIILPVINNNPVFKKYYRLKISQGKGHRCAQGHCIRKLLRIIYHLLETGQSFDPALLR

SEQ ID NO: 313877 - protein, 339 aa, unidentified
MNIKTLGIDIAKRVFELHGVDEKDKVVLKQRVSRGELVVTIAHLPPCLIGIEACSGAHYWARRFRALGHEVKLINPQFVKPYVKSNKNDSHDAQAICEAVGRPSMRFVAVKNVGQQDIQALHRIRERLVKDRTALVNQIRGLLTEYGIVIAQGIDKVRKQLPIIIENVDNELSVLGQELLHDLQIQLLELDSKVKAYDRKVDAICRANEMCQRLTEIEGVGALTATAVVASVGDAKVFKNGRELAAFIGLVPKQHSSGGKQKLLGISKRGDRYLRCLLIHGARAVLIRAKNLPDKKEQWLKDLVARRGHNKAIVALANKNARVMWAMMAKQEAYQRDMN

SEQ ID NO: 313878 - protein, 470 aa, unidentified
MVAVMIGIDPHKASHTAVAIDPAEVPLGQLRVRASAVQAERLLGWAQAWPERAWAVEGAGGLGHLLAQQLLSAGERVLDVPPKLAARVRLLATGNINKNDPNDARSVAVAALRSAGVREVRRDDHAAVLKVWSKRYQDLGRARTQVACRLHQVMCELIPGGVPGEITAGQAERILASITPAEAVQAARWELAAELTEDLRGIDARIRQARTKLAAAVRAAGTSLTRLFGVGPVIAAAVIGDVGQVARFPDRDHFAAYNGTAPIEVSSGGRKIWRLSRRGNRRLNHAIHMAAVTQIRHRHSQGHAYYQKKLAEGKTGKEALRALKRQVSDAIYACLQADARRAAAHVKGPGGQPGNGSDSSAAGSHPGHRLFGQATPGPRHHTTTAASDPAPGPASARGRAGHSSIAATSPLAKPQVQVQRPQRSEDERPGGAARQRPYSAARKAWGQGSQAKPQRPEAASRAREKDRRNP

SEQ ID NO: 313879 - protein, 352 aa, unidentified
MDATTVAVDLAKDVFEVAVANRAARIVDRRRLTRRQFETFLDSLAAGTTVVMEACGTAHYWGRRGQARGLHVRLLPVQYVRPYVRRNKTDRTDVEGMLEAHRCAGIQAVPIKTVDQQALQALHRARTQWQAARTARINVLRGLLREQGHPMPTGSRTVLARVIAVLDTAGDTLPGLLQTLIRTLVDEVRDLEGRVATLDRQLAAVARTHPDAPRLQQVPGIGVVTATAFVGAVSHIHAFRRGRDFASWLGLTPRESTTGRRRYLGRISKRGDGYLRCLLTHGARAVLLAAQRTARDRPHRLTRLQQWAVALAARRGHNKTAIALANKLARIVWAVWCRETDFHSPAAAPVAA

SEQ ID NO: 313880 - protein, 337 aa, unidentified
MKNSSQSMEFFVGIDVSELTLDVTAIHTASKSKKYIQVENNDSGLNVLNHWLHDMPGFAHAQTVFCFEHTGMYTRVLLDYLLSQSANVWMESSLQIKKSLGLNRGKNDKIDSCRIAAYAYRFSDRATFVENNSPEILLLKDLLSARNRLKKSLQQISVKIKELTKVDFPQGKEIEALNLHAIRGLKASIEQIEEKIHQVITSDKHLKEVYQLITSIPGVGFILSVKLLVYTKVFTCFDNVRQLACYCGVAPFEYRSGTSVKGKTGGSKFANMDLKATLHLAAISAIQHNVELKKYYERKVEEGKCKMSVINAVRNKLLARIVAVVHRGTPYVQLTNG

SEQ ID NO: 313881 - protein, 409 aa, unidentified
MEVVHERCCGLDVHKETVVACVVVPGAGKQPHKEIRTFNTMTADLLELADWLTAQGVTHVALESTGVYWKAPWNILESSFTLLLVNAQHIKQVPGRKTDVRDCEWIADLLRHGLLRASFVPDLPQRELRELTRYRTTLIRERAAERNRIQKTLEGAGIKLGSVASDILGRSGRLMIEALVDGSTDATTMADLAKGNLRAKLPQLQRALTGRVRAHQRFLIAHQLAHLDGLDELIEQLSQEIAERLRPFQDKIERLDAISGVGQRTAEVLLAEIGTDVARFPSAAHLASWVGICPGNNESAGKRKSGKTGKGDVWLRTALTEAAQAASHTKDTYLASQYQHLAARRGKKKAIVAVAHSILRIVWHLLDHDCEYVDLGSRFLEERDRQHIERRLVRRLEGFGYTVKLEPAA

SEQ ID NO: 313882 - protein, 345 aa, unidentified
MEHYVGIDVSLERSSVCVVDGTGKIVVEAKVVSEPEALIAWLRRQPFTLARIGLEAGPLSQWLFAGLRDAGFAAELLETRHVRDAFKAMPVKTDQKDARGIAQLMRLGWFKPVHCKSVSAQETRALLTARKLLQAKRHDVEMSLRGVLRGFGLKVGPTTPRTFEARVRELVDGHPTLVTVAEALLAARTELLRRFEELERRLVEVGRADVRVRRLTTVPGVGNLVALTFVAAIDDPSRFRSSRQVGAYLGLTPKRYQSGETDVSGRISKIGDHGVRTMLYEAANVMLTRPVKGSALKDWALAVAKRAGPRKAKVALARKLAVVLHAMLVKVTNFQHRRQAAAAMA

SEQ ID NO: 313883 - protein, 425 aa, unidentified
MNYKQNEKINQVKESTLVVGIDIGSTTQYARTFDWRGIELGKVFPFSNSREGFESFKAWMQHLQDKYKKLDAIVGIEPTGHYWFDLGAYLEDEGILLVMVNPYAVKQTKELDDNSQSKNDRKDPKVIAKLVTEGRYSAPYTPDGVYADLRIMVANRKRLIREMTQIKNRFARWFAIYFPEYTDVFGDYEAQSSMLLLKKVCTPEAIVELGAEKINQIWRDAKLRAVGMKRATTLCETAKRSIGLKKGSSAARYEMKLLLEDYEYKKAQLDAVMEEIEKLCRKIPESEQMLAIKGIGVITVAGFLAEVGDVRRFESPRQIQKLAGLSLRENSSGKHKGQTTISKRGRSKLRAVLFNAAIPLIAKNPEFKSLHEYYTTRANNPLKKKQSVIAISCKLIRVFYAILAKGVTYDAQKLISDIHRQPQVA

SEQ ID NO: 313884 - protein, 319 aa, unidentified
MAPLSNQQFKAFVGIDWADTKHDICLQQAGDDRREFDRIPHQVTRIDEWAKALHQRFGGPIAIALELARGPIVSVLQRHAFFTLFPINPAMLAKYREAFKPSRAKDDPTDAELALDLLLRHPERFSALRPQSAGMRSLLSLIEQRRELVGDKTRFTNRLTSTLKQYYPQALEWFEDIDTVLFCDFLTRWPTLLAAFGEQRDRFKGADELQKYSGIAPVTERSGKKCWVHWRWQCPTFLRQTFVEWAGQTINKSFWAGAYYRQQRAKGSSYQAAVRALAFKWIRILYRCWQTGTRYDESVYLNALRKRGSSLLRNLELPG

SEQ ID NO: 313885 - protein, 355 aa, unidentified
MSHLNSEIAVIGIDIGKNSFHVVGQDRRGAIVLRQKWTRGQVEARLANLSPCLIGMEACVGAHHLSRKLQLFGHNARLMPAKYVRPYSKGQKNDYRDAEAIAEAVQRPTMKFVATKTTDQLDLQALHRVRERLVSQRTGIINQIRAFLLERDIAVRQGLRFLRAELPGILATRADVLSPRMSRVIEELAGDWRHLDARIEGLTDEIETLARQDQHCERLMTVPGIGPIISSAMVAAIGTGDVFSKGRDFGAWLGLVPKQISTGDRTILGSISKRGNRYLRALFVQAAWVVLVKLGPTHWERYGLKSWIEAAKKRLHYNVLAIALANKLARIAWAVLNKGRAFECVKTDVMASRPA

SEQ ID NO: 313886 - protein, 386 aa, unidentified
MQKLNDLSRSLTPLDPDGTLIAVIEMSQSSWLAAGIVPGVERQPLKKLAVDESALLNLLNRWRVEAEKAGRKIERIAVAFEVGRDGFWLARWLRARGIEAHVIHASSVAVSREHRRAKTDRLDTQLLKRAFIGWLRGERDHCKMVAIPTTKDEDAKRPNRERESLIGEQTRIVNRMKAALIRLGIRGFNPKLKKAAGRLEDWRTPEGEPIPPNTLAELRRDMERRRLISDQIRQIEDARLERIEQAPGDGPRAMVRLLARVIGVGIETADMLVQEVLTRNMRDRRAVARYAGLTGSPDESGTKRREKGLARSGNARVRRGMIQLAWRFLMFQKESALAQWFRARTESARGTRKTMIVALARKLLIALWRLVREGVVPDGVVLRPAQ

SEQ ID NO: 313887 - protein, 446 aa, unidentified
MNDRTGLSRGDRNRNARLARLRQLLPLENAIVGIDLAADKQAVVVTDHDSRVIARRRVSARAWELGELLDWALVKAKAAGFGSVTVACEPTGHRWRVLDQLAAQRGLALVCVQPLLVYRAREGEDLTFDKSDPKDAVIIARLTAGLHCYEPERADAVWARLRHLGARRSQLTTEATAAVNQVRDLLECAWPAVLDTSSAPFRSATWRAAVMVALERSGGDLARVRRLGIARFTAAVRAELPRWDATRPCLRIVRAVFAALADPAGVSAQRPGALERADLAMADWQQTRLRLAQTEARMVAVLDDLGLTGLVTSIAGLTPVGAAAILAETGDPNRFATPRSLVKHAGLCPRDNASGGYQGKTSISGRGRPGLRVAAWRAVWAALPNNSVMAAKFTHLTTREVNRLARQQARTACAAALLRWIHVVITRQVRWDPAVAAGSTPLRRAA

SEQ ID NO: 313888 - protein, 354 aa, unidentified
MTSDLGRPAQTFASIGIDIGKDVFHVVGFDPNGKVVLRKKFKRLALESELAKLPPSIVGLEACLSAHFVSRTLRRLGHTPRIIPAIYVKPFAKGQKNDYNDAEAIAEAALRPNLRVVQEKPQDQLDLQALHRVRARLVSRRTATINQIRAFLIEHGIAVRTGANSLRRSLFAILENRADELSPRMSDLIVGLYEDWLWLDERIETLTDEIERSSHREANCRRLMSVPGIGPIISTAMVAAIGTGEAFERGRDFGAWLGLVPRQYSTGGKPILGRISKRGSKYLRTLFIQAANVILMRPQTWERFSFGAWLKAAQPRLHRNKLATALANKLARIAWSVLRHDTVFDAQRVEVVAI

SEQ ID NO: 313889 - protein, 322 aa, unidentified
MILSMGVDISKKKADITIYNDVVKKNYVITNSVSSIKRFLKKHSDVDRIVMEATGTYYLKFATIANELGFYVSVVNPYIIKKYGEYKFKRSKTDKIDAELIAKYGYENTPKKYKITDKLRSKLKSLLTTITGLKKQITQNTNRIEALSQFPNNETKYSIKALQKVIKAIKREKSNIEKEIQSIIKNNFKKTYELLDGIKGLGPGCNAAIIAYYGDFSDFDSAKKAVAFAGMDPIKHESGSSVRKKSKISKRGNKVLRALLYMGGMSAIQYNKQCIKLNKRLKDKGKIGKVRIMASAHKLLRLAYGVVTSGVKYDPDYLKKSA

SEQ ID NO: 313890 - protein, 416 aa, unidentified
MYSRVKSKRLVKVFEGVVGVDIGKYQHVAVAQRWDGNRMKPLVFENNKDGFDRLHTYICESQNSLGIQKMRVAFEPTGHYWKALAEWINRVGFNLEMVQPAHTHKAKELEDNSPGKTDFKDAGVIADLALQGKSRKFIIPEGVFAELRYLTHFRQELVIDLNRHINQLHQVMDNLFPELFSLFNHHIGKGLLNLLQQAAVPEKVLALGQAGIAGLLKRGRTGAKRAEAIMEVACKSVGVKHGKLSLEMKLKHLLKQLELINRQLEQIEKQIKTYLQQIPYTNVILSIPNLGEITLAILLGEMGDLRRYHSAEQIVKLAGLNLYEISSGQQHGKKRISKRGRPLLRQMLYLSCLRMIQAKGRFYIFYQRLVNKGRPKTVAVVAMTCKLLRVMFALVRDNKLFNEEQVGEELISLQVA

SEQ ID NO: 313891 - protein, 375 aa, unidentified
MEKLIRIGVDTSKSVFQLHGVDVLEQPALIKKLHRGQVIAFFKKLPPLKIGLEACGGAHHWGRELEGLGHEVFLIPPQHAKAYLRRGKHDAADAEAICEAMSRPRTRFVPLKTSEQQAAQMLAGVRDQLIRRRTQLSNTIRGHAAEFGLIAPTGLARIEPLLGRIASEETVPALAKELFAVLAEDYRALGSRIGKVDAKLMVFHRQDEVSRRLAQVPSIGPIGATLLSIKVADAKAFRSGRDFAAWIGLTPKNHSTAGKTRLGAITRAGDAMLRRVLVVGAMAVIQQLKRRKEPPPSWLGELLKRKPAMVAAVALANKTARIAWKLMVTGERYDPRPRQAIVAPCSAPSRPLRAADRGGLRPALTAPALRAPACP

SEQ ID NO: 313892 - protein, 349 aa, unidentified
MNQISRIGLDTSKAVFTLHAVDEAGQPMLRVNLRRAGLIGFFRKLPRTVVALEACGGSHHWARKLTALGHEVRLIPPQYVKPYVKRGKNDRNDAEAICEAAGRPGMRFVLAKTEDQQAQAMVLKVRAALVEQRTQLINALRGHAAEFGVIAGKGTGKVTALLAAIEAEATIPPIGKEMLALLGEQIEHLDGRIQALEAKLNAMHKANAISQLLATAPGIGPVIGLSFAVEVDPAAFESGRHLAAWLGLTPKEHSTGGRQRMGGISRAGHERLRALLVNGATAVIRAAERPGSQLATPWLLGLLARKPKKVAAVALANKMARMTWAMMTTGEAYRRPVAAGAACRPAVIS

SEQ ID NO: 313893 - protein, 345 aa, unidentified
MKHYAGLDVSVKETSVCIVDEAGTICCEGKVPSHPEDLARLLGDPAWRLVRVGLEAGPLSQWLFSGMAETGLPVICIETRHTKAFLKAQVNKSDRNDARGIAQMMRVQLFRPVHVKTLTSQKHRALLTAHKLLQEKFIAIENDIRGLLRNFGLKVGSVSVLKFDHRIRELVEGLPDLVEIMEPLLASRKQLREAFMALHRRLLVIVRDDAVCRRLMTIPGVGPVVSLAFRSTIDSPARFTNSKAVGPALGLTPVLHQSGESHRLGRISLCGDEMMRHLLYEAAQVMLTRVQRWSWLKAWAMSIAKRRGLQKAIVALARRLAVIMHRMWMDGTEFRWTRESIPASV

SEQ ID NO: 313894 - protein, 341 aa, unidentified
MKQEMHVLGIDIAKRVFHAVGMDDRGKIVYRKRLSRHDLMPCIAKLPRVLIGIEACGGAHYWARRFRAHGHEVKLMAPQFVKPYVKSNKNDSRDAEAIAEAVTRPTMRFVPVKDVDQQDIQALHRVRERLIGERTALVNEVHGLLHEYGIVIPKGVAKFRQAVVGKLEAEKDKLTPLSQEMFWQLVEEFAALEKQLAYDQEKLEALATTHPACQRLMTIPGIGPLSATALVAAVSDASAFKNGRQFAAWLGLVPRQHTTGGKERLLGISKRGDPYLRKLLVHGARATIRWVDRKTDRRSQWIRQLVERRGKNRTAVAVANKNARIVWALLTSHQDYQPATS

SEQ ID NO: 313895 - protein, 470 aa, unidentified
MTHRDQKKERRASAATRLRVMNPHAAGIDVHANVHWVAVPAADAPAPPPDHPRNLPPNVRSFGACTADLIALADWLTTCRVRTVVMESTGIYWVPLFELLESRGFQVLLVEPRQSRHAPGRPKSDVLDCQWLQRLHSYGLLSGSFRPAEQIVVLRSYLRQRQMLIRYSGQHVQHMQKALEQMNVKLTEVVSDVCGVTGMAIIRAILRGERNPLELAKLRNDKCKRTEAEIARALYGNWRAEHLFALQQAVALYDCYREQLRVCDDQMQAYLDTLADRSQGRPRPRRHGRARRERARNAPAFDVAGALFRMSGVDLTVLEAIDPNTALVLMSEIGPDVSRFPTVKHFCSWLGLAPQHQMSAGKIRKRRVQGGASRAGQALRLAGQACYHAQNVLGAFYRRVQARAGAPKAIVATAHKLAERVYRLLKHGADYVCQDVAAYEAAYRQRLVKGLARKAASLGYRLEPTAAPAT

SEQ ID NO: 313896 - protein, 343 aa, unidentified
MKITTIGIDLAKSVFQVHGVDARGHVVVRKQLRRDQMAPFFANLPACLVGMEACGSAHHWARKLQAFGHEVRLISPQFVKPYVKSNKNDAADAEAICEAVARPNMRFVPIKTVEQQAVLSVHRVSQGFVKARTAQANQIRGLLNEFGLVLPQGIANVFRRVLPMIDGAPDLPASMRALIERLLENMKVLDRQVKELEAQIKAWHQGSALSRKLEKIPGIGPLSASALVASIGDARSFKNGRQVAAWLGLVPKQDSSGGKPKLLGMSKRGDTYLRTLLIHGARSAIVAAQRKGKPNVWLSGLLARRHSNVAAVALANKNARTIWALLAHEREFRPDYLPRPATA

SEQ ID NO: 313897 - protein, 317 aa, unidentified
MAKVTFPQLIQRACGIDVHLKVVVATIDGAAIQRETRSFKTFTSSLNELKEWLLSNGVTHVAMESTGVYWKPVYKVLEDSIPNVWIVNARHIKNVPGHKTDKMDSEWICKLLLAGLLKPSYIPPKEQRQLRDLTRYRNKLIQQIASEKNRMMRILEDCNIKLSSVVSNTSGTTATSLIDMLCEGKVLTPDDINSVYHGKLSASPEELLEACTGFVEEHHIYLLQMIRKDIDQTQTLVDDLSERIKRLLSKYENVLELLREIPGFSIKVVEDLVSEIGLDMSHFPSEKHLSSWAGLSPGNNESAGKKKAHESLTETNR

SEQ ID NO: 313898 - protein, 385 aa, unidentified
MKPNSQMTLGDFFRQCVGIDISKKKFTACLYMYDRASDVGCYTKSIDFANTKSGFNQMVKWSRKEAVKEYPLTYLMEPTGIYYEPLAYHLHKIGQTVYVVLPNKARKFCEAEGIKTKTDAVDARCLALMGCVSRKLSPWSPPSTIYHELRQMTRFHADLCKVRTSVSNRMEALDHMHGPDKSVIRHCQKLLEEIDKLMEKNGQALLQKLSENKELEERVKRIATAKGISVQTILCVVAETNGFHLIRNRKQLTSYSGLDVIAKQSGNEDPKHRISKKGNVHIRAALYMPALVAIRYNRQLKTTYDRICQKHPKEKMIGITAVMRRILLLIYALWKNGEEYDETRDMIHMPRKKGLEPENGQEDLVGIDREPIDWNAVGDNGEPPF

SEQ ID NO: 313899 - protein, 408 aa, unidentified
MQVYIGIDWSEDKHDVVFMNQGGVDVARMTIPHSLDGFVQLDAARRKLGLAPGEGTVGLETAHNLIIEYLWSQAYQQVYVIPPSVVKSNRGRFRQSGARDDQSDGYLLADILRTDQGRLQPWHPDSLLTRQMRAKVSWVHHLTRATTRLSNRLRAVLLRYYPAALQVFPDLGTQIALEFIRAYSTPQAAARLTLAELVDFAHQQGYSHPKKLPSCYARLKGDYPPASPETVLIYQEEAIQLASLLLQMTHTKVDVLRELHALFRQHPDYPIFSSLPGAGELLEPALLVKFGDDRARFPTPASVQALAGTCPVTDQSGKRRVIKFRKACDREWRSLSQAWAIALVNSAKSPLAVAYFEQIRPHCQNRHHAYRCVANRWLAVAWKLWQTHQPYDEAYHFQQRAARSKPKI

SEQ ID NO: 313900 - protein, 372 aa, unidentified
MKYTTVYVGMDVHKESFSLACYTNEKEEAEYVQRTEAHYCKVLSYLEAMRFHYGDDVTFVCGYEAGCLGYTLYHQLTSHHVKCVILAPTSMPTQKGKKKVKTDKRDAQRIARCLAHHDYSAVHIPTAKDEETKEYIRMRDDHKLALKKIKQQILAFCLRHNCSFPGNSHWTQAHLRWLREIKLGDVYQEILEEYLLTYSNLVDKLERLDKRIEELAGDEDYAENVHKLSCFLGIKTQSALSVLTETGDFKRFGTAQQYASYLGLTPGEDSSGEGQDRLGITKAGNRHLRMLLVEAAQSYGRGKPGYKSRELKKRQEGNPPEVIAYADKANERLRRKYYRLVLSYNKRSNVAKVAVARELACFIWGMMTGNVA

SEQ ID NO: 313901 - protein, 382 aa, unidentified
MEATRIGIDLAKNFFHLVAMDSRGKVLWRKALTRRRVPEFLAQLKPSMIGMEACATAHYWAREIQKLGHTAKLMHPGFVAAYRKNSKNDFNDAEAICEAMSRPTMRFVEVKSVAQQDMQSLHRIRRLMIKQRTQVAHQLRGLLAEYGITVRPSIAALRREAAALAGDVERSTAALRRVVANNLEQLTLLERQLRELDREIAHTCATDERCRRLAEVAGVGPLTATALVAKVGNARQFANGRALSAYLGLVPGQNSSGGKTVLLSITKKGDRYLRSRLIHGARAALQVAGRYDDPRSQWAIRLKRKSGPNVATVALANKNARVLWKLLTSGQHFRVQPPVPEAERAQAAHRLASPKPAGRRAAVRLEHDARPQDFSTSPPEGN

SEQ ID NO: 313902 - protein, 305 aa, unidentified
MEYFAAVDVSLELSSVCVVDGTGRILHEAKVASEPEALVAFLRGSGLAFTRVGLEAGPLSQWIHAGLTGAGFEAVLLETRHVRAVLRSAAVKTDRNDARGMAQMVRMGWFRPVHAKTIPAQEVRALLVARKQLQARLNDLERCLRGILRGFGLKLGEVAKGRFEARVRELVAGQRTLEGLAGPMLRARAALRAEYSALHREVLRTVRTDTNCRRMMTVLGVGAIVAMTFKAAVDDPNRFKHSRDVGAHFGLTPRRYQSGEVDRSGHISKSGDGDVRTALFEAAHVRCSLERWSPRWLGVGASARG

SEQ ID NO: 313903 - protein, 337 aa, unidentified
MKYSGIDLHSNNSVVTITDEEDRVMAEKRLPNDLTKILDFLQPWKDELTGVVVESTFNWYWLVDGLQAAGYKVHLANTTAIKKYDGLKHSGDETDARHLAHLLRLGILPTGTILPPEQRAVRDLSRKRMQLVRSRTAHILAVENITARQLGARISSNQVKQLAGEDIDKMPLPDEVALAIKANVAVITTLSEQIDLLEKRLQKNVGTLAEYVHLTSAPGIGQVLATTILLETGPIERFSDAGNFASYARCVDSVHTSNNKKKGEGNTKNGNKYLAWAFVEAANFALRYSPEAKRFYDRKKSRTNNVVAIKALAHKLARACFHMMKEKKPFDAKRCFA

SEQ ID NO: 313904 - protein, 418 aa, unidentified
MTEDVEWFAGVDWASQTHQACLVDAGGKIVGERGFAHSGAGLAELCSWLLTMTRAAPTAIAVAIEVPHGPIVETLLERGFQVYAINPKQLDRFRDRFTVAGAKDDRRDAHVLGDSLRTDRHCFRRLSAENATVIELREWSRMSEDLQQERNRLANRVREQLWRYYPQALAISDDLAADWFLQLWAAAPTPATARRLRESTVEGILKRHRIRRITAAEVLASLRQKPLTVALGTAEAASAHIRTVAHRLRLVNRQIKQAHQRLDALSDRIAENEGDSDATGQKSEQRDVAILRSLPGVGRIVLATLLAEASEPLRRRDYHALRTLSGVAPVTRRSGKYCIVVRRQACHMRLRSAVYHWARVATQHDQRSRHRYAELRKRGHSHGRALRSVGDRLLAVACAMLTRRTPFDPDYPVKQMAA

SEQ ID NO: 313905 - protein, 364 aa, unidentified
MEVVYPCCCGLDVHKKKINACVLWAEARGKSRKEKRRFGTFTHDLLQLADWLGECGVTHAAMESTGVYWKPVWNILAEQFEVLLVNAQHIKAVPGRKSDQKDSEWIADLLQHGLLRGSFVPPRPTRELRDLTRYRVSLVQEINRIANRIQKVLEDANIKLASVATDALGASGTAILEAMLAGEQDPARLAEMAKGLLRNKIPELKLALEGRMTEHHRFLLRQLFDHLRFTEAKQDEIEREIDRRMRPFEDQVARLCTIPGVHRVTAWGMLAETGMDMNQFPSAEHLSSWACLCPGSFESAGKQDAQGQRFAPPLPVASSLGHFEDQEQLPFGAVSAHCCAAGSQARDHGRRPCPPGHGLSHAEA

SEQ ID NO: 313906 - protein, 410 aa, unidentified
MRLCVGDDWAQDHHDIEVMDEAGQVLAARRLPEGVAGIGQLHELIGAFVPAGEDVEVQVGIETGRGPWVTALLAAGYVVFAVNPLQASRYRGRRGVSGAKSDGGDAHMLADAVRTDAHQLRPAAGDSPAAEAVKVLARTHKTLIWQRSTVVLRLRAQLREYFPAAVAAFEDLDARDALELLGKAPDPARAARLTRAQVSAALKRAGRRKIAERADAIVAALRSPQLGQPAALTAAYAATVRSLTAVIATLNEQVASLQGQVEAHFGQHPDAEIYRSQPGLGQVTGARVLGEFGDDPHRYATAKNRKNYAGTSPITRASGKKKIVQARFVRNDRLIDALMLQAFGALRVSPGARAFYDAQRARGCAHNEALRNLASRLVGILHGCLKTRTRYDEAIAWGHRENIPQSDAAA

SEQ ID NO: 313907 - protein, 351 aa, unidentified
MSEHYAGRQIVGMDLHRRRSVLVRMTDTGEQLETIRISNDPEYLKAVMARAGEAPEVVLEAAYGWYWAADTLAELGASVHLAHPLGVKMFSYRRVKNDQRDAADLADLLRMGRLPEAWIAPPATRELRGWVRHRAKLVGLRSSLKCQVHGVLAHAGIWVPMSDLFGVAGQQLLAELSTGERLSIESRSRLDSALRVIGALEFEIELFTKLVNGRLRTDPGYRAIQQIPGVGRVLAAVFVAEIGDITRFHRPAQLASWAGLTPKHHESDTTVHRGRITKQGSRLVRWAAVEAVQRVGAHTRLGQHRDRVAARRGRNIGVVAAARELLTLVFYGLRDHHIRALRPPAAGRPAA

SEQ ID NO: 313908 - protein, 350 aa, unidentified
MENIALIGIDLGKNSFHIHCQDHRGKAVYRKKFTRPKLIEFLATCPATTIAMEACGGSHFMARKLEELGHFPKLISPQFVRPFVKSNKNDFVDAEAICEAASRPSMRFVQPRTESQQAMRALHRVRESLVQDKVKTTNQMHAFLLEFGISVPRGAAVISRLSTLLEDSSLPLYLSQLLLKLQQHYHYLVEQIKDLESQLKRKLDEDEVGQRLLSIPCVGTLTASTISTEIGDGKQYASSRDFAAATGLVPRQYSTGGRTTLLGISKRATKDPNFVGSVCRYSYKTGTPVWQVGRLGQGVVVSEKQLCRHLCSGKQAGQNSLGTDGATANLRSIKAEIHQFKQSFIWFCEY

SEQ ID NO: 313909 - protein, 344 aa, unidentified
MEQVTIIGIDLAKNVFQLAYADAAGRVVVEQRVRRSELAAAVARCPGAVVGLEACGGAQQWARDFEAAGHPVRLMAPNRVKAYCAPGRKDDRRDARAIAEAASRPHVPGLRVKTPAQQDAQSRQRLHRMRVRQCTTKINTLRGLLGEYGIVLPKGKGGLRRYTELPGSARWEAIDAEMRAEFDRLYAEIQDDRAVIEAGRARLAEAGRDDPAVQRLCTIPNVGPMIAAATVGAIGDGASYPSGRKFATSIGLTPRLDASAERVVLGRISLIGDGQLRALYVNAAQGLLMRAVDGRLAGDGLAQWARRLHAKKGWNETVIALANKLARIAWAVLRSGQPYRPRPL

SEQ ID NO: 313910 - protein, 338 aa, unidentified
METYAGIDLHSSNNYIGIMDQDHKRLFSRRLPNSLDKILMVLEPFKSDLKGVIVESTYNWYWLVDGLQEHGYRVHLANPSAIKQYEGIKHTDDKWDSFWLAHMKHLNILPEGYIYPKEQRPVRDLLRRRLLFVRHRTANILSLQSTITRNLGIKISGNNIKKLNMDDANELFDSSNLVFMAQNNISTIKHLGKIIKGIEKEIKSQVKLRKEFVMLTAIPGIGLILGLTIMLEVGDIGRFFKVGNYSSYCRCVGSKRLSNGKKKGENNKKNGNKYLAWAYVEAAHFAKRYIPKAQRFYQQKMANANVAVATKALANKLARASYFIMRDQVPFDEDMLFK

SEQ ID NO: 313911 - protein, 341 aa, unidentified
MNEITRIAIDTSKSVFTLHGVDAVGVPVLRRDLRRHQLQAFFGKLPPVEVVLEACGGSHHWGRWLMTLGHRVRLIPPQYVKPFVKRGKNDRNDAEAISVAASQPTIGSVPVKSADAQARAMLLSVRELLVRQRTQLVNALRGHATEFGLVAPLGDKGLAELRSEIASAADDRLPAAARQALALLGGEVDRIEARRAEIEAKLMQSHKADPLSRRLAGIPGIGPIGALNFAWRVDPAQFKSGRHFAAWLGLVPRQRSTGGKQRLGGISRAGDERLRQLLVLGATAVIQHAKPGRPNASPWLLELLKRRPRKLAAVALANKMARILWAMMTSGEAYRQPPAAA

SEQ ID NO: 313912 - protein, 395 aa, unidentified
MDVMHPVCCGIDVHQKSIVCCILDGPLTSNEPKKYQTSFGTTTKELKAALDWLLEHQVTHVFFESTGQYWIPLFNIFSDSGLELILANPQHIKNVPGRKTDVKDAEWIAQLGRCGLINQSYIPSQEVLQLRYLTRYRLSVKQRLTQIKNHIHVILQRANIKITSYLADIFCKTGQALLTLFIDGEVINEDNVESCIHGRIKASTRQLIEAMEGKLSTVDRFLIKECMEEYQLQKKISDELNKEINEYILEHFPEEYQLLLTIPGISDNCCATILAEIGPNVDAFKTEKKLASWAGMCPGSNESAGVKRSSHTTQGNKYLKQALVMSVLSVQRAKEETFSLFYQRISSRGSKMKAIIACGHKMLRIIYKILQSHQPYNSQKALGLRQQTNALSLTI

SEQ ID NO: 313913 - protein, 405 aa, unidentified
MEIIVDKGCGLDVHKETVVACIMGTGLKKETRTYSAMTNDLLGLKQWLKEKGITHVAMESTGVYWKPVFNILEDSFEVMLVNARHVKNVPGRKTDVQDSEWLCKLLRNGLVRGSFIPPKEIRQLRDLTRYKRKLIQTMTAEKQRIQKILEDANIKLSSIASDTFGVSGMRILEELMKGELRPDEMAELSKGRLRKRKADLKEALVGTMEEHHTFMIQASLGHIKMMEELLATVEERIQEKIDRHVKEEYELLKTIPPVKDNASVILAEMGVNMDLFPTEMHLSSWGGLSPGNHESAGKKKPGTTTHGNKHLKAILVEFAWVASRMKGTYLRAKYHSLVGRRGKKKALVAVGHKILIMCYHILKYKVPYKELGANYLDERKKDRIANSYIRRLSNLGYTVTFNQAA

SEQ ID NO: 313914 - protein, 344 aa, unidentified
MNYHTALDVSLRSVSICIVDDEGTIQFEAKVPSEVNEIVACLRRFSQEISSVGFEAGTLTQYLTYGFQAAGYEVICLEARQVSAALSAMRNKTDKNDARGIAQILRTGWYSRVHVKSMESHLIRALLSGRKTILKKCVDLENEIRGLIRLLGIKLPGPLKHGAYDAHVRQAVEEHACMASTLIPLLDARLVLYKTYLKLDNQVKALVREDTICQRLMTVPGVGAITALTFKVGVDDPRRFKSSRTVAAHFGLTPRRYLSGEVDNPGRISRAGDPDVRSALYLAAHALVTRSEEWSSLKVWGIRLIKTKGRKRAVIAVARKLAVILHRMWLDGTDFRHGSTKAMT

SEQ ID NO: 313915 - protein, 373 aa, unidentified
MTDYDAYIGLDVHKDSISVAIADAGRSGEVRLFGAIANEPDAICKLVKKLSSKHGRVEFVYEAGPCGYNVFRQIEALGFVCRVVAPSHTPVRPGNRQKNDTRDAVMLARLLRAGELTFVWVPDVVHEAMRDLVRARSVASHDARKARTLIQLFLLKHDLRYSAKSWTSRHRTWLRNRHFQHHAQQIAFQSYLNRLEQAEARKKELEDQIAVISQTWSLARTVMNLQAFKGIGLVIAATLVAEVGIFSRFDSPGKLMAYLGLVPGEHSSGGSVRPRGITKTGNSALRALLFEAAWSYRVQAKIGNWMHKRRPDVPQAINDIAWKAQVRLSARYRKLVGSGKKSNVAITAVARELVGFLWDVARKTESETMSSAA

SEQ ID NO: 313916 - protein, 355 aa, unidentified
MDSVKYIGMDVHKESISIAVRNGAGKIVMECVIETKASMILQFIDGLRGDLQVTFEEGTWAAWLYDLLKPHVTKLVVCDPRKNASMREGNQSDKIDARRLAELLRLNHLNPVYHGEHGLRSLKELVRSYLTLTKDLGRVMSRVKAIYRSWGIACTGKQVYAPRHRIEWLGKISEAGVRRRAEFYYQQLDALRTVRQQVRRDLLAEGKKHKAWKLLCQIPSIGPIRAAVLLGILQTPHRFRTKRQLWTYSGLGIETQSSADHRRVDGQLQRVKKPSSIRGLNRNCNHDLKNLFKGAAIVAASKPGPFQEFYTALLTKGIRPEMARLTLARKIATIVLIVWKRGASFDAQHLKPQTA

SEQ ID NO: 313917 - protein, 348 aa, unidentified
MNTLHYIGFDVHKKTISFCVKTAAGEIVEEGSLPAQRAGLRQWASARSQPWQGAMEATLFSGWIYDTLKPYGEQLEMAHPAKMKAISAGKKKSDTLDARTIADLVRCNLLPACYVAAPRIRELRRLLRYRSLVVSEAVRMKNKMAGLLMETGALYVKEKLHRKKYFATLLEELEEVPPSVIDLLRLSRGALEMFESTQKRLVRELLADPELTQRVERLMTIPAVGEITALTWALEVGDPQRFHSSSDAMSYCGLTAALKSSAGKQQRGPISKQRNRWLQTTLIEAAKLAPRWNPQLAALQARELERGHRNRATLAVARKLVAYLLAVDKSGQPFQMRAAAEAPTQKAA

SEQ ID NO: 313918 - protein, 403 aa, unidentified
MNKQTEHVIIGVDPHKLSATIEVVDQHEKMLGTGRFTTDRAGYSAMRKYVSAWPDRVWAVEGSNGAGRPLAQRLLEDGEQVVDVPAKLAARVRLFDTGHNRKTDAHDAHAVAAVAVRTTTLRVLQLDGELEALRMLTDRREALTRRRVQTVDRLQALLAELLPGQAKRDITTGQAKAMLASVRPRDIAGKTRRRIAAEELAELVAVEAKIKKSTAELKTIVLARGSHLMDLHGVGPVVAARVLADVGDVSRFADRNRFASWTGTAPLDASSGEQNRHRLSRAGNRRMNHMIHIAAISQIRLDTDGQVYYRRKRAEGKKSLEAIRCLKRRISDAIYRQLLYDAQQSAGDDAGAGPGGHCGATQESSAADLIPRIDTSDKPLPGPAKPTLRRPASARKTLTPTAP

SEQ ID NO: 313919 - protein, 380 aa, unidentified
MPEAVIGLDVGKLSHWACVATRDGEILLSAPVANREGDLDSLFGRFPDALVVVDQSRNIGALALARARAAGMSAAYLPGLAAHGAARLFAGDAKTDERDAMVIAKTALGIPDALLPVGDPGPTVAAARALAAQRNFLTCENTRNKNRLRSILLESCPAFEALVDLSDGPQLRLMASLGGAWSVADAGPRRAAALTRGAARGKIEALVRSTASSTRPDAAAIAAEDRAVRLLARRISENSAEIDVITAEISALLEGDDTYRCLLTVPGIGPKTASELAISIDIEDFPSHDRLASYCGLAPRNRQSGTSISSVTASRQGNKRLKNLLIFSCNCLTRTEGRWGDYYARCRERGMPHGKALKALARKRLKVIYAIMRDRVPYAA

SEQ ID NO: 313920 - protein, 338 aa, unidentified
MELYAAIDLHSNNSVLVVTDAEDHVIFAKRLRNDLEMLVTALRSCPGDIRAVVVESTYNWYWLVDGLRSAGFDVRLANTAAVKQYDGLKHGDDFSDAKHLAQLLRLGILPEGYICPPELRALRDLMRKRAQLVRQRTTQILSIHNLLARNLAKSVKGDAIKRLEDREIDALALLEDQKHALRANVAVMRCLEEQIRLLERAILAKGKLRQEFHGLKTVSGIGDVLALTIALETGDVHRFASAGKFASYARMVDSRRESNGKSKGVGNRKCGNKHLSWAFIEAAHCAVRYDPSVRRFYQRKCAKGLSVVAIKAVAHKLARACYHIMREGVPYDGTRAFA

SEQ ID NO: 313921 - protein, 338 aa, unidentified
MNVTTLGIDIAKQVFQLHGINEKGKVILRKQVSRKKLSEVIVNLPPCVIGIEACGGANYWARVFEKMGHTVRLISPQFVKPYVKSNKNDSNDAEAICEALTRPNMRFVPIKRVDQQDIQSLHRMRDLIIKDRTALVNQIRGLLAEYGIVIPQGVASVRRRLPAILADTDNELTGMSRELFYELYQQLLAFDQRIAGYDQRIKRVFEAHPICQKIGKIEGIGPMTATAVVASVGDAKMFKNGRQMSAWMGLVPRQRSSGGKNVLLGISKRGDRHLRTLFIHGGRSVVKLASNKKDPRSQWIRNIKNRRGANVAAVALANKNARIVWALMTSEEAYRKAD

SEQ ID NO: 313922 - protein, 408 aa, unidentified
MSALTATPTRFVGLDLHKHYLIALAVDAEGEQTGGPWRVTLDHLDAWAHQHLTRLDAVAVEITTNTYTVYDALVPLVHSVTVVHPPHLALITRVPVKTDNRAALVLAQFLAKGMLPALWIPPQAVREQRATVAQRAKFTRLSTQAKNRLHSVLHRHHLPLPEEGSPFSPGNRAWWQQLPVSASEQARLQADLATLDFADQQIDRLTRALASDGAQDERVPLLIQLPGFSVVTALTTLAAIGDIGRFEDAKHLVGYSGLGAGVHASGQLYRTGRITKAGRRDLRAALVEAAQVAANADPHWQAELARLEPRLGRNKAIVAIARKLLVAVWHVLTEHRADRFAEPARVARKLLNYTYTLGRSHRRPGQSGAAYVREQLDRLQLGADLESIAHGKRSVPLPPSQQTPAATA

SEQ ID NO: 313923 - protein, 430 aa, unidentified
MEIVYPRSCGVDVHKSFIVAVICISESVKPKYIKKRFSTFNNQLIQFRDWLIENNCQNVCMESTGKYYIPVYNALEGHISNVVVANPKWVKAIKGEKDDNKDAKWIADLFKFGIVRSSYIPKKDIRILREFTRYQYKLVNMRSSEKNRFQNALTTGNCKLDIVFSDIFGKSASAIVDTILSNNPYTSEDILSKVHAGCKASHEDILSAVEGIQLNQFQKARIRIVQKHMEYLDSLLDEIQHHIDLMVANYEEYIQLLCTIPGINRKSAITIISEIGTDMSQWSSHRKLAAWAGLAPGCNESAGKKKSVKISKAGVYLKPCLVQVAHAAVKDKNCDYYADKFNKISKRRGKKRAIIAIARKILIAVYHLLKTGEVFNPTDMADVETTKKQRIEYVKNNLRNAFNQLSRTGLSEAEILQLIRKESTNSPQIE

SEQ ID NO: 313924 - protein, 404 aa, unidentified
MKRVYVGIDWADDHHDVNITDNTGVTLDSFRIPHSYGGVEKLKDRLLKFSSSPDNILVAIESHHSLLIYALLEAGYVIYPINPKTMDRYRDRYRMSSSKSDSQDAMVLANILRTDLHLYKPLPKETPADTRLRELTRAHQSLGQQKVQLVNQLTAQLKSYYPAALHLFSDLDQEVTLAFLEHYPTPTKAKAASLNELQRFFREQGYSCLRKVPFIYKSLQQPALMVPNEMEDIHQVIVLSLITVLRSLLNEVERLAKEVAKEFRQNPANTIFSSLPAGQLTAARLNAELGSDGMRYPSREYLQTAAGTAPVTRRSGKSKVVLFRWQCNKHLRYAFQSLARGSVAKCSWAKDYFMRQIELGHKPSRAYRALANRWAAIVWKMLQERQCFDQARLEKRSIITLQAI

SEQ ID NO: 313925 - protein, 343 aa, unidentified
MTEVSTIGLDLAKNVFQVHGVDVAGETVIRRQLRRRQVLPFFRKQPPCLVGIEACATSHYWAREIGALGHEVRIMPAAYVKPYVKRNKNDAADAEAICEAVTRPTMRFVAVKTAEQQSVLMVHRTRELLVRQRTMLVNAIRAHMAEFGVVARVGLPQVKELLTVIADPGDDRIPPLARTCLEGLARQLLSLEREISAAEQRIHAWHRANQASQRLATIPGIGPITASALAASISDPSVFRSGRELAAWIGLVPRQTSTGGKQRLGRISKAGDHYLRWLLVTGAMTVIRHGRRTNFAKRPWLGDLVARKPTKLAAVALANKNARTAWALLANGGTYRQPEITVA

SEQ ID NO: 313926 - protein, 409 aa, unidentified
MRRVIGMDIHRTFAEVVFWEDGKLRPGGRISMTRAGLEGFGRSVGKEDEVVIEATGNAMAVVRALSPYVARVIVANPLQVKAIAHAHVKTDKIDAGVLASLRAADFLPEIWLPDADTERLRRLVARRNQVVRHRTQIKNEVHAILHAHLVPPGPHADLFGRLGRNWLAGQVMPDDECGAIERHLRELDRLGEDLGILDRDIAQTAVDDPAVKRLLTITGVNLIVAAGLVAAIGDVRRFPEPQKLVSYVGLNPRVRQSGLGLAQHGRISKRGRSHARAMLVEAAWAASKAPGPLRAFFLRIRARRGHQVAAVAVARKLAVLCWHLLIKGADYQWARPALVANKLRAMELKAGQLARKGSKPGPAHAYIKALRDREIDLARHAEQAYERFVSQWQPRRAKRRTGAANEERH

SEQ ID NO: 313927 - protein, 467 aa, unidentified
MVVPNEEPKKPAKPRKPAKPKKPTEPSKSRERSRPVPVPASPAALNVINPDAAGIDVHSNMHMVCVPADRDANPVRQFGANTADLHEIVAWLKKCRIKTVALESTGVYWIPLFELLESEGFEVHLVEPGQLSRCGARPKTDVLDAQWVQRLHSYGLLRSSFRPPDSVLALRAYWRQRQMQVRYAAHHVQHMQKAMEQMNVKLTEVVSDITGLTGMLIIGAILEGERDPNELAQLRHPQCHHSEEQIALALQGTWRPEHLFELRQAHELYQFHHRQITECDQEIEAELAKFPNRAGEKTHTVKPRKSGRKSNDVRFEAAGPLFRALGVDLTLIEGIDVATALVILGEIGVDVSRFPTEKHFASWLRLCPPQNESNNTNRRRGHRKATSRVTIALRMAARSVGQSMSPLGVFYRRIRSRIGGLGAVKATAHKLACLIYRMLKYGQEYVTQSIEEYEAKVKGNLLYFAGG

SEQ ID NO: 313928 - protein, 377 aa, unidentified
MKNVRFVGLDVHAETIAVAVAEKTGEVRSLGVIPNRAESVSRLIRKLGKPEQLRVCYEAGPTGYPLYWQLTQLGVKCEVVAPTLVPVKAGDRVKTDRRDAERLARCYRAGDLTPVWVPDAAHEALRDLVRAREAAKTDQLRARHRLSKFLLRHGRRASEGVQAWTGKYWDWVKSRVHFEQPAQTATFIDYVHEVEHAAARIQRLEQAIDTAVETVPPKMRAVIEALQALRGVAQVSAVTIVAELGQISRFARARQLMGYSGAVSREHSSGARIRRGAISKAGNAHLRRIVIEAAWSYRHRPGIGKALAARQRGQSEAVKEIAWKAQHRLFHRYRKLMAVGKSKQQVVTAIGRELLGFIWAIGVQAEQAPQPRLAAAA

SEQ ID NO: 313929 - protein, 350 aa, unidentified
MDKELYIGVDVSKQTLDLAYYDGESIDWKKAHIKVSNNNAGFKKIGSWVAKVSKGFDIVLFCMEYTGLYTQDFRLWLEEKHYIYRMVEPRKMHRFEPDLDDGLRSLDRIKTDELDSFRIAIYCEQNHRKILRNPSKLPPPVYFKLKRLLAERKQTVKQSVLYKQQLHDICAYDTDLSVERKNGQLKTLNDALKGIDNEIDMYIKEDADISKNFSLLTSIPGIGRVVALETIVLTENFMAIDNPRKYACYIGVAPFKKESGTSVRKGSSVSKKGFKQAKADLSIACLVCMQHIPNIRDYWERKRKEKCSGIVFNAIKFKMILRMFAVIKRGTPYVETDNYRNGKNKQPEVN

SEQ ID NO: 313930 - protein, 344 aa, unidentified
MYFIGVDHHKQVSVMTVLDDDGRELRTERILNRRSHVQEFLEAYRPFTAVLEAGRASYVMADLLRELGGEVKMANPLQVRAIAHARIKTDKRDSRTLAQLLRADLIPEVYQRGEWNRRAQRVMRMRAYWVGKQTEVRNKIRALLAQQREEIRLEVEKRDAGLFRPGGLEFLRQLALEGPDQMMLVDLIQGHGEIQAHIKVTDALVKALYNELEEAARIDTIPGFARTLSVLVAVEIADIRCFPRPADLHSYAGVIPSTHSSGGRTFHGHITKQGSVWLRWAILEAVYPAIKKDLVLRALYKRLARRKGPNVAKIAVARRLLTIVYRVLSQKRDYIPGFMKQSAA

SEQ ID NO: 313931 - protein, 393 aa, unidentified
MSQIDDLSRSLVALEQNSTVVVVVEMSLSTWLVGALVPGIARQPLKKMDPDPNELLSQLERWRGEAVKSGHPIKRIVLAYEAGRDGFWLARWLKTHGIETYVIHSTSVAVSREHKRAKTDRLDVAMLMRVFLGWLRGERGHCGMVAIPSLEEEDAKRPSRERENLVKERTRSINRMKGAFIRLGIRGFKPELRKAPQRLDTLRTPEGTPIPDNILGEIRRDMDRLAVIRDQIDCIESERLKRMKQAAAEPEGPHAMVLLIGRVHGLGIETADMLVQEVISRNLRDRRAVARYAGITGSPDESGAKRREKGLAKSGNARVRRGLIQLAWRFLIFQKDSALSKWFRQRTEGADGKRKTTMIIALARKLLIAMWRFAKTGEVTEGVILRPAKKILL

SEQ ID NO: 313932 - protein, 393 aa, unidentified
MICVGIDVAKDKHDCFILSSEGEALADVFTIQNNAEGFDRLLQTIRRCTRPEDKIKVGLEATGHYSYNILGFLLDEGLPTYVINPLHTNLYRKSLSLRKTKTDRVDARTIAAMLMSDVDLKSYTDTAYHNEELKSLTRYRFDKVLERAKLKQSVSRLVTILFPELEKLVPTLHMASVYALLSEFPGARQVAEAHLTHLKAVLYDASKGRYGRDMATTLRDAARCSVGSVMPAKSLELQHTIRLIRELDAEIEDIETAIQSMMDEIQSPITTIPGIGVRMGAMILAEIGDFTRFDSPDKILAYAGMSPSTYQSGQLSLSGAYSHMEKRGSRYLRYALYNATKYVCLWNPTFAAYLAKKRAEGKHYNVALSHAAKKLVRLIYAIEKSQKPYCSAA

SEQ ID NO: 313933 - protein, 503 aa, unidentified
MTAPTIRGQPASSRSTSGGQQAQAHRQAYQRRKARARARSDDLLKKEAARVEALPVLRPHACGIDIGSRSHWVCVGFATEADSCMTREFPAHTDGLNAIVAFLREHQVNTVAMESTGIYWVPLYELLAAEGFEVLLVDPSYSRQLRGRPKTDRRDCQWIYRLHSVGLLAAAFRPDGQTCQLRAYLRQRANVVRQASKHVQHMQKALEQMNLKLTEILSDITGVTGRSIIRAILRGTRAPEKLARHRDKQCKASEAQIAQALTGSYREEHLFELKLAHEAWQFCLRQVEKVDGQIALQLGRMKSDRALPPLRPKARPKRRVNSPRFDVRAALYHVVGLDLTEIEGVSELTALTLIGEVGPAGLSRFASVKKFCSWLGLCPNWKKTGGRVRSSRTRRGVNRAALALRLAAQGLHHSRGALGGFLRRMKGRLGGQAAVTATAHKLARIVYLALKHGMTYVRRSQEDYEAQMKEKQIKALLRKARQLGLEVVEKTPASGMTAAAVQG

SEQ ID NO: 313934 - protein, 347 aa, unidentified
MRFYTNPHPFYCGIDLHARSMYVCILSHDGEILLHRNMKAAPEAFLKAVAPYRDGLVVAVECIFTWYWLADLCADQGIPFILGHALYMKAIHGGKAKNDKIDSQKIAALLRGGMLPQAYVYPAEMRATRDLLRRRNHLMRKRAELLAHVQNTNSQYNLPEIGKKIAYQANREGVAERFDDAAVQKTIEVDLALITYYDELLKDLELYLLNTAKQHDAHTLYLLQTVPGIGKILSLVLLYEIHDIRRFPSVQNFASYARLVKCSKESGGKRLGTSGSKIGNAHLKWAFSEAATLFLRNNPEGQKLLTRLEKKHDKGKALSILAHKLGRAVYYMLKRQTAFDMALFLQS

SEQ ID NO: 313935 - protein, 403 aa, unidentified
MNAVGIDVAKGKSVVSILRPFGEVISSPFELCHTSSAIDDFIHSLSNLEGEVRIVLEYTGRYHEPIARWLSDADFYVSVVNPKLIKDFGNNSLRKVKSDKKDALKIARYALDNWNDLRQYCFMDKTRDQLKTMNRQFDFYMKHKTALKNNLIALLDQTFPGANTFFTSPVRKDGSQKWVDFVASFWHVDCVRKVSLSVFTERYRKFCVRKGYDFHPDKPAQIFEASKELIALLPKDKMTKNLIMPAIEQLNTLSRTIEQLRLQMDQTAAQLPEYPVVMAMKGVGPSLGPQIMAEIGDVRRFSRRGALTAFAGVDPGVNQSSTYNQKSVRTSKRGSAQLRKSLFQVMDVLVKTSPENDPVYAFLSKKRAEGKPYYVYMTAGANKFLRIYYGRVKEYLASLSEEE

SEQ ID NO: 313936 - protein, 468 aa, unidentified
MHTIPDNATRIKCFREVKATLRTSRERLVVGIDIAKAAHVAQVRLAHTRILEAKLPVLNTAVAFAAFWTRLQTHAAAAGVREIVCAVEPTGTYHEALARFLEAQGAHVVLVSNHVAQLNRRTLDGTWGKSDPKDAHNLCDLLEQGKALFYSLPGEPLADLRRLVRLLRRARVELTACKARFTVTLLPQFGPVGDGLAPAVAAAVPAPLRAFLPRPVRAGAGAAAPGAAVSSGLAFELTDLAARVTAVAARIAAVETELLRVAAPLPAFALLQTIPGIGPTVGAILLAEIGDIRWYTKFSQLRKLAGLDIVSIQTGQWRGRGRISKAGRALLRWALYQAALGACHNPAWRARREALLAKRQGDRHAFFKATVELGAKLLRLVWGVWRSGQPYDPARGPAAPLAPAHRKTRVGRRSALVAPPTRSPRGRRPAAAAPGPVSTPAPAPRQPRGRRRAGLVAAPTRSPQGRRP

SEQ ID NO: 313937 - protein, 370 aa, unidentified
MRTDFKTFVGLDVHKDSIAIAYADADFGQAPRFLGTTGYSVISLTKALATLGEPKELSLCHEAGPCGYGLVRSLRKRGYATEVIAPSRTPRRPADRIKTDRRDALLLARLHRSGDLTPIVIPDPKDEAVRDLVRTREDAMHDRQRARLRLRSFLLRQGHSYTGRRWGPAHQLFLSKIKFEDSAHHIAFTEYRLAVHFRTECVERLESALRAEVQSWRSLPVIKALMTLRAIDFLSATTIVAELGDLRRFPHPRELMGYLGLVPSEHPSGPTQHRGELTRTGNTHVRRILIEAAWNYRFAARIGESLQPRLEGQSKEIVTIAWKAQVRLCARFRRLRARGVHHNKVTAAIARELCGFIWDIGRRIAVSGAG

SEQ ID NO: 313938 - protein, 393 aa, unidentified
MVYVGIDVAKDKHDCFIANSDGEVLYDVFTIQNDMDGFEDLLFKIKTASKDLSKVKVGLEATGHYSCNILGFLKNKGLNTIVINPLYTSLSRKSVSLRKTKTDKVDARTIASIIMSDVSLKPYSDTVYHNEDLKSLSRYRFDKVSDRSKLKQSVSRLVNILFPELEKLVSTLHTKAVYELLSEFPGAHQVASANLKHLTALLSTASKGHFGREKANEIREAARRSISSYLPAKSLELRHTIKLIHELNAEIAEIETEIKKIMDSIDSPTLSVPGISYALGSVIVSEVGDFSRFDNPDKLLAFAGCSPSTYQSGQIYSAHAKMEKRGSKYLRWALLNAAKYVCKWEPTFAVYLRKKLAEGKHYNVAVSHAAKKLVRLLYHLETTSEKYIPQTLS

SEQ ID NO: 313939 - protein, 345 aa, unidentified
MPIVGGLDIHRKQITFDYLDTVTGEVKRGQIAPADRAHVRAWLARFAGHDDVAFAVEGCAGWRYVTEELAAAGIAAHLGEPADTAALRGRKRHAKTDKTDARHLRVLLAEGRLPGCWIPPAQILEYRALLETYHDLRAAHTAWVQRIHAVFFHQGAPPLSEGALRTEQGLAKLRAAAAAHLSPAGQLQVAGALDMIAATEAQLGPLRHQLRDAARHLTGARVLTARLYGVGPVTALALTCWLAGADRFSSSRKAVRFTGLDITVWSSDRKGPPGRLSRQGPPVLRWAVYEAGKTHARTSAPDHGYYATVKDRKNSKRAALSEARKIVRQACHILTELGDDALTAA

SEQ ID NO: 313940 - protein, 333 aa, unidentified
MPLFVGLDVSLRTTSICVVEADGSVVWEGKAESEPVPLLKALSRWRKKIRLVGIEACPLAEWLYGALIESGLATVCIEVRHAHRFLSTRPNKTDRNDAHGIADMMRLGHYRAVHVKSKPSLRLRTTLIARKKFVDHMLAIELTIRGLKVHGLKVSAVHRRTFAARIDTLLTDAPELKIAIEPLLEARNLMRKQKAIIDRRLSQMARQDDVCRRLMTIPGVGPIVSLCYKATIDDPSRFRTSKAVAAHLGLTPRVLSVWRDRSVGSHQQMRRQAAATRVVRGSRLASSHRQEVVEPESLGHEARQKGWHQKGARRRGAQIGDHHAQNVGEWRSV

SEQ ID NO: 313941 - protein, 315 aa, unidentified
MAFLHQQPLNCLGFDIAKDTITVSDGLSKSAHAIRNTHGDIRAFLKRAGPDFIVCEPTGGYELALLGEAMRAGIACHRVDIARFKGFVRSLGTRGKTDALDAAMLALYGRERWSALPLWQKPDAHEQKLKLLVRRRHELMAIKNAEQNRAKAPAHKPLAASFKAIIAVIQRQIEAIEHAIAAVIRQSSSLARRAAIITGMNGIGPITAAALLALLPELGTMSRRQAAALAGVAPHPADSGTKHGYRKMHGGRPEIRTVLFMPALRAAAGRGEFADHYKRLVANGKKPIVAIAAVMRKIVVTLKARLRDHAPIPQS

SEQ ID NO: 313942 - protein, 343 aa, unidentified
MKHYAGLDVSVEETSVCILDETGRICREVKVTSHPEDLLRILQDPIWHFERIGLEAGQLSQWLFDALADAGLPVVCIETRHAKAFLKAQVNKSDRNDARGIAQMMRVNLFRPVHVKTLTSQKRRVLLTARKLLQEKAIAIENDIRGLLLNFGLKVGVVGAAKFEERIHELIRDMPDLAEIVERLLDARRRLREHFAALHRKLLALARGDAVCRRLMTIPGVGPVVSLAFVATIDTPARFRKSKAVGPVLGLTPVRSQSGNTDRVGRISLCGDGMMRTLLFEAAQTMLRQTTRWSWLKAWAMRVAQRRGSRKAVVALARRLAVIMHRMWCDGTEFRWTREAPVA

SEQ ID NO: 313943 - protein, 466 aa, unidentified
MSKLSRTQRGGVPISDPHPWEGLTRIQPQAAGLDIGAHEIMACAPGPNDTQDVRAFGTYTADLHALVAWLLERHVQTVAMESTGVYWIPVFETLEAHGLRGCLIRATAIHRIPGRKSDVLDCQWIQTLHTYGLLADSFRPDADLIALRTLLRHRAQLIEHRSPHILHMQKALTQMNIQLAQALSDVTGQTGQAIIRAIVAGERDPHRLAALRNYRCQKDAHEIALALTGTWRAEHVFVLTQSLECFDFYTRQLNACDAEIERLYTSLRPAWGMPEPPLPPQKPHSHNKNTRPDTPLRNQLRRLTGVDLVAVPGLSVSLAQTIVAEVGTTLDQFPDAKHFCSWLGLAPHNDISGGKVLKSRTLKNHNRAGQAFRQAAAALMRAKCHFGAYYRRKKSQIGPAQAAVATAHKIARTVYHMLKFKVEYRAMSADEYDQQFEARELKRLQHKAAHFGLSLVPLTAAKVAVS

SEQ ID NO: 313944 - protein, 408 aa, unidentified
MERLIERVCGLDVHKQTVAACVRVPGSKGTREHVQTFGTTAAELLALRDWLEAHEVTHVAMESTGVYWKPIYYVLEERFTCLLVNAAHVKQVPGRKTDVQDCMWIAQLLEHGLLRGSFVPPAPIRELRDLTRYRKVLIQDRTREANRLHKLLEDAGIKLASVATDILGVSGRAMLEALVRGTTDPEVLAELARGKLRAKLPALRQALRGRFRPHHAFLVSQLLAHLDYVDETITTLSERIEEVISPFADELARLDTIHGVARRTAEVLIAELGVDMSQFPSDRHLASWAGLCPGNNESAGKHKSGKTRRGNRWLRAALTEAALAAIRTSNSAFTARYRRIMRHRGHKKAVLAVAHAMLVTAYHVLARQTTYQELGADYFDRRHGERVTRRAVQLLERQGYRVTLERAA

SEQ ID NO: 313945 - protein, 408 aa, unidentified
MAVSELPIILNRGCGLDVHKDNVVASIKGKDIKSETKTFLTFTEDLYELVAWLQNHGISEVAMESTGVYWKPVYHILEEFFNIILVNARHIKNVPGQKTDKKDSEWIAKLLLSGLLKGSFIPPQDIRELRALNRHRRKLIHKRTAEKNRLQNVLEDANIKLGSVISDIFSVSGTAMVNALVNGQNNPEVLANLSKGSLVKKKDLLIKALNGKVTDHHRFMLKLILDSIKHIDNQIAQLEAEMEKIKLKYTQQIDLLKTIPGVSTHVATGIIAEIGTDMSEFPTHKHLASWAGVCPGNNESAGKKYSSKITHGNKYLKTTLVEAAWVASRSKANPIFADKHRRIAARRGSKKASIAIGHKILTAAYHILRDMEPYQPSTQDIAILEKRRMKKIQRLENQLSKLKNTSFN

SEQ ID NO: 313946 - protein, 438 aa, unidentified
MSTYAGVDWASEKHDVLIADETGEKVLAATFAHDEAGVRGLCRALVRHEVTLVAIERPDGLLVERLLDAGLRILALHPNQVAAARDRFRASGGKSDRFDAFVLCELARTDHHRFRVLEPDSDQTKALRALTRAREDLVGTRTALVNQLRAELARFWPGPLGLFTSLHSQISLAFLERYPSPTDARGLGAARLHGFLVRQHYTGRQTPAQLMAKLRRAPEARVGELELGTRRQLVLTLVTTIKTLNEQIKQLERQIATAIREHPDGAIFLSLFRKPNSVITAAELLAEIGDCRARYPTRDTLAADAGHAAVAIESGKRRAACFRWACNKRLRQAFVTLADTSRHHNPWAHDLYAAAIGRGHDHPRAIRTLGRGWCRIVWRCWQDRTPYDPARHRALQRHITVTIPTSSGPMPDLAANPADARRRRHPKGGPQGPSAKRL

SEQ ID NO: 313947 - protein, 419 aa, unidentified
MSQSNIDKPSMQDPAGTLHAGVDLALEKNVVVVVNERAERLDHFSFPQDRGGYDYFLRRLEGLRQKHQAAKVVVAMEPTNFFWKLLARELEEKQLSYRLVNAYTVKKHREGDQLDRSKDDLRDAGQIAELSRNGKTTQTQLQKGAYEDLRQYATLYHQLMQSIRREKTILWGLVGQVFPEMVLAFKDIEGETYQALLMTCPAAATIRQKPIEVFLAQVRAAYSGKRLCVSKLEYVYQLATRSIGITEGIQAFQLAIQVHLTQLQVFETQLEQVTGAMTERLFSLPEAPYLLSCPCLKSTSAALFLAEVGDPQRYQKAAQWVKLAGIQPTLKASGKKQRSRTPMSHQGRPRLRTLLYFSCLRMVRYDTRFAQLYAYLQRRKDNPLTKMQALGVLMNKLLHIWWALIQNQTFYNPSFGQSV

SEQ ID NO: 313948 - protein, 357 aa, unidentified
MRFYTKQHQFYCGIDLHARTMYVCILAHHGAILLHRNMPARPETFLKAIAPYRDDMVVAVECIFTWYWLADLCAREGIPFVLGHALYMKAIHGGKAKNDKIDSHKIAVLLRGGMLPQAYVYPAAMRATRDLLRRRMHLRRKRAELLAHIQNTNSQYNLPEIGKKLAYKGNRDGVAERFLDPAVQKSVEVDLALIDHYDRLLREVELTIVQTAKQHNAQALYRLQSVPGIGKILSLVLLYEIHDITRFPRVQDFVSYCRLVKCAKESAGKRYGTSGKKIGNAYLKWAFSEAAVLFLRNNPQGQKWLARLEKKHGQGKALTILAHKLARAVYYMLTRDTVFEMDRFLNGYGSRVGEPAA

SEQ ID NO: 313949 - protein, 356 aa, unidentified
MVDKVTEAAVVGGVDTHKDLHVAAVVDQNNKVLGTQYFSTTRQGYRQMLAWMTSFGTLKRIGVECTGTYGSGLLRYFQNAGLEVLEVTAPDRMERRKRGKSDTIDAECAAHAAFSGIRTVTPKTRDGMIESLRVLKTCRKTAISARRVALQIIHSNIISAPDELREQLRNMTRMQLIRTLGSWRPDASEYRNVTNVYRISLKSLARRYLELHDEIADLDVMIAAIVDELAPELIKRNAIGYESASQLLITAGDNPQRLRSESGFAALCGVSPVPVSSGKTNRYRLNRGGDRAANSALHIIAIGRLRTDAKTKEYVARRVAEGHTKMEAIRCLKRKRKLTAVCSHQTRIGNLDAHLI

SEQ ID NO: 313950 - protein, 534 aa, unidentified
MRRRRRGGSKRGALKPQRASYPLQERMLRVGPGKFGILAVDSSKVHFAVMLTNFAGVELMVDLAVENTAPALEALVAKVQAACAEHGIVDLVVAIERTGRYHVPIRNVLRKHWEVRMVHPLATKRLREPADPGNKTDLTDLRAIVRAVVAGYGALEKDLPERWADWREVNRERESLVRKRALFRVQIQERLEGMLPGFSGLFADLWSSPAAPDLAAHFGSAEALRQAGETGLLDWLRASGRPMRRDTLCRILVWAATASAPDHGPELRRRMLANQLALLRATQAQIVAYERDLAGYLAETPFVLLLSCPAVGVVSAAGYGAELGPIEHYAHPANIRGRAGLYPSRYQSDATDLADGPIVRQSNARLRDALIEIAHNLLTHSPYFKAWAQVRKAKGWPSAKLHVAVANKFTRISYAIVAGRTLFEHPALGGPDAILRKLYDFARGHGLTAEATAGLLAAAAPWMPDTAARQEAAALRNDLAPRARHRSAGPDEGSPEHWAKVLGELFERIAAGLPLPDERNRTRPIANVRGRTPD

SEQ ID NO: 313951 - protein, 453 aa, unidentified
MVQCNRAVSLKPGKSRAALTITHPNAAGIDIGSAAHFVAVPPDRDDEPVREFPSFTVDLNAIADWLVACRVDMVAMESTGVYWIPLFELLQARGFTVLLVNARHVKNVSGRKSDVLDCQWLQQLMTYGLLSGAFRPAEQVCVLRSLWRQRGMLLRSQGRYVQHMQKALTQMNVQLANVIADVVGETGQKILRAIVAGERDGQVLGAMKNVRVKASIEEIAKSLQGNWRAEHLFALKQALDAFDFIGTQLAECDTQIEQQLQTLQVHEGEPAKGKKRGRARNAPKFDLRTQLFKMCGVDLTRIDGIDVTTALAVISETGADMSRFPSDKHFASWLGLCPGTKITGGKVMSGKTKRCANRAAQALRLAAAALRTSQSALGAYFRRLCARMDKPKAVAAAAHKLARLIYTMLTKGEEYTDQGQAYYEERYRERVLRHLSQRANKLGMQLVAVAQPA

SEQ ID NO: 313952 - protein, 458 aa, unidentified
MSNSNARTEATAREDLAHLNPNAAGLDIGAEEIWACVPPGRDPQPVRAFGTFTPDLQALAEWLAQCGVKTVAMESTGVYWIPIYEVLEARGFEVYLVNAHHLKNVPGRKSDVQDCQWLQRLHSYGLLNASFRPAEDMRGLRAYSRQRGMLLEHRAAHIQHMQKALQQMNVQLAQVVSDITGRTGLQIIRAIVAGEHDPQVLAQLRHGRCHASAAEIAKALTGHYRPEHVFALKQALALYDCYTQQVQECDATIELHYAAIKPIYDDTTPPPPLGPDPKPNSHAKNAPAFDVRACLYRILGIDLTATAGLDDSTAQTLVSEIGTDMDKWPTEKHFASWLGLAPHNDISGGKVLRSKPLKVRNRAAQALRLAAQTLGRTDTALGASYRRLRARKGPKAAVTATAHRLARIVYHLLKHRESYQPLSREAYEHQLRQRELARLKRHAARLGFALLPQPASTA

SEQ ID NO: 313953 - protein, 316 aa, unidentified
MNETIVEKFVGIDVSKSTLDVCIEPAVLTLHVAYDEPGIKQIIERLIEINTTLIVMEATGGLEVRIATELASKGLPVAVINPRQARDFAKATGQLAKTDKVDAAVLAAFAKAIRPQARTLKDADTRALNDMVSRRRQLIDMRVQETLRLGTAASKPLEKSLNKHIAWLDKQIAEIDTDLTKRLRESDVWRTKDDLLRAIPGVGSVTTITMLAKCPELGKLNRREIAALIGVAPLANDSGKHSGKRFVWGGRADVRAVLYMATVSAIQHNDAIKAFAERLKKAGKPPKVVIVACMRKLLTVMNAMLKNNTPWNPKTA

SEQ ID NO: 313954 - protein, 333 aa, unidentified
MKDVAAFCGIDIAKHLISVHLENEDRKVISQKNMRRDSVLTFFSNMPPCLIGIESCGGSQHWARELRKFGHDVRLMNAKYIIPYRRKGKNDLNDAEAICEAVSRPSMKFVAVKTEQQQSILMVHRLRQQCISHRTSLSNQVHAYLLEFGISLPKGAKAIHKNLSAIFENCELNPLVVEMLHELLAAIAREEEREAYFNKRIADWVKHDERAKALLKLDGIGPLSASAIVATAGDPSFFENGRQFAAWLGLVPRQYSSGGKSKLGGITKAGDRYLRTLLIHGARSVLLMASRGKGQQREWVNQLRTRRPENVVAVAMAAKQARMTWAIMAGKVV

SEQ ID NO: 313955 - protein, 357 aa, unidentified
MKPLKLSLQAFGPFAAREEVETRRVRRARIAHAPGCIRHYLRDAERGTTVAVEATGNWYWIVDEIEAAGCRPALVHPRKAKVMLGCINKTDKLDADGMNRLQRVGTLPTVWIAPASVRDLRELPRTRMFLCRQRAALKNRIQANASKHGLGPCGYSDPLGKVARRQLREWLPRLPGQTAQVTGELLDELDGLDGRIAEQERRLGRLVAQTPEMVLLQSLPGIGPILSTVIALEIGEVRRFPSAEHLASYSGTTPRVHSSGDRIRFGRLRPDVNRYLKWAFIEAANCTCIHRRRHPQRHVSILYGRIAARKGHAKAIGAVARHLAEAAYHVLSKNQNYKDPANRPQACDQGGVSATTA

SEQ ID NO: 313956 - protein, 391 aa, unidentified
MIIVGIDIAKNSHEATIIDSLGNIVCKSFKFPNSHKGSSTLITNIAKANTSNEPVIIGMEATGHYWLPLYSRLLSEGFEVKVINPIQSDSFRNLYIRQTKNDSKDSFIIAEVIRFGRFSSTCLAEEDILSLRNLSRFRLFQVDMVSDLKRKVISLLDQVFPEYAKLFSDTFGKSSLEILKEYSTPEEFLNVDTDYLAQTLAIASKGRLGLSKAEQIQDAAANSFGIKLALDTFSFQINQLIEQIKFIEEHIVQLEEQISILLKKLDTPIETIPGIGPVLGAIILSEIGDITRFKDASKLVAFAGIDPTVKQSGEFMGTKNKMSKRGSPYLRRAIWLAANVASFNDPVLSAYYNKKRQEGKHHFTAIGAVSRKLLYIIHAVLRSNKPYTPIA

SEQ ID NO: 313957 - protein, 483 aa, unidentified
MKSKPWEKTDKTTNHPTQRHWHEMNRKQRREMTRQIQSEDVSLEVVHPDAAGIDIGNEIHYVAVPPSRDSQPVQRFGCTTAELKTMANWLKQCRIRTVAMQSTGVYWIAVYDILEHAGLEVYLVNARDTKNLPGRKSDVQESQWLMKLHTYGLLRNSFRPPQEIRTMRTYWRQRNDLVQSAGRHIQRMQKALTQMNVQLANVLSDVSGVTGQAIIKAILAGERDPHKLAAFRDPRVKASEEQIAQSLEGNWQPGLLFLLQQEQDGYEFCQKQMVECDRQLEQYIQQRDDRSHGAPLPEEKRKGRLKKKKGNAPQFDLREGLFRLSGTDLTQIDSIDVMTASTILSEAGWDMSKWQTENHFVSWLRLCPDNRISSEKIIGKGRLPTNNRATIALKMATSTLRQSNTYLGAQFRRLRTKLGAPCAIKAMAAKLARLVYRMLRYGMKYVDQGAAFYDLRHRELQVKRLKAKAEKLGYRMTPIPAAA

SEQ ID NO: 313958 - protein, 318 aa, unidentified
MISIGIDVHKKKCVATLKRNSKRIVEQTSFCNNNYGINEFIQHIKGCYKEDAIAVCESTGNYWIRLHDTLEDNGINTLLANSLKTKIIAQAKLKDDKIDSNVLADLLRADLVYESFVPDKEYRELRQLVRTRLDLVTERTVLKNKVHALLAKYEYQCPVSHIFSNKGTEWLKTIDLSWIDRMAVDAYLDALVAIQKQIGIFTAKIAFVSKEDQRVKLLMTIPGIDYFTALTIVSEIVDIKRFSTPWKLVGYEGLAPSKRDSGDGHRYGGHITRQGSKWLRYTIVEAANTSTRYDDRIGRFYKRIAERRGPQKARVAAA

SEQ ID NO: 313959 - protein, 347 aa, unidentified
MNFYNNMHPYYCGIDLHARLLYVCIIDNTGLILVHKKIKDDPHALLNLIKPYIGDIVVGVECMHCWYWVADFCKQHAIDFILGHALYMKAIHGGKAKSDKIDSYKIAKLIRGGNFPLAYVYDKEMRATRDLLRRRTKIVRHGADLKAHVANTASQYNLPAHNVNLKNVCDREKMRYYFPDPVVQRSINLDMAILDCYHKELKPLEHYIEQMAKQHNPVHLNILQTINGIGRILALTIIYEIGDINRFSSVQKFASYSRLVKCKAESAGKIYGSQGNKIGNAHLKWAFSEAAVLLLRHSDNANKYIEKLQKRMSKAKALSALAHKLGRCVYYMLKKETVFDEARFLKS

SEQ ID NO: 313960 - protein, 323 aa, unidentified
MNKDIKYFGIDISHLVFDVTDSCGSYYQFKNNASGFKKFSKHLDLDSHCVMEATGYYHYQLAYHLLESGIKVSVENPLSVKRYIQMKLSKIKTDKSDSRLICEYGQYTELKLWQGNTKVEMECLQITRALAIYTKQSTMLKNKLHGEAVLGEPSKAVVRSIKRSLKQVVNEMKTLEVKLLVLVKQVHQDLLTRLKTIPGIGPKTAIMLIVLTGGFDRFTSASELCSYAGLTPVIRQSGSSVKGRPRISKIGNQKLRNLLFMCSFNACKCNKACRDLYERIVAKGKSKKLALIAVCNKLLKQAFAIAKSGLIYDDAYRSTLVKN

SEQ ID NO: 313961 - protein, 315 aa, unidentified
MPTLENAKVSVGIDVSKNKLDIAVHESGDVWSSNNDSSGCTALAAQLKQLQATSIVLEATGGYETLVTAMLAATELPVIVVNPRQVRDFAKATGQLAKTDRLDCGVLAHFAAAINPPVRPVKSEETQQLEALLGRRRQLVEMLTAEKNRLANNRDRAVSKDLQAHIAWLERRLKSSNDELQRVLKNSPSWRERDQLLRSVPGVGPVLSLTLLAQLPELGQLNRREIAKLVGVAPFNWDSGQWRGTRHIWGGRATVRAPLFMATLCAIRINPTIKSFYRRLIAAGKAPKVAIVACMRKLLTILNVMLKTQTSWRTT

SEQ ID NO: 313962 - protein, 411 aa, unidentified
MVKENFIYVGIDLHKETHTAVMIDCYNQKLGEITFPNRPAAFPKLVTKVKKCNTDGKEVVYGLENAYGYGRALAVWLIDKGYLVKDVNTAISHRQAKHRGAMYRKSDSDDAKAIALATLNMLDKLPDACPNDAYWSLGQLVHRRDNIMKQRTRLVNQLHEQLCIAYPSYKQFFNDISRPTALYFWEHYPSRKYLKGKSVEDLRAELVPVSHNKCSTKTCEKILDAVASDKVKNNAYQDARDMVTLSIVSDLQHYDSQLTEVDKMLEQMYKMLGCTLTTIPGVNVITAVKILAEIGDIKRFSNANKLAQFAGIAPLHLSSSGKGKDVATKQGNRRLQATIYFLAIQMVQVSSKGTPRNPVVRAYYEKRKAEGKTSQQALICISRRLISIIYGMLKNGTEYRMPEVENAGENM

SEQ ID NO: 313963 - protein, 317 aa, unidentified
MNSTQIQTSVNIGVDVGKANLDIALHPSGQFYSIPNSEAHICRFVKILKNYDIERIVVEATGRHEHALVQACNQAGLPIIVVNPVSVRRYAQAIGVLAKTDRIDAQVIAKYAATLKPEFRPIPDKTSQKIRDLLARRAQLMEMSTMEKNRLQIMPKPLHRSIKSLLRMLQSQIETVTRQIEQEVAKVDHWRAKLEIMTSVPGVGKVLAYTFLSELPELGSLNRKEIAALVGVAPINRDSGKLNGKRRIRGGRHRVRTVMFMAMLSSIQCNPVFKRFYERLKAQGKIPKVAVVACMRKMIVVLNTMIKNQEPWRENMA

SEQ ID NO: 313964 - protein, 346 aa, unidentified
MKILALDLGKYKTVGCAYESESGAHQFKRGFTSPAGLTRMVQEVKPDRVVIEICSIAGWVCDRLWELGIEVQVANTSDDAWRWRKVKQKDDRRDALKAARLSAVNQIREVYIPALEVRQWRALITYRQQLIRRRTKIKNHIRDLLLREGQILARGSSCWSEVGIEPLAAQARSFSECGPAELWRGELQLELEQLREVQRQVVTVTAQLDKIGAGDTRVKLLRTVPGVGPRLAEAIVALLDQPQRFRKASQVSGYIGMVPKALDSGETERRGHITRQGSRVVRSLLVEVAWAGLRHNAWVRQTYQRLSGGKKARKKIAIVAVGRKLLVRCWAMLRDNRAWDWQPQIT

SEQ ID NO: 313965 - protein, 430 aa, unidentified
MGLIVPTTRHPEREDQPLPYEWFVGIDGGSQQHQVSVLDRDRRRVGERVVDHDGASLAQLADWLWTLSAGQPQRVAVAIEVPRGAIVEGLLERGFHLFALNPKQLDRFRDRHSVAGAKDDRRDAFVLADAVRTDQPSFRRLHLEEPQLIVLRELSRAEETLLEEFRRSANRLRDQLHRFYPQMLQLCSAADEPWLWDLIDLVPTPAHAALLSEEHVQRVLKAHRIRRVTGKDVLTCLQMQALPVAPGAAEAAQAHCQLLLPCLRVLAEQLQACSQQVSALLSTLAEEPGDGEGPSDVAIVLSLPGVGRKITAWLFAEAAQPLAERDYQMLRTHSGVAPVTKQSGKRRLVVMRRGCNPRLRHALYHMARVAMQRDAYFNSVYTTLRAKGQRHGQALRNIGDRLLRILVAMLRHRTCYDASRIRREPVVQMG

SEQ ID NO: 313966 - protein, 357 aa, unidentified
MVTLGVDAHKNSHTIVAVDGNGRALGQRTVSATPTGHLEALHWAAQWPERQWAVEDCRHLSRRLEVDLLRAGERMVRVPPRLMGAARRTGRTPGKSDPIDALAVARAALREPDLPCAQLDGPERDVRLLLDHREDLVAERTRMQNRVRWHLHELAPGEAPAARTLNRQHVLAALEQRLAEVPGTVARLARELLVRIRELTIAINRLEHEIEQLVRPLAPSLLALLGCGPLTAAKVVGETAGVRRFRSRAAFARHTGTAPVPVWSGNTQRFRLNRGGNRQLNTALHRIAVTQLQHHSAGRAYVDRRMTAGNTKTEAIRALRRRLSDEVYRRLMADAAPSPLSDQPCTSTAAPTPQPSS

SEQ ID NO: 313967 - protein, 353 aa, unidentified
MAIVAESFDFVIGVDTHAKTHTLAVVTPAGLVGDTGTFPTSSPGLGRATSWVSKHTGGPEGCSRVLVSMEGTGSYGARLAAVLTHAGYQVVEAITPTSRARGSRGKNDPIDAQLAARTVLPVDTRRLTTPRSGNLRAALRVLVVAREEMNGEATRAKHALLALLRITDLGVDARGHLTGGTLTTVAAWRVRDEDLATATARTEATRLAKRVLALDLELAGNKTTCQAIVAQMAPRILELPGVGPITAAITLLAFSHPGRIHSEAAFAALAGACPIPASSGNTVRHRLNRGGDRRLNRALHTIVLVRTVYDQTTREYVQRRTAQGHTRREIVRCLKRYVARQLYRTLNTPTAMA

SEQ ID NO: 313968 - protein, 419 aa, unidentified
MKIVHSICCGVDVHKNVIVATIAITDKSNITQYVAETFATLNADLVRFRTWLLDYQCFNVCMESTGKYWIPVFNILEEANISVLLTHPKYVRAIKGKKTDKKDSKWIADLFKFDMVRSSFIPPKDIRALRELGRYRFKLVCMRSSEKNRYQNCMTVSNIGLASVLSDPFGKSATEIMKYVLSSSVFDEDHCKTLIQKSAKKKTELILESIRGCSIESDQQFKMNEASAHMDYLDQAIFRIEAELYVRIQPYYYLVEHLSNQLPGITQLSAALIISEIGADMSVFESSKHLNSWAGLAPANNESAGKKKSVRISKAGQYLKPLLVQCALSAVKSKKETYFADKYSRLVKRRGHKKAIIAIARMMLTCIYHMVSTGEVFNPSDYEELRMPTARKQFITDETAIAYLAAQGYDVSKLSKVAV

SEQ ID NO: 313969 - protein, 449 aa, unidentified
MSKSGKANGLPIVNAKAAGIDIGSRIQVAAVPPELSDEPVRTFQSFTGDIERMANWLVSVGITTVAMESTGVYWIPVYEILEEHGLTVVLANARDCKAVPGRKSDVNDAQWLQRLHACGLLRASFQPAREIAALRTYMRLRDRHLEYAAAHMQHMQKALTLMNLQLHHVISDISGVTGLKIIRAIVAGEQDPNVLAAMRDVRCHESVQTIRAALVGNYQPEHVFALSQALMLFDAYQARIADCEKQIEGSLQLLNADRPKPQAPLTAPRTRTKQANAPKFDVRSMLYQLTGTDLTLIHGIGPSIALSLVAECGTDLSKWPTEKHFTSWLCLSPGCKISGGKVLSSHTRKSSSRLASQLRLAASNVGRTETALGGFYRRLAARIGKAKAVTATARKLAILFYRTMRFGMQYQDPGADQYEQRYRERVVKQLQRRAAHFGFSLQPTEVGVS

SEQ ID NO: 313970 - protein, 343 aa, unidentified
MENFAGADLHKKVTQLGLLRKGKPPSQYRFSNDPHTVEKVLGKLPSGTKIAVEATGNWWWFVEKVRELGHEVFLSHPKQTKAIASARLKSDKVDALMLARLLKADLLPMVWIPGEKERYVRELLSHRSRLVRSRTAVINELHAVYAKRNVELTGKVWLKVEPVPYRVKELSGYGPRIVKENVELLRFINEQIDGLDKELRKLAKEDPQANRLMTLIGVGPTTAVAVSCWVGDINRFANAKKLVSYFGIAPRVKQSADKERHGHISKEGSRMVRWLLIQAALSHTRVAKGPSRKHYLGVRNRQGKKIARVAAARKLLGVMFHIMKDEIDYEEFVRRGSSAQRAR

SEQ ID NO: 313971 - protein, 352 aa, unidentified
MEYYIGCDAHKKYSVFAGISEAGEIIPAQRVEHDRESYRSFLRSLPPASQIAVESVGNWYWMVDEMEKAGHVPALTHPAKAKLMMGQINKTDKLDARGLAVLSRNGTLPAVWIPPGELRDRRELPRMRMALSQVRTKFKNRIHSAFAKYGITFDEVSDLFSGKGRKLLEKSLDELPPETRLSVQEQLWLLDQIEQSVKKAEKRIGQVIKMDDTMQLLQTLPGVGPILAIVIALEIGSIDRFATAERLASYTGKVPRVNSSGGKTYYGKVRPDVNHYLKWAFTEAANAIVLQQNRWPDRHVVHLYQRVRKHKGHAKAVTAVGRHLAEATYWMLKNNEPYREPGGKRPVSHTQG

SEQ ID NO: 313972 - protein, 343 aa, unidentified
MNEISMIGLDLAKNVFQVHGVDASGKVVLQRRLGRKAVEKLFARLSPCTVGMEACGSAHHWARVIGRYGRDVKLMPPAYVKPYVKRNKNDGRDAEAICEAVSRPTMRFVAVKSVEQQAMLSVHTTRALLVKQRTMAANALRAQLSELGIVAAQGHEGLHELMARLEAPSEEIPEMMRNALLMLVEQWQALDVKERVLEKQIMKAVRCDQEARRLMAVPGVGPIIASAVLAKVPDARMFQSGRDFAAWAGLTGRDHGTGGKHRPGRISKQGDRTLRALLINGASAYLRQQRRRGVSDPWLRELLARRPYKVVMVAFAAKTARIIWAMLAKGEAYRDRTSASAAA

SEQ ID NO: 313973 - protein, 412 aa, unidentified
MTTTNQFAAHVGLDWADKKHDVCVQFKNGERVFHVIEHTAEALDVWLTELHQKVEGRIAIAVELKKDPMVYALQKYPFITIFPVHALSLASYRQAFSPSGAKDDPQDAELALELMLRYPQKIKAIEPDNADIRLLQQLVEQRRQLVEDKRRFVNRIINTLKQYYPQPLEWFSHRGSLLLCELIIRWPSLQQLKRARRDTIRNFLNAKGGRAMALTEQRVASIDNAIPLTTDPSVIEANALMATALATQIKVVSEIIKTYDERIETLFDTLPDAGLFKSLPGMGPCMGPRMLAALGDNRDRFSSAEEIQNYAGIAPVTERSGQKSWVHWRWQCAKLVRQTFVEWAAKTINSSYWARLYYQGQREKGKSHQSAIRALAFKWIRIIYRCWKTRTCYDEAKYLLALEARHSPLLRP

SEQ ID NO: 313974 - protein, 309 aa, unidentified
MDARYVGIDVSKDRLDVHVQPTGEAFAVARDGEGLASLVARLKPLAPHVVAVEATGGFEMTVAAAIAGAAIPLAVVNPAQVRHYAQALGRHAKTDRIDAEVIARFAAATRPEPRPLPDEATQLLADLVMRRRQIITMMVAERQRAARLPTRLRRSCERVVRLLEKELAALDQDIDAAVRGSPAWRAKEDLLASVTGIGDITARTLIAQLPELGTLDRRKIAALVGVAPFTRQSGQWQGKSFIAGGRPTVRAALFVATMAAVRHNPTIRIFRQRLLAKGKPKMVAMIACMRKLLTILNAILRDQKPWQPA

SEQ ID NO: 313975 - protein, 362 aa, unidentified
MAKSTTIIAFDQHAATTVAAVLLPGHRTPALHTLASDSPTILRFVERLHRQGPIVCCYEAGPCGFELQRALSARDITCEIIAPALIPRRAGDRIKTDRRDAGHLAVLYRAGALTAIHIPTEQEEAARDLLRCREDIRADLLRCRHRLSKFLLRHGRRFTATKKAWSKRHDAWLRAQTWPIAALEQTHRAYLRAVEETLARLRAVEEDLRTLLDLEPLRPRVQRLRCFRGIDDLTALTIAAELGDARRFPSAPSTMAFVGLVPSEHSSGTKQARGAITKTGNAHLRRVLVESAWHYRHHPFVSAALRQRQRGAPAAVIAQAWTAQHRLHRRYQRFAARGKPKQHIVTAVARELTGFVWAALTQ

SEQ ID NO: 313976 - protein, 428 aa, unidentified
MNYNQNEKIAQITSHTLIIGVDIAKFKHVARAQDFRGLEFGKPLYFENSKSGFNHFLDWINKLIIQLDMEKAIVGMEPTGHYWLNLAHFLKEHKIKFVVVNPMHVKKSKELDDNSPTKNDVKDARVIAQLVKDGRYAEPNIPQGVYAELRVARKIRDLLSVDRQVVQGQIHNWLDRYFPEFLTVFKDWEGKAALQLLKLNLLPNELVKLSNEEILIHVRQVVKRGIGISKIKDLTGVAQVSIGIREGSNMAKLELSTLIEKYELITEKLEELESNIDKLLDQIPGVSQMIAIKGIGKDTIAGFLAEVGDLSNYTHPRQIIKLAGLSLKENTSGKHKGQTKITKRGRKSLRALLFRVAMPLVAKNSAFKALHEYYTKRPNNPLKKMQSLIAICNKVIRILFAIGKKQCEFSEERMLQDIPHMAILKIAA

SEQ ID NO: 313977 - protein, 340 aa, unidentified
MTEIKRIAIDTSKSVFTLHGVDAAGRAVLRRNLRRGELLRFFGRLPPVEVALEACGGSHHWGRALAALGHRVRLIPPQYVKPFVKRSKNDRNDAEAIGVAAAQPSIGSVPIKSVEQQAAAMLLSVRELLVRQRTQLVNAMRGHAAELGVVAALGEKGLRELQTEIVAADEAAVPAAAKQAIALLGREVERIEGRLRAIEAELMQQHKANPLSRRLAAIPGIGPIGALNLALRVDQTQFASARHFAAWLGLVPRECSTAGRQRLGGISRAGDERLRQLLVLGATAVIQHAKPGRPATSQWLLNLLSHKPRKLAAVALANKMARIVWAMMTSGKTYRPAPAA

SEQ ID NO: 313978 - protein, 416 aa, unidentified
MNAVGIDVSSRKSTVAVLRPLGEVVCLPFDVTHDIAGLASLAEKLKALDGETRVVMEHTGRYYEAVAKALHEAGLFVCAVNPLLIKEYGANSLRRVKTDKADAVKIARYALDNWADLRDFTPMDAIRYDLKTLNRQFQLASKQRTASANNLIALLEQSFPGIRKCFDSPVRSDGTQKWVDFAHSFWHVDCVRKQPFPAFCERYRKWCKRHAYLFKLSNAEEVYALAKRAVVLTPKSKVVKVLVQEAANQLISISRSVEVYRAEMDRLAAMLPEYPVVMAMYGVGKSYGPQLMAEIGDVRRFERKQALVAFAGIDPMPNQSGDKNVRSNKSSKRGSPYLRKTLFNVIRTYLQCAPQDEPVFQFLNRKRAEGKPFYVYMLAAANKFLRRYYAKLRDYFASLDTLQPAAPIPTILKAAL

SEQ ID NO: 313979 - protein, 366 aa, unidentified
MNTNNRTNENRLIETLLGSKSEEVKFGVDVHAKELVASIQEDGSLPQRGRRMSREQLLGVVKALRAAGKKVYVVQECGPCGYVLHRQLEAAGAVSYVVTARDVTDGRRQKTDGLDAVALVNNLDRYLRGHRKAMTVIRVPSEEEEQARAQSRLRDQLRESRQQWSSRGRSLLLAQGYHVSGEWWTPRAWRKLCAETALPDWLQEELDVMRTVLLEIDGQEKVRRKSLEKAAPKELPKAIGALSWVQLLREMCTWKRFRNRRQVGGYTGLCAGVDQSGGRSRDGSINRYGNPRVRHLLIEMIWRLERWQPDYPPVRVLRESGARGAQRRKLAVAAARRLAIDLWRLATGQTTAQKLRLIVPELEVSS

SEQ ID NO: 313980 - protein, 343 aa, unidentified
MQVSTIGLDIAKNVFQVHGADAAGKTVITRQLRRGQVIGYFEKLPPCLVGMEACATAHHWARELTKLGHAVRLMPASYVKAYVKRSKHDAADAAAVCEAVTRPSMRFVPVKTIDQQAALMLHRCRDLLIRQRTQLINALRAHLAELGMIAAKGKEGVKDLVAIITDAVKATVLPEPMRQALQALVNQFAALQQQIGELERSIHAQHRASDRSRRLETIPGIGVLGATAIAATITDPSAFKSGRECAAWIGLVPRQNSTGGKDRLGGISKQGDRYLRRLLVIRATAVIRYARTHPDKHPWVTKLLAKKPYKVVAVALANKMARIAWAILAKGETYRAPALAAAA

SEQ ID NO: 313981 - protein, 574 aa, unidentified
MNNHAPPKPVHIGVGIDTARYAHHVSFLDGEKRTATTPFHFTETAAGYRKLQEAFDRLAGKHPHLHLHIRIDAAGQYAENLLQWLHQLDLNTTISVGQPARNKAYRKVHFDKRKADPTESLACARFAIVERPRATPHNPPEFQQLRDTVALLEVATKQHTRLVNQLHGLLARVFPELAVLVKDLSANWALTLLDKYPTPAKLARAKAETIAAIPRLPADLVPMLQAAAAHSLGSNRGLVAEQLVRQKVRAIRIQEAESRDLHKLLEKAWEALPAGPYRRLTTIKGIAVQTAAALAAKIVSIDRFPTASSLIGYFGVFPEEVDVSGTDPQGKPKAGTEIHMSRKGNDLVRRLLYTSAQCAAKWNPPVRALFARLMAEGKGYNVATGHCMAKLLRQVFALWKKDCDFDPQFETRPTAEPPTESNAAEAHGAKETKTVVGHREADKPQEKVVTTTASNIPSSMNGSKRRPLNFGLLRQQVSITRVLESIGWHAQSAHGPQRRGTCPLHEPKGTTSRCFAVHTENNLYCCHRCGSQGNALDLWTALRGKPLLEAAWELVETLGLNPPLLKEGPPGANA

SEQ ID NO: 313982 - protein, 436 aa, unidentified
MEKTENLPIIYSHAAGIDIGSEKIFVSVDGIEVVNFRTFTAEYRKCVEYLIQRGIQGVAMEATGVYWIALHQMIEENNIKVCLVNPKEVSQVKGRKSDVSDCQWIQKLYSSGILRESFIPAGKLKELRLIVREREDIIEMGSAYVNKMQKALELMNIKLTEVISQIHGVSGLRMIEAIIHGERNPQKLLELCDARIIKAKSKDVLSALEGNYNPTYLFMLKSSFQMWKLHQQELVNIDKKVESLLNELNINRPHIDDDAKPKAIRHHKPDVKDLHQKMLDLYGVNMCSLSGLNDYSLLRLVGETGNDLERFPTEKHFVSWCQLSPKHKQTGRTIKKIKVRTKNPAGQIFRDAARSLLNSKYTAIGAFMRKIRSKKGAAIAIKAGARKLAIAYYNIIRKGKAYVEEGIANYQKKLKEREFNLLQKLALKYNVEVILQ

SEQ ID NO: 313983 - protein, 321 aa, unidentified
MTGIICGVDIGSSSLAARIGQDGAAASFANSSEGIAELAAFCKTHQVALVAMEATGGYEQRAFAELSGHGLPVAVVNPRAVRQFAQSMGWLEKTDAIDAGMIAWYAQTKKSQPLCLAPPTQLELRARVTRLRQLTEVRTAQLNQQRLVTNEAVQKGFGAMLKFLAEQIRELEQAIAALIEADPLWRELNQAFRTIKGVADRTVARIMAEMPEIGTLSNKTISKLAGLAPLANDSGKHQGKRAVRGGRAAIRDILFIVGSVVARHEPDFHAFQQRLRAAGKPPNVVRIAVAHKLLVRLNAKAREVRQKNVHSQLSWAANQQP

SEQ ID NO: 313984 - protein, 388 aa, unidentified
MIYAGIDVAKDKHDCLIVDSNGKVLTKVFTITNNKQGFDELFTNLRTHSKDLSELKVGLEATGHYSDNLLEFLIANDLPTTVINPLHTNLYRKGLSLRKTKTDKVDAHSIVTMLRTEDLKPYSQSSYHVRELKSLTRYRFSLVQDCARLKSSFARLCVILFPELEKLVPSLHMASVYALLAEFPNAKAISESHLTRLTNLLSEASKGRYSKDKAIEIRNAAKASIGSYSEVKSLELQQTIQLIQMMEEQIAQAEARINPIVDSLHSLIMTIPGIGYRMAAIIIAETGNFANFDKAEKVLAFAGLEPSVYQSGQLTSTHAKMVKRGSKYLRYALFNAAKYVCHWDDGFRQYLAKKRAEGKPYNIAVSHVAKKLTRVIFHLVKTNQSFSR

SEQ ID NO: 313985 - protein, 350 aa, unidentified
MNSLSEIVEVVIGVDTHVETHTAAVVDARTGAVLDEATVPTTPQGYRDLVDLADAHSSLRVWAIEGTGGHGAGLARHLDRGEEVVLELDRPERAKRRHGAKSDPLDAVRAAREALSRPRLGTPRAGGDRQALSVLLAARRSAVEASTVAQRQLFSLVIAAPEHLRARLRGRKLPEMVKVAARLRVQPGWDTESATTAATLRTLARRTQALTVEAAELEKQILAIVRSWRPDLLNEFGVGPIVAATVLCAWSHPGRVRSEAAFAMLAGAAPIPANSGQVTTRYRLNRYGDRQLNRALNTIALSRQRYHAPTKAYIERRTSDGKTPREIRRCLKRYIARDLFRLLEHHPSMA

SEQ ID NO: 313986 - protein, 353 aa, unidentified
MRRPKDKLIAGMDLHSNNVVIGVINQDGKRVAHRKLECDLKQVTQFLKPLKPQLQSMAVESTFNWYWLVDGLRAADYPIDLANPAKIEQYNGLKHADDKDDAFHLAELQRLNILPKAYVYDPELRPVRDLLRRRGNLVQQRTALLLSFKSLYARTTGQSLDLSEVKTMDPKEAPKLYEHPANQLIAQVQAEHIQALAKSISRIEKGVLASAREIPLYEKLLTIPGVGRILGMTITMEVGDVHRFKTNGDFASYCRMVDAKRLSNGKCKGDNNQKCGNKYLAWAFVEAANYARRFDEHCRRWYDRKAARTSKIIATKALACKLAKAAWHVMVGKCDYDEKRMFPELAAKAMKTT

SEQ ID NO: 313987 - protein, 353 aa, unidentified
MNSSKYVGMDVHTATISVAVRNAGGKLIIESVLETKASTLLQFIRGLGGDVYVTFEEGTWAAWLYDLLKPYVKNVVVCDPRHTALLKEGSKSDRIDARKLSELLRANLLRPVYHGEKGLRTLKELTRAYLTISKDLTRVMNRAIYRSWGIPCSGKSVYHPRHRDEWLSKITQASVRRRAELYYQQLDALVVLRKQAREELLVEGKKHKVWKLLRSIPALGPIRTAVLMAILQTPHRFRTKRPFWKYSGFGVVTHTSADHRYVNGQLERSKKPVSVRGLDSSHNHHLKDLFKSAAIQASTSQGPFRDFYEALVAKGMRIDMARLTLARKIATITLAVWKKGVAFDAKYLKPQRA

SEQ ID NO: 313988 - protein, 370 aa, unidentified
MNSIVYIGLDVHKESYTICSYRIEDDEAKFVQKIKSDYKMVLKYLEQMRRQYGEDTEFLCGYEAGPLGYRLYHELNNRGVACVIMAPHTLGVTNNNRVKTDKNDARNIARSLAFRLYSEVHVPTAEDEEVKEYIRMRDDKKVAMKKVKQQILAFVLRQGYIYEGKSKWTIAHVKWLRTLEFTGLLQEVMSEYLITFDYLVGKLERLDERIEELASGERYAENVKKLQCLIGVKTYTALSVIVETGDFRRFSKPDQYASFLGLVPSEDSSGGSQKQGSITKAGNRIVRRLLVEASQSYAKGTIGHKSKELNRRQRGNAPEVIAYADKANERLRRKFYRLVLKNNKARNKAVTAVARELSCFMWGLMTDNIA

SEQ ID NO: 313989 - protein, 408 aa, unidentified
MKTMHKRCAGLDVHKAEVVACLRLVTRGKASHEVRRFPTTTRGLLELADWLEQAQCTHVAMEATGVYWKPVWHMLDGRFQLVLANAASIKGVPGRKSDVNDATWIADLLAHGLIRASFVPPQPIQELRDLTRTRKQLTREIVRHTQRIQAVLEEANVKLSSAITDVLGFSGRRILKAMIAGETDPAKLAALGSQRLGASPAELTDALHGRIREHHRFLLDQHLKTIEQLEATITAFDARIEAVLLPFRERVERVKEIPGLSQTSAQILIAEIGADMSQFPTAGHLLSWAGLVPRLDESAGKRRSTRLKKGAPWLKPVLVQCAWAATRKKDSYFRAQFLRLKARCGPKKAAIAVAASILTTAYHMLADGTRYQDLGPGHFARRDPARAAAKLANRIRDLGYTVEIRSAA

SEQ ID NO: 313990 - protein, 440 aa, unidentified
MKLKIVNPNAAGIDIAYGEMQVCVPEDRDGDNNRCFGSFTCDYEEIASWLKACGITTVAMESTGSYWAGLYFFLEEKGFDVLLANAKDVKNVSGKKTDEADAEWIMLMHSYGLLKPSFHPDASARGIRELARHRDNMLRSASKEVQHMQKSLVLMNIKVDTVISDILGKSGKAIIEAILDGNHDPKSLALLADPRCKAGKETIERSLEGTWDVVHLFELKQSYDLYKYIHTQIADCEAEMDRLLDEYTDGCGTDMQGYVATNKRVAKKNAISFDAEKHAFSMWGVNAMEIPGMSLGALAVLMGELGSGFTEKFTSAKSFCKWCNLVPNNKISGGKLLSSKVPKQKSRVGQVFRLCANSVKNVKTGLGVYFRRQKSKGGHLQAIVATANKIARIFYTMVVSKNHYDESKVGLDEKELLQRKIALAQRTLDRLNLKLSVAQG

SEQ ID NO: 313991 - protein, 339 aa, unidentified
MLIIGCDYHPSFQQIAFVDRETGECGERKLTHKEEAESFYRDLNGRSVRVGMEATGHARWFERLLAEQNFELWIGDPAEIRAKRVRKQKNDRQDAEHLLQLLVEDRFPQIWVPSPENRDLRQLLWHRHRLVQMRTRVKNQVQAIALNEGIRRKKGLWSKLGRVQLESLSLAPASARRRQDLLELLDRLNPKIDELSTAIQQAAEQRPEVQRLMTHPGVGPITALAFVLILGVPERFQCGKQVGSYLGLIPCEESTGGRQRLGHISKQGNTLLRFLLIESAHAVVRYDPDWRRRFLHLAMRRGRPIAKVAMARRLAVRLYWMWRKAWDYQQTLKFGSHVG

SEQ ID NO: 313992 - protein, 320 aa, unidentified
MMAQNDLVVVGIDVAKDKVDACIRRFKLQQTFPNNPQGHRKLIAWLRKYQVGKAVMEASGGYEREWRNVLHNAGIEVRIVDPRRVRNFALSAGRLAKNDPIDAEMISWFAETFSQAPGQIPDAAREELAGLAKARKALVDVKVRLLAQNEHAAPEPARKAHARVVKSLAAEIAKLEAAISAKVKATPGFAELAEIIESVPGLAQATSAILIAGMPELGQVSDEVAAALVGLAPYDDDSGKRRGERHIKGGRRWVRNALYMPCLGAATQNNPVLKAFYQRLIAKGKEPKVALVACMRKLIIILNTMLARRQKWNPGRHAVA

SEQ ID NO: 313993 - protein, 344 aa, unidentified
MSDIIRIGVDTSKSVFQLHGVDAAELPVLRKKRRDMLAFFRRLPATKVGMEACGGTHYWARELTALGHEVKLLPPQHVKPYVRRGKNDRNDADAICEAMSRPRMSFVAIKSADQQAAQMLMTTRERLIASRTQLINTIRGHAAEFGLTAAKGPAHVAPLLLRIAEDKTVPELAKELFALHGQELNRLKIELREIEAKLKVWHRQNELSRRLAEVDAIGPIGGCLLAIKAPDPQVFRGGRDFAAWMGLTPKDHSTAGKMRFGAITRAGDEALRRTLVVGATSVIKQVSKGKGDPSPWLRDLVARKPPKLAAVALANKVARIAWKLMVGGERYDAARAGVVSPTAS

SEQ ID NO: 313994 - protein, 323 aa, unidentified
MRHLGVDLHSNNFMVCVLSENGEQTFKQYKLSDLASFKRFLKAEDRMAVEATSTTRFFYNQVNSLVAECVVVNPSQFEIIKKSFKKTDKNDAEALARFLSKGLLPSSRMKDELHAEVNSLANTRDKFVKLRTVLLNKIHAHLKGAGYESRKEAYDHPANLKKVLSLDWSVAMQIELEVIVNEILNLTAGITKLEKEISERGAEINGYENLKSIKGIGNYSAAVLLSVIGDVNDFADEDKLASYLGIVPRVSNSNQTQHYGSITKRGSKLARTVLVQCTLTAKRFSPYLKQFYERIKVRRGSSKAIIATARKFLGIIYQTLKYN

SEQ ID NO: 313995 - protein, 387 aa, unidentified
MFYVGIDIAKLNHFAAVLNSEGEVLIKPFQFSNDNDGFCKLLFSLSTFDKSNLVIGLESTAHYSDNLVEFLVARHFQVCLINPIQTSSMRKNNIRKTKTDKVDTLVIAKTLMLQPFRFCTQEDIDCMHLKNLGRFRQKLVKERTRLKIQLTAYLDRVFPELQYFFKSGLHQKAIYAVLKEAPSPELIASMHLTHLAHLLEVSSHGHFHKEHAKQLRILAQKSVGSSDSALSLQVTQSIEQIELLDRQLKEVESKMNDIVQSLDSVIMTIPGIGSINGGMILGEIGDIHRFAKPKQLLAFAGLDPTVCQSGNFKAHHTRMSKRGSRVLRYALINAAHNVVKNNTTLKAYYDTKIAEGRSHYSALGHCAGKLVRIIHKMLTANVAFNLA

SEQ ID NO: 313996 - protein, 422 aa, unidentified
MRSIGLDVHRDFCEVAICERGAARLAARIACDPSSLRLFAGSLSAEDQVAMEATSNALAIARILEPHVARVVLAHPRKVRVIAEAKVKTDQIDARVLAELLACDYLPAIWIGDERSRALRRQISQRRALVKRRTALKNEIGSALMRTLAPRSPASDPFGAKGRAWLAELELPEDERETVDACLRQLDFLAGELAHLERLIARRVRDDQDVRRLMTIPGIDMITAVTLVAVIGDIRRFPTSRQLVGYLGLHPTVRQSGDAPARHGRLAKDGSAAARHALTEAAWAAAKAPGPLHAFAQRVGDRRGRQVATIAVARKLAVLAWNLLTRGEDYAFQRPSLVRRKLRHMDLLAGAPRAKPGPNPDPVWKTATDDAEKRLAQQAEAAYRRLVDDWQSTRPKVGASATPERASSRPSKGKAARQVQSS

SEQ ID NO: 313997 - protein, 390 aa, unidentified
MIYAGIDVSKDKHDCLISDSDGLVLAEPFTFPNNHQGFNDLFSKLESCSEDFTNIKVGLEATGHYSNNLLEFLISKGLNTIVINPLHTNLYRKCLSLRKTKTDRVDAHSIVTMLRTGSLKSYSQTSYHVRELKSLTRYRFSLVQDLAKLKSSYARLCVILFPELEKLVPTLHLASVYTLLSELPTAKAVAGCHLTRLKHLLASSSKGHYGDAKAIEIRAAARISIGSFSDVKALGLQQTIQHIQMLEQQIKQVEAKINPIIDSLHSPLLSVPGISYRMAAIIIAETENFENFNSAEQVLAYAGLEPSVYQSGQLTSTHAKMVKRGSKYLRYAIFNAAKYVCHWDTHFGEYLAKKRSEGKAYNVAVSHAAKKLIRVIFHLVKSNQTFVSQS

SEQ ID NO: 313998 - protein, 419 aa, unidentified
MSFKIFKFNCCGLDVHKTWIYACIGITDSNNRTEYKQARFSSFSKGLHQLCVWLAKYNCNDVCMESTGKYWIPVFNILEQHKIWITLFHPKYTKPMKGNKTDRKDAKWICDLYMCGMVKPSFIPPADIRELRDLVRYRFKLTCMITGEKNRAQNCLTVSNLKLDDVFSDVFGKSSRSITEQILQHPGEKFDVSPFVDSRCKTPIEEIQAAVDGNISKEQAVKLRQCLDHIDELQKHISEVEQEILRLSDKYEAALNLIRTVPGFDKNPMTAIQVLSEIGGDMSVFPTAKHLVSWAGCCPRNDKSDRKIKSTRISCAGSYFKPVLVQIANALIKSKKHFEFTTRYKRIKTRRGHKKAIIALCRMILTAIWHILTDLKPYTSDGFLESRPVKKEKVLTTSQALNLLRQRGYLIKDEPSPVS

SEQ ID NO: 313999 - protein, 339 aa, unidentified
MQLYAGLDLHSRNTYIGIMDQEFKRLFGKRVLNKLPVILDTLAPFRDQLKGIVVESTFNWYWLIDGLMDAGYQCVHLANPSAMKQYEGIKHTDDQHDAFFLAQMLILGILPQGYIYPKEDRPVRDLARKRLFLVRHKTSHILSLQSLIARCCGQRVSANEIRKFTVEDLQRLLEQEYIVLSAQANLDTIVFLKQQIQQLEKAIQKKVKLNKAFQQLLTVPGIGLILAMTIMLEVGDIGRFPQVGNFASYSRCVPSNRLSDGKNKGHGNRKNGNRYLSWAFTEAAHLSRRYNESFRSYYNRKVAQANTSLATKALGNKLARICYYLMRDQVPFRQELLSQ

SEQ ID NO: 314000 - protein, 446 aa, unidentified
MNDRSGLSRGDRNRNARLARLRQLLPFDHAIVGIDLADDKQAAVVTDHDSRVIARRRVSARAWELGDLLDWAVAQASAAGFASVTVACEPTGHRWRVLDQLAAGRGLALVCVQPLLVYRSREGEDLTRDKSDPKDAVLIARLASELRCYEPERADAVQSRLRHLGARRRQLTTDATAQVNQIRDLLECAWPAVLGASGSPFRSATWCAALAVVLDRCAGDLGRVLRLGAVRFEGAVRRELPRWGAVRPCLRIVRAVFAALRDPAGVMAHRPGALERAHLALGDWRDTRARLADAEARMVAVLDDLGLTALVTTIAGLTPAGAAAILAETGDPARFASPRSLVKHAGLRPRDNASGEHQGKTSISGRGRPGLRLAAWRAVWAALPNNPVMAARFTYLTTRHDNRLARQQARTACAAALLRWIHVVVTQRVTWDPAIAAGGRPLQQAA

SEQ ID NO: 314001 - protein, 519 aa, unidentified
MHQTKYRGIITEAGLLTMPPWEPAFRLVKPPIKSVSPFGGDLCFGWLGSPRLYLYKPLGCVSAFWKWIPARKDKTMQYQKVLKMLESIPYLSVGLDVGADFTWMSIMLPNGTLAGKPFKIVHSDPQSRELAVAKIKEAQEAYSLKSRCFLESTGIYHIPLLCFLRDKGFDCSVINPIITKNSTNLNVRKLHNDKFDSKKAAKVGLDASLKTSIIPDDAVIDLRNLVRDYYYFKDLQSAVVLKLTAELKVSFPAYRKVFSKVTTQTSLKLLDACPLAVDLLAAPKDTVVEMIRSTARFGEKYALAKYDALRTAAEDAAIFGRALKSNSVRIRLYIDSYREYQKRLDTIMEAIHASVDGLKDSPVYDHILLLQSLRGIGFMSAVVLVAEMGSFNLFPSPKKLYAYFGLDPAVKQSGKFNGEKVHMSKRGSSLARRILHMVALNNLKVDKGRGIPVNPVIHSYYTDKCKAKKKNVAVGAVMHKICNIIFAMLRDNKPFEVITPQEHCKRYLAAHPDKVQRAA

SEQ ID NO: 314002 - protein, 354 aa, unidentified
MSQNPITAIATVGIDIGKNSFHVIGLDQRGAIVLRQKWSRGQVEARLANMPRCLIGMEACVGAHHLSRKLKELGHDARLMPAKYVRAYSKGQKNDFRDAEAIAEAVQRPTMKFVATKTADQLDLQALHRVRERLVSQRTGIINQIRAFLLERGIAVRQGQRFLRAELPRILTTPPDVLSARMVRVIEDLASDWRQLDERVEGLSSEIEAVARQDAGCERLMSVPGIGPIISSAMVAAIGTGDVFSKGRDFAAWLGLVPKQMSTGDRTILGKISKRGNRYLRVLFVQAAWVVLIKPKSWERHGLKPWIEAAKKRLHRNVLAIALANKLARIAWSVLAHGRNFEARKIDEVVAQSA

SEQ ID NO: 314003 - protein, 343 aa, unidentified
MHIASIGIDLGKTTFHLVAVGEQGKVVVRKKFSRKQLLAYTANLQSSLIGIEACSGAHFIGAALRSQGHDVRLIPAQFVKPYLKSNKNDFLDAEAIAEAVARQNMRFVPIKTEDQLDLQALHRVRDRLVHRRTAIINQIRGFLLERGITFAKGPANLRNQMPAMLEDTELNISPRLRTLLARVWQEWKQLEIDIADASDEIERISSEDAGCKRLRQIPGVGPLVSTATVAAIGNGAAFRKGRDFAAWLGLVPRQYSTGGKAKLYGISKRGNIYLRRMFIHGARAVLLRVKYDTGGFGQWVHQLEARAPRNKVIVAIANKLARIAWAVLFRAEDYRHMAVCAPA

SEQ ID NO: 314004 - protein, 395 aa, unidentified
MYNAVGIDVSKGKSTVAVLQPAGVIIRKPFNVNHTSSELDELAKYIGSLEGETRVVLECTGRYHEPVVKTLSEAGLFVSAVNPHLIKNFGNNSIRKVKSDPADAKKIARYTLDNWIELRQYSSMDNTRTQLKTLNSQFSFFMKQKVAAKANLIALLDNTYPGVNKLFDSPVRDDGSEKWVDYAYSFWHVDCVRKIGLKTFTERYQAFCKKHHYNFQPAKPAELFLASKDLIAVFPKEASYKLLIQQSIQQLNLASSHVEELRSKMNELASTLPEYATVMGMYGVGKTFGPQLIAEIGDISNFSHREALTAFAGVDPGVDQSGTHNSKSNKASKCGSNRLRKTLFQIMSTLLQTAPEDDKVYQFLVKKRAEGKPYYVYMTAGANKYLLRQGQGMHP

SEQ ID NO: 314005 - protein, 342 aa, unidentified
MSQGRVGIVVVERGRPGSMETTQGACFAGIDVAKAKLDVAWTTEPTASWQTTNDAAGWSVLVSRLLPLAPTLIVLEATGGYEAGAASALARAGLPVAIVNPRQVRDFAKAMGILAKTDALDAHVLATFAARIQPACRPIADELQADLRALVARRQQLIEMLLAERNRFELARPAVRSSIRMHVRWLEARLRDVDRDTRDRIQQSPIWRAHDRLLRSVPGVGPASSARLISSLPELGHLTAREIGKLVGVAPLNDDSGRRSGPRRIWGGRAGVRHTLYMATVSAISCNPVIGAFYRRLRGQGKPGKVALIAAMHKLVTILNAIMRTHQPWTLTPAHLTDGASA

SEQ ID NO: 314006 - protein, 387 aa, unidentified
MNKSNRVIGLDVHPDSFAGAVLLKGKDAASARVVSTSRRVELPELEKWVARHTGEQDVLVLEASGNAFAVAERLRVLQRQVVILDSHRAGKVGKAYCANDRVDAIKIARIYLTALSPVVWQPDAKTRERREVFSAYQAVVKEATRLKQQLRSMLNEHCVRLESGFRLSHPSAINRLLKLREWTPVRAMLLEQLHRGLVSAQARRTRLRRYMAQEVLDEPELLRLTRLCGISLITLYGLSASIGDIKRFSNSRKLSAYFGLNPSVEQTGNWEGEGALKRHGRGALRALLVQSAKKLLRVNNPLQKWGLAVATRRGRNKAAVAVARKLCVAVWHVTQGHVIGAIERMTTLHTKLHKLATELGLNTIKSQGYETKEAFVQKKLYLLRSYA

SEQ ID NO: 314007 - protein, 327 aa, unidentified
MAQYIGVDLHKAFFQVCAVDASGSRLTEGRYDTSAAGITSWLAGCAADAVVAVEASGPTWWFVDQVAARVQRVVVVDAGKTRLKAGHAAKTDRLDARRLADALRRDSVVTVWTPPAALRDLRELSRYRISLVRTATTVRQRLRALLLRHGVSVRAADLASPKGRALVESVTLPGWADEGRRGLLALLTDVQTRLGPIEAAVAAVATTDPIVGALQTIPGIGPVLGVTVRAEIGDIVRFPTPAHLVSYAGLVPRVSGSGGRLHYGAITKRGSAWLRWALVEAAIHGTRRHDDVGRWARALALRRGGLKARVAIARALCRDIYRVWPRS

SEQ ID NO: 314008 - protein, 349 aa, unidentified
MTIVGGLDVHRKQITFDYVDTDTGVVRWGQIRPATRKTLQDWLGEHCPDGDGEFAVEGCTGWRYVVEELAAAGVTAHLADPAETAGSRGPKKRAKTDRADARLLRTLLGEGRLPESWIPPAHMLEIRTLGRLYCALMEERRAWQQRIHAQLFHQGCPPIPGLLTEAGRDRLATAELSAAGRQYVDVALGRIDELTARIDPLRRQLEAFARRQRGCRALQGRHYGVGWLCAAIIWAEIGDVRRFGSSDQVVRFAGLDITVYSSDAKRAPGHLSRQGSPELRWAAFEAAKCAARPGSPDYAYYHKMAGRLDGKRPALAVERKLLRRCYHTLRELGDGALAMPVAKTQKVAA

SEQ ID NO: 314009 - protein, 339 aa, unidentified
MPHYAALDVSNEETAIHVLDENGRTVWRGKRASEPEALATALRRHAPELVRVGLETGFLTPWLYHSLKALGLPVICLEARHARAATALQRNKTDANDAETLAQLVRTGWYREARVKSFAAHGVRHLVGARAQLKGMSVDLSNQIRSILKTFGLMAGKGAGHTFAIRVRELLEERPSLAAIVDPLLAAWQAVREQIAVLDRRLIRLAKEDPTCRLLMTCPGVGVIVATSFAASIEAPEHFRRSRSVGAYLGLTPTRHQSGETDRSGGISRRGDRLMRTYLFEAAASLLNRVRQDSALKTWGRALAKRMGFKHAAAAVARKLSVVLHAMWRSNTPFQAWPA

SEQ ID NO: 314010 - protein, 406 aa, unidentified
MEVLIERCCGLDVHKKSITACIITPEGKEIQTFATMTRNLIALVDWVKQNRCTHVAMESTGDYWKPIYNLLELEDLQPMVVNAQHIKSVPGRKTDVQDAAWIARLLRYGLVRGSYIPNRDQRELREVIRYRRSIIEERTREVNRLQKVLEGGNIKLSSVASNVLGVSGRNMLEAMINGETDTAILADFAQKKLKLKKEQLKLALEGRLGPHQLLMIEKQLAHIDYLNDLITDLDEEIDKRMTPFEDDLNLVDTIPGVGKRTAEQILAEIGTDMTRFPTPGHLCSWAGMTPGHNESAGQKRSAKTRKGNKKLRSALVEAARAAARKKNTYLSAQYHRIAARRGKNRAAVAVGHTILTIIHILLTRKQEYVELGFDYFDKRKRDILITTSIKRLEALGLTVSIQEQTV

SEQ ID NO: 314011 - protein, 427 aa, unidentified
MSYRIAGIDVHKRMIVVVVADVDVAGDYEFERRQYGSTPAQLRLLAAWLVEQGVEEVVMESTAQYWKPVWASLERYWKPICEKREGAGPMSGSLHLAQAQSNRGARGRKNDFADAERLVRRLVAEELTLSFVPDAEQRLWRTVMRTRYQLRCNQVQLQNRLEALLEEAHLKLSSLVSDLLGLSGRRMLQAMAEGETDPAVVAARADCRLRATQEQLCDALGACRELHPVYRRLLKAALEEWERIEAQIAQLGQEMASLIGPQQEQVQRLAEVPGLGVDSGQQILAEVGASAATFPSDRALASWVGACPGEEQTAGVNRNRRSPKGNRHLRRILNQAAHAAVKLKGSIFALLYRRYVVRFGHNQTIAVIAHRLCRLIWKILHEGVRYDERGPAVSQRAQQRRTARMIRQLRSLGYSVELLHAAAGVPA

SEQ ID NO: 314012 - protein, 377 aa, unidentified
MQKEHNMESIIYVGMDVHKDSYSICCYKADEDRFYYEKKVNAESKRVLKYLESVNKEFGEDCLLMCGYEAGPTGFGLYRDLIKAGYICVVIAPTSLKHSSNHKIKNDKVDARFLAKTLFTKDYSSVHVTTEHEEAIKEYCRMRLSLKKELTRAKLVLQSFLLRHDKKFTEGNTWTLKYRDWLNKIHFEEDYLNEALNEYMISVNTYEARIKAIENRLKQISLDPAVKDKVDKLVCFCGIETVSAVTIVSKVGDFNRFEKAYHFSNYLGLTCGEKSSGQKEKHLGITKSGDRELRCLLSECAKSIKKTSIKGKKSKRLLDRQKEKDPKVIAYADKCRYRLRSKIAYLELRGKSANVATTAAARELACFIWGMMTDHIA

SEQ ID NO: 314013 - protein, 454 aa, unidentified
MKILALDLGKFNSVCCLFDSKTRKTKFVTTPTTREHFDVIFKDTKADLVVMEACGPSGWINDLAEAHGHETLVCSTNEEAWRWANVKRKTDRDDALKLARMAAMGELKGVHTPSLEHREFRSLVKYRKTLDGRINKTKNAIRAWFVNHGIEIATGEKAWYSGREHINSFRKPLADCGPDELWKGELDIELTILDSLTEQLTGVVKKLEAIGKNDERIKRIQTIPGVGPRTAEILVACLDDPHRFENGRQVSAYFGLVPRQYQSGETDRNGRITKRGNPLARTILVECAWASLRYNPWAKGVYERICGKQKTRKKKAAIALARKIAVIAWAMLRDEKHWDPKQMIQVTESFGRMPAGLKDSLQNMKPKENADQRKSRLRKEARAAREAAESRASKTTGQNPVKRTTTGSAKPTAAKRNATISAATRSPRSTSQPNGKRQTKTSKPRRARKPVSRD

SEQ ID NO: 314014 - protein, 392 aa, unidentified
MQVTRIGIDIAKRQFEVHGVDERGTVVVRKSLKREQVSEFLAQLPRCEIGMEACGGAHYWHRELSKLGHTVRLLSAHKVKPYVVGNKNNRHDAAAICEAMSRPTMRFVEPKSPAQQDLQILHRARALLLRERTALSNQLRGVLHEYGIVMPLGAAALKRKVAEVLAGDDERASSVLRTVIGEQLERFTYLSQRLAKYDRQIAQFCHQDERCRRLLAVEGIGPLSATALVATCGNGQEFQNGRHFSAYLGLVPGHSNTGNKTVMLGITKRGNRYLRTLLIHGGRAALYAARRRSDPRSRWLKRLQERHCTNLAAVALANKNARIAWALLRYGQDYCPTRAHEQTATPARTARPAQSTPASAVHRARPVRSRTHSSAAPSTHHEGRGERMLRKN

SEQ ID NO: 314015 - protein, 382 aa, unidentified
MYIVGIDIGKNHHEASIVSPEGKQIGRSLRFATTHKGADSLMSFIFKNIGNSPCVFGMEATGHYWYPIYSFLKAKGYTIYVINPIQSDSLRKMYIRQTKNDSIDSFLIAEVIRFGQFGTTSMADENILAMRQLCRYRDSVISSRTEIKLRIGTIMEQIFPEYEKQFSSLWVSTSMGILEKYLTPENIENTPIDELFEIIKDKSHNRLTKAKAISIKEAAADTFGIKIAQDAFSFQLKQLIDRMNFLDKQIEALDIEIMKYYEQFDCYLHTIPGIGIIGAATILAEIGDISRFKNSSALVAFAGIDPTVRQSGEFNSTHNHMSKRGSPYLRHAIFLAATTCSFHNSPLNAYYKKKRDQGKHHLTATGAVARKLTTVNLCRVTG

SEQ ID NO: 314016 - protein, 341 aa, unidentified
MAVAGGFDLHRGQLTFDYVDTGTGESCRGRISPADRESLRRWLRRFDGAQDVEFAVEGCTGWRYVVEELQRAGITPHLAEPAETAGLRGSKRRAKTDWADARHLRDLLLNGRIPESWIPPAHVLEARALVRLYKDLLEERTSWQQRVHATLFHQGIPVVPKLGTADGQQRLDAAELSAAGRRAVQAGLRQIERLTQEMASLRRELARLSSRQPGCRALRRAHYGIGGLLSVAVWAELGDCRRFSSSDDAVRHTGLDITIYDSDGRRARGHIARQGPPVLRWALYEAALYASRPASPDYAYFCGVRDRIDGQRALLSVARKLVRRCYHTLRELGEDALLPAA

SEQ ID NO: 314017 - protein, 340 aa, unidentified
MDKMQVEACGIEVSAKELVVALSGKKGEAVLRRFANTPVGHRQLLQALTRGGRRVRACLEATGVYGLDVALLLSAHTGIELMVANPRAVRHFAQATMRRSKNDQLDAVMLREFALRMEFIAWTRPDENTLALWSIARRLEALTKQCAAEKNRQHAAAVSQAIPACVRASVARTLRWLQREIQKLRKTARQYIANDARLQRHYQLLRTIPGIADSSAIQILAELALLPTDRDVRQWVAYAGLDPREYSSGTSVKKRTRISKVGNRHLRCALFMPALVASHCEPHLRGFYEHLVAAGKKKKQALTAVARKMLHAIFGMFRSDRPYDGNRVYPLPLSESPLQA

SEQ ID NO: 314018 - protein, 333 aa, unidentified
MSKSSQYVGLDVSLKETSICIIDDAGKIVWRGRVDSTPEAIATAMKQHAPNAVRIGLESGQLSSWLFHELKAAGLPIICVDARHAKAALSLKVNKTDANDAFGLAQIMRVGWYREVTVKGLDCQAVRALLVARAQIVSQITTLKNCVRGILKIFGRVLPKGLRSQFPGRVRAAIDGHPVLGAIIEPTLRVLEAMRTQLLVYDRAVIQRVGTVVALAYMTGVEDPARFKRSSSVAAYFGMTPRRYQSGEVDHAGRISKCGDGMVRGLLFEAAKVLLSRSARPSALKTWGEALGKRVGAKKATMAVARKLAVILHRMWTTGKTFQWNAEAASPAA

SEQ ID NO: 314019 - protein, 321 aa, unidentified
MMKQHTVGIDISKAHLDAHRLVDGRSARFANDRAGFQALIDWIGTPVECVAYEATGPYHRDFEEALSQAKLPLARVNPWQARRFAEATGSRAKTDTVDARMLAQMAASLDLRPTPAPSKTQRRLQELQTYRDSLIRQRTAALNRRAQLRDPRLKRYNQTQINLFKRQVRALDRQLQQLIQSDPERARKLEILTSIPGIATTTAAGLLAEMPELGTLSGKAAASLAGLAAVPRESGTWQGRAFIRGGRRRARRLLYMPAVSTLRWNRDLAAVYRRLTERGKPGKVALVAVMRKLIVLANTLVRQDRTWLPEAPRGSAGQIMC

SEQ ID NO: 314020 - protein, 334 aa, unidentified
MKKRYFMGIDVAKASLDFCLLSKNAALLWRGQLPNEPQAIAQFLAQLQARGYKLAQIHFCCESTGVYGQRLVEALDQGALALSVLNPAQVKFFAISVLRRTKNDKVDAEIIARFCRERQPLATRPLRPIESQLKLLVHERESRVNEQNRERNRAKKDPYQIALPKLIEQQRKRRLKQLAAQIAQFDGAIDSLIASDEALSNQSHLLCSIPGIAKLTAAKLLCELAGKEFQSARQLAAYAGLTPQECRSGYSSYGKTVLCKIGNAFLRKALYLPAAVAKRWCKPLQPWIARLQSRKLHDLAIRGAIMRKLLHIAFGVLAHQQPFNPSLVFIPKNP

SEQ ID NO: 314021 - protein, 316 aa, unidentified
MNSIICGVDVSKNWLDAHVAAGPGERGEACRFANDADGIGALAAFCAGHGAELAVMEASGGLERQAYLLLWQLGQPCALANARHVRAFAEAMGFAEKTDRIDAMVIARFALAKGIVAEPPPGPQSQRLQALVARLGQVIGDLTVNKQRRASARNAEMGDSLDELIAFLNRQKRSLTGEIASMIDDDPLWARLDQAIRSFKGLAGRSVGLLLAQLPQIGLVSNKAIAKLAGLAPIADDSGARHGQRHVRGGRAPVRSLLFLVADIARRYDPDLGAFHAKLSAAGKPKMVVRTALARKLLVRLNARARIARAEIINAT

SEQ ID NO: 314022 - protein, 334 aa, unidentified
MENIALIGIDLGKNSFHIHCQDRRGKAVYRKKFTRPKLIEFLATCPATTIAMEACGGSHFMARKLEELGHFPKLISPQFVRPFVKSNKNDFVDAEAICEAASRPSMRFVQPRTESQQAMRALHRVRESLVQDKVKTTNQMHAFLLEFGISVPRGAAVISRLSTILEDNSLPLYLSQLLLKLQQHYHYLVEQIKDLESQLKRKLDEDEVGQRLLSIPCVGTLTASTISTEIGDGKQYASSRDFAAATGLVPRQYSTGGRTTLLGISKRGNKKIRTLLVQCARVFIQKLEHQSGKLADWVRDLLCRKSNFVVTCALANKLARIAWALTARQQTYVA

SEQ ID NO: 314023 - protein, 397 aa, unidentified
MEVMDEAGRVLAKRRLPEGAAGMVLLHGLIGQFVPEDGMDSAEVVVGIETDRGPWVAALVAAGYTVFPVNPLQAWRYRERHGVSGAKSDRGDAHMLADMVRADSHQLRPAAGDSPEAAGIKVLARTHKTLIWERTRAVQRLRHQLREYFPAALAAFEDLDAADTLELLGKAPEPARAARLTRAQVSAALKRARRRSIRERTDAILAALRGEQLSQPEALTAACAAAVQSLIAVITVVDEQVKTLQGQVEEHFGRHPDAEIILSQPGLGPVLGARVLAEFGDDPRRYRDGKARRNYAATSPITRASGKKKVVAARFIHNDRLVDALSAQAFASLNASPGARACYDQLRARGIEHNDALRRLANKLVGILHGCLKTRTLYDEATAWGHSKNLPQSSVAA

SEQ ID NO: 314024 - protein, 426 aa, unidentified
MKNLDVLTTLFVGIDVSSQANVACAIDFNSNKLLTITVPNNHTGAIEIADGICSLMEGSVFKAVVFAMESTSFYGVHIANFLSSEPRLLELHPYVYCINPKQIANYRKSFIGLDKTDAKDAFIIADFARVGRITVAPWRGSQYLALQRLTRHRLHLVECLVREKNYMAANVFLKFSELATLKKQAHPFSSNFTATAEAILTEFHSPEDIAAMPIEELVDFLCEKSRGRFADPDSIAEILKRAARDSYRLDKTLYEPLNTAIASSFNCLAAFEREIKAVDEAILRQVAGMNGNEYQCLRSIDGIGPVFSAGILAEIGSISAFHSQDALAKYAGLVWRKNQSGEFEADDTPMSKAGNRYLRYYLVEAAGSVARFVPEYRDFYQKKYDEVKTHQHKRALALTARKLVRLIYGLLAKDQLFSPNKVGEIS

SEQ ID NO: 314025 - protein, 330 aa, unidentified
MEQQQAGPQAHEFIVGVDVAKVKVDVCLRLPSGKSRSKVVANGKAGFEELVAWLTKHGAQHAHVCMEATGPYWEAIAEHLSDAGYAVSVVNPAQIKAYGAALGVRSKTDAADAKLIAQFCAAQPPALWQAPPPAVRVLKALVARRDALVELQIQEGNRLQVAHDSVRPSIQSVLDLLDQQIREIEKRIRQHIDDDPTLKSQRELLDSVPGLGDATIPVLLSQFGGPLRFASTRQAVAFAGLDVRHYESGSSVRGRPRLSKRGNGRLRRALYMPALVSMRLTPWGRAFASRLTAAGKPKMVILGALMRKLVEIAYGVLRSGKPFDANLHSA

SEQ ID NO: 314026 - protein, 351 aa, unidentified
MYNVTIGMDLGDKKHQIYILDENGKTIKVCQVSNTAKSIEKFFLQYSEALVAIEASPHSPWISRLLEKIVSKVLVGNPRKLRMIWDSDQKDDMRDAEMLARIARFDAKLLYPIKHRDEQAQADRSLLKARDILVKIRTSLILHVRGSVKSIGGRVVTCSSSSFHREAAECIPALLEQSLLPILAQIEEINKQITAYNTTIKRISKTRYPETEILQQVGGIGPVTALAYAVTIGDPSRFRKSRDVGPYLGMTPRRDQSGESDKQLRITKAGDRYLRRLLVQSAQYILGVFGEDSNLRRFGLNIAERGGKNAKKRAVVAVARKLAVLLHRLWVTGEVYDPLYRPTKVMIQIAA

SEQ ID NO: 314027 - protein, 361 aa, unidentified
MAQSTTIVAFDQHAATTVAAVLLPGQRTPALHTLTSDSPTILRFVQRLRALSVQCCYEAGPCGFELQRALSGHDIPCEVIAPALIPRRAGDRVKTDRRDASQLAVLYRAGALTAIHIPTEQEEAARDLLRCREDIRADLLRARHRLSKFLLRHGRRFTATRKAWTKRHAQWLQAQQWPIAALEQTHRAYVRAVDEAGARLHAVNAELRDLLILEPLRARVERLRCFRGIDDLTALTLAAELGDARRFPSAPRLMAFTGLVPSEHSSGTSRVRGHITKTGNAHLRRVLVEAAWHYRHHPFLGRSLRLRQHGGPAAVIDQAWHAQLRLHRRFRRLAARGKPRQQIVTAVARELSGFLWAALTH

SEQ ID NO: 314028 - protein, 370 aa, unidentified
MLYIGIDVHKDMCTACLQDEKGQVLREWKFKNKTSGFSELLALVEGKETEAAMESTGNLWIRLYTYLEKAGIKPVLANPSKTKVIAESSIKTDKVDAKTLAHLLRAGLISPCYVPTDPIRQLRQFLRHRIIIVQNKTRAKNRAHAIFHKYELPEFKGTDLFGKAGLNWIKEQLPKLDEADQFILRSLIYEIRTHNLLLAETEKEIARHVEIAKEVYLLMTLIGVSFFTAMLFLAEIGDINRFSSQSKLTSWIGLTPRVHQSGNTCYHGKITKKGSSRLRWALIQAAHSAVRFDPHWKAIFNRISARRGKQKAYVAVARKLAETMYCMLRNNEPYRYGRETTYNEKLKKLERLIRTTQTNEGGVLLECFSF

SEQ ID NO: 314029 - protein, 426 aa, unidentified
MARQKRSVEGEFDIFVGVDWGTEFHRACVLNARGEILRGCRIDHNGEAITEFLRSLQQLTNGGPSRIAVAIEVPRGPVVEAFLEGGFAVFSINPKQLDRFRDRHTTAGAKDDSRDAYVAADSLRTDQHCFRRIATDHPDVVRLRELSRTEESLGEALRRTVNQLYQLLLRYYPQLLQLNSAPDEPWVWALLEAAPHPQYGAKLTLARLKSLLAKHRIRRWAAEEVQVILRTPPLPLSAGSAEAISEHALLLLPQLRLLHTQRKKVHDRIEALLNHMTVVGRDHPECCQHRDIGLLLSIPGLGCLIAAHLYTEAADSLAQRDYAALRAHSGVAPVTKQSGKSKQVIMRRGCSQRLRGSVYHLARCSVLHDPHSKQHYAHLRSIGHTHGRALRGVADRLLSMLVAMLKSGKPYDATRRSTAAATAPAT

SEQ ID NO: 314030 - protein, 343 aa, unidentified
MELYVGMDVSLKETSICVVDGSGRIVSEGTVISEPPAIAAFIEANAVSVLRIGLETGPTTTWLWHELRALGLPVICIDARHAKAALSMQINKSDRNDAVGLARIMQCGWYKEVQVKSVSCHELRAVLNSRALLVKIKRDLENQIRGLLKNLGLVIGKAGGTVFTRRVEELLGRHGLLWEAVRPLLAVREIVRRELAALYRKLLDLARGDEDSRRSMTVPGIGPITALAFHSAVDNPTRFRRSRSVGAYFGLTPRRFASGEVDWSGRISKCGDTMVRSYLFEAAGVLLTRVPQWCKLKAWGHRLWKRIGFKKAKIAVARKLAVILHRMWRDGADFIWSSKEVVA

SEQ ID NO: 314031 - protein, 361 aa, unidentified
MKKPAQHLIAEVPRRQAKVEITIGIDLGDVWSHYCTLNQDGEVVDRGRFRTTPKAIEKWFTDVAPARVAMEAGTHSIWISAQLQELGHEVIVANVRELRAISHSDRKSDQVDAEKLARYARLDPNILRPIAHRTVEQQQALTLIRARALLVRLRTAAVNAVRGLTKSCGHRMPASATTCFAQRSLAVMPPGLAQALGPVLQQIAEMTVKIKMYDRQIQQLGQTEYPETQALLKVHGVGHLTALTFVLTLGSKERFGRSRDVGCYLGLRPRRSQSGDHDPQLGITHADNAYLRSLLIECSNHILRPHGRDSALRQWGLRLAARGGKQARSKAVVAVARKLAVLLHHLWSTQATYMPFYEQAA

SEQ ID NO: 314032 - protein, 427 aa, unidentified
MSQEKSLEIRVSVDVGSRSHQVAIGLSSGEVLEEFEIAHRVEGFEDFFSRIERHRKGNSYGVAVAMEGYNGWARPLDSMVRGRGYRLYNINNLKLARFKEIFPGAAKSDRIDARKGLELFQLRDHLPLAKEVLQEVTGTPHHNEVLKRLTRRRRRLVNERVRVVNNLQADLQAVCPGLLEITKEAGNQWFLNFVLSSDTLPQLARLRKSTLLKIPGVGKKYASLIEHWQKRAYFSEEVEWVSEMIHEDAQRCLELEEKINALETKIEQVAKDSKIAKILLSLPGFGAVCTSELAGEIGTVERFRKEGSLALYLGMSTLDNRSGKYQGSKQPKHVNTRAKAAMMTALDRHRKSVPESQKYYEKKRAQGKSHNQAIRALGRHLCRIIYKMLKEQREYQIRPAKGDTQAKVKSRSSRIGQIRKQQIFAKG

SEQ ID NO: 314033 - protein, 409 aa, unidentified
MYFVGIDIAKKTHQAAIIYSDGKLIGKPFKVSNTVDGFNLFLEKLTAVNTDLSQFEIGMEATGHYWLNLYTWLSDKSFRLHVINPLQSDALRNLYIRKTKTDSVDAKIIADVIRIGQYSETQLADENIIALRDLNRQRFYLVDMAADLKRKIIAMMDRIFPEYQDFFSDMFGKTSVQIMKEYTSPEQILQIPTERLTQLLKKASRGRFTETKAKELKALASNSFAALLSSEMTTLLIRQMLEQLDLLEKQIADIEHIIAAQFAQFDTKLTTIPGIGTTLGATIFSEIGDINRFDKPKQLIAYAGMDPSVKQSGNFVGTQSHMSKRGSPYLRRALWLAAVVAVSHDDLFKYLFQQKMNAGKTYAQAMGYICHKLLNTVFAILKTGEEYKPVYPPQLDLSKLTDQPIHSLL

SEQ ID NO: 314034 - protein, 429 aa, unidentified
MKEKTQEQEFGAYVGLDWADRLHVISMRAGNNHEVERCQLPHKPEAIAEWVSGLQQRFPGQRIAVALEQSRGALIYALMSYDCLVLYPVNPKALAKYREAFYVSGAKDDPTDADLLLELVTLHRDKLRAWLPDDELTRTITLLVEYRRQLVDEQTALTNRLANRLKLYYPQALEWAGELATVQACDFLQRWPTLDKVQKTTAAKLRQFYLAHGCRKPKVIDQRLQEMEQAQPLTKDVAVITATVPMVQATVSQLRPLLAAIQQMDKQIAALFEQHADHDLFNSFPGAGKALAPRLLAAFGTDRGKFAAAREVQQFSGIAPVTERSGKSCFIHRRWACPKFLRQSFHEFAAQSIRWSAWARAFYNQQRARGNYHHAAVRSLAFRWIRIIYRCWQTGVVYNEETYQQALRRRGSPLANLLDAQKATEEAPA

SEQ ID NO: 314035 - protein, 419 aa, unidentified
MSVVAAPVSSSTVVVAVDVGKNCVALSVTDVGRHRLFGPVEFAMTRPALERVLSRVGEVLPADGVVKVGVEAAGHYHLPMITGSAWPAGWEVLELNPAHVGEQRRVAGRRRVKTDAIDLEAITDLVLAGRGIPVTAREEVLSELTAWAAHRTRRVGTRTATKNQLLGQLDRSFPGLTLALPDVLGTKVGRLVAAEFADPARLGALGVTRFIRFAAHRELRVTRPVAERLVTAARDALPTRDAVIARRVLAADLALLADLDQQINQAEAELAALIPASAFRTLTSVPGWGVVRTATYGAAVGDPTRWPGPRQLYRASGLSPMQYESAGHRRDGAISREGSVELRRALIDLGIGLWHSDQPARAYAAGLKAPRETRRDHRLRVGAPREPNRLRPDPRPGHLRPHPLGPITQVSQHISVCPG

SEQ ID NO: 314036 - protein, 346 aa, unidentified
MQNDTLVAVDIAKEVFEVGISDRPGRVARRRRLARHEFLEFFAQLPQATVVMEACGSAHFWARRIEELGHVVVLLPPQYVRPYVVRNKTDRTDVDGLLEAFRNEQIRPVPIKTVTQQVFGTLHRLRSGWLADRTRAINSLRGLLRELGFFIPEGRKHVLPDAWEIIQDPKRGLPDALKPSLSSLCQEILSHSTRIEEIEAQLEALAKQVPVVARLRSVPGIGLLTATALYAFIGDAARFPSGRHMASFLGLTPREYSSGLRRRLGRISKRGDTYLRMLLIHGARSILWHAKRMKDRDRLRAWALRLERKLGHNKAAVALANKLVRITWAVWTHDRSFEPVPELQAA

SEQ ID NO: 314037 - protein, 387 aa, unidentified
MFYVGIDIAKNTHWASIMSSDGEIIADPFSFSNDSAGFQILLSKLEFLNKEKILIGLESTAHYGENLISFLFYLDFKIGIINPIQTANLRRSNIRKTKNDKVDTFIIIKALTLGNYAPVTSRDINNLKLKGLCRSRRNLVTLRSRAKIQLVSFVDQIFPELSSFFKGNLHLNVSYQLLKDYSSPSEIANLNLTKLSNILKINSHGKYKKEDAIKLRELAKNSVGISNPSLSLQIKHAILQIELFDSQIQEVEKLYKEIVDELDTTITSIPGMSYNQAAVILGCIGDINRFNSSSQLLAYAGLDPSVIQSGNFSARSTRMSKRGSGMLRYALIYSAHNVAKNNVTFKNYYDLKRSQGKSHYCALGHVAHKLVRTIFKMLKDNVSFNLA

SEQ ID NO: 314038 - protein, 337 aa, unidentified
MKRYMGVDLHRTQFTVCTRLESGRTYLRQWPMHELKLFAAQLRKHDEIAVESTGNTSLFYDAVLEHVSRVAVVNPNQFKVISQSVKKTDKNDAELLALYLAKGLLPEVRMKERRQREISHLAQTRDLLVKQRSALKAKINNLLSSEGINLKREALSSNKALERVLVLPLVPLMLAEARVLVSQIRCLNQSVGELEELLKQEGPKLAGHRNLMSIKGIGPVSAAVLLSVIGDIRDFSEAGKLAAYLGLVPRVQNSNQTERSAHITKQGNKLARTALVQCALIAKRYSPYLQQFYQRIQRRRGGGKANIALARKFLGVVYHTLKNNWVFEDFPNFVLAS

SEQ ID NO: 314039 - protein, 366 aa, unidentified
MREQDERNRITIGLDLGDRRHRFCVLDGKGEVVEEGTLSNKRESLSELSRRYRRALVVMEAGCHSPWISRHLEGAGCEVIVSNPRKTRAIYQHERKSDRRDALMLARIARMEPALLYPVQHGSEQAQQDLLRIKLRDSLVRARVGMINSLRFTLKSLGYAIANPSTERFHKVIQEQVPESVDSVIAPSVQALKELSLRIKLLDREIATLARSKYPETTWLEQIPGVGPITALYFVLKIQDPARFERVRDVGAFIGLCPRRDQSGENDPQLRISKRGDAYLRRLLVSAAQYILGPFAPPSALRQYGLALASGGTPRAKKRAVVAVARKLAVLLLTLWKNKSLYQAFPLSRDGEKMRTSDLERLRCIA

SEQ ID NO: 314040 - protein, 325 aa, unidentified
MNTMKIYCGIDVSSETLDICYQTTDGDQLHFQVKNNKSGFQKIAKQCGPNYHYVMESTGVYHTGLMFFLSDQGYVYSVINALQIKRYIQMHLERNKSDKKDAKRICDYGIDRKPEPSEMPDRFYFECRSLNNAVQDLTKEITKIGNQIHSLKRAPYDTNEVIKTYESILGKLEKEKQKLEERLDTKLQAWQPDLLKQIKSVKGIGKRAAAELIIYTKAFKGMKSYKQLISYAGLSPVEYSSGSSIKGRTKICKQGGKQLRHILYMGALNAKTTNEACKELFDRLVAKGKNKKAAIIAVCNKLLKQVFGVVKSGTLFQDNYAKKMT

SEQ ID NO: 314041 - protein, 427 aa, unidentified
MSWMGVLVPYLSQGRIPVKACGKPLCNIFEKVVHPMYYIGIDIAKRAHEICFTNENGDVLDGNSFNIPNTVSGINKLQKQLDKYGLNPTNALVGMEATGHYWLVLYSWLMEQGFDVKVINPLVTDAYRHMLIRKVKNDRIDAEVVAAVLRLGEYQETAVTDHDTLALRQLCRFRLWQVGSASDLKRKVIALLDQIFPEYEHLFSDVLGMSSRELLKVYTTPEEIASIHTTKLTHILTQASRGRFGKEKALEIKAVAKHSLGMTIGVDAFAFQLRQIIEQIEFVEIQIAKLDQEIEAYMDSLQSPVTTLPGVGPVVGAIILAEIGDIKRFPSAKQIVSYAGLDATVNESGEFKGQRSSISKRGSPYLRRALWGAAFVASWSDPELKDYYQRLRKRGKHHSVAIGAVARKLCYLLFAVLSENRPYEVRR

SEQ ID NO: 314042 - protein, 375 aa, unidentified
MKKHTMAKKSQREKTKRDRKRVHQMAGKQRLTVGLDLGDRNSHYCILDEAGEVVSESSLSTTQTGLSSLFAKMAASRVALEVGTHSPWVSRHISGLGHEVIVANAHKVKLITQSVKKNDRMDARQLARLARVDPQLLSPIQHRGPEAQADLGVIRARAELMEVRTSLINSVRGLVKPMGERLKKCDADQVGEDLGQTLSETAQRVIGPLLKSVETISEQIGIYDQLIEEIAQRYPAVELLTQVYGVGTLIALTFMLTIEDAERFQSSRDVGAFLGLRPKQRDSGASQPELGITKTGDRLVRSLLVQGAHCILRKGAPDSDLRAWGLSKVGTGKRSKRRAIVGVARKLAVLLHRLWVTGEVYDPLYNRKQAPRAAA

SEQ ID NO: 314043 - protein, 420 aa, unidentified
METTQVSFKQVVSRGCGLDVHKKVVVATIDGDGIKKQTREFDTITSSLKELRDWLLENRITHVAMESTGVFWKPVYNVLEPAGLTVWIVNAAHVKYVPGHKTDKKDSAWLCKLLLAGLLKPSYIPAKEQRELRDLTRYRTKLVQSNASNKNRIIRILEDANIKLSSVLSSTSGVVGTKLIDKICEGKQITMQDIDQVYHKKLGASKDEIFEACQGFVTTHHVYMLQLIRKEIDNTLRTIESLDLRIKEVLSPYDNALELLKKVPGISVKSAEDLVAEIGLDMNVFPTEKHLASWAGMAPGNNESAGKKKSGRTTQGNKQVKKVLTEIAWAATRTKNTFYHARYHKLAARRGKKRALIAVGHSILKSVYHILKDNCEYKELGAEYLISRTEAKRKAYLKSELSKLGYVVELKELSPVEKAG

SEQ ID NO: 314044 - protein, 410 aa, unidentified
MEAILERCVGLDVHQETVVACVLYGKLDCKPKQEIRTFSTTTKGLLALNDWLNDRECTHVAMESTGVYWKPVWNILEEQFTLILANAKRIKNVPGRKTDVADAAWIAQLLRCGLITPSFVPPADIRNMRDLTRYRRKLLRDATAEKNRIHKILQDANLKLTTYISDIFGISGRALLESVINGEVLDADEVKEKVKTSLKRKVPELLEALDGRMKKHHRMMLGLHLDHLSYVEKQLEKVEFEINQLLEPHLPSVELLVTIPGIQKDAAAVILAELGNDMSHFGGDPQIAAWAGLSPGNNESAGKKKSSRIAKGNKSLKAVLCQAAWAASKSKGTRLASFFYRIQKRRGQRKAIIATAHLMLRMIYRMLKDKIPYREVGWDYLTSSKPSVEYWVKKIEAQGFIVKVESTEAS

SEQ ID NO: 314045 - protein, 314 aa, unidentified
MSNNSTLTAGIDTAKDTLDVAVHGRTTRFTVDNNRTGWKRLAGELIKAGVQRVGIEATGGYERDVTLHLRAAGLTVLVLQPLQAKAYARLHLRRAKNDRIDAALIAACTQAIDPQRVEPDARLVPLADHLTFIEQIEEDTARLKTRLEHIYDRRLRGIVSKEIVRHETMRASELRHIAKALRGHQDLARRFDLILSVPGIGERTAIALMVRMPELGQISREQAAALAGLAPFDDDSGRHKGERHIAGGRGRLRRSLYAAALPAAFRWNSALKALYARLIARGKPHKIALVACARKLLIFANTVVERGTPWVQTT

SEQ ID NO: 314046 - protein, 319 aa, unidentified
MKTTKYASTKTEGDNVGIDVGKDSFDICLYEQDIDWQESNTEIGIRRLMKRLSRYHVTRLLVEATGGYERALVEAAIDHSIPVVIVQPIQVRQFAKAQGVFAKTDKIDARLIAEYGVKLQPEVKALPGDKVRRVKDLLARKRQLTEMRTQELNRAHRAQKITAASHRRLIKLLDKEIAEVNVKLTGEVADIGEWQRTYDIISSVPGLGDGVAFTLLGELPELGQLTHRQIAALCGLAPFNRDSGRLKGKRRIRGGRAPIRTVLYMAMLSAIRYNSMIKGFYQKLVAQGKHKKVAIVACMRKMMTILNAMIRDGQEWRMN

SEQ ID NO: 314047 - protein, 355 aa, unidentified
MNDAKYIGLDVHQATISVAVLDSAGKLVMEAILETKAETILQFIHGLRGSLHVTFEEGTCAAWLHDLLKPHVAQVLVCDPRKNALIKAGNKSDRIDARKLADLLYLNKLNPVYHGETGIRALKEVARSYLALTRDTTRVMNRLKALYRSWAIPCAGQRVYAPRYRSEWLAKITEAGVRRRAEIYYQQLDALRSLREQVRRDLLAEGRKHSAMKLLRQIPSIGPIRAVLLIALIQTPHRFRTKRQLWAYCGLALKTSTSGEYRIVEGQLKRAQKFLAIRGLNANHNHDLKNIFKGAATRAAAVPGPFQEFHAGLVARGMKPTMARLTLARKIAAITLIVWKKGVGFDAEHLKQQAA

SEQ ID NO: 314048 - protein, 326 aa, unidentified
MEHELHYIGIDTAKEKLDVDVLRPDGRHRTKKFANTTKGHDELVSWLKGHKIDHAHICIEATGTYMEPVAECLYDAGYIVSVINPALGKAFAQSEGLRNKTDTVDARMLAEFCRQKRPAAWEAPHPLERALRALVVRHQALTDMHTQELNRTETAREVQRPSIDAHLLWLEAELKRLEKQIKDLTDDDPDMKHRRKLLESIPGIGEKTSVVLLAYIGLKDRFAHARQFAAFAGLTPRRYESGSSVRGASRMSKAGHVSLRRALYMPAMVATSKTEWGRAFRDRLAANGKKGKVILGAMMRKLAQVAYGVLKSGVPFDASRHNPVAA

SEQ ID NO: 314049 - protein, 318 aa, unidentified
MTHTAHTTVLSVGIDFSQQTLAVATYPTNTVRGIPNDANHCQALANELSQQPVQLVLLEASGGFERAVVRALQQANVPVVIVPPQRARYFAKSLRGNLKTDRVDARLLARFASCYCAPEATEVPAGQAPLKELWARREQLVQTLESEKKRLQVATHPLVRASLERTIATVREELAQIEAAIEALVASDEALAQKATLLQTVVGVGWVVASGLLAELPELGQVSPKGIAALAGLAPVRRESGRWRGYARIGGGRRRVCRLLYLSAVVAVAHDARWRAVYQALLAQGKPKKVALCAVARRLLVVLNAMVCDGRAYERVQE

SEQ ID NO: 314050 - protein, 345 aa, unidentified
MKKVVAGMDLHSNNVVIGVMDMDGKRLASRKVSCELKEVVKFLAPFKSRLEKVAVESTYNWYWLVDGLQAQQYPVVLANPAGMEQYRGIKHADDTNDAFFVAELLRLDILPTGHIYDAELRPVRDLLRRRMMLVHQRTALMLSFKSLYTRTTGQEMRLGELKDLEIKEAQKLYVHPANQLIAGMQVKHIEQLTESIEKIEKVVMACARALPPYSKVATLPGVGIILGMTLTMEVGDIKRFASAGDFASYCRTVAAQRTSNSKRKGENNSKCGNKYLAWAFVEAANFARRFDPACRKWYDRKAARTSNLIATKALACKLAQAAWHLMSGGTEYDSQRMFGQPAKIK

SEQ ID NO: 314051 - protein, 348 aa, unidentified
MRRYKQMTVKGKSLFVGIDLHMLQWHLTIRTEDVEIFCGSIPGKWEALRKLLDRYPGSLLKTVYEAGCFGFWLHDRLVEYGAECVVTPPSLVPIEYGNKVKTDRRDSRKLAHLLAKGMLKRVWVPSEEESFHRQVIRRRRQLIGDRVRIQCRIKSELCFYRIQMLNTTTKWSQAYVMNLHRLKFNNHWMQECFQRLLEEYDFLSDSVKEQMKILQEFAETSLYKERVTILRTVPGIGLIAAMELLLELQDMERFRRADQLADYVGLTPSQYSSADKIRIWRITATGKNNLRGTLIEVAWKDKWMRRRYDRIKARSGGKRAIVAIARITLLKTRRMLLDNKPYVTGRAA

SEQ ID NO: 314052 - protein, 394 aa, unidentified
MRFAGVDIASEIHVLAMVAADGSVALKATPFTEDDIGYQKALALLGTPGEVLIAMEATGHYWKNLFAVLAAAGHAVALLNPLRTHRFAGVDLERTKTDAIDAVGIARFAAEKRPATTPVPDALTEELRELVQLRQRLLQDFGDRVRQLHRLVDLGFPEFTRYVRTLDSELASAILRDYPTAAAFRGVSVRRLAALRYDGHHRVGLDLARQLIDAARRSVGQHHSATYRLQIRYACDDLDTLRHRLRDLDRDLDGKLRVHEVGRLLTTINGIGTQLAARVIAAVGDPAHFRSGSALAAYVGTIPALKQSGKRQSVRGALTPIGNAPLRADLWMPTLCAVRSNPWLRAHYQRLLARGKLPKVALLACMHKLVLAIYSVAKHRQPFVPHIASEQATT

SEQ ID NO: 314053 - protein, 402 aa, unidentified
MIYAGIDIAKSSHVIGAVDERGKDAAKPMQFANSAEGFGKCAAYLEGLGAPAEEMLVGMEATGHYWLPLFSFLHAQGYDVVVINPIRTDAMRRFKGSSRVKTDLVDCTLIADTLRLGEFRPSKLGDESMVELRQLTRLHQGLKESVADLKRQVIVALDQVFPEYDSIFSDTFGESSKAFLRKCPTPEECRGVRVDALGNTLSRASRGKLGREKAEEIKGIAEESCGIDRGTRTLSFQIKLLVEQIDFIEGQIEEVEARIEEGIETTEPLILTIPGIGHVLGAQIASEIGDIHRFRNASAVVSYAGINPSVSQSGKFSSSENHITKQGSPYLRRALYLAATAQLRLSTPFRDYYDKKRADGKSHREALIAVARKLVHVIYAVLSKQEPYRPDAVNANPVSRSE

SEQ ID NO: 314054 - protein, 366 aa, unidentified
MKKKIAYVGIDYHKNTLTIAVRIEGEKEIHDTIRIRNEDKIIQKYMKKISKDFDIRACYEASSTGYNFYRKMTSWGYHCDVIAPSSLPKKRGDRRKNDFRDAINLAQNYANGTLSIVHVPTETDEAVRSLVRCRMVFKEDVKKAKQQINSLLLSQGLHWPRSKWTLRHRKWLWELKMPDEHLQKVLDEYLSHLDYLETRLKHLDQQIEQIAASDLYAPAVKKLRAFKGIATLSAMLLLAELTDFPRFPDPRALMAFLGLIPSEDSSGDRVKGGPITKTGNRRCRTQLIESVQHYVKKPKISSEMRRNLAQVDSRSAAIAIKCLERLHKRYWSLTMKGKLRPVAITAIAREFVGFIWAMMQTQAVAA

SEQ ID NO: 314055 - protein, 322 aa, unidentified
MLEAVVGVDIAKKKFDVALFMNGKFKHKTCLNKRQGFEELSQWFKRQGVERVRVCMEATGTYGDELATYMHDAGHTVSIVNPVRIKGFAQSELLRTKNDKVDAALIARFCVAMTPEPWTPPPPEIRRLQSLVKRADALIVMLTQEQNRLGTAHETVESSIKEHIGYLDQEIEKLKRQIAEHINSDPNLKTKRDLLSSIPGIGEATIAVILSALHIFEGVDRVQKTVAFIGLAPREMISGSSIKGKPRICKVGHARLRKALFMPALVAMRYNPVMIDFGNRLRRKGKNGKVIVCAIMRKLVHLIYGILKSGKPFDPNYKPNFA

SEQ ID NO: 314056 - protein, 361 aa, unidentified
MSSVPVFVGLDYHQDAVQVCVVDGTGRTLFNRSVANELAAIERAATRYGRPRRAAIEACCGAADLAEQLSVAADVPIQLAHPGYVNRLKRSPDKTDLGDAQLLADLVRVNYLPAVWLAPRNIRELRRLVRHRCQLVRRRKDVKLRIRGVLRENRIERPAAAAWTKAWLAWLAAEAPLSASDRWLVDDHLAELTALTTRIAAVERRLRETVKDDPLVKQLMALPEVGLVTATTLRAEVGRFDRFDTGKQLSRFCGVTPRNASSGARQADAGLIRAGNPELRCVLMELAHRLVRRFDLPWARLAAGMLQRGKPKNVVVAAVANRWVRWLHHELRRDRPTAPASAPARQEGSAPPASVAASTSG

SEQ ID NO: 314057 - protein, 363 aa, unidentified
MKKVSKVLWQTEVGNDKPAITVGLDLGDRYSHYCVLNEECEVVEEGRIQSTESAFRRHFESDPRQRVALECGTHSPWVSRLLKSLGHQVLVANARKISAITASESKNDRNDAELLARFAAHDPKLLSPVQHRSLERQQDLNLIQARSTLVRARTMIVNALRGLVKSAGGRLPACSTESLPVRARTSIPPALKVVAVPLLKQIALLNAQIGAMDQQIEKLAVRYPEIGVLRTAPGVGPVVAAAYVLTLDRPDAASNRSAGAFLGLRPGQSQSGESDPQRRISKTGDSYLRSLLVQSAQYILGRFGPDSALRRWGLKLASSGGKRGKKRAIVAVARKLAVLLHSMWRSGQRFQPFPQPAKAADAA

SEQ ID NO: 314058 - protein, 408 aa, unidentified
MNTLYVGIDVSSKSNVIYLMLPNGDKHSNFSVANSHEGSTQLVKRILSALTSHSLDTVLIGLEATSVYGDNLVYFLREDATLAPFNRKIHVLNPKQVKKFHDAYNDLPKNDYVDSFVIADCLRFGRINKEVYMGDYRYKALQNLTRARFFAVQNLVKEKQRFMNVLFKKYSTMTQEKVFSDTFSTTALAVYDEFESAEALANMDLHELTDFIMEKGKNRFPDPDAVAKAIQKAARSSYRLPKTVNDSVNQVLSISITSMKALESQIKEFDKAIKAQMELLPNVLISIPGIGPVYSAGIMAEIGDINRFNSQAALAKYAGLAWKQHQSGGFESEVTRLIPSGNRFLKYYLCEAAFSLVRCDKEYSDFYRLKYKEVNRCQHKRALALTARKFVRLVFRLLKDNRLYCPAK

SEQ ID NO: 314059 - protein, 359 aa, unidentified
MTTYYIGADVHSNSTELAIEKNKRIVQRYRLPTSITALTGVLDSLKGEKHLAIEEGPMAGWLYRNLSKKVDELIICDPRRNKLIGSDGDKDDKIDAAKLACLLRGNFLRPVYHSDDECRTELKHWVSLYHDRVRDAVRNINKIRSRCRMHGISIPRMVVRRPAARDKWLSKINNRTLAKQLELLWLGYDTTSQQVRIAKRYLSRLSGRYKIIKFWSQLPGIGLIRATTLFAYLDTPWRFKKKNKLWKYCGVGLQRTTSGTDKKGRPKPARLQLPWAVNRTLKNAVLGAATSAIKQKNNLFRQYYERTLEDGIMPSNARHAVARKLLTVMWAMWKTNRRFDENVLIKPDTEMSVALSRLS

SEQ ID NO: 314060 - protein, 342 aa, unidentified
MTIVTVGIDLAKNVFAVHGVDAAGKPVLVRPSVARDKLLELIASLPPCLIGMEACSGAHHWAREFDKLGHTARLMAPKFVAPYRLSGKRGKNDAADAAAICEAVTRPQMRFVPIKSADQQGQLMVHRARQGFIEQRTATLNRIRGLLSELGIVLPLKAATVRRQALQHLEDLPGWANTVIGDLLSEVSHLDERIAQYDRHIGLMARHSTQAQHLMQLAGIGETTATAIVSTVGNGHDFVCGRSFSAWLGLVPGQYSSGGKQRLGRITKAGDAYLRSLLVMGARVVLAAAMNSKAPKQDPLSRWARALAERRGYWRAVVAIAAKNARLCWAVLQRGDNFKIPA

SEQ ID NO: 314061 - protein, 343 aa, unidentified
MKTTTVGIDLAKNVFQVCALNRAGKVVSNQAVKRAALTETVAQLQPSLIAMESCAGAHHWGRTFQMLGHKVILVPPQHVKPFVRGGKSDPRDALAICEAARRPGLHPVPIKPLAQQDLQSLHRVRQQQVQHSTGIANQIRGIAHEYGVCFPVGLKRLCREVPYALEDADNGLTGAARELLARRFIDLLAIREEIERTSQRIVALAEGLPPWPRLMKLHGFGVMVTSSYLASIGDGRQFKRGRQVAAWLGLVPRQHGSGGKMRLHGMTKSGDRYLRTMMLHGARAAICWSRDRDTPLARWINPIVERRGFNKAVVALANKNARIAWNIVANGAHYDPGKAFGSA

SEQ ID NO: 314062 - protein, 346 aa, unidentified
MILGVDTHLDIHVGAVISQTGKLPGTHIIQTNQSGYLELLDWARSFGILERAGIEGTGTYGAALTRYLIKNGIYVVEVNRPDRSKRRLEGKSDPLDAENAARTVLSGSSKAIPKMQSGACEALRIISVARRSAVKARTQAINQLCALLVSAPQDVRDKLWKSKPRECVTACINSEVSEYSPLRIALCSTLRSLAKRWMALTEELNELDESLDKLTRKYASHLRSQFGVGPQTAATLLAVAGDNPERLKNEAALASLCGVNPLPASSGKTVRHRLNRGGSREANNALWTIALVRMRSDPRTRIYVDRRTGEGLSTKEILRCLKRYIVRELYPLILSDLAYANRPLLT

SEQ ID NO: 314063 - protein, 316 aa, unidentified
MSADPLNVGIDVSKAALDIAIRPTGQHWQIPHTNDAIHDLASQLVSLHPFLVVLEATGGLEIPLTGALATAGLPIVVVNPRQVRDFAKATGKLAKTDAIDAHVLAHFAEAVRPTPRPLPDAQTQAISAMLARRRQIVAMLTAEKNRLRTANGAVREDLLQHIAWLEERLSKLDTDLRETLRQSPIWREKDNLLQSVPGVGPVLSLTLLAQLPELGTLSRRQIAALVGVAPLNRDSGTLQGKRTIWGGRAFVRAALYMGALVASRWNPVLRAFYQRLCAAGKPKKVALTACMRKLLTLLNAMLKHRTLWLTNHALNS

SEQ ID NO: 314064 - protein, 387 aa, unidentified
MYFVGIDISKFKHDCAIVDELGDVITPSWSFQNDRKGFSLLKELLDALDGEKKIGLEATGHYGQNLKLFLENNDFSFMEFNPLLINRFVHSKSLRKTKTDSIDALMIAQYLMTVEYKPYPPSFYTLEKLKSLTRFRDSLIRQRSKQLVELTNILDKVFPEFKPFFKGRFSATALYILSHYASPEKISNMNSKSYEPLRRLSRGRFSMVDFVELKTLARNTVGSTCDYLLQEMEITIDIYNQLQSKVEEIELQIHDCVLGLAPPMLTIPGIGVASAAVILSEFGDLSKFNSPSKLLSFAGMEPGYFQSGTSESTGKMVKHGSSHLRYAMMNCAQTVINNEPTFAAYYAKKRAEGKEHRVALTHVAKKLLRVIYTLQTKELSYNPDLVR

SEQ ID NO: 314065 - protein, 419 aa, unidentified
MQVVYRHCAGLDVHKKTVVACAITPKSSSGWHKEIRTFTTMTNDLLKLSDWLTSHGCTHVAMESTGEYWRPVFNILEGNFEVMLVNARHIKAVPGRKTDIKDSQWIAELLQHGLLRPSFIPPVEQRDLRDLTRHRSNFIRERVNLVNRVQKVLEAANIKLASVASDVMGVSGRAMLAAIVDGNTSPELMADLAKGTMRKKHDLLIQALEGRVRPHQRFILAQLLCQIDSIDETIECFDQQIEEYCRPFEQAVELVDTIPGIARRTAEIIVSEIGTDMSRFPSAEHLAAWAGLAPGNYESGGKTLSTSTRKGNRSLRTILVQAAHALARTKTYLAAQFHRISGRRGKKRAAVAVAHSILTIAYHLISRKEPYKDLGADYFDKQRPESVKKRLIKRLEKLGEGVLSTSTVLVETSPLTKKI

SEQ ID NO: 314066 - protein, 354 aa, unidentified
MRTYYVGMDVHRASIVMVVLNGAGKLVMQAVIETGAERVRGFLKQLRGKVSVTFEEGTQANWLHEVVRPLVTEVVVCDPRHNKLMHSGNKNDRVDAQKLAELLRLGSLKAVYHGDNGVRTLKELVRNYDCLVSDTTRVMLRLKAIYRGRAIPCGGHDIYRSDRRAQWLEKLREPGARQRAGFLYAQLAALKPLRHEAKLVMVKEARRQTAYPWLLSVPQLGSVSVAQLMAVVGTPHRFRTKRQFWPYVGLAVVTRTSADHEVVNGVLQRSRRPIATRGLNRNHNHLLKKVFKSAATSACHSGPFKAGYDARLAQGMDPSLARLTIARQLAAITLAVWKRGEKFNTQRMKQQIAA

SEQ ID NO: 314067 - protein, 299 aa, unidentified
MTRMHQAATEPAPPPAVSTSRVVFGGIDTHKELHVAAVVDSGEVVLGTASFSTTRAGYRALIRWLRSFGDVRRVGVEGTGSYGAGLTRHLTEAGVEVLEVDRPDRSDRRRKGKDDDLDAISAARAALHQRRTSIPKSKDGAVEALRVLRVTRQTAIRARRNALQLLRMSIVSAPEELRDQVRNLTRMRLIRTCAAWRPDVTDAADPVSATRIALKSLARRILELGDEIAMLDELIEPIVTALAPQLLARVGIGVEVAGQLLVTAGDNRARMRSEAGFAMLCGVAPLPASSGMTQRHRLM

SEQ ID NO: 314068 - protein, 364 aa, unidentified
MKEKKVETRFVGIDLGKRTYAMAIVGKGSKVTMSNGKTYVEGRQKLYRKLRQTDKVALEAGSLAFIMAKEMEAAVGCQVYVLNPYRLSVIYKSMKKTDKEDALKLAHIIEDFQEERLPIVPVPSDKEMERRKILAGYRRAQQSRSREINRLHALFLNQGITTIVRKDLSTDEERKEAVKILNGFYLEEANYLIEILEQHEKRIEALDKKMNEESKEDEVMQRLQSIPGVGPTVSFAFVAHVGAERFENAGQLSNYLGLVPRVYMSGDTVRYGNITKRGNGYLRALLVQASWVLIRTKKGGRLKERFRYMTIERAIGKKKSIVSIARRLAELMYVLMRDGTTYEIRPFIKNNEVVRDISGIKFCA

SEQ ID NO: 314069 - protein, 337 aa, unidentified
MLFCGIDLHSNNCLVVVSDDNDKVVYSKRLPNDLATICTALSPYQQELFGVVVESTYNWYWLVDGLVAAGYSLHLANTTAIKQYDGLKHRGDESDARHLAHVLRLGLLPEGHIMPRAERAFRDLARRRMQLVGQRTSQIVSIETSMAQHMGATISGNSVKELTVDDIDAMPIGPTEALGMKANLAIMQALQVQIDGIEATLSKHCRRDKDYRLLCSVAGIGPILATVILLETGDIGRFADVGNYASYCRCVGSAHMSNGKKKGEGNTKNGNRFLAWAYVEAANFAIRYCEAARKFYQRKRSKRNGIVAIKAGAHKLARACFHMLKTGEKFSVERCFT

SEQ ID NO: 314070 - protein, 353 aa, unidentified
MGYVGIDVHKNFCQFAVMDDSGNIVAEDRFPNTDEGIRSFIARLERFDAKVVIESTGNLWMKLYDAIEARGLETVLSNPYKTRLIADARIKTDKLDARILAHLLRADLIPRCYVPSKEVREVRALVRHRAKLSKTRTEIKNRVHALLDKHRLRAPCSELFSKQGLEWMKGLKLSSSDDAVLKSDLGVLKVFEEQIGYVESEIASVALKDSNVELLITMPGIDFYSAMVLSSEMGSVERFSSDKKLVAWAGMAPSLHRSGDVVRMGRISKEGNKMVRWIMVQAALNAIRSDARLRAFYERCCSRKGHQKAIVAVAHEMLRIVWFMLKRREPYRYENRRLSLRKHNRMSRLAVVG

SEQ ID NO: 314071 - protein, 363 aa, unidentified
MAVKAMTVVGLDVHARQTHAAIVDPLSGEVRVSKLRMAPIEVASFLDGLGPDVLAVYEAGPTGFGLARAARERGIDVRVAAPGSIPKAPGDRVKTDRRDAIRLVRLLAAGELRFAFVPSVADEHFRDLVRAIEDVRGDLMRCRHRLGKFLLRRGERYPGPGGAWTIKHLAWLRALRFDDACSQATLADYLAAVELLMGRRKSLIDALEHAIPESSHATTIARLRCFRGIDTLSAAGLSAEIGSFARFPKPPLLSGFLGIVPSERTSDTKRRQGSITKAGPTHARRLLVEAAHHYRYAPNIGQTLARRQDGHDPRIIEIAWRAQRRLHQRWQHLRGQRRKPSGVVAIAVARELAGFLWEAATLD

SEQ ID NO: 314072 - protein, 405 aa, unidentified
MEFVVALDVSMGKSYSVIYQDQRCLYEEEIAHNQLGFQQLFDHIQTLPGSVTVVFEATGIYSKPVETFCQRNALRYCILNPLEAKKQLELGTLRSWKTDKHDAHLLAQSHSLHRREETQTQSIIYQHLRDLSRFYQEIEEEIKRMRMYLHNALQLSFPELEQFFSSRITPYALSLIALFPHPDLVLRSSITKIKNQLINHTLKNISQNRAKQKAVEIMSYAHSSYPAVSIESVQTQKVRYYARQLLHLLEEKERVSKELIEEAKNLPEFDLFLSVPGIGEISAALVMGELGDLSRFSNHKKVNAFVGIDIRRYQSGKYHGQDHINKRGNPKGRKILYLIIRNMIRQQKAAPNHIVEYYYKLKKQPTPKKDKVAVVACMNKFIKCMYSMARNHTEYDYSHAVSMDQ

SEQ ID NO: 314073 - protein, 371 aa, unidentified
MKKQTKTTPSVVLTPTPTPVITGGFTIGLDLGDRSHYVCVLDVPGQIIHEGPMLNERVALAQLLTKYPAATVALEAGTHSPWISRYLTGLGAAVIVANPRKLHAISRHERKCDRRDAVMLARLARADVALLHPLQHGSAQAQHDLLGLKLRDSLVRTRVNLINTVRFTLKSLGHAVTNPSSEAFHKSILTAVPADCLPVVAPVLAVLTLITDQIKTLERDLVARSKKAYPVTQRLQQIAGVGPLTALCFVLKIGEPTRFGRSHDVGPYLGLCPGRDQSGGTDKQLRISKCGDGLLRRLLVSAAHYILGPFGPACALRAYGQHLVGTSVREKKRAVVAVARKLAVLLLSLWKHGTDYEPRVPAAPTLVMMPA

SEQ ID NO: 314074 - protein, 356 aa, unidentified
MKNSKLDFTGQTISVGIDTHKKNMVITPRCQGMQLKTISMDPEPEQLVRYLHKNYPNAKYESVYEAGFSGYWMDRKLREAGIKNIIVNPADVPTKQKEKRKKTDKIDSRKLARELSAGNLEGIYIPSEEHEAIRALSRLRKQITKDQTRLKCRIKSLLNFVGITLPENSELKHWSGRFIKYLSEIEFKHKAMKITLERLLESLINGRQILLGIVKNLREIVKEDAEMKKITGYLQSVPGIGFITAITLYTEIMEIKRFGKFDELSSYVGFSPSTDSSGEKDKVIGLSKQQNKYLRNMLIESSWLAIRTDPALLQAYGNLVRRMSKQKAILRIAKKLLSRIMYVWRNEKHYVCAVVS

SEQ ID NO: 314075 - protein, 410 aa, unidentified
MSWHTCVCGLDVHRSSLVTCLLRGSPGEPSTRIERRFGTTFTDLNNLKAWLLEEHCEVLGMEATGVFWKPLHRTLEGEMRVVVANPAHVKAILGHKTDRHDASWLAGKIREDGIPPSFIPAPEIRKGRDPARLHGNLVRAKTQAKNQTLKLLASIGLPLSSVLSDVFGQTGMGILKALSQGTTAWSALEGELRGKTKAHAERIRMALEMPLIESERWQLGFQLQRLAALDAQVHEVDSCLKIWSEAYATERTLLTTIPDIGELAAQLILAEIGTDLSAFPSARHFASWVGLAPANNETGGRMRPAGTRKGGKILRSVLVECAQAASRTRGCHLRVKYQALSHRMGSPKAKVAIAHKLALIIYRILVDNRPYKESETDLQTSETRARKLRKAVRIIEQLGGKVVIPSSHSR

SEQ ID NO: 314076 - protein, 297 aa, unidentified
MAEQVVVGIDVSKAKLDVAILPSGEQFTVSNDRPGVGQLVQRLTQLGPIRVVLEATGKLEHLAASELAAAGLPVAVVNPGQVRHYAKARGKRAKTDKIDARLIAEFARDLQPEIHPLPDAQTQALAALCQRRNQLLEMQQMENNRLERAPRASQKSIKAVVRFLKRQVEQVEKEIDESIKKSPIWQAKRKLLETVPSIAQVSSSTLLARLPELGQFSRQKICALVGVAPYEDDSGEWHGRRHIAGGRARVRQVLYMAALSAVQYNPVLRDYYQRLLARGVEKKAALIAVVRKMGRLC

SEQ ID NO: 314077 - protein, 335 aa, unidentified
MQIYGIDLAKEKFDVSFFDLTSKKVSNQPSHKVVKNNLKSIGRFLENLPSDAVLVAEHTGVYGDTLLKCCMDSNVKIAFVGGYVIHRYRATPDRAKTDVLDCALLRDFGERYPDKLKYKTFPEEALYELRQLARHREMLVEQRKQLITADRSEDCRPVRSLAVKRSMDRIKEMLDTEIAETEKEMLKVINEHESIHHNYELVKSVDGVGLITAVELLVKTENFTKITTARQYAAYAGTAPYEKSSGKMDKGAHISKIGNRRSKTLLYICAESSRLHNKEIKLYYERRTLIDKKPRHYVLNAIANKLLRIIFTLVEKGEYYDANFIRQDPRVVKYN

SEQ ID NO: 314078 - protein, 431 aa, unidentified
MTASDSNARPCNLVAIDIAKAKHDVLVELRNGKRRKMIVRNQLSDFRQLVAFLKRLDGALEIALEPTADYHRNLAYFLKAQGFAVKLVSSIAVARTREALHNSWDKNDPKDAQVILHLLRNGNTQYFYDPVIEQTNDLQELSKTHFQVSLRKTRVQHSLLNHYLPLYFPEAERFLSNSRSSWFARLLIEFPTPQAITQLTEKEFIDRASQLLWRKQAKVPILRALYAKAQESVALPVPLESQAIATFRLTLAQHLELCRIRAELEETAHELLQDQLDYQILRSVPGVGPIIALTVLAEAGDLRRFGHERQFLKFCGLDLATSQSGAYRGRTQLSKRGNSRLRSALWMAARRATHMQENTFRQKFSRYLRSDPTNTDLRRKAYTACTAKMARTIYGLIKHQQFYRAYREDAIPEPGGRTRSHGPLRQAAAVA

SEQ ID NO: 314079 - protein, 465 aa, unidentified
MHTLNVGVDLGITSKHQAEIRDEQGRKVRPSFSFSGSTEGFDALSKHALKDAPEGTQLRFVCEPTSMSWFPLAVYARSQGHALVRVKAQKAHDLRQYYSKHRKRDKVDAKVLSLMPVVDRDSLEEVYLPDKLTHALDRRCRQREKLTKDIGAIKTRLKSLFEWVMPGLTSCFEDPYGSCARAFYAKYTNPFKVKQLGLSRLAKFLPRSSRQKMKPDLPERVYQVALQSCQMYETASQYTDFNELQGELQCELEQLESLEKVRAEVETAIKRLYQQVHPSKNIETIPGIGEALGPVFVGIIGNPNRFSSQAKLRGYSGMIPKQDDSGERSKKGLDITKEGPPRFRRGIFLAGDVSRQWDPQLAKIYYDQMVHKGNCHTQAVCAVANHLPARIHAVLTRGEPYQLRDLEGRPISKRDAKRLIQRELTVPEEIRQRTRSRKKRRRRKEGHLHSQVRGLATVLQASTHA

SEQ ID NO: 314080 - protein, 413 aa, unidentified
MDVIVECCAGIDVHQAQLTVCVRVPGADGKRVEQLAGFGTTTPDLLVLADWLAAHGVTQVAMEGTGVYWKPVYWVLEESFELWLVNAHHVKNLPGRKTDTKDAAWLCQLLEHGLLRKSFVPPRQIRDLRDLTRYRKTLIRERASEVNRLHKVLEDAGVKLSSVASDIMGVSGRRMLEALVAGTSDPEVLADLAKARLRAKLPALRKALDARFREHHGFLVAQVLAHIDYLEEAIATVSERIDTAIEPFQAAVELLVTIPGVQKRTAEVVVAEIGVDMSRFPSSRHLASWAGLSPGNNESAGKHKHGRTTKGSPWLRTALVEAALGATRRPGYLRSKYWRVRGRRGHQRAVIAVAHGLLEIIHHMLSTGELYSDLGSDHFERRQADYLRRRAVRQLERLGHQVILTETPTPQPA

SEQ ID NO: 314081 - protein, 349 aa, unidentified
MEQNEVILGVDTHLDTHVGAVISDTGRLLGTRSVSTDTAGYLDLLTWANSFGHLRRAGVEGTGTYGAGLARVLRDHEIEVLEVNRPDRAMRRSKGKSDPTDAENAARAVLSGRATAIPKEQSGAAEAMRAVSVARRSAVKAKTQAINQLRALLVSAPQEIRDRLLKSKTAECVESCARVRTLGKTPMLQTLTATLRLLAKRWLTLAEELKALDTMLDSLTTQHARRLRERFGVGPQTAAVLVAVAGDNPERLKSESALAALCGTSPLQASSGKTVRHRLNRGGDRSANNALWTIAMVRMRSDPRTRAYVERRTKEGMSNKEIHRCLKRYIVRELYPLILADLADSTASA

SEQ ID NO: 314082 - protein, 541 aa, unidentified
MTSHTTSLVRFYREGERKRIVSLLGKRAPRSLFLFPSPLFCSILFLSGKREERNLLTPIWGAQKESAPAPVMAQSVKITEITALPTGDRPRALTEYQRQGYTAYRCLWSAAAPRRPYPFLPGHTRRRKGGALPVFPVITVPFQWERRPMSKNQLVVSIDPGSKLCQALIAEDGRVLETFPFPNLSFSGMEKLLAHVQAQGQNPVFVFEATNVFWRPLYWHLSSQGYHCRTVSSSQTGAFRKTRMRRTQTDTIDCKQILEIHRQNESHPTRFLRQPLAGLRELTRFYTHLSDTRTNLAYRLREYLYQLFPEWSRCFSDLAGKTSLSLIQQGLANPAVLVKTRIDKLARIMKKTSNGRFGLSQARTLKEHASHTFGMNLAQEDVSFNLSTLAQAITYLAGLMRPLEQRISSLLAQVPQQLLTVPGVHVIPAASFVSELGDPTDFSKPEQVIAWFGLDVVWKSSAGKGRGYHISKAGSPYARKWLYVAAGEFVRHFPPARQKYLKLFKEHHLHKKAMLPITADLAKLLFVMYRDNSPFDPARYH

SEQ ID NO: 314083 - protein, 342 aa, unidentified
MEHTTIAVDLAKSVFQVAVSHRPGHLDEERRLSRDRLLPFFAQRPPATIVLEACGSAHYWARQLQPFGHTVRLLPPHDVRPYVRRNKTDRTDAKGLLEANRNEEIHPVPVKTIEHQAIASLHRLRSTWLATRTARLNTLRGLLREFGIFIPVGAQHVVPTVRALVVEPSMVPVLLHTTLAAACDEIEILETNMRAVERQLGALASQMADVTLLQTVPGVGVITATALIALVADIRRFPSGRHFASFLGLTPKENSSGSRRRLGAISKQGDVYVRMLLTHGARSVVWHAKTAARPTSLQQWAVKIEQRRGRNVAAVAVASKLARIVWAVWAQQRPFAADHRAG

SEQ ID NO: 314084 - protein, 316 aa, unidentified
MYLGIDVSKLTIDCCLIADGQNHQKKFQNNKGGFEQLTKWLQSHKVSDKLHCVCEATGTYYEALAEYLYLRYTITVENPRKIKGYAIAELQRSKTDTQDAKLIAQYCQDRKHKLKAWQPPAKEQKQLQEIARYLDYLKQQRATEKAKQHEAPDYIKSHIQTTISNLTAQIQTVKKQLLQFYKDNPSYNNLRKRLKTITGIGEQATAVLLSTYKRHEFKNAKQFTAYLGLDPRKYQSGTSVNGKSRISKIGSSEIRKSLYMPAVVAYRCNAFPEFVGRLKNKGKHIKLILIAIMRKLAVIAFTLLKNGQDFQVERYK

SEQ ID NO: 314085 - protein, 425 aa, unidentified
MNSDIEMAAFIGLDWADQHHVIRLRVAGSTPIEAHVLDQKPESLRAWIQQLRQRFQGRPVAIALEQSRGSLLYALMNVDFLRLYPVNPQNLAKYRKAFYPSGAKDDPQDALLLLEMLEKHRDRLRVWVPDEASTRCLRLLAEHRRKLVNRRTALTNQLTSLLKETFPQALEWAGPLDSLRACDFLQQWPSLEALQKASRARVRKYYHDCRREDSESIQLRLEQIRQAQPLTSDPALLTATGLMIQALVGQLRPLIESIRQFDHQLKERFQQHDDYTLFHSFPGSGSVFGPRLLSAFGSNRDRFECVMEVQNLSGIAPVTQRSGKSCWVHWRLACPKFLRQSFHEFAAQSIHHSLWAKAFYDQLRTKGVSHHAAVRTLAYKWIRILFRCWKNRTPYDEARYIASLKRRGSPLFVALSSQLQEVACE

SEQ ID NO: 314086 - protein, 341 aa, unidentified
MKLIRVGVDLAKNVFQVHGVGRNEKAVWRRKLTRASWLKVLLETAEPGCEIGMESCGGAHHWARRLQAHGFKVRMIAPQFVKPYVKSNKNDANDAEAICEAMSRPRMRFVAVKTVEQQDIQAVHRIRAELTKQRTAKANQIRGLVAEYGLVAPKELEHLRRALPCWLEDTENGLSERFRRLLNGLWGDLQALDERMAELDREITLIAQNDPVAKRLQQLRGVGPIIATALVAAVGNGEQFANGRQMSAAFGLTPRQHSSGGKERLLGISKRGDVYLRVLLIHGARSVLRTSKDKGDRLSQWVTRLAARSHPNVAVVAMANKTARMAWAMLKNGTDYQPATS

SEQ ID NO: 314087 - protein, 378 aa, unidentified
MGLDLHKAYVYGYVFQAGQKGTPCRFANTPDHWDRFLATQVTPDTWIAIEATGNAFPGDDRRLERAGHVVVAHPAALKRLGSGRHTDRVDAERLAQMLALGTMPAVWVPPAEVRAIRALITQAAACQQAATAWTNRARSVLIRQGYAVPRSVAVDDWFADHVAELDATTQLLLTSALTMAAEARAEADRLQGEILHRLADRPEMAWLWSLAGLGPWTAAVVWAWIGDPHRFCSARPVTRDAGLDPSVFPSGETDGRGPIRRQGPAALRHALSEAAGFALRSPPRPVRAGYQRLLPRVGKRRAIVAVARTVRIAAWRVWREQRLAREVDPRRYQKKLSAIRVTLRTRPPYPLAERLAAWAEPPHGPERSPRAAASPASA

SEQ ID NO: 314088 - protein, 343 aa, unidentified
MKLSRVGVDLAKNVYQLHGVDRHGKAVWKRRLRRGQWLQALLDKVEPGCEIGMEACTGAHHWARELQSRGYTVRLIAPQFVKPYVKSNKNDANDAEAICEAMSRPQMRFVTVKTVEQQDIQATHRVRTELKDHRNAKANQIRGLVAEYGLVAPQTLLALRRAIPEWLEDAENGLTDSFRCLLHGLWNDLLTLEERLIDLDKEIEKIARSNEVTKRLQQLRGVGPLIATALVATVGTGEQFSKGRQMAAAIGLTPRQSSSGDKHRLFGISKRGDTYLRTLLIHGARAVVSQAKHRDDPLSRWATDIAKRRHPNVAAVALANKTARMAWAMLQNDTDYDPVLAVG

SEQ ID NO: 314089 - protein, 397 aa, unidentified
MYIVGIDIAKRKHEAAVIDGEGAVIIKPFSFTNNCSGYNRLLAMLAKAKLPLDEVSFAMEATGHYWLALFTRLQKEGFRVQVINPVQTNSIRSFYIRQAKSDPRDALLIAEVIRFGHFSESTLHPENIYELRELCRGRHAIVSMQADVKRKVVALLDQVFPEYETAFTNLFGDTSMAILQTCPTPKELSEMPLEKLCHLIEVSSRKRFRMEKAQELQVLARNSFGFAMAGGVFSTMIRLYAKHLDFLKQQVREMDRKIAEIMDTLDTPITTITGIGPTLGAYILSEIGDISRFSSAAKLAAYAGIDPTMRQSGEYNGVRNRMSKRGSPYLRHAIWLATSSAVLHDPALKLYFQKKRDEGKPYMASVGHACRKMVSIIYAVMRDNKAYTPCIPNEISA

SEQ ID NO: 314090 - protein, 458 aa, unidentified
MGRNKSKDKDRRTMSVVHPNAAAIDVGATMHVAAVNADRTPEPVRGFGTFTTDLHRLVDWFAECGVDTVVMESTSVYWIPIFELLDARGFAVFLVNARDAKHVPGRKTDVSDAQWLQRLHSFGLLRASFRPKGHIAELRAYLRQRERLLQYGASHIQHMQKALTEMNVQLHHVVTDITGATGLRIIRTILGGERNPAVLARMRDRRCHATVETIEKALAGNYRAEHLFALEQALALYDTYQQKASACDVRIEAVLKELSVRRGRKAGPLPSPRQNRSRQQNSLHFDVRAALFALLGKDLTQINGLGPYLTLRLVAECGDDLSAWPSAKHFTSWLCLAPSNKISGGKVLSSRTRRSGSRAAALLRLAAATVGRTDTALGAFYRRLSARIGKAKAVTATARKIAVLFYNAVQHGMEYVDPGASSYETRYRARVIDNLHRRAKAFGFVLQPIDPTPSIAVS

SEQ ID NO: 314091 - protein, 382 aa, unidentified
MPTYRAKENFIRCGILCQECTIFCARMGLGDPRTIQVISMRAPVTNVGLDISKSIFQVHAQDDSGVVTVSRTLSRGRVLPFFEGLPPSLVGIEVGGTAHYWGRELSALGHDVRLIPPRDVKPFVRRDKTDANDAEAICEAVQRPHMRFVPIKSAETQAAMGLHRSRELLVKQRSQVLNMLRSLLAEFGVAFPLGTNKTFEMLDRLARGQLAQVPHLAQEIADPLTKHARNLEEMVEANREHLCRWHEQSELSQRLATIPGIGIISATAFASTVVDPERFRTARQFASWLGLTPSQRSSGKQHRYGKMSRRGDAYLRRLLILGTTSVALQARRNPDRAPPLVVNLLERRPLHVVRVAMANRTARIAWAIMMRGGTYRSDLLTG

SEQ ID NO: 314092 - protein, 353 aa, unidentified
MSISISNYDLVFPMDVDKKRIHLAVMNKERLIRKVTLPYDLLNLFNYVRKSFAGQKGVFVYEAGPTGYGLYDFLKQKGEECVLAVPSMIPQAPGKRVKTNRLDAYNLGVQLRTNDLRLVHVPEEKYRDLRHLTRLRLQYGKRIVGTKNGLKSLYLFEGIEFPNGKWSRRVISELRQIRYRPAVEFKVQQLLTNLEFFRTQELQTKAEIRRFCREDEEINRCIVYLMSLPGVGWIVSSYVLGTLGGFKHLISVKKTSGFLGLGPRENSTGDKVRRGEITAVGDPEARKMIVQASWVGIKKDLELRSAYERVYSRNPERIRKQKAIIAVGRKMVCRIHAVLRDQRPFENRLTKAA

SEQ ID NO: 314093 - protein, 334 aa, unidentified
MSDSTTWVGMDVHKENIVTVSISGDSGTVMTRWETRNTAKGKERLAGRIAGLGKARCVYEAGPCGYDLRRFPDGKGIPCDVIAPPLIPTRPGDRIKTDRRDAEKLARMHRMGELTAISVPTPAQEALRDLVRAREDANEDLVRSRHRLQKFLLRQGRRFEGKSWTREHWRWVRALTFDDANAGTVLAEYVLAVDQQLERVARLDARIEEEAQNPGIAPAVARLKTLRGVRTLTAMTIHSELIDLSRFASPRDLMSFIGLVPSEYSSGGNQRRGSLPRAGNAHLRRILVEAAWRFRHPPHRTDETIRKRREGQPPDVIETARKAEVGCTANSPAW

SEQ ID NO: 314094 - protein, 323 aa, unidentified
MVASPVFVGIDVSKARLDVASTGSGEAWSVANASEGIAQLVQQLREVGPALVVMEATGGFEVPAAAALVAAEVPVVIANPRQVRDFAKSTGQLAKTDAIDAHILALFAERVRPQVRALPDEDARALDAIVGRRRQIIGMITAENNRLGFALPAVQKGIKKHIRWLERQLNDVDSDLDGRIRRSPVWQAKSDLLRDVPGVGPNLARTLIAELPELGRLSNKQIAALVGVAPLARDSGLFLGKRMVWGGRAPVRSALYMSILSSTQWNPVIRIFYQRLRTQGKPPKVAMVACMRKLLTILNAMIRDGRKWNPEIPIGQLRLQHSC

SEQ ID NO: 314095 - protein, 343 aa, unidentified
MYYIGLDVHKKTISYCVKNASGQVLSEGKIGSTRRELDGWVRTLPEPRMMAMEATIFTGWIYDHLLPHAEKVKVAHPLMLRAIAAAKRKNDKIDASKIADCLRCDFLPESYMIPTEMRDRRRFLRYRNLVLRQSVQMKNRISGMLMETGVSYEKLRLHRKGYFDQLMKSNEEVSDCIRPLLKLCREQIDRSIRLDATLLRTLERDPLLSGRLERLRTIPGVGPITALTWVLEIGDVSRFRSIKQAISYCGLCGEEVRSADKVMRTPISKQRNKHIQSMLVEAARLAPRYSPELALLYDRERQRGDGNRATLAVARKLVAHMVAVERRQSSFLPAGELKQTAAA

SEQ ID NO: 314096 - protein, 320 aa, unidentified
MMAQNAAVVVGIDVSKAKVDACIRALKLRQAFPSMPEGRGKLVAWLRKHKVTKAVMEASGGYERDWAKALRQADIGVRIVDPKRVRNFALSAGRLAKNDPIDAEMIAWFAETFSEGPTQVYDAAREELQALVKARSALVNLRARLQCQSEHAAPGLVQKAQARVLKCLDNEIAKLEDAISAEVKSTPDLAERAEIIESVPGLGETSATNLVAGLPELGEVSDKIASALIGAAPYDDDSGKRRGQRNVKGGRRWVRNAIYMPCVGAARLNNPVLMAFYDRLIAKGKKPKVALVACMRKLIVILNTMLARRQKWDPSRYALR

SEQ ID NO: 314097 - protein, 372 aa, unidentified
MSFNQVVSRGCGIDVHKKMLVATISGEGLNTETREFGTVTRSLTELKDWLLENRVTHVVMESTGVYWKPVYHVLEPSGLTVWIVNARHVKNVPGHKTDKQDSRWLCKLLLAGLLKPSYIPPREQRELRDLTRYRSKLVQDISSNKNRIIRILEDCNVKLSSVLSDTSGVTATRLIDKLCQGKEVTMGDIEEVYHKKIEATKEELFEACNGYITDHHIYLLGTIRGDNHHLESLIRDLDEKIKHALAPYENALERLREIPGLNRKSVEDLIAEIGLDMDVFPNENHLSSWVGVSPGNNESAGKKKRTHHPREQAGQIHPEPIGMGGVADKRHVLPRPVPSPGSPPRQEKGHSGRGPLHPQVGVSCLKRRSPLQ

SEQ ID NO: 314098 - protein, 439 aa, unidentified
MDLFHSHGAGLDVHKQSVVAHARITDAKGHVTRHTRTFGTMTIDLLNLAAWLLSLEITHVAMESTGEYWKPIYNILEGSFTLLVVNAQHIKNVPGRKTDVKDAEWIADLLCHGLVRGSFIPPQAQRDLRDLTRQRTNLVRDRATVVNRLQKVLEWANIKLAAVVSDVVGVSAREMLAAIVDGQSDVSVLADLARGRMREKRAVLEAALSGRVRDHHRFVIASHLEQIDFLDAQIASFDGQIVACVNEQAPPPPDAPDTPPAAAPSTSDTDEVSWEGAIEIWDSVPGIGRRLAEQLVAEIGPQMREFPSAAHLASWAKVAPGNRESAGKRLSGKTGKGNRWLRTSLVQAAHSAVKVKSSALAIYYRRLAKRMSGKKAMLAVAHKILTIGYRLLSKRELYSEPYVSVRDARRTEQLAAQMQRRLERLGYSVRIEPLTASAT

SEQ ID NO: 314099 - protein, 352 aa, unidentified
MHYVGIDFHKRTSSITQMDGRGKILNRCRLTNEPTTLRTFAEGLPAGSKLALEATGNWTYFYELVEDLGLDITLAHPYRTRAIASARIKTDAIDATTLAHLLRTDLLPAAYIPPRAIRDQRELLRYRCALVSLRTRIKNAVHALLAKQGLEPPVTDVFGKAGCVWLRSLALRPSARQALEGYLAVNEALVQQLSQVSQTIRSQATASPDAQRLMTLPGLSFFSALLILAEIGDIHRFPDAEHLCSYAGLVPSVHASGGTTRYGRLTKQGSKYLRWILVELSHHAAQGSVRFGQLFARIKAKHGIPTANVAVARVMLRTIYHMLTDQTDFRDRPIPTNGRTGQRRRGLRHQSA

SEQ ID NO: 314100 - protein, 401 aa, unidentified
MLFLGDDWAEDHHDVELQDQTGMRLAKARLDEGVDGVAKLHELVAQHRDSVDSEVLVGIETDRGPWVQALIAAGYRVYAINPLQVARYRERRTVSGAKSDAGDAHALADMVRTDAHQLRAVAGDSDLADAIKVVARTHKTLIWERTRHVLRLRQALREYFPAALHAFGDLDSPDAVELLAKAPTPVAAARLSITQIEAAMRRARRRNITARAAQLRTVLRSEHLRRSERVSAAYAVTVRALAALLAALNTEIDTLAAEVETLFDRHPDAEVYLSQPGLGPILGARVLGDDPSRYRSASARKNYAGTSPITRASGKKKYILARYVHNDRLVDALGRQAYTTLTASPGARRYYDELRVRGISHHAALRQLANRMVGILHGCLQNHEPYDESKAWSHRAKQCAA

SEQ ID NO: 314101 - protein, 348 aa, unidentified
MKFYTKTHKHYCGIDLHARKMFLCILNASGDVLLHRNIATSPETFLKAVAPFRDDLVVGVECMFAWYWLADLCTKEGIKFVLGHALFMKAIHGGKAKNDKIDSQKIAILLRGGSFPVAYVYPPEMRATRDLLRRRNHLVHKKAELLAHIQNTAIQYNLPEIGVNLSCEGNRKEVDQHFPDPQVRKIVQVDLAMIDAYDDVLKVLEPDIEKTARRHDWHALMLLRSVHGIGQILGLVMLYEIHDIERFQTVQDFASYCRLVKCVHESAGKKKGTSGAKIVNAHLKWAFSEAAVLFVRHNPSAKKLMDDLIKLHGKGKALTILAHKLARAIYYMLKKKVPFSLEKFLATA

SEQ ID NO: 314102 - protein, 387 aa, unidentified
MQKPHDDSKASPAAFMQDNTLIAVIELGLSNWLVAGLIPGVSREPLKKLEPNPEDLLKLLHGWRDEAIKAGRPITRIAVAYETGRDSFWLARWLRERGIDAHVIHATSVAVSREHRRAKTDRLDTAMLKRGFLGWLRGERGHCTVAIVPTMEEEDAKRPHREREGLVHEQTRVVNRMKSALIQFGVRNFNPKLRKARVKLETVRTPEGKSLPPNTIAALRRDMERLKIIKEQIKAIEQTRLQQFEQKPEALANRMVYLLVRIYGLGWETADLLVHELLSRTLRDRKAVARYAGLTGSPDESGSKRREKGLSRSGNARVRKIMIQLAWRMVKFQPDSALVQWFKQRTENAKGSRKPMIVALARKLIIALWRYANDGVIPEGFRLHSAA

SEQ ID NO: 314103 - protein, 425 aa, unidentified
MKSAVEYAALIGLDWADTKHDICLLVPGTPSTPERLTLPNTPEAIAEWLQKLRQRFGGRPIALALEKTRSGLIHMLMEYDLVVLYPLNAEAVARYRQTFATSRAKDDPTDAELLLDLLVKHRDEFRPWQPDTATTRELAALGEARRQAVNLRTRLSCRLISTLKSYYRQALALIGEDVYSPLALDFLTKWPSLPASQRARTETVRRFYYAHNSRRADVIEERLQLIAAATPLTTDPAVVEPARLTVQLLVEQLRVLAEAIHRYETRQAALFAAHEDAPIFRSFPGAGAIFAPRLLTAFGTDRTRYASARAIQQYSGIAPVTERSGNRCWVHWRWGCPKFVRQSFHEYANESIRHSLWARAFYASQQQAGKSHQAIIRALAFKWQRIMWRCWQDRTPYNEVAYLTSLQQRGSKLLKLIAEPVEQPA

SEQ ID NO: 314104 - protein, 362 aa, unidentified
MSVYVGIDVHRKRSQVAVVGDDGRVQLNRNVVNGSQPMLGLLGGLPAGTPVASGAAFGWGWLAGLLADYGFEAHLVHPLRCKAIASARLKNDKVDAAILAQLLRADLLPEAWIAPPEVRALRALLRHRVQLVRLRTLLGNRIHAVAADHGYDRPAGYWSGPGRAWLASLDLPPASRQVIDDGLALIDALAGPIAALDAQARQRAKAEPGVKVLTQLPGVGEFTALVILAETGDITRFASARKLAAWAGLTPTVRGSDRTVRHGRISKQGPAWLRWALGQAAQTAKRHPDFAATYQAIAARRGKQIATTAIARKLLTRAWHLLTTAGITGPATSPPPRLPPGGAQAPGALAKVHVPATPRTSC

SEQ ID NO: 314105 - protein, 319 aa, unidentified
MSSQAIFVGLDVGKATLDVAVRPTGECWQVPNDEAGGAELTARMRGLKPALLVCEATGGFERSVVAALATAGVPIVVANPRQVRDFAKSTGQLAKTDRLDAGILALFAERVRPTPRPLEDAATQLLDALLTRRRQVLEMLVAEKNRLGFAPRPLHRGIRQHIRWLERQLDDVTGEVARMIEASPVWRAKDDLLQSAPGVGPVVSATLLGELPELGTLTHKQVAALVGIAPLARDSGQWRGKRMVYGGRASVRTALFLAALCGRRWNPQLKVFYERLIATGKPKKVALIACARKLLTILNAMVRDNAAWRAPDLTAQHSC

SEQ ID NO: 314106 - protein, 363 aa, unidentified
MGNTIICGIDAHEKTLVTRIGVNQEPAETKRFSNTRSGRDALFNYLKKLSGEYAGGKMVMAYEASTLGFGIYDESVASGIECHILAPTKMPTARKDRKKKTDERDAQRVFEIVRAYALAGNELPRIWIPDHQTRDDREVVRGRLDAAQKLTGLKCQVQTLLKRTGVVKPAEAGDSWTQRYRLWLKQLCIKPGAQIALQSLLRQIEGMEEEIKILDQAVEQLAEGERYKAVAGALVREVKGVGLLTAMVYVTEMGDLSRFNNRKQVGSYLGLVPSSNESGEVADHKGHITREGSARVRKVLCQATWARVAHDKEEAVVYQRLVKKNPKHKKIAVVASMRRLGVLLWHIGLAAQKEAVAVKEQAA

SEQ ID NO: 314107 - protein, 348 aa, unidentified
MAHFVGLDVSVEETSVCVVDDVGKVLCERKVRTEPEDIAVLLTSIGGDYVRIGIEAGPLSQWLVNGLIEADLPVVCVETRHMKALLKAQQVNKSDRNDARGIAQMMRVGLFKPVHVKTLIAQEQRMLLTSRKLVQRKLMDIESDMRGTLRNFGLKVGVVSSIRYEARIRDLVEGFPRLAAIIEPLLTVRRVMRQQLATLHKLLLNAVRVDPVCRRFMTVPGVGPIVALTYRASVDQPHRFIHSRAVGAHVGLTPKRHQSGEIDYDGGVSKCGDSMLRAMLYEAAQSMLTHSKKWSWLKAWGMRVAQRRGMGRAIVAVARRLAVILHRMWVDGTDFRWRNGSTAVVQVA

SEQ ID NO: 314108 - protein, 420 aa, unidentified
MPNIEIGVDSMVKENFIYVGIDLHKETHTAVMIDCYNQKLGEITFPNRPAAFPKLVTKVKKCNTDGKEVVYGLENAYGYGRALAVWLIDKGYLVKDVNTAISHRQAKHRGAMYRKSDSDDAKAIALATLNMLDKLPDACPNDAYWSLGQLVHRRDNIMKQRTRLVNQLHEQLCIAYPSYKQFFNDISRPTALYFWEHYPSRKYLKGKSVEDLRAELVPVSHNKCSTKTCEKILDAVASDKVKNNAYQDARDMVTLSIVSDLQHYDSQLTEVDKMLEQMYKMLGCTLTTISGVNVITAVKILAEIGDIKRFSNANKLAQFAGIAPLHLSSSGKGKDVATKQGNRRLQATIYFLAIQMVQVSSKGTPRNSVVRAYYEKRKAEGKTSQQALICISRRLISIIYGMLKHGTEYRMPVVESAGEK

SEQ ID NO: 314109 - protein, 314 aa, unidentified
MPVKAMSLVGLDVHSRQTHAAVLVPDTGELVVSKLRMEPVEVVGFLEGLGAGVRAVYEAGPTGFGLARAAKERGVEVQVVAPGSIPKGSGDRVKTDRRDAIRLARLLAAGELSFAFVPSVEDEHFRDLVRAIEDVRGDLMRARHRLGKFLLRRGERYPGPGANWTAKHLRWLGTRRFEDACSQATFVDYLTSVQLLVGRRAALISALEQQIPGCTHAPVIARLRCFRGVQTLTAAGLCAEVGDFARFAKPTLLSGFLGIVPSERTSDTKRRQGSITKAGPPHARRLLVEAAHHYRHRPLTGEALARRQAGATPG

SEQ ID NO: 314110 - protein, 417 aa, unidentified
MMSEATWFAGIDWASRKHQICLLDAAGRIVGEREVAHSGAGLAELCDWLVASSGAEAGAVAVAIEVSHGPVVETLLERGFLVYAVNPKQLDRFRDRFTVAGAKDDRRDAQVLGDSLRTDPHCFRRLGLDDPLVIELRAWSRLADELQQERTRLTNRMREQLWRYYPQALQLTDDLAADWFLAFWQFAPTPDKARRLRESTLARLLKQHGVRRLKAPEARRLLRQPPLLVAPGTAAAAGAHLRSLVARLRLVNRQLREARDNLDSLCLEFADAEPATPGQQNEPRDVAILRSLPGIGRINLATLLAEAPEPLKRRDYHALRTLSGVAPVTRRSGKHTLVLRRLACHRRLSDAVYHWARVAIQHDPNSRHRYAALRHRGHSHGRALRGVGDRLLAVACAMLTNRTLFDPTRYAVQPAAA

SEQ ID NO: 314111 - protein, 353 aa, unidentified
MLIIGCDFHPGFQQIAIFDNQTGAYEERRLSHRAEAEQFYGSLAGQQVRVGMEACGHYPWFERLLAELGFELWLGDAAKIRASVVRQQKTDRRDAEHLQMLMREGRFPRIWVPSLEERDVRQLLVHRHKQVQARTRTKNQLQALAMSQGVQKKRKLWTAAGRAELESLELLPYAAQRRRQLLHRLDALEAEIAGLNRQVEEEVKGRPAAVKLMTHPGVGPVTALAMVLTLGPAERFRDGRKVGSYFGLIPSEYSSGGRQRLGHISKQGSSFVRFLLVEAGQSAARKDAELGRFYRRLGARKHRALAKVAVARKLAVRLYLMLREDWTYAQLCRAVVQASPSHSVAASSNRPLE

SEQ ID NO: 314112 - protein, 367 aa, unidentified
MKKTSTAASKQSGNISQQKLTIGLDLGDRNSWYCVLDETGRIQLEQRVRTTAKALQEVFGGMPRSRIALEIGTHSPWISRLLGELGHEVIVANARKVRLIGESRQKDDRLDAQTLARLARIDPELLYPVKHRSAKAQADLMMIRARASLVRTRTGLVNAARGLAKSYGERLRGCNVRNLDPEKAENLSPELQQALEPLLAAIAEVSARIVEYNDRIEALAQTSYPQVELLKQIKGVGTLIALTFLLTLEDPHRFRKSRDVGGYLGLQPGRRNSGQSEPQLHISKEGDPYLRTLLVQGAQHILGPFGIDCDLRRWGLKLAERGGRNGKKRAIVATARKLAVLLHHLWVSGEVYEPLHNSNRITVAAAA

SEQ ID NO: 314113 - protein, 389 aa, unidentified
MKIYVGIDIAKLNHFAAAISSDGEIIIEPFKFTNDADGFQLLVSKLESFDKNSLIIGLESTAHYGDNLVRYLVTELYQVCVLNPIKTCQMRKNNIRKTKTDKVDTYVIAKTLMMQDNLRFVSFFDLDMMDLKALGRFRQKTIKQRTRLKIQLTTYVDQVFPEIQYFFKSGLHQHAVYALLKEAPSPKEIASMHMTHLANLLKVNSHGHFTKEQTKELRVLAQKSVGANDSAISIQITQTIQQIELLDSQLEKIEAEMTDIMKFNDSVIMTIPGIGYINGGMILGEIGDIHRFSNPNKLLAFAGLDPSVYQSGNFQAKTTRMSKRGSRVLRYALVNAAWNVVRNNATFKAYYDAKRAEGRSHYNALGHCSGKLVRVIWKMLTDNVEFNLK

SEQ ID NO: 314114 - protein, 337 aa, unidentified
MIVIGVDVHKRSLTAVAVDEVGRQLGEQTAVDAAGLLLWSASLPEERLWAVEDCRQLTRALERDLVAAGERLVRVPPKLTAPQRRTGRVRGKSDPIDALAVARAALREPRLDYPRPQEPLLRELKLLVDHRDDLVAERTRAQQRLRWHLHELDPDLSVPVGALDRTVWLDRLARRLARGGQTVQAEIARELVGRCRTLTRTIREIERELATRTTVAAPGLRAVPGCGPVTAAKLLGEIGPIQRFDSDAQLARHAGVAPLEASSGKHQRHRLDRGGNRQLNRALHQIAITQARMHPPARAYLERRQADGKSRREALRCLKRHLVRAIYTTVKNEPLLT

SEQ ID NO: 314115 - protein, 413 aa, unidentified
MRVVHARCGGLDVHKRTVEACVLLTAEDGSLRRYVRTFGTMTGELLALSDWLARLGVGHIALESTGVYWRPVFNLLEGEGRELVLVNPQHVRHLPGRKTDVQDAAWLADLLRHGLLRASFIPPAPIRALRELTRYRKTLVQERTSEVNRLQKTLEGANLKLASVATDVLGVSGRDMLAALLAGEADPEVLAELARGRLRAKLPALRQALTGRVQAHHLLLIGQLLAHIDFLEEGIARLQAEIEASQTTCAAAVDLLQTIPGVGAVTAAAIVAEVGTDMGRFPTAKHLASWAGVCPGNKQSAGKRLSGKTTRGNVWLRAMLGEAAWTIARTRGSYLHAQFHRIARRRGKPKAVVAVAHSVLVVAYHLLRTGRPYEDLGADYFEQRDTARLERYHVRRLEQLGYVVTLAAPPPAE

SEQ ID NO: 314116 - protein, 360 aa, unidentified
MSHSSALTSSPSTIIVGVDTHKYVHVAVAIDLLGTRLASCSASADRAGYGELVAWARRLGPIGAFGIEGTGSYGVGLASYVRRQALRVVEVSHCDRRKRRNNGKSDTLDAETAARSVLAGIATAVPKAADGAAEMVRQIKVARDTAVKAKSAAIITLKTLIVNAPDELREVLQPLTDRKLIDRCARLLPGVMDDTTASTKHALRALATRWLALSTEIEIHDGALDAITQASAPTLRAAFGIGPDSAAEMMIVAGDNPARVRSEAAFAKLCGACPIPASSGVTNRHRLFRGGHRQANAALYRIVTVRMRWHQPTIAYVARRTAQGLSKKDVIRCLKRFVAREIYRSLLDDHRARTAVIDAA

SEQ ID NO: 314117 - protein, 345 aa, unidentified
MDHFAGLDVSVKETSVCIVDDTGKIVREVKVASEPEALLLVLMNPAYRFKRIGLEAGPLSQWLFSALAEAGLPVICVETRHMRAVLKAQINKTDRNDARGMAQMMRVGLYRPVHVKTLRSQKLRMLLTHRKLLQSKAIAIENDLRATLRNFGLKVGMVGTVKFEARIKELVENLPDLIVLVEPLLIVRRALREQTDILHRRLLAIVRDDDVCRRLMTVPGVGPVVALTYRATVDVPARFRNSKAVGAVFGLTPSKYQSGESDRTGRISKCGDEMMRVMLYEAAQIMLVRSAKWSWLKAWAMKIARHRGLKKAIVALARRLAVIMHRIWVDGTEFCWTREQATAAV

SEQ ID NO: 314118 - protein, 316 aa, unidentified
MDESGNILKRQRVPSSPAGFQQGLSGFDHPMKAVLEASYCWGPMFDWLDELADEVVLAHPSKVRAIAEARIKTDKIDSETLAHLLRADLIPKAYAPSKDTRAIKRVLRQRLFLVQLRTMVKNRIRTLLAQHAVELPKLSDLFGKSGLAWLRQVELPRPDGSLFHEDLQLLQVFAEKIASTEHLIEELARGDEAVVWLSSLPGIGKFLSVVLRWEVDNMERFREAKKFASYTGLVPSTYSSANRTVHGRLTKRGNKWLRWAFIEAVSPAVRTSARLRAQYQRIKIRRGAKDARTAIARKLAELAWTVWTERRCYEER

SEQ ID NO: 314119 - protein, 307 aa, unidentified
MSKAQLDVALRPAGRFAVPNDEPGVAQLLTRLKAMPPTLVVLEATGGVELPVTTALALAGVPVVVINPRQVRDFAKATGQLAKTDAIDAGVLARFAEAIRPTPRRLPDEQTQALAALVTRRRQLIEMLTAEKNRLASARPAIRKHLRAHISWLERALQQTDTDLAEAIRQSPVWREKDELLRSVPGIGPVLTTTLLANLPELGTLTHKQIAALVGVAPLNRDSGTLRGRRTVWGGRAQVRTVLYMAAIVAARFNPVIRSSYQRLCAAGKAKKVALVACMRKLLTIINAMLKQRTPWRQGMDQALAGV

SEQ ID NO: 314120 - protein, 367 aa, unidentified
MRTGACVIPESVETAVQQRPRPHRWFEPEQLIGRAVASGDPHDKAGTDDMMQGFVIGVDISKERLDVFVLPRGQHLALPNTPAGCRRLAALAGAAAGADEVLVVFEATSIYDRMPGEVLAQAGIAHARVNPRRAREFARAAGLLAKTDRVDARMLAMMGERLELRRSGPVDPQAVRAQALFDRRAQLVEERKRLKTQMKQMERLGHDEIVAEMAQALGELSRRIAAYARRLESELAQAPALARRTAIARSLPGFGPVVAAAYALKAPEFGALDRRGAAALIGVAPLACDSGAMRGKRRCWGGRKPLRDLLHMAALAARRHGRFKDLYDRLIARGKANKVALTAVGRKLVTILNALIKADTTYDPAHA

SEQ ID NO: 314121 - protein, 461 aa, unidentified
MAKRKQKSQIQVKQLDVLQQLNLNAAGLDIGASEIYACVPADRDEEPVRVFETFTVDLYALADWLTACGIETVAMESTGIYWVPVYEILEARGFDVYLVNARHLKNVPGKKTDVLDCQWIQQLHTYGLLRASFRPPDDICALRALVRHRDNLIRFRSAHIQHMQKALKLMNVQLTQVISDITGVTGLRIIRSIVAGERDPHVLARLRNSKCAKSEAEIAKALQGNYKLEHLFVLKQALAQYDFYQQQIQECDAELEALYASLASQEQDNQEAPPPKPKRSKPRKNQPHFDLATSLYHVVGVDLTAVDGIDALTAQTIISEIGLDMSKWPSAKHFASWLGLAPHNDKSGGKILRSRTKKTQNQANTAFRIAAQSLSRSQSALGAFYRRMRAKHGPAKANVATAHKLARIVYHMLKYRKAYVDPGEAQYEQQHRERTIRNLERRAAKLGLQLLPTAEEAPLVS

SEQ ID NO: 314122 - protein, 419 aa, unidentified
MDTPLLVAVDVGSRFHQVAVGDGTGHVLDEFRIDHEPSGFTAFFERVERHRRSPDQRVQVAMEGYNGWARPLDSQTLARGWALYNVNNLKLARYKEIFPAPAKTDAIDSRRMLELFALDQQPGVARNALQRVTLIPKAHRHLKYLTRRRRVLVQERAGRLTRLNCDLQALCPGLLSITGSIDNRWFLRFLTCRDRLTALPRVRASTLLRIRGVGRAYLAKIQAWQPTAQFAPDIAFGDMDVVTDARSILTLSERITELDTELERLACESQPARLLRSIPGFGPTGVAELVGEIGTLDRFTKESGLAVYVGMAPLANSSGVRDRGKRPRSVNTRCQNALMTCVARHMAHVPESRAYYDRKRAQGKTHNQGVTVKSGVREGLRKAAYPAGMEVPATNQPRGIRHHDLRYDRDFERASGHAR

SEQ ID NO: 314123 - protein, 415 aa, unidentified
MTKIIRIGMDTSKSVFVLHGVDAAEQPILRRKLRRKQVLEFFAKLEPTKVGLEACGAAHYWARELRALGHEVVLAPPQYVKPYVKRNKNDAADAEAICEAMSRPTMRFVPVKTAEQQAALMLAGSRDGLIRRRTQLSNTIRGYAAEFGLTAAKGLDKIEPLLARIAAAALPELAKEMFATYAREYARLKVEITKIEAKLMAWHKDNELSRRLEEVPGVGPIGASLAAMKVPDPHAFGCGRDFSAWLGMTPQDHSTAGKTRLGVITRAGDEALRRVLVVGATAVIQKVKQGKGQPSPWLVALLKRKPPKLAAIALANKNARIIWKLMVSGERYNPARAAAARGEGVEVPSCTSGTPCSPPSRTLRAAAGDGPRGPSLTAAALGVTGPRQVGTEKRPSGRTKKLTLKKLENVAPAAV

SEQ ID NO: 314124 - protein, 395 aa, unidentified
MKTVCGLDIHKSIILMCIMKGNGEKIIREFSTLTKDIESMCDLMQMDGVAEVGMESTGVYWIPVWRFLQGHFSLKLINPYFIRQLPGRKTDVKDSEWIATVIQKNLVRGSYVPGKQIQELRQFSRRYVRLCEQSTRIEQEIDRQLHRCNIQITNYATKIGSASVIKVVKAIIAGQTMAEVLEKHVHGRIRNKYREEITASLRGVISATDRFIFHQNIREYEQIQQQQEECLKAMENDCQEHFGKELQLLCTIPGIQKLSAMIIISELGVNLKTFLTAAALTSWAGLRPRNDESAGKIKSKKITKGNKYLRRILVQCAWGASRQKNGWLKTKYEQLCARKSSKKALIAISRKLLVIIWHVLSKQEPYKEFVPEIDPKQKQKKINYHKKIIEQLQAG

SEQ ID NO: 314125 - protein, 323 aa, unidentified
MSQPNPLCVGIDVSKTTLDIATANNEFAQFTAGNDTDGFELIIAELRKHSVALVLMEATGGLEAAVACSLQAEGFDIAVINPRQARNFSRAMGYLAKTDRIDAKVLSQMAEVINRHPERERFIKAIPDAERQILAAMVVRRRQLITMLVAERNRLHPAHPQNRKSINTIIKALEDELSRIDEAMNNHIKTHFKELAARLSSIKGVGAMTVATLLSEVPELGSLSRREISALIGVAPVNRDSGTMRGRRTIFGGRAGVRTALYMAALVATRFNPVIKAFYTRLITAGKVRKVALVACMRKLLTILNAMIRKNEEWRDSYHEFSL

SEQ ID NO: 314126 - protein, 457 aa, unidentified
MRKRHRSKSKLRSRQIAPATIRPDAAGIDVGATEVHVAINPERDPESVRTFATFTVDLERLAAWLRACQVKTIAMESTGVYWIPLFDILEAHGFEVCLVNAQHVKKVPGRKSDVLDCQWLQYLHSVGLLRASFRPPSQICALRALLRHRQNLVRYAAAHVQHMQKSLDQMNLQLHHVLSDITGVSGLRILDAILAGERDPLQLAGLRDYRVRSSEETIAKALTGNYRDEHVFTLRQALAAYRHYQQMIVACDQHIESLLEGFSDRVDPQQQPLPEPRRKRRRSGNGAHFDLRTHCYRVLGTDLTAVPGVDALTAQAVIAEVGTDFSKFPNSAAFSSWVALCPHNDITGGKVIRRGTRPVKNRLAVALRQAAQALHGEQSYLGAFHRRLRARLGPAAAVTATAHKLARIIYHLVTTREAYDESVFQREQQRYRQRAEAHLRARALSYGFQLVPLDRPA

SEQ ID NO: 314127 - protein, 340 aa, unidentified
MSEVTTIGLDLAKHVFQVHGVDAEGATVLRKQLRRAQVLTFFSRQPRCLVGLEACATAHYWGRELRALGHEVRLMPAQYVKAYVKRNKNDAADAAAICEAVMRPTMRFVPVKTADQQAAVLLHRGRERLVRQRTGLVNALRGHLAEFGVIAPQGLRNVGKLIAIVRDEGDGRLPDLARQVLAVLAAQIEQLEAAVAALEKQLIAWHKSNPVSQRLASVPGIGPIIATAIAATVTEPSGFRSGREFAAWLGLVPRQNSTGGKNRLGRISKRGNQYLRRLLINGASANLLRSKATNADPWVIGLRRRRPSLVVAVALANKTARIAWAVMHRQENYRRVAAAA

SEQ ID NO: 314128 - protein, 352 aa, unidentified
MQTPQLFIGIDVHKKSWSVSIRTDLFEHKTFNMPSEPDKLISYVNQHFKDYPVECCYEASCCGFIPYRQLAQAGWKVKVLNPSDIPQSAKNKDQKNDKMDCRNLAKQLQSGHLTGIHVPDEQREQLRSLFRQKNNLTKVMRKLKSQIKAELLYYGIKFPSQFENANWTREMTTWIQDIEWKYVTGYTSLQSKLRHLAFVRQEWLTINKDLRQYVTACFNNDYQLLMTIPGVGPVIAIGILSELGDIRRFSKFDQLSSYVGLIPSVYSTGETVQIRGLTYRTKSLVRSYLIESAWVSVRRDPTMQTYYRTHTGKQPNKIIIKVAHKLLRRMWHVIKTGDGYRTCLNDSTAEPG

SEQ ID NO: 314129 - protein, 431 aa, unidentified
MSKYLNGLVVGIDVASEFSFVAVLAPDGSQYRKSFKVLHTAVGFNYLIEQIKKAEEEFSTKPVFFMESTGVYHLTLFHFLKDKKFETFVINPLVTNCNKNKDIRKVKNDKNDALSIAKLGKFEDIKVSSDSDINIFTLKLLVRDYYKLIDTRSTFKKKLSNSLSISFSGYQNVFSNTCGIVSIKILKKYPTPQAVISAQKQDIMDILLNSRKGLKWAEKKYTNLVEASKNAQIVSLTSPWLSVSITTSISIYEAINNETATLLKKIKSFIDSDEMSLTFRKNILLLMSIPGVGYNTAITILGEIGGIDKFITPKQLVAFFGIDPAVNESGKFKGDRVKMSKRGTRFGRRALYAVALASVRIKRNGEATNQILLKYYQENLKGKKAKVALVAVMHKLIKYLFAVLRNQEEYQVRDPKLHQKMFIENHTVQVA

SEQ ID NO: 314130 - protein, 354 aa, unidentified
MSQTLNTAIAVVGIDIGKNSFHIAGHDKHGAIVLRQKWSRGQVEARLANLPPCLIGMEACVGAHHLSRKLNSLGHDARLMPAKYVRPYSKGQKNDFRDAEAIAEAVQRPTMKFVATKTADQLDLQALHRVRERLVSQRTGIINQIRAFLLERGIAVRQGQRFLRAELPRILATPPDVLSPRMVRVIEDLAGDWRRLDERIEGLSSEIETVARQDAGCERLMSVPGIGPIISSAMVAAIGAGDAFTKGRDFAAWMGLVPKQMSTGDRTVLGRISKRGNRYLRVLFVQAAWVVLIKPKIWERSGLKPWIQAAKKRLHHNVLAIALANKLARIAWSVLARGRVFEVRKMDEAAAQSA

SEQ ID NO: 314131 - protein, 367 aa, unidentified
MAIVAHTHPFVIGVDAHARNHAVAILACPIGEIVDQAQFPATVAGLQRAVSWVARRTGGDLDGLWVIEGVGTYGARLARVVADAGYPVVEAGRMNARANRGVGKSDPLDAHRIAQSVMAIDVAKLRRPRADDGVRAAVRVLVAARDQISGERTAAVNALTALVRVADLGIDARRPLTAGQITAMAGWRTRAEDLAAAVARAEAVRLAKRVIAAERELAANTKQLTDLLNRSPARVLLDQPGIGPVTAAVAFTAWSHPGRIRSEAAFASLAGVNPIPASSGNTVRHRINRGGDRRLNRALHMTTVTRIRMDPRTHAYVEKRTAEGRTPKEIRRCLKRYVARQIYRQLNAAQTRQTGQSLQSVETLPSG

SEQ ID NO: 314132 - protein, 475 aa, unidentified
MNVNGKRKKNQVVTANIFEQQELLKKAEVIRENLTASTWRELETNGKFDKNEKLSFISDDMLILGCDVGSEIHYLRAIDTRGRELSKSAFSFSNESEGFQSAKEWAVKIAAEHNKNQIVLGLEPTGHYWFCLATWMISNGISVVQVNPYAVKQTKEVEDNSQMKDDRKDPKLIANLVKDGNFGMPYLPEKLYAELRRLSMFRDQLNEDRIRTINRMHREMKIYFPEYKDALGKVDGAFSLELLKQAPFPEDLTALGEDGIGQIWHDAKLRGRGYSRAGAILRYAKTSVGIKDGAAAGKTAVKWFVQKIMELDVELAVIEEQINQKCQEIPHAGNILEISGIGENTLSGILAEMGDISRFDDVKEIQKLSGLGLVACSSGKHKGETKISHRGRKRLRYWLFQAAKSAVAHAEEFKELHMYYTTRADNPLKKMQSLIVIACKLLRIIYTILKNGTVYDPKKMLMDIRRPEKKEAIAA

SEQ ID NO: 314133 - protein, 457 aa, unidentified
MNPKRSKPKNDRTMPMIHPNAAAIDIGATMHTAAVRADRTPEPIRSFGTFTTDLHRLVDWFTECGVETVVMESTSVYWIPIFELLDARGFAVFVVNARDAKHVPGRKTDVSDAQWLQRLHSYGLLRASFRPKGQIAELRAYVRQRERLLEYAASHIQHMQKALTEMNLQLHHVVADVTGATGLRIIRAILAGERDSKVLACLRDYRCHSSAEAIEKALTGNYRAEHLFALEQALALYNVYQDKASACDARIEAVLKELSISRGRDAGPLPSPRRRLHGKANGPDFDVRAALFKLLGKDLTQIDGLGSYLSLRLIAECGDDLSAWPSAKHFTSWLCLAPSNKISGGKVLSSRTRRSGSRASALLRLAAVTVGRTDTALGAFYRRLSTRIGKAKAITATARKIAVLFYNAVRHGMEYVDPGSSYYETRYRTRVVENLHRRAKAFGFVLLPLESKAGAVS

SEQ ID NO: 314134 - protein, 337 aa, unidentified
MNYCGIDLSSKSSDISIINGTGTQLRRREIATEAGDIGEALKDFGVLKVIIEAHPLAETVAGIVEELGHVAVIIDARAAKNLMDAMKKTDRRDAQTLAEIGRCGWYVEVHRKSAAARQMRSILQARQALLKSNKALASSIRGLLRSHGIRLGKVSKGEFVAQVKKVTAQEAPGILAALSGMLDAWVVTGERAEQIKKAMVKECKQDEISAYLESAPGVGPLISTAYRATIDDPHRFKRGDEVGDYLGLAPRIYQSGEVEYRGRITKQGDALLRSLLVEGAHVLLTKGRDCALKRWGLSLEKRKGSAKAKVAVARKLAVLLWRLWKDEKMFEAFPQTV

SEQ ID NO: 314135 - protein, 365 aa, unidentified
MEKYLLKSRSDHQSRPKPGEVVYIGIDQGLNKWVYAIRWGGEQRQAFAGPSELSHLQALVKRFAPNEVQIVHEACGFGYQISRWAQDCTDQVVRVTVVPPSTIEQKPGLRVKTDRIDARNLARKLEQGELKAVWVPSVEQEQARQISRTQEQMAKERRRAQIQVRSLLKAHGYKAPQATKSWSSYVRWLEQLSLPEALQQCVRLLVGMRDHAAKSEQELMRQLRKMSRAESYAKPVQAWTNEVVGVGWLSAIRILLELGDVERFPRRGSLPHYLGVTPSEYSTGDDVQRGAVLRCGPARVRSWLIESAWVAVRRDPQLKELFYRIAGPSPSSTQRKVAIVAVAHRLAIKLRALWKQALAESEAVA

SEQ ID NO: 314136 - protein, 527 aa, unidentified
MGRLRRAMTVSTLVLIARLRAWFQVCRLIPWRRPAGMAACWLIPFRRLRFFMPLLGRRHTIQMKKKPQNHKNKRTKIKLDSGLPMINPDAAGIDIGHREHWCAVPVDRSAKPVQRFGTFTEDLEKLADWLKGCGIKTVAMESTGVYWIPAFQILERRGFEVRLVNARQVKNVSGRKTDVLDCQWLQRLHSYGLLNASFRPADEMCVLRSYLRYRDELVCARSVQCQHMQKALQQMNVQLHQVLSDITGLSGLRMIEAILAGERNAEKLANLADRRVHASKATIQRALKGDYRSEHMFLLKVAFELHGTYEKKIQECDEQVIAEMAKLPARVDPKQKPLPPRKPGRAPIRDMVAGRDLREELYRWTGVDLTAIEGIGVLSAQVVLSEIETDMSRWRTEKHFTSWLGLCPDNRVSGGKILSSHTRHVINPVADALRIAATTLERNKSALGAFYRRMKGRLGPASAITATAHKLARLIYRLLKHGDAYVRQGMDIYEQKYRERLIHNLKKTAASFGFQLTETKELAQGVS

SEQ ID NO: 314137 - protein, 413 aa, unidentified
MAAVMIGVDPHKGSHTAVVIGRAEVALGQVRVRACAVQAERLLAWAAAWPERTWAIEGAGGLGHLLAQQLVAAGERVLDVQPKLAARVRLLAAGDVNKNDPNDARSVAVAALRSAACPPVRAEDHATVLKVWAKRHRDLSRSRNQVVCRLHAVLCELVPGGVSKQIYAAAAARILDQIEPAGAVQAARRELAGEFLADLRRIDAQRRDIRKKLTAAVRASGTTVTEVFGVGPAVAAAVIGDVRDISRFPGRDRFAAYNGTAPAEVSSGNRKVYRLSLRGNRRLNHAIHMAAVTQIRYGHTKGRAYYDKKIAEGKTAKEALRALKRQVSDAIYQHLKADARRAAAGPGGHPGNGSVASAAGSHPEHRLFGQATPGPEPSLRSRPGPSKGARRTGTPRQTRPLATGGRPGPKRYR

SEQ ID NO: 314138 - protein, 341 aa, unidentified
MNPTELFIGIDVAKAQLDIAVRPTGETWTSPTDEAGLTALVQRLQPLRPTLIVLEATGGWEIPIAGALATAGLPVAVINPRQVRAFAKATGRLAKTDRLDAQVLARFAEAMRPTPRPLPDALTQELTAVLARRRQLIEMLTAEKHRLSRALARVQPDIRTHIAFLEKRLGRADDELVTLLRSSPLWREHDDLLQSMPGVGPVLATTLLAELPELGTLSRRQIAALVGVAPLNRDSGTLRGTRRIWGGRAPVRTALYMGALVASRCNPILKAFYHRLLAAGNAKKVALVACMRKLLAILNAMLKHRRPWCPDLLTGPRSSPVRESHPAALAVPEPTMGVPVS

SEQ ID NO: 314139 - protein, 344 aa, unidentified
MKYFAGLDVSLEETAICVVDESGRIVKEGRAASEPRALCEVLGKVDLPLERIGLEACSLTAWLYDGLREGLPAICIETRQANAAMKTMPNKTDRNDARALAQIMRTGWYRQVHVKSQQCRLWRSLLVARRTVLNEMRTIENVVRSILREAGIKLGTPSRTAFGGRVRELIGTDTVVITLVEPLLAIVATMLRELGQLTKQVLNIARQERVCRRLMSVPGVGPITALAFRATIDRSDRFRRSRDVGAHLGLTPARYQSGETDIQGKISRCGDELARTALYEAAHSLLVRSKKWSSLRAWGMNVAKRRGMARARVAVARKLAVILHRMWSDATEFRFGKAPGHVSA

SEQ ID NO: 314140 - protein, 373 aa, unidentified
MYYTTLFVGMDVHKENFTVCCYDMIQDKIFYTQKLEPDYNQILKYLTFVRKAFRKDVDFVCGYEAGCLGFTLYHQLTQHGVSCVILAPTTMMKPAGKKKIKTDKRDAALIARCLASNNFSPVHVPTTQDEEVKEFLRMRDDHRLALKKVKQQILAFCLRHGYSYTATKNHWTGAHIAWLRSLKPEGLYSEILSEYLLTFQALSDKLERLDQRIEELAAMKAYSEGVKKLSCFLGIKTHTALATMVEVGDFHRFASANQFASYIGLVPGEDSSSESVNRLGITKAGNAHVRTLLVEAAQSYTKGQVGYKSAALKKRQAGNTSEVIAYADRANERLRRKYYKMILSKSKRTNVAKTAVARELACFIWGMMTDRIA

SEQ ID NO: 314141 - protein, 352 aa, unidentified
MNSVKYVGMDVHKGITVIVVLNAAGHVESRTQVKTKAENFRDFFRGLSGRVEVVFEEGAHSAWLYQLLKPLVAEVTVCDPRHNKLIGDVNKSDDDDAETLARLLRMRELKAVYKGDCEQQKLKELCRAYKNLVEDTTRAQNRLKAIYRGRGLDSSGTEIYRPERRADYLARLSDEAARFRAESLLDQIESLRELRKQAKSRFLEQARKHPDYPILASVPGFGAVRVGELLAIAITPDRFRTKRQFWPYIGLAVVTKSSSDYKEVEGRIIKSHKVSTRGLNWNHNPRLKQVFKGAAQSALHRGEIRAYYQRLVERGTRPALARVSVARKLAAITLTLWKRKEKYDPKKITAQN

SEQ ID NO: 314142 - protein, 412 aa, unidentified
MEGETVIAGVDTHKDVHVLCLLDGLGRKIWSGSFGADPEGYDRLAEAIGDPGSCMVVGVEGTASYGAGLTRRLVELGYNVVEVLRPKRDKARPGEGKSDPLDAERAARKAASGRGCSVPKSQDGWVEAVRQLYVARRLAVATSTSCVACAKSMLTTAPSALRERFRGRERPKDLMPLLARGRKAGDALEESVLASLRSVAAVWKEARSQVESLDERIRALLEANAPALLGVEGCGTTTAAALVVAAGDNPGRLKGEAAFSMMCGASPIPASSGKTDRHRLNRGGNRQANWALYEIAIKRMAYDERTRRYVARRTSEGKSRREAVRCLKRYIAREVYRVLMDPNPDGAAPEGPELAKMRKAMRVTQKKAAAELGLSAATLGHLERGKRRSTKLERMYYELLCELERTLPQTAS

SEQ ID NO: 314143 - protein, 367 aa, unidentified
MKKVSTAAGKATKNFSQPKLTIGLDLGDRSSWYCLLDEVGEVLQEQRLSTTPKAIREVFGAMPRCRIALETGMHSPWVSRLLSELGHEVIVAHARSVRLIGESRKKDDRLDAQTLARLARIDPQLLCPVKHRSAKAQADLTVIRARAGLVRARTSLVNTARGLAKSYGERLRGCNVRNLNPEKAEGLSPELQRALQPLLAGIESLSERIRECNERIEQLAQQSYPQVALLKQIKGVGTLIALTYMLTLEDPHRFRKSRDVGCYLGLQPGRRNSGQSEPQMHISKEGNPYLRTLLVQGAHHILGPFGADSDLRRWGLKLAERGGKNGKKRAVIATARKLAVLLYRLWVSGEVYEPLRNSHQTAMPAAA

SEQ ID NO: 314144 - protein, 477 aa, unidentified
MASFRQRRRLPDITEAMTITNPLAAGIDVGSRFHAVAIPPHLAAESCRTFGCTTPDLQELAAWIHQYGITTVALESTGNYWVQPLRILEAAGFHVILVHPAYARQAKRTKYSDLDDSVWLQLMHSYGLLPASFQPPALFIRLRCLWRHRDRLIAEQGRCLQQMQDALELMNVQLHKVLSDIAGLTGLAIIRAIVAGERDPAHLAKSRDWRVKCSSEDLIKALTGDYREEEVFILAQRLARYDFTQQQLTELDAQIERRLAALQALCPPPPVCVPSASPAPAALPTTGKPNVAPPLTPRKSRSKQEPTAYDWHARVVALCGIDLTRICGLSVLLVLALIAELGVDLSPWASAQQFTAWLGLAPDHRVTGGKVIKRQTRRGKPHAAHFFFLAALAVAKSHTPLGEFYRYQKARMGPRKALTATARKIAILYYHLLKYGPAFVEEGQRRLAENAEGRKRRRLQRLAAELGVQIVERPCAA

SEQ ID NO: 314145 - protein, 381 aa, unidentified
MKKDIRHVGLDVHAETVSAAVAEADGEVRWLGTISNRPEAVSRFVRKLGARENLKICYEAGPTGYVLYWQLTRMGVACTVVAPSLIPTRPGDRVKTDRRDAEKLARAFRSGDLTAVWVPDEAHEALRDLVRAREDATQDRLRARHRLQKFLLRQGRRAPEGMKSSSQKQLEWVKAHVHFDQPAQEATLVDYLHEVEHGDERIARLERAIEDAVGKAPERMRAVIQALQSLRGVAGITATTIVSEVGDLRRFLRPRQLMGYCGLVPSECSTGSRTRRGSITKTGNAHLRRVIVETAWCYRHRPAVGVPLKRRQQGQSEEVKQIAWKAQHRLHSRFWRLQARGKPSQQVATAIARELLGFVWAIGVKVESAPVPSGTPRRKAA

SEQ ID NO: 314146 - protein, 339 aa, unidentified
MKELSVVGIDLAKSVFHVHGTDETEKVCVRRKLNRSSLLKFFATLKPCLVGMEACGGSHYWARELVKQGHEVRLIPPQYVKPYVKTNKSDAIDAEAICEAVTRPTMRYVDIKSEDQQAILLIHRDREGLVRDRTALINRIRATLGEFGLAVPTGPRNLHKWFEQRYSEAESRLPVITAQQVHRMMDRLKFIESEVADLDRQIELQGQRDETVKRLEEIPGVGRLTASALVATVGRAQSFKSGRQFSAWLGLVPRQHSTGGKSRLIGISKRGDAYLRRMLIHGARAVLRHMNPRRPVTAWLRQLQTRCHRNTVIVALANKLARIVWALLTKGERYQEVTA

SEQ ID NO: 314147 - protein, 344 aa, unidentified
MVTIGIDPHKASLTAVAVDPSGRPLGRRRLLVHAGTLGQLTAWATGWPTRRFAVEGAYGLERPIAQQLAAAGEQVLDVPATLAARARLLSVGGGRKTDAADAASVAQAALHFATLRTVAAEDHCMILRLLAERRGDLTGERTRILNRLHGLLRDLIPGGAPTNLSAAKAAALLRGVRPATATAACRRELARDLLADLRRVDARLKVNMVQVRDALAATGSTLTEVHGLGVVVAAKLLGHVGDIGRFPSQDHFASYTATAPLDVSSGNQQRHRLNTGGNRQLNAALHTIAVCQARDPGPGRRYYLRKLSEGKTPAEARRALKRRLANVIYRRILADQQRHQPAGG

SEQ ID NO: 314148 - protein, 194 aa, unidentified
MNNTLSQKLAMVTPETLIVGVDVAKHTHYAQLINFRGEALQKPFPFQNTTSGIGNLVHQIKMNQLKHGLSCVLVAMEPTGHYWLPLACALLEQGIAVVMVNPHHVKKAKELDDNSPTKRDDKDAGVIARLTQLLKEIPHASYLLTIPGMSTVQVANIISEAGDLDNYSSARQLIKLAGLNLVENSSGSHKGPCI

SEQ ID NO: 314149 - protein, 410 aa, unidentified
MERVIERCCGLDVHKKTVVACVRVPGRTSAREQQVRTFGTTTAELLALRDWLGGYGVTHVAMESTGVYWKPIFYVLEDAFTCVLANAAQIAQVPGRKTDVKDCAWIAQLLEHGLVRGSFVPPAPIRELRDLTRYRAALIGEHTRETNRLQKVLEDAGIKLASVASDVLGVSGRAMLDALTQGTHDPDVLADLARGALRRKLPALRQALTGRFRPHHAFLVSQVLAHLDYLDEVIEALSTHLDEVMAPVAEEVSRLDTIPGVNKRTAEILIAEIGVDMSVFPTAGHLASWAGLCPGNNESAGKHRSGKIRKGNRWLRGALIQAALAGGTRATKGAFAARYRRVMRHRGHKKAVVAVAHAMLVAAYHLLARHTTYHEPGADYYERRHAERVRQRAVQLLERQGYRVTLEPAA

SEQ ID NO: 314150 - protein, 343 aa, unidentified
MYFIGLDVHKKTISYCVKDAAGRVYQEGKIGSTRWELDEWIRTMPQPRTIAMKATIFTGWIYDHLLPHAEKVKVAHPVMLRAIAAAKKKNDRIDAGKIADCLRCDFLPECHMASTEIRDRRRTLRYRSLVIRQMVQMKNRVSGLLMETGVSYNKQRLHKVGYFAELMTTNEDVQESIRPLLKLSRDMIRRSQKLDYALVSSLERDPLLKERLRRLRTVPGVGPITALTWALEIGDFTRFSSIKQAISYCGLCGDEKSSADKVMRMPISKQRNKHIQRVLIEAAKLAPRESPELAVIRARELERGNPNRATLAVARKMVSYMLAVERRNQDFLPAEEFSRTAAA

SEQ ID NO: 314151 - protein, 342 aa, unidentified
MTVKTVGLDLAKDVFQVHGISENGRVIFNKAIKRAKLLAFFQTLPLCTVGMEACGSSHHWGRQLRKLGHDVKLMPAGYVKPYVKRGKNDAVDAEAICEAVRRPTMRFVDIKTEDQQAILSIHRTRDLAVRQRTQLANMIRSLLREFGHILPIGIEAVTAFAKRHLGGDHLDMPEIANGMLGIQCYQFIGLNERIEGYSKMIEQHALLNTLNTDARRLMRMPGIGPITASAIVATIGDAKQFQTGRDLAAWLGLTPLNKSSGGKERLGKITKQGDRYIRKLLVVGMTSRAVMAKRSPEKVDLWTAKIIADKPFRLATVAMANKAARAIWAMLTKKQEYRQPAF

SEQ ID NO: 314152 - protein, 424 aa, unidentified
MKVTYQTCCGVDVHKSFLVATIVKTTGGIEPSYQKKRFSTFNNSILEFKQWLLENDCLDVCMESTGKYWVPVFNILEDEINVVIANPKWVKAVKGNKDDTKDSKWIGDLFRLGLVKGSYIPCKTVRILREYTRYRYKLVSCRSSEKNRYQNALTVCNVALDSVVSDIFGKSSTSIIDYLLDQSGTSINHEEIASKLLRNLKSKEDAVIESVEGYQMTDTQKYRMRLVRAHMDYITAEINDVDKMIENMISSNPDFENAVQLLCTIPGVKRNSAITIISEIGTDMSQFSNSKRLCCWAGLTPGSNESAGKKKSVRITRAGVYLKPALVQCAHAAVKSDKSPYYKKKYESLVKRRGKKRAIIAIARMILTAIYQMLSTGEEWNPSDLYKIDMPVALVEKQKAKAIRQAKKLLQREGILPPDKPLAS

SEQ ID NO: 314153 - protein, 338 aa, unidentified
MKFYAGIDLHSNNLVLVILDSNDKVIYSKRLPNDVQSILGVLAMYKEQIEAIAIESTYNWYWLVDALQAEGYEVRLVNTAAVVVYDGLKYSGDKSDARHLAHLLRLGLLPCGYIYPPEPRALRDLARKRAQLVRQRTTQLLSIKNLLARNCGQDTSSAVIKKWTEEQLTQLPLLPEQRMAIKANWAVMQALEQQIDVVESELLRQLKPNKEFQLLKTMSGVGDILSMTIYLETGDIGRFDSCGQFASYARMVDSKRESNSKKKGEGNRKCGNRYLCWAFMEASHFAIASNEDIRRFYQRKCSKSPKVVAMKAVAHKLARASYNMLKDGVEFDVKRAFS

SEQ ID NO: 314154 - protein, 478 aa, unidentified
MARKEQTQPHLKAVPMLLHESLYVGVDVGKRRHVAGFVSQTLLQRYERFEACPALAFEQSREGFRTLIDRIRELVPLEQAYLLLESTGHYHRALVQYLQELDIPVYIMPVQKRPVGLIKTDKRDALGLANQLYNQLELGVQLADKTHLVRRLLPASESALQLKGWMRHRYELMHESTQRKNKLTAICDELFPELTWVLKDPNGTAALKLREHFPTPHAIATTPLTALAQHRVSSHPSMEQLVELQRLASQTIGTKDIVRQRGLVLEQQQLIRELRMLQEHVQQLDVEIVKLVEQSREGQILTSMPAIGPIAAAAIMAAIGNVLNFENGATLKAYFGWAPKREQSGTTLDRDQLARTGTRTMKQTMFLVVANAIQRKECEWAKLYERLVPRMCSYDERKRAYRGKLKVLVRIAGQMTEMIYALLKQDAEILSKVPPGQEPPPPILNDPELHRRHRNGEYRPLKHTPPQRKVLRLPERTT

SEQ ID NO: 314155 - protein, 405 aa, unidentified
MSNNVFVGLDWAVQTHAVCVIDAEGRVLDRFEVVHDRDGLAGLMRRLARFGSRLRIAIERPSGLIVDALVEAGHEVVPIHPNAVKASRPRYRSHGGKSDSSDAYLLADLLRTDGHRWRALCPQSDAIKALRALVRSRDDLVATRVALGNQLRSALEASWPGAACIFADITSPIGLAFLKRYPSPTSAARLNERRLQAFCRREHYSGRRSAAELLARLRSGACALGGPAVVEAMAQVVRSLVAVLQPLVDQIVELTRRIERTIEELPDGQIIMSFPRAGHICAAQILAELGDVRERFPSAEQLAAEAGAVPVTYQSGKTRSVSFRWACNHRLRRAVTCMADNSRHANAWAHAIYVAARARGCDHTHAVRILARAWLRVIWRAWTDRRTYDPELHGAAAQFVKASGG

SEQ ID NO: 314156 - protein, 402 aa, unidentified
MNAVGIDVSKGKSMVAIMRPFGEIVSTPFEIKHTSSDINSLVKLIKSIEGESRIVMEHTGRYYEVLAHQLSEANLFVSAINPKLIKDFDNDSLRKVKTDKADSVKIARYALDKWQNLKQYSVMDELRNQLKTMNRQFGFYMKHKTAMKNNLIGILDQTYPGVNTYFDSPARSDGSQKWVDFASTYWHVDCVRKMSINAFIDHYENWCKRKKYNFSQSKAEEIYGKAKELVPVLPKDAITKLIIKQAVDQLNSASTTVESLRTLMNETASKLPEYPVVMAMKGVGTSLGPQLMAEIGNVSRFTHKSAITAFAGVDPGVNESGTYEQKSVPTSKRGSADLRKTLFQVMDVLIKTHPQDDPVYQFLDKKRAQGKPYYVYMTAGANKFLRIYYGRVKEYLASLPES

SEQ ID NO: 314157 - protein, 369 aa, unidentified
MDKDTTYVALDDSKRKIVAGILRPSDTQPELREIANDARQIRRLFERLKREGPVAACYEAGVSGYDLHRQITGLGVACAVIAPALTPRRPGQRIKTDRRDAAKLVRLFRAGELTAIHVLDESEEAVRDLVRCRDDIRRDVLRWRHRVLKLLARHGRAYLTGKNWSHAHWRWIREQRFELPPLQRAFEATVFALEQALARQAELDKELEALAATAPYREPVGWLRCFRGIDTLSAIILLAEVVDFQRFRRPRELMAYLGLVPSEDSSGETQRRGALTKAGNSHARRVLVEAAWHYRHRPTIGRALANRSQGQPDEIVSHAWRAQQRLHRRYRHLLGHGKRTPVAVAAVARELVGFIWAAMTRHESRRQAA

SEQ ID NO: 314158 - protein, 425 aa, unidentified
MNKIYDFAATIGWDWADLKHDLYLHPADGSKAEHLVLEQTPEALHEWVAKIRERFAGRPVAICIETSRGPAISALMAYDFIVLFPINPKALKNYRAAFSVSGAKDDRSDALLLENYVRFHHDKLQALEPDTTLTRTLAGLVEIRRQAVDERTRLVEQLHSVLKTYYPLAEELLGNLLTKPLATEFLRRWPDLESLKKANAATLNGFFLKHNCRNLKLIQERIDTIAQAKALTTDEAIILPARLRAQMLVALLKPLHSYIGQLDRQIKQAMDKHPDAHIFRSLPGAGPCLAPRLLVAFGTNRNRFRNAAEVAQFYGIAPVVRQSGTSKTVHVRSRCPKFGRQSFHENAGCALKEDWASCFHAQYKKRHGGRHHQANRSLAFKLIRIYFACWKKSQPYDPQRYLESLRKNGSPHYQALEKLELAKCE

SEQ ID NO: 314159 - protein, 391 aa, unidentified
MVCVGIDVAKDKHDCCILDSDGMVRADCFTIPNNMDGFKQLLQTIRNCTKKSDKIKVGLEATGHYSYNILGFLLDNDLAVYVMNPLHTNLYRKSLSLRKTKTDRVDARTIATMLLSDVDLKSYTDIAYHNEELKSLTRYRFDKVQERAKLKQSVSRLATILFPELEGLVSSIHGTSIYALLSEYPGTKQISEVHLTKLTNLLTTASKGRYGKEKAIQILEAARASIGSVMPAKSLELKHTIKLIQELASEIDEIEDSIQKIIDELNPPILSIPGMGVNSAAVILAEIGDFSNFSSPDKILAYAGCSPSTYQSGKLTNCYAHMEKRGSRYLRHALYNATKYVCYWNPVFAEYLAKKRAEGKHYNVALSHAMKKLVRLIYALQKSGKTYLTAA

SEQ ID NO: 314160 - protein, 362 aa, unidentified
MSDGSKDQPKVTAGLDIGDRYSYLCLLDTENGEVLEEGRLRTSPEALKRRFVSERPPMRIAIEAGTHSPWVSRVLEECGHEVLVANARKIRLIYTNARKTDKVDAENLARLARLDPKLLYPLKHRGEESQAHLALIRSRQALVGSRTQLVNHVRGAVKSFGARLPKCPARSFHNRASEHIPEALMPALRPLLETIGSLTERIRVYERQLEAISKEHYPHETDLLRQVEGIGPLTALTFVLSLEDPHRFEKSRSVGAYLGLVPSTDRSGNRDPQKRISKEGDEMLRKLLVGSAHYILGPFGSDSDLRRHGEKIASRGGKNSKKRAAVAVARKLSVLLHRLWVSGEVYDPLHNAHRRPEREEAA

SEQ ID NO: 314161 - protein, 364 aa, unidentified
MDTHKKQHRVALVYPNDEQIIEFSVKNTPAEIRKMVRRIKRNAPGEVKFCYEAGVCGFTLQRRIEALGCKCSVIAPSLVPRKLGERKKTNRRDAKKLLGLFMADMLTEVYPPDEQQEAARELTRCREAAQENLKRIRHQLQKMLVRHGYVFIDGQHWTQKHLRWLEAVEFDRPLLQEVFDCYFTEMRHCLQRVKTLDRELEKLAQSEAYREVVGILRCFYGIETLTAISIIAEVFDFGRFASARAFMSYLGLTPSESSSGEKEHKGPITKTGNKRARRLLTEAAWHHRHAYTVSKAFSKRREGQPQWAIDIADRAGVRLRKRYHRLVNRGKLPCKATTAVARELAGFIWLALIEYEARKKRKVA

SEQ ID NO: 314162 - protein, 357 aa, unidentified
MQKNTISFKGQKIFIGIDVHKKNWDVAVAPEVGVIKRHPQKASAHELFVFLKKHYPDGDYLAVYESGFTGFSTYYALKDVGINCIVIHAADVPTTQYEEVMKTDKVDSVKLARTLKAGLLKGVYVRERDNLDDRSVIRIRKTIQKDLSSYRIRIKHLLHNNGVSIPERFEKSGSYWSRAFMRWLKEDVNLLSSSKNSLNLLISQVEAIRSTLLESTLLMRELSQTERYKKNVDLLTTIPGIGVTIAMCILTEVYDVSRFRNEREFASYLGLIPTTHSSGEKTIHGEMTFRGNKQLSTMVIEAAWVAIGQDVGLGSLYQHYRERLKPQEAIVRIARKLSNVIFAVLKNRTEYVPYVDN

SEQ ID NO: 314163 - protein, 345 aa, unidentified
MRLYAALDVSLKKTAVCVMDHDGTLVREVEVPTCPDALAAALRTYHGQLEPVGLEAGPMSEWLVRGLAGLGVEAVLMETRQAQKALSAMTVKTDRNDARGLAHLLRMGWFRPVHVKATTAREQRARLAARTTMVRQLQDLENSVRGLLRGFGLRLATLRRGSWSDAVRALLDGHPSLPGIVAPLLQAREALREQLAVLDRQVRDAARDDAVCRRLMTVPGVGAVVALTFRSTIDEPARFRSSRSVGAFLGLTPKRYQSGETDRAGAISKIGDASARVALFEAAHVLLTRVTKWSALKTWGVRLAQRRGAKRAKVAVARKLACVLHRMWVSETDFRYGTPAVAMEG

SEQ ID NO: 314164 - protein, 343 aa, unidentified
MYYIGLDIHKKTISYCVKDASGQIHREGKIGSTRCELDSWIKTLPQPRMIAMEATIFTGWIYDHLLPHAEKVKVANPLMLRAIAAAKRKNDRIDASKIADCLRCDFLPECYMASTEIRDRRRTLRYRNLVLKQMTQMKNRISGLLMETGVSYNKQRLHKLGYFMELMSCNEEVNESIRPLLKLSRETVVRSQRLDYALVHSLERDPLLAERLKRLRTIPGVGPITALTWALEIGDVSRFQSVKQAVSYCGLCSAERSSADKLVRMPISKQRNKHIQQVLVEAAKLALRYSHELALVYERERLRGNKNRATLAVARKMVAYMLAVERRQQDFVPVGELGGTAAA

SEQ ID NO: 314165 - protein, 481 aa, unidentified
MNDVLEKFNVENGEEVRPLHDYGVGIDTHRDFIQVCVLVREGGTIKMYESEHRTTWEGLVGAGRWTRDMIRGKSIPTTVPEPLRYAIESTSTYHLPVVKAIGGAPSIINPMLAGSSKRKTDVLDARLLSYQSMTGLWPESFVIPPEIQEFRLLMKQRDYNVRACTALTNRINNYILRFGHTLGSHKSVRSMENRAVIEDMCGDGYVYTDNYPGTTAGQFICPDGLPREARKIIEDMYMEYDAHDEKAGNYQRLAVEYARKTDWETDHGHVKGDALIKNLLTVPGVGELTALVWLCEIVTPLRFRTPSQLAAYCGCDPSLKVSAGKVTSQTRRKGNSKLHSQLVRTAGACINRHSEPFGQWGYAISKKHVKGGYKKASGAVARRIAVSLYHVHKQNEPFTYEKYNFHKIDVPYVQASDMGFSKRLEHMLASNGLADSKSITESYTTGKIHELKGFGKKSAQDVNAWIQDNKNDKSKRRRNNG

SEQ ID NO: 314166 - protein, 439 aa, unidentified
MIGIDLAEDKQAIAVIDHDVRVLARKTVRVKAFRLGEALDWAVGQARAKGFASVTVACEPTGPRWLQVQRLCAERGLPLVCIQPLMSHIAREQQDYTTHKTDEADCVLIARLAVELHCYIPEALDETWAHLRHLGRRRTQLITAATASGQRILDFLSVAWPTVTETCADPLKSVTWLAALQVVTARCGADPGKLAVMGTEAFTALVRGAVAGWGGKKAWGPITRRVFAALTSTEGVVVSSRRGLLRRIADELGDLQRTRAQLRAVEADMAAVLGELGLSRLADIPALSAVGAAAILAETGDPRRYDSSSSLVKHAGMSPSDNASGAFYGDAHISRRGRPGLRLTVWRAVWPMLRFNPVMAAKYAAMTQAADDAAAAAGTGSRQAGAAAATARARHAKARVACAASLLRWIYCLVIHGTSWDPGAASGPASGRPALAEAA

SEQ ID NO: 314167 - protein, 459 aa, unidentified
MAQRKPKRSRSKPTLPPQLAAVNLHAAGIDIGADAHWVAVPSSDDPQPVRSFGAYTADLEALADWLATCGITTIALESTGVYWIPLFELLETRGFEVLLVDPQQVQKIKGRPKSDRHDCQWIQRLHTFGLLSGAFRPADQICVLRSYLRQRAMLLTSAAQHIQHMQKALTQMNIKLQHVVSDITGVTGLAILRAILAGERDPATLAQLRDYRCKHDEATIARALQGNWRDEHLFALAQAVALYDVYHQKITECDQHIEAYLRTFADRSDGQPLPPPSRPRKRGGNQPGFAVREPLHRISGVDLTQIEGIDETTSLVILSEIGLDMTRWPTVKHFTSWLGLCPHHRVSGGKVLSRRTKPCANRAATALRLAAACLYHSQSALGAFFRRMKARMGAPKAITATAHKLARLIYTMLKDGTAYVRQGMDEYEQQYRDRMVKHMARRAKALGYTLVKAPEGNPA

SEQ ID NO: 314168 - protein, 452 aa, unidentified
MAKKGNRRCDALPVLHPDAAGIDVGASELYVAVSADRDPQPIRSFPTFTRDLHALADWLEKCGIHSVAMESTSVYWIPVYQILEARGLEVYLVNAQHVKNVPGRKTDVSDCQWLQYLHSVGLLRASFRPPGFICAIRSLWRHRSSLIQMAAEHVLHMQKALDQMNLQIHRVLNDVTGISGLKILDAILVGERDPLTLARLCHGGVKNSEDTIAKSLEGDYRPEHLFALRQSLAAYRYYQKLVVEVDQEIKHQLGELKTAATAESITPARTKASPYQRRRYEPKTFDLRGELYRIFGVDLTNVPGISAITAQTILCEIGTDVSRFRNASAFASWLGLCPEKKISGGKVLFTKSRRVRSRVATALRMGAQSLHHAKDYLGEFFRRITRRLGKPQATTATAHKLARIVFHLLSTKQAYNESVFHKSEEETLRRAEYRLRRQAAQLGFQIIPAEIA

SEQ ID NO: 314169 - protein, 341 aa, unidentified
MKDVSIIAVDLAKQAFQVHGAAAEGSVVFRKKLSRSQFLAFLSRQPACLVAMEACATSHYWGREIMKLGHTVRLIPPIYVKPFVKRHKNDAADAEAIAEAASRPTMRFVAVKSEEQQARAMIFRARDLLVRQRTQLINALRGHLAEFGIVVAKGPVHLEKLNDAIDELETGLPPMVREIGRTYLDQIAVYTEEIADLEKKLHAEAAGGEVTKRLQTMPGIGPVTALAIEAFAPPMESFRRGRDFSAWLGLVPLQKSTGGKQILGKTSKMGQRDIRRLLIIGAMAVVRWTARRGAPKGSWLAGMIGRKPRLVVAIALANKMARAVWAMLTKKENYWNPVAAA

SEQ ID NO: 314170 - protein, 326 aa, unidentified
MQGKDVSEQETMGKSNVGIDVCQSWLDVHILPSGVAFRIPNSSQGHRQLKRRLKDYDVALIVVEATGKWHRPIHRSLYASGYRVAVVNPLRARLFAEAVGLLAKTDRLDARMLAVFAMSLTPDARAPAPKTVDEIKELVQARLSAVDEQTALANQRTSVETAFLRRQLDRRLKGIAKDIGQLEVEILKRIKADDGLARRYDILLSIPGFGPVVTSTLLVCLAELGNCDHKQIAMLAGLAPLADQSGDRDGRRIIRAGRQPVRNVLYLAAVTAARFNRDMKTLYERLIALGKPKKLALIAVARKLVILANTLISENRPWMLHAPKHA

SEQ ID NO: 314171 - protein, 400 aa, unidentified
MDRIEHGWVGIDAGKGHHHVVLIDRDGRQLLSRRVDNDELALTGLIETVRDRVMEPTWAIDLADGAAALVIGLLLHRDQPVFYLPGIAVNRASAGYRGEGKTDAKDAAIIADQARMRRDLRRLQVLNEDIAELRLMTAYRADLAADRTRCINRLRSLLLGVFPALERVLDFTCHGPLVLISGFQTPTAIRRLGATRLLRWLERRGVRRPGRLATAAAEAAGQQTIQLPGEAAAASLVARLAQTILELDRQLADVDRKVAASFHTQQDAAIITSLTGIGDVLGAQFLAAVGGSLSGFASADHLAGYAGLAPTPRDSGYRTGNLHRPQRYNRQLQRVFYASAMISIQRSPASRAFYDGKRAQGKRHTQAVLALARRRVNVLWAMLRDHQPYQERRQPLILAA

SEQ ID NO: 314172 - protein, 308 aa, unidentified
MSDYTTIGIDVSKHFLDICILPTGETMHIANNKYGYKKIVTIFSKYENIFRIVMEHTGGYQKNIAEYLIQKGFPVSVVNPVRIRYFAKANGKRAKTDIIDALILAQYGLIHKPELTKNTDYNLEELRQMVHRRANLVEMLTAERNSLEKKPGTAETKSIKHIINVLEKEIQKITLFIREHIKNNPELKRKSEILQTISGIGAECAALLVSDVPELGKVSRRQIAAIIGLAPINRDSGMKKGHAFIQGGRRNVRCSLYMPTVVASTQCNPVLKEYYNRLVANGKPKKVAIIACMRKLVIFLNSLLAKNS

SEQ ID NO: 314173 - protein, 403 aa, unidentified
MNAVGIDVSKGKSMVTILRPFGEIVSSPFEIKHTSSDIHSLIKLIHSIEGESRVVMEHTGRYYEALAHQLSAADLFVSAVNPKLVKDFKNDSLRKIKSDKADSVKIARYALDKWQSLEPYSITDELRAQLKVMNRQFHFYVKQKTAMKNNLIGLIDQTYPNANTYFNSPTRSDGSQKWVDFVSTYWHVDCIRKMSLNAFVEHYQNWCKRKKYAFNKSKAEEIYTKTKELVPVFPKNEITKHIIRQAIDQLNSTSVTVETIRTLMNETASKLPEYSIVMQFKGIGPSLGPQLMAEIGDVTRFTHKGALTAFAGVDPGVNESGSYAQKSVPTSKRGSSNLRKTLFQVMDVLIKTMPQDDPVYQFMDRKRTQGKPYYVYMTAGANKFLRIYYGRVKEYLSVLPDPS

SEQ ID NO: 314174 - protein, 366 aa, unidentified
MKKISTVRVNGNMIFKGHKLTIGVDLGDRWSCYCVLDEAGEILLEQKVATTPEAMKQIFEKIPRGLIAMETGTHSPWVSRLLKELGHAVLVAHAQKVQLITKSNRKDDRHDARTLARLARIDPELLGPVRHRSAKAQIHLTVIRARAELVSARTGLANAARGLAKSYGERLRKCGTQQVSRELAAELSVELREVLEPLLKEIESLNERIKEYDVRMEQIARESYPQVELLKQVKGVGTQIALTYVLTLDDPQRFPKSREVGCFLGLRPGRRDSGESHPQMHISKEGDPYLRTMLVQGAHYILGPFGEDSDLRRWGLKLAARGGKSAKKRAVVAVARKLAVLLHRLWVSGEVYEPLRNSQKAMRAAA

SEQ ID NO: 314175 - protein, 307 aa, unidentified
MQAVTTIGLDIAKSVFQVHGVDAEGKVLIRRKLKRRYVLAFFQKLPPCLVGIEACATSHHWSRELKALGHTVRLMPPAYVKPYVKRQKNDAADAEAICEAVTRANMRFVETKTPEQQSCLMLHRTRHLFIRQQTSVINAIRAHMAEFGIVAPVGRQGVEALLEVAADGGDNRVPEVARSCLAALGAQLRALKAQILEFDRRITAWHRSNETSRRLDAIPGVGPALATALVASVADPKAFRSGRNFSAWIGLVPKQHSSGGKDRLGSISKQGAAQPVHCRSPRRDPLCQDPRHKASTLAYSLAGAASD

SEQ ID NO: 314176 - protein, 367 aa, unidentified
MKKVSTAATMQSRNISRQKLTIGLDLGDRNCWYCVVDEAGQIRLEQRVRTNAKALREVFGAMPRSRIALEIGTHSPWISRLLSELGHEVIVANARKVRLIGESRKKDDRLDAQTLARLARIDPELLYPVKHRSVQAQADLTLIRARAGLVRARTALVNTARGLAKSYGERLRSCNVRNLNPEKAESLSPELQAALEPLLNAIESLSERIVEYNERIENLAQQSYPQVALLKQIKGVGTLIALTFLLTLEDPHRFRKSRDVGCYLGLQPGRRNSGQSEPQLHISKEGDPYLRTLLVQGAQHILGPFGPDCDLRRWGLKLAERGGRNGKKRAIVATARKLAVLLHHLWVSGEVYEPLHNSSPTTVATAA

SEQ ID NO: 314177 - protein, 322 aa, unidentified
MSEGAGQGPVIGIDVAKAELEVAVQPSGDRWTAPNEPGGIRELVARLTTLGPMLIVLEATGGYELAVVGALATAGLPVVVVNPRQVRDFAKATGQLAKTDRLDAAILALFGERVHPPVRPVPDALHRELEAVLTRRRQLLEMLQAERNRLGQVFTAGVSVRRSLTRHITYLEKQLRETDTDLGVLIRTSPVWREREDLLRSVPGVGRVVATTLLAELPELGRLTRKEIAKLVGVAPLARDSGKQRGRRFIRGTRPQVRAVLYMGALVATRRNVVIATFYARLLAAGKPKKLALTACMRKLLTILNSMVRSQERWRVPDALHA

SEQ ID NO: 314178 - protein, 417 aa, unidentified
MLKIVFRKCAGIDVHSTQITVCIAITDNNDITFYETRIFPTFSENLRECRDWLLSKGITDACMESTGKYWIPVYNILEEKIHCVITHPKYVRTILGKKTDRKDAKWIADMFKHGLVEPSFMPPKDIRELRDLMRYRNKLVNIRTGEKNRFQNSLTVSNIQIANVLTDTFGKTAQSILTSVLENPNITLDDIRPLLRKNIKSTPEEIYKAIDGNFSKYQSSKMSICLSHYDAINICIDHLEQYILKLAINYSTEINLLLTIPGIREISAIFIIAEIGTNMDVFLDSKHLVSWAGLVPRCNESNNKKKSVKITKAGIYIKPLLVQCALCAIRESSSDYFKLRYESIKRRRGHKVAIIAIARLLLTCVYNILKTGEVFDDERCNKLIERNFKSHKKTYSKPEDMISYLSSLGYTITLSDN

SEQ ID NO: 314179 - protein, 453 aa, unidentified
MRVMYERCCGLDIHKSSIAACALITEKGKPQEETRRFGTMTGDLRELAGWLQQKGIRHVAMESTGVYWKPVWNILEPAGLELLLANAQEVKVVPGRKTDQKDSQWIADLHKHGLLRNSFVPPRAIRDLRDLTRTRAILTQEHSSICNRIQKVLEDANIKLGSVASDVFGVSGRAILRALMNEENDAEALANLSKGTLRKKIPQLRRALEGQVTPHHRLLLTEHWDRMEFLERQIADFEIQIADRMKPTPEEMALMMQDATEDAPAPLSPREEAIQLWMEIPGVGWTAACSMVAELGINMDQFPSAAHVASWAALCPGNNESAGKRLSGKTRKGNVWLRRTMCEVAWAASHTKDTYFAAQFRRIASRRGNKRALMAVAHSILVTAYHMLKHKRHYTELGADFFDVINRDKVRDRLVQRLSKLGFDVTLKSKGTLESVDHLADNSHPVVPASPKS

SEQ ID NO: 314180 - protein, 347 aa, unidentified
MITIGIDPHKASHTAVALDANGVTLSELRVTADRSMLAGLEQWAAAWPRRVWAIEGASGLGRLLAQQLVAAGESVVDVPSALAARSRVLARGHGRKTDGIDARSVALVAQHCSDLHTVAADDHTAVLRLLSDRRDELTGERRRTINRLHRLLRDLHPGGASRQLSADRAARLLAGLRRSGPVDQERKAIARQLIADVRRIDRALHENRRRCAQAVAASGSNLTEIFGISDVLAAKILGHTGDVTRFPSSDHYASYTGTSPVEASSGERTRHRLSRAGNRSLNHALHMAARVQVMHPGPGRAHYQRKRAEHKTSTEALRSLKRQLAKVVYRQLRADHHRVQPSPPPQT

SEQ ID NO: 314181 - protein, 341 aa, unidentified
MKTSRTVVGVDTAKRVFQLHWVDMETGEIVDLKLTRAKFLDHFAALPPCVVAMEACGGSQHWARRLRELGHEPLLLPAKLVRPFVTGNKNDAHDARAIWTAVQLPGVKTVAIKSEEQQAVLALHRMRQQLVKFRTAQINGLRGLLTEYGEVMPQGRAGMRRDMAGILERVSEQLPAMVIDTLREQWARIGQLDEEIGEIERRIGVWHRDNADSRRIAGIPGVGVLTATALVAAMGDPAAFRSGREFAAWLGLVPRHDGSGGRVRMLGISKRGDRYLRCLLIHGARSVLTHSKAPPAWAVRLAERRPLNVATVALANKTARTIWALLAHDRAYQANFVNQAA

SEQ ID NO: 314182 - protein, 393 aa, unidentified
MFFVGIDIAKKTHQAAITSDDGKLIGKAFKFSNTIDGFNLFLEKLGAVSTELSQFEIGMEATGHYWYPIYSFLKAKGYTIYVINPIQSDSLRKMYIRQTKNDSIDSFLIAEVIRFGQFGTTSMADENILAMRQLCRYRDSVISSRTEIKLRIGTIMEQIFPEYEKQFSSLWVSTSMGILEKYLTPENIENAPIDELFEIIKDKSHNRLTKAKAISIKEAAADTFGIKIAQDAFSFQLKQLIDRMNFLDKQIEALDIEIIKYYEQFDCYLHTIPGIGIIGAATILAEIGDISRFKNSSALVAFAGIDPTVRQSGEFNSTHNHMSKRGSPYLRHAIFLAATTCSFHNSPLNAYYKKKRDQGKHHLTATGAVARKLTTVIYAVLRDGKPNEPKKFC

SEQ ID NO: 314183 - protein, 313 aa, unidentified
MNEPDVFVGIDVSKVQLDVAMRPTDDRWPVSNDEPGITILVERLRTIQPVLIVLEATGGLEVPVAGALAEAGLPVVVVNPRHARDVAKATGRLAKTDPLDAQGLAHVAEAVRPTPRPLPEAQAQALSALLTRRRQLVQRLTAERRRLQSAPQRIRADIQAHITWLERRLARTDDDLAAAIRSSPLWRAKDEILPSMPGVGPVLSRTLVAEVPELGLLNRQKIAALIGVAPFNCDSGTLRGKRVVWGGRAHVRAVLYMSTLSAVRHNPVLKAFYDRLRAAGKAAKVALTASMRKLLTILNAMIKHHTCWQAKTA

SEQ ID NO: 314184 - protein, 412 aa, unidentified
METLVERGCGVDVHQATVVACLLIVRKDGKVQKQIRTFGTTTRELVSLREWLLSEGCSHVAMESTGVYWKPVYAILEGEGTFKIVVANAQHVKKVPGRKTDVKDAEWIAELLCHGLLRSSFVPPKAIRELRDLTRYRRKLVESQVAERNRLLKLLESANIKLASVAADVFGLSGQLMLRALIEGKASPHEMSELAKGRMRAKIPELEPALERKLEEHHRFLLRLQLQRLEAGEKDLAVLEQRIQEKLKPYEAQLALLDEIPGVDWAVAAAIIAELGVDLSVFQNVLQAASWAGVSPGNHESAGKRKSSRIPKGNVYLKTALVEAATAATKAKGTYLRDKFYRLKARRGYKRAIVAVAHKILVAIYHILSHQVCYNELGDLYLDKLNRHTLTRNLVHRLERLGYTVTLEQKAA

SEQ ID NO: 314185 - protein, 336 aa, unidentified
MNRIIMVVGIDISMDDFHACIKVRTEFGKVTIKGTRTFKNTYVGFKEFLRWVMDRKKEDCALSFVMEATGVYYEDLAYFLYSSKQRVSVVLANKIKSYAKSLNIKTKTDKVDSKVIAGFGIERKLDEWKPMSPVYKELRDHCRELLSIKKEMNRARNQLHAMTRSHNKSKSIIKLKTNQIKFYEGSIKNIEKELHKIVDKDPKLKEKLRKAQTIIGIGFETSVILASETNGFALFKNIRQLVSYAGLDVEFKESGKFKGKTRITKKGNSRIRQALFMPAMSATLYNESIKALHERICERNPDIKRKGVVAGMRKLLIYTYVIWKKDTEYDNNYKWS

SEQ ID NO: 314186 - protein, 402 aa, unidentified
MNCVGIDVSKGKSMIAVMRPFGEVVVSPFEVRHTASELSELARLLKSLDGETRVVMESTGNYHAPVARLLHDAGLYVSVVNAMLVHDYGNNSLRRAKTDKKDAVKLANYGLDHWLTLPRYVPEEDTRLMLKTCYRQYQQYSKVQTMLKNNLISLLDTAFPDANRLFTSPPRADGSEKWVDFVATFWHCECVCGLSKKAFTAKYQKWCRKHGYNFSEDKALDIYASACRHFGVIPKTDTAKLLVEQAISQLQTTSAALAALKQEMQSLAASLPEYPVVMEMFGVGPTLGPQLIAEIGDVRRFHSKKALVAFAGIDAPPYQSGQIDVRSRSISKRGSASLRRTLFLVMGVLLQCAPMDEPVYQFMNKKRSEGKPYRVYMMASANKFLRIYYASVKAYLDSLEHD

SEQ ID NO: 314187 - protein, 345 aa, unidentified
MDYFAGLDISVKETSVCIVDDTGRLVREVKVASEPEALLPVVTNPLWRFKRIGLEAGPLSQWLFSALAEAGLPVICVETRHMRAVLQAQINKTDRNDARGIAQMMRAGLYRPVHVKTLRSQKLRMLLTHRKLLQSKAIAIDNDLRGTLRNSASRVGVVGALKFEARIRELVEDLPDLAELVEPMLVVRRTLREQIGILHGRLLAIVHNDDVCRRLMTVPGVGPVVALTYRATVDVPARFRNSKAVGAVFGLTPSRYQSGETNRTGAISRCGDEMMRAMLYEAAHIMLVRLAKWCWLKAWAMKIARQRGIKKAIVALARRLAVIMHRIWVDGTEFRWTREQVVAAA

SEQ ID NO: 314188 - protein, 354 aa, unidentified
MPATARTAIAVIGIDIGKNSFHIVGLDDRGAIVLRQKWSRGQVEARLANVPPCLIGMEACVGAHHLSRKLKALGHDARLMPAKYVRPYSKGQKNDFRDAEAIAEAVQRPTMKFVATKTADQLDLQAMHRVRERLVSQRTGITNQIRAFLLERGIAVRQGQRFLRAELPRILATPPDVLSPRMVRVIEGLAGDWRRLDERIEGLSGEIEAIARQEPGCERLMSVPGIGPIISSAMVAAIGTGDAFSKGRDFAAWLGLVPKQMSTGDRTILGKISKRGNRYLRVLFVQAAWVVLIKPMSWERHGLKPWIEAAKKRLHRNVLAIALANKLARIAWSVLARGRSFEARTITNVAAQAA

SEQ ID NO: 314189 - protein, 409 aa, unidentified
MEVVYSHCCGIDVHKNNVKACIMTPQHKEIRTFSTMTGDLMKLKDWLKQCAVTNVAMESTGVYWKPIYNLLEDEFGVIVVNAKHIKNVPGRKTDIKDAEWIADLLKHGLVKASFIPNREQRELRELVRYRRGLIQDRSALVNRIQKVLEGANIKLSSVATNVMGVSGRAMLQAMIEGNENPEELAELAQGKLRDKHTDLVAALQGMMGEHQRMLLESLLRHLDFLDSEIKRLDDEVSTRMKPFEDQIERLDEIHGIGRRSSEEILAEIGTDMKRFPSAAHLASWAKICPGNNESAGKRKSGRTGHGNNWLRSVLVQVAWAASRTKKTYLSALYRRMAGRKGAKRAIIAVAHAILVTIYTMLTDNARYRDLGANHFDQLNLQYVLKNAINRIERLGFKATIEPIPVQEVG

SEQ ID NO: 314190 - protein, 341 aa, unidentified
MLIIGCDYHPSMQQVACLDTGTGEYIRKRLAHRAEAEQFYRELTKEHVEVRVGMEATGHAHWFERFLSELGIELWIGDPAQIRAKMVRKQKNDKRDAEHILKLMREDNFPRIWVPSPENRDLRQLVWHRHRLVGMRTRVMNQLQAIAMNEGLRRKRALWGKRGRKQLESLSLAPWSNRRRQELLELLDRFDPTIDELSQAIEQEAERWPEVQRLCTHPGVGSLTALVYVLVLGTPDRFQCGKQVGSYLGLIPCEDSSAQHWRLGHISKQGNALLRFLLGQAALNAGRSDEEWRRQYVHLTMRRNHAVAKVAMARKLAVRLFWMWRRDWDYEQWKRFGSHSG

SEQ ID NO: 314191 - protein, 355 aa, unidentified
MNTTTTKTIIGIDLGDKQHAICVTDRKGNILKEFSIRNRIEELKNLADQYPNSVVAMEVGTHSPWISRLFAEHGLQVFVANARKLRAIYTNPRKSDELDAQMLAKIAGFDPELLSPITHSSLCSQQDMLAIKMRDTLVRQRRSLICSIRFSLKAMGVILPLWSSSVFSKRALLRLEDQPEVLGSLKPLLNILNELTTQIKQFDKSISEIAETKYPQAKWIQQIHGVGPITSLCFVLHIEDPNRFAAKKRRDVGAYLGLVPRRDQSGQTDKQLPISKAGNSYLRTLLVQSAQYILGHFGPDCDLRRHGLKLAARGGKAAKKRAIIAVARKLSVIMLSLWQNQSEYQPLRNSLTTAI

SEQ ID NO: 314192 - protein, 281 aa, unidentified
MQYIAFDAHKHYTLASVASLDGRTIREERVEHERDALRQFLERCERGSPVAVETTGNWYWIVDEIEAAGCVPKLVHARKAKLMLGMINKTDKLDARGLNRLQQAGTLPTVWIPPGELRDRRDLPRTRMVLVRQRTQLKNRIHATLAKYALQCSEVTDLFGRRGLTLLRQRIDQLPPHTAYATRQLLTQVEALDRQVRGFEREIRAVCRPTPEVASLMTLPGVGLTLAVVIALEVGDVSRFPMDEKLAGYAGTTPRVRSSGGKTRYGPLRGFVNGGVSAECV

SEQ ID NO: 314193 - protein, 422 aa, unidentified
MKLTWFAGIDWGSQKHQACVLDAAGKVLGERVFEHGGEGLLQMADWLLSFVKGDASEVGVAVETPRGPVVESLMERGFAVHSINPKQLDRFRDRLSPAGAKDDRRDARVLASALRTDPHCLRRLEPTDPAIIELREWSRMNEDLTRERVRLANRMRDQLWRYYPQFLDAVDDDVAAPWALDLWRSLPTPRAGQRVREVTLTRVLKQHRIRRIDAATLRAKLRTPAVKLTPGAAEAATTHVRLVAERLALVNRQLDQARRELDGLVHRLAEAAPADDPNASAEDEPSSKALPDAAILLSLPGIGAKVLATLLAEGSDAVRRRDYNALRCLCGVAPVTRRSGKSMIVTRRLAAHDRLRDAAYHWARVAAQRDPVSHDKYRSLRTRGHGHARALRSMADRLLNVACAMLRDGVRFDPHRAGIGAA

SEQ ID NO: 314194 - protein, 450 aa, unidentified
MSFSFLTLFNYLKMAKVVQFEEIHAKAAGIDIGSRGVFVSIDGEQVVNFKTFTSDYQLCCKYLKDNGIVSTAIEATGVYWMTLYEMLEEHGIEVCLVHPTETQQVPGRKSDPKDSRWIQKIYSAGLLRESIVAKGELKELRMLTRERLDLIQMGSTYINKMQKHLELMNIKLRNVISQIHGASGLRIIKAIISGERDPEELLALCHGTIKSKKREDVLKSLQGNYHPTYIALLKENQYLYEQHQLCIERIEIQIQELLDKLNRDNKQIEVTSPARPARHHNPAIADLHTKMVQMYGGVNLTTIAGINDSTMLRLLGEIGNDLSRFPSKKHFVSWVGLSPKNKQSGKMKKRVKCNSSNNAGLIFRQSAQSLFNSKNNAIGVFMKRLKGRKGAKVAVKAGARKIAEAFYDAITKGLDYVEQGIAKYIEQMRQKELKLMNILANRYNYVCVEN

SEQ ID NO: 314195 - protein, 343 aa, unidentified
MEHYVGLDVSLKQTAICIVDKTGAIKREAMVRSDPEAIAEYINTNASNVIRIGFESGATSTWLWTELNRKRLPVICIDARHAKAALKMQINKNDRNDAAGIARIMQTGWYRQVRIKDLDSHAIKALLVSRALLVKIKRDLENQIRGLLKNLGLIIGRAKMGTFLTRTKELIEDKPSLIAVIGPLLKARECIAQQIADLDRKVMRLARNDAQVRRFMTTPGIGPITALCYLATIDDPTRFKKSRNVGAYLGLTTRRFASGEIDWTGRISKCGDTLLRSYLYEAANVLLTRVAKWSALKAWGMRIAKRSGIRKAKVAVARKLAVILHRMWIDGTEFKWTLKEVAV

SEQ ID NO: 314196 - protein, 413 aa, unidentified
MEVLYPRCCGLDVHKSSITACALLREQGRIRMERRRFTTMTQDLGNLVAWLLELQVTHVAIESTGVYWKPVWNILEGHFTIILANAQHVKNVPGRKTDAKDSEWIAELLQHGLLRNSYVPPEAIRDLRDLTRGRATLSQEASRIANRIQKALEDANIKLSGVASNVLGKSGRAMLDAIVGGQLDPEQLADLALGHLRAKIPQLRLALSGKVREHHRFLLNRLLHQLRFIENEIDVLDQRLEQLGRQDPVLAAAVARWTTIPGVDRVAAWSLAAEIGVAMEQFPTAAHLASWAGLCPGNCESAGKHLSGKRRKGSPWLGRMACQCAWAAARTKNTYLSVQFRRLAAKRGKKPAIIAVAHSILVIAYYLQKKESEYHDLGSDYFDRLNADGLRRYLVRRLEALGNKVTLEATSAA

SEQ ID NO: 314197 - protein, 409 aa, unidentified
MRLFVGLDVSSFDMKVCILNGEGEKLNAFTVTNDLPGATLLKERLLDCIGDQEVDVLKIGLESTSVYSFHPSMFLHHDEDLKVFGAKVFVMNPKQIANFKKSYSDMNKTDEIDAFIIADYLRFGRNQMSVVKESQYVALQQLTRSRYQLIRMMTKEKQHFLQHLSYKCNTFSQEVDSSVFGNAMMELFLEKYSLEELAHLPLEELAAFLQEKGKNRFGDPKCVATSIQKAVRSSYRLDKVVEDSMDVILGTSIEVIRTFQKQIKEIDKAIKKLMAGLTHTLESIPGIGPVFAAGIIAEIGQIDRFDDEAKVAKYAGLYWRKHQSGRFTAEDTSLSRNGNHYLRYYLVEAANSVRKQVPDYRDYYVKKYSEVPKHQHKRALVLTARKLVRLVDALLRSHQLFTPERGVKI

SEQ ID NO: 314198 - protein, 430 aa, unidentified
MKSNTQNAKIEAITEKTLVLGIDVGSETHYARAFDYRGIEYSKKPFKFSNTEAGFVTFKEWILDLKERHEKDKVVPGMEPTGHYWFNLGKFLQDNEMKPVLVNPHHVKKSKELDDNNPTKNDRKDPKVIAGLVREGRYMIPYLPDGVYADLRTASNIRFQLQAELTRIQNRISRWFNIYFPEYKTVYGKPDAKSGMLILKAAPLPEDILTLGIDGVNQIWRDAKLRAVGKARAKTLIEAAEHSVGSKEGAMSARMEIRMLLEDYESRNTRLQEVMVLIEELVRKIPMAEKLLEIKGVGIRTVSGFLAEVGDISRFNNPKELQKLAGLALVENSSGKHKGETTISRRGRKRLRYLLFEVAMSLVAKNPEFRELHNYYTTRRLNPLKKMQSLMAIAAKLIRVFYAMLTKGVDYDPKKMVSDIKRPAVYLQAA

SEQ ID NO: 314199 - protein, 350 aa, unidentified
MLIIGADYHPSFQQVAFCSQDTGECGERRLNHSDGEAERFYRDLKQQGISVRVGMEATGYSRWFERLLAELGFEVWIGNAAEIKTQRVRKKKTDREDARLLLKLMREDRFPRIWVPSPENRDLRQLLWHRHRLVQMRTRVANQLQALAMNEGKRCKKLWNAQGRAELEKLVLAPWASRRRQELLELLDRLHPTIEELTAAVEQEAGKRPEVLRLMTHPGVGPLTALAYVLIIGTPERFPCGKQLGSYVGMIPSEESSADKQRLGHISKQGNSLLRFLLVEAAQAAARINDEWRRRFVHLAMRRHRSIAKVAMGRRLAIRLYWMWRNQCEYSPKMEFGSYVGQLGTGHGAK

SEQ ID NO: 314200 - protein, 357 aa, unidentified
MRSSNIKYIGLDVHKEAISIAVLNGAGKLVMESVIETKASTLLQFLDGLRGELHVTLEEGTWAAWLYDVLKPHVWEIVVCNPRRNALLKEGSKSDKVDARKLAELLRCGMLRAVYHGENGLRTLRELARSYQVISKDLKRVMNRLKALYRGWGIPCTGTQVYSQRHREQWLKKIREAGVHRRAELFYQQLDGLQVLRRTVRGELLAESRKHQAVKVLRQIPFIGPLRAAQLVALMQTPHRFRSKRQLWTYSGLAVETHDSAQYRYVDGQLQRSKKPQQVRGLNQNHNHAMKEIFKSAALTATGRAGPFQDFYEGLLAKGMKPELARVTLARKIAAITLTLWKKGECFDAGYVKRQAA

SEQ ID NO: 314201 - protein, 369 aa, unidentified
MSMTKIIALDLGKFKTVACVMNVADRSHVFVTIEMSPAAVHELLARHATDPAEQTLVVLETCDCCGWVYDLCVALGLSAKVVAANSEAWQWRRVKRKTDRDDALKLAKLALLDQLTVVHMPSPEQRQRRRLILHGSTELAEVRRSVVSRRTQSRNAIRSIFSQQGLPLVRGGKQWTKAGIEQLKTHARPLAECDDALDLWRGRLHAELQLMADADAQLKIFDRKLDGLSKEDDRVQLLQTIKGVGPRVAEAVVMHLDDVSRFASAEHVASYAGLVPKQIESGEMSRRGHITRRGPSLLRSMLVESAWVVWRHNDWAKAWVNKISRGSKARRKIGIVALARRLLTILWAMLRDNTPFRDPGVPPVPVMTT

SEQ ID NO: 314202 - protein, 412 aa, unidentified
MDVLHPRCAGVDISKRDAKVCVRIQGAGRARARSTVTTWEAVTNRILALRDHLIAEEVTLVVMEATSDYWKPFYYLLEDAPFEVMLVNARHTKGIPGRKTDVSDAAWLADLGAHGLVRGSFVPPEPIRQLRDLTRTRTAITRERGREVQLLEDAGIKLSSVASDITGVSGRAMLEALIVGDRDPAGLADLAKRRMRSKIPELTEALTGRFGEHHGFLARLHLDLIDGHSRAIEELNERIEEAMQPFRATRDLIVTIPGISIIVADVIIAETGGDMSRFPSAGHLASWAGTCPGSNESAGRVKSTHTRPGNPYLKGALGAAAMSVARSKNTYYFAAKYRRIASRRGPVKALVAIEHAMLIAIWNMCSSGAYYADPGEDFFTRLHPDRARDRALEQLRRMGYAVTLETLPAQAG

SEQ ID NO: 314203 - protein, 325 aa, unidentified
METKKLCCGIDVSHSTLDVCYQNNLGELFHLQVGNNNQGFAKILEHTGVGYHFVMEATGVYYIRLAFYLHHRGCELSVVNAIAIKRYIQMHLERNKTDKKDAAWICRYAIEQQPAYWQMPDSAYFESKQLYNTIREYTEQIKRFHNQLHSLGLLPVPSRDTIKSIEKVIESMKKEIKQLEQKLQVLLEQWQPDQLKNVSSIKGIGKRAAAMLIVFTQGFKHTENHRQLISFAGLAPTQYSSGSSIQGKPRIYKRGGKNLRDVLYMCSMNAMKTNAACKALYERLRANGKTGKQALIAVCNKLLKQVFAVVKNNTMYQPNYCSAKP

SEQ ID NO: 314204 - protein, 391 aa, unidentified
MINIGIDVGKFKHCATVLDDSTGEVLIKPFFLTNDRKGFDLLYSKTKQFIHRKHSVGMEDTGHYMINLTNYLLDKKFTVKYINPRATCLRRKELGVSAKNDRKDALLIAEMLSEKRFWRSISPRTIENSKFRDITRLYHQLQEQQNQDMNRLQRALDIVFPEANSLSWTRYSKAYMKFLSTYPSASSIALEDIRNLRKALKTEGKGRQCKVTAEEIRELAKHSVGEDNSSIELEVTSIIAIIITREEQLRILEKKIEEFSHKLNSPIISIPGISHISGMTILAEIGDINHFQNTGNLISFAGMDPLVYQSGKYDAAHMPISKHGSRYMRKALYQAVFTVCKYSPTFHAYYTKKRNQGKSHRCAQGHCARKLLRVIYKLLSTNSLYNQNHIH

SEQ ID NO: 314205 - protein, 338 aa, unidentified
MKYKRIAIDTSKHVFTLHGVDEQERPVLRRELRRGQVEAFFGKQDATEVVLEACGGSHHWGRLFSRLGHRVRLIPPQYVKPFVKRAKNDRNDAEAISEAASRPCMRSVVVKTVDQQADGVILKHREMLVSQRTQAINALRGHAAEFGVVAAKGIVKVAALLMELAADNAIPATARAMFEQMGAHIEALDQRVAAVDSELAALHKADPVSQLLAEIPGVGPLGAITMVLTVEPGNFASARHFAAWLGLTPKEHSTGGKQRMGKISKAGNERLRQLLFVGAMSVIRFAKPGSKSASAWLLQLLERKPRKLAAVALANKMARIIWAMMSRGEAYRRQPVAA

SEQ ID NO: 314206 - protein, 464 aa, unidentified
MKKKRTYGTVPVQSLNLASLLERLAGTVVLALDIAKTSMVFAVADVGGEVHALVRFSHPKETSIFLVLVERLLELGRTVEAVMEPTGSYGDAVRYQLRKRGVPVFLADAKRTHDMRAVLDGVDSMHDPKACTVIAGLHSRKLTSPWRERTVLDEETRALLDELALSADPLEVLHGRLEAILGASWPELNDMFDQRARWPLHLLMKYPSAAEVRANLPAARALLHRVTRNSMDSERIEEVLACATESVGAELPEPRRRYLQLLVEEMLELDHRVTQVEKRMRALCKNGPALDATDMHSAEDETKGARAGEAENSDVHGTEKESLTLIAEVVGPAAALAIFADLGSPCQYGSAAALEKAAGLNLREVSSGKRTGQLHITKRGPPRVRAYMYLAALRLLKFSPLVRAWFEGRSSGPGAKKRAVVALTRKLLRALFHVAKGAPFQVEKLFDARKLVLTDKPKETLRAA

SEQ ID NO: 314207 - protein, 365 aa, unidentified
MIVIGTDTHKKTHTCAAVDALTAAARAELTAPARRGSFGRLLVWARALDCERVWAIEDCRHVSGAFERFLVARGERVVRVAPKHMAGARRSARERGKSDSIDAFSVARAALKEGIENLPGAHLDGMALDIRLLVDHREDLVAARTGEQQRLRWHLHDLWPELEIPTGALDTAKWLGKASRRLARAEQSTRVRVARELVREVATRTTRIRELEAELARLVGGYAPQLLAERGCGPLTAAKLIGEIAGAERFATDAKLARTSGSAPIPASSGNTKRHRLDRGGNRQLNCALHRLAVNKAHWDPETVAYLERRQAEGKSRKEALRCLKRHLARRVWKLLQGPRDRQDAQSQQPISIYCNLPNSGFGLT

SEQ ID NO: 314208 - protein, 363 aa, unidentified
MSHYRVGCDAHRRYSQFAVLDQDGQLRQQTRVDHEPGAIQGFLENLPEGTPVALETVGNWYWIADEIEAAGCLPLLTHAAKAKILMGNVNKTDKLDAKGLAKLLHLDSLPTVWLPPGEIRDERELHRTRMALSKLRTSLKNRIHATLAKYGITSTEHSDIFAGTGRVWLEATLSRLPPETGRCVAQEIEVLDGLQLQITQLEERIRERIALTLSIQLLKTLPGVGDILAIVVEREIGSIDRFDMAGQFTSYAGLVPTVHASGGKTRFGHMRKPSNQYLKWAFIEAANVIVRHRHHPAWKTKYVCQIYDQVCQRKGHAIAVGAVARHLAEGAFWILKRQEPYRPPAIRQASPKQVQGRAELVST

SEQ ID NO: 314209 - protein, 310 aa, unidentified
MDMIAVGIDVSKDRLDVAVRPNGEVFAVERKATGLDELIVRLRELGPQLVALEATGGYETIAAAALASAGLPVVIVNPAQVRAFAKALGQRAKTDPIDAAVIAHFAEATRPEGRPLPDEATQMLADLVARRRQIVEMIVAERQREKRMTRPHLQADIARLIKTLEKELSKLDREIDDVVRGSPAWREREDLLASVPSVGPVIARTLIADLPELGTLSRRQVAALVGLAPFTRQSGQWRGRSFIGGGRKTVRTVLFMGAVVAMRFNPVLRAFFLRLVDAGKPKMVALIAVARKLLTILNAMVRDNRRWQNA

SEQ ID NO: 314210 - protein, 370 aa, unidentified
MRDVITHVALDAHMRMLHVAMLLPGSDVPIQWQVPNEVGAIRRMVKKIIKEAKGEVRMCYEAGPCGYALQRTFKELGVDCIVIAPSLIPMKAGDRIKTDKRDARKLVELFRAGLLTEVHPPTPGEEALRDLSRCREDARADMGRARQRLGKMLLRRGIMWEGGKRNWTQAHMKWLRTLKFDHPADTLVFADYLLAIEHLEERLKGLESALEAAAQKEPYRERVSALRCFQGIDTVTAITVVAELHDFRRFQSPRELMGFLGLVPSEHSSSERRSLGSITKAGNTHARRALIESSWQYRHPPRLGEVLRKRREGQPAAVIAIADKAAQRLHRKFVKLDARGKPRPKIAVAVARELAGFVWAVLYPASVQAS

SEQ ID NO: 314211 - protein, 420 aa, unidentified
MTVDLERGYKRRELCGPNQYLNLLLRSVLMIYVGIDVAKDKHDCFITNSDGKVLFPVFTIQNNRDGFDVLFSRIQSSSSDVSNIKVGLEATGHYSYNLLGYLIDKGLHTFVINPLHTNLYRKSLSLRKTKTDKVDARTIALMLMSDVNLKSYSDTSYHNEELKSLTRYRFRKVQERAQLRQSVSRLVTILFPELEKLVPSLHIASIYALLSEFPSAGTIASCHLTHLTKRLENASKGRYSREKAIEIRNAARASIGSNMPAKSLELKHTLRLIGELDSEISEIESEIKRIMDEIHSPILTIPGIGYRMGAMILAEIGDFSRFDSPDKILAYAGASPSTYQSGQMESSYSHMEKRGSRYLRFALINATKYVCQWDETFGAYLQKKISEGKHYNVAITHAAKKLVRLIYAMEKSGKPYIKTA

SEQ ID NO: 314212 - protein, 341 aa, unidentified
MTVTIGIDPHKATHVAVAIDDHEEPIGRVALIADRSQTQRLLAWAEPFGDQRVWAIESARGLGQLLAQQLVAAGEDVVDVPPTLSARVRLLGSTKASKNDFHDALATAIAGLRHCGLRPVRIEDHTAVIRLLIDRYDDLTALRTQAACRLHVALRELIPGGGPRRLSADRAAKLLRDTRPTGAAATERQRLAGELLADIRRLDREIAATRTRVADTVAASGTTVLEVHGVGPIVAGFILGHVGDPARFATADRFASYNGTAPIEASSGPRKRHRLNPRGNRKLNHALHMAAVTQVAHDTPGRSYYERKIAEGKSKKEALRALKRRISDAVWRQLQVDLGRR

SEQ ID NO: 314213 - protein, 340 aa, unidentified
MKRIYQRCCGIDVHKATLTACVRVHGPGGKLSQEIRSFGTTSDELLSLHDWLTTHRVSHIAMEATGVYWKPVFYVLEQGFTLLLVNPADVQRMPGRKTDVSDAAWLAQLLENGLLRPSFIPPRAIRELRDLVRYRGELKHDHTRVANRLHKVLQDADLKLSSVMSDILGVSGRQILRQLAAGHSDPAALAELARGSLRAKRPALRQALTGRFSEHHAFLIGQALTELDNLEESMSALAARVEQHLVPFAPQIEQLTTIPGIKRVAAAVILSEIGTDMSCFPDTAHLASWAGMAPGNHESAGKRRRAKARHGNRWLRTILVECGHAARRTRYTALVLSTGA

SEQ ID NO: 314214 - protein, 412 aa, unidentified
MRHRKEQFIYVGVDLHKRTHTAVVINCWNEKLEVIEFENKPSAFPAVVSKVRKHLQEGMTVVFGLEDVGGYGRSLAVYLVENHFLVKEVNAALSNWKRKSYAMTEKHDSWDAENIAKLLLDELDRLPSAHPQDDYWILKQLVMRRYSLRDTLVMLKNQLHTQLSYNYPSYSKFYSEVDGRTALAFWHEYPSPYLLEGVTLEDLTLFLRKNSNNVCSTKKAAFILENVQADGNTKRNGQEHRDFLVRSHVNQIRDVHREMTDVENHIRDIMQKLDFKLNTFTGIDDVTASAIVAEIGDISRFTSADKLAKYAGLTPSQMSSGGRGKDRNQRQGNRALNKILWGLAVRRVHTARTSSKPLNPIFREYYEKRLSEGKKKKQAIICIMRRLVTILYSMLKNKTEYRLTALPERAAS

SEQ ID NO: 314215 - protein, 417 aa, unidentified
MTQYAAYLGIDWADKKHDLCLVDATSGQKTTQVLAHTPQAIAEYFSNLRCRYPGQQIAVGLEQSRGPLLFALLQYDFLVLYPLNPTTLAKYREAFTPSRAKDDPTDADYASELLMKHSERLKAWHPDDDQTRTLRYLVEHRRRLIGDRTRLSNRLTSLLKCYFPQVLTWFPELTTVLVCDFLLRWPAWERLQGVKRITLLNFFRAHHSVRADTLERRLAAIKASVPLTTDRAIIDSSVLMITALAAQMKTTIGAIKQFDEAITKLCVVHPDFPLFQSLPGAGEVYASRLLAMMGTQRDRWTTADELACLAGIAPVMERSGQSVWIRWRYFCPKFMRQSFHEYAGESVKHSFWARAYYEQQIAKGKSRQAAVRALAYKWIRIIWKCWQTRTPYSEVKYLEALRKKGSPLLSFAATKVA

SEQ ID NO: 314216 - protein, 465 aa, unidentified
MKPAQKSKSKSRTKPNRRAKLKPPEETPGMQVVNPKAAGIDVGNEEHWVSVPPELDAEPVRSFGCFTRELEEMANWLVGCGIETVAMQSTGVYWIALYDILAERGVRVCVANAEDTKNLPGRKTDIQECQWLRKLHTYGLLKNSFRPEEEILVARTYWRQRQQHIADASRCIQHMQKALTQMNVQLANVISDISGETGQAILKAIVAGERDAQKLARFRDPRVKASATTVAQSLEGNWRAELVFVLEQELNSYEMYQDKIAECDQRLYEHYRRMAQKADPQELAPVPHDKRPRGNVPEGFDLRQELYRITGVDLTAIDGINVLTAQTVFAEVGSDMSRFSSEGHFVSFLDLSPRNKISGGKIVGRQKRKTKNRAGLALRFAAGTLLKSETYLGAQYRRLRTRLGSPKARKAMGNKLARIIYRMLKFGEEYVDRGQEFYQEKYHQQQVRFLTKKAAELGFQVVQMA

SEQ ID NO: 314217 - protein, 323 aa, unidentified
MATSSYVGIDVSKDRLDIAVLGEGRVWQVDNTQQGINELVKWMVRLDPELIVVEATGGYQRAVVDGLFEAGLAVAMVNPARVRQFARACGLLAKTDKLDAFVLAEFGQRVQPRRYEGKSEVGRQLSALLVRRRQLEEMVKAEQNRLRTISQSLRGSVERIIACLKEEKRTLDEQILQFMSEQASWQEQTEILGSAPGVGMVTTATLLADLPELGKLDRKKIAALVGVAPMNFDSGKKRGYRKTKGGRGDVRSVLYMSTLVATRYNPVIQAQYQQLLKRGKEKKVALTACMRKFLTILNAMLRDKQPFRCASLAAQACISQPKK

SEQ ID NO: 314218 - protein, 378 aa, unidentified
MPSSVNFWVGLDVHKDSVTAAVFRNRDPEPVRVDRLPYDLQKIRRYFQRLQKEGNARACYEASGAGYVLQRALIEWDVECHLAAPSLIPRRPGEHRKTDQRDAIKIGRDFRDDRLVLIHVPTEEDERIRDLVRCRETFQREIIKSRHYILKFMRRRGFIFREGDHWTLRHMNWIRQVLAPGTLAEEDHVVLSEYLALLEYKLQRRDELDGRIEALALTPRYKPVVDRIRCFRGFKTQSAMVIATELGDVRRFENPRQLMAYVGLVPSEHSSGDRRRLGSITKAGNARVRHVLIQAAWQYRKRPAVGAPLRQRQRGQDPSVILHAWKCQHRLFTLFHRLAAKKPRPVAATAAARELVGFLWAILRDMDVSRLQEVSAAA

SEQ ID NO: 314219 - protein, 369 aa, unidentified
MESQEVKYVGVDCGKKSIEVVRINSENSLERRQFSTTESGINNLLQWLTLNDIVGLEAGSQSFRIAKSILNKGVQVIVLNPGNLATIYQSLKKTDKEDSLKIARLIQRHPIEELPTVPIPNDEEEDNRRLCSEHENWTKQLTQGKNRLHSLFTQAGLTQITKKHLRTKVSREASVTLLSDRYKKEAERILKVLDLVELNLKLIEEEIQEALKKNKAYVQTIMSMPGIGMITSLAIKANSISHSLWAFMSYMGDCKRFSSAKQAAYYAGLVPRVDISGDTVRYGRIINRGCHSIRRVIVQAAWSLVRCQHGGKVKEFYQRLYLKKGAKKSIIATSRKMIEVLYVMIRTGKLFDSMPENILNRKLTQYGLM

SEQ ID NO: 314220 - protein, 346 aa, unidentified
MLHVGLDLSRKRIDVCLISDQGELTDRFTSIPDRDGLHGLASRVAVYGQPVRAVVESMNGARFVHDELTAHGWEVLVADAQKVKGLAPLACKTDKIDSRVLAELSFGDLVPAIWLPTFELRREREISRWRLHLVKHRSTLKNRVHSTLITFGHQRHMSDLFGASGRRLLKELEIPEPWRSHVDASLVLIDDLEARITQIAKDLRRSGADHRYVPVLMTAPGFGWITSYTVACELGDITRFSSPVKLTGYTGLCPRVKQSGQMDQRGPLSKHGPKYLRWGLMEAAIAASSHPLYRERYQRTKRRLGRQRGPKVAQIDLSRQLAEAIWYMLTRNQPFAPAGATFRLAA

SEQ ID NO: 314221 - protein, 316 aa, unidentified
MESPQTFVGIDVSAKRLDVAVLPAGTHFTVAHTDEGIASLVRCLLELRPHIVVLEATGGYEILVAYAMSEASLPVVIMNPKVLRHFAKSTGKLAKTDKLDARVLAHYAQAIQPPVRPLKDPEQAELATLMSRRRQLRDMIVMEGNRRRTSTPKVRGNIDQHLAYLRQLLKDLDREIHDAIRRTPLWHEKSEILQSFNGVGPKVSASLIADLAELGTAPRTQISALAGLAPMNRDSGQWRGKRTIQGGRPAVRQALYMAALVASRHNPVIREFYQRLRQAGKPAKVALTACMRKILVILNAMLKNRTYWNPQLPLAA

SEQ ID NO: 314222 - protein, 425 aa, unidentified
MDFKQNQKINQVSEKTLVVGIDIAKRTHFACFVDDRGRVLHKSFSVSQSSDGFELFYQRILTAMKEYKKTEVIVGIEPTGHYWLNLAYFLEARGIPLVMTNPMHVKRSKELDDNLPTKHDRKDALVIARLVKDGRFSYPRILKEVEAELRVGSTFRGKLTEELGAVKNMMIRWLDRYFPEFTQVFPSFGKMALAVLECTPFPSDLHQKQPDELLKMYRQVEGMKSPQKPKATRLIEVAANSIGVTEGREMARFEIATLVRRYHQLEQEIESITQHLVELVQTSVEYEWLATVQGLGDTTIVDLLAEIGSFSHYDDPRQLIKLAGLTLRENSSGQHKGQKRISKRGRRKLRALLFRVMMPMIRHNEAFRKLHEYYTTRTVNPLRKKQSIVVLCGKLLKVLHGISTKHKAFDAQRMMKDIPSLAEAM

SEQ ID NO: 314223 - protein, 457 aa, unidentified
MAKRKRKQGKLDRTLPTLKPNAAGIDMGATEVVAAVPADRDSESVRTFATFTQDLHALADWLQQCGINSVVMESTGVYWIPLFQILEARGMEVYLVNAQHVRHVPGRKSDVLDCQWLQYLHSVGLLKASFRPEQDICAIRSLLRHREGLVQMAAVHVQHMQKALDQMNVQIHHVISDITGVTGLAITDAIISGQRDAQELAKLRDRRIKAPFETVAKSLVGDYRAEHIFTLKQSQTAYRYYQQLIADCDREIQDRIETFQNTHAGPGTPAESSNPSPGTADSPFNLRSHLERVYGTDLTAIPGFECLRIRTIFSEIGVDLCSQFPSSENFCSWLNLSPKDGTSAGRRIRAPRIKNNNRAANAFRLAAQSLHHSRSYLGDFYRSQRARFGAPIAIKNTAHKLARIFYHLVTTRTAYDETVFAKLEAKNQNRRLRKLQSFAQRMGYSLVPANVPSLQVP

SEQ ID NO: 314224 - protein, 404 aa, unidentified
MQRCYIGVDWADQAHELWVVDERGEQVWSAQVEETEEGLSELGQWLYTHRSEGVELWASIEKPEGRIVDFLLDHGVEVYPINPKALDRARDRFRMSGAKSDPFDARVLAEFLRTDHPHLQPLLPSSEQAQELKLLTRDYERLLRNQTRLLNQLKATLKEYYSRPLKVFKNLSTASALDFLERYPTPESLTPQGWQEFAASHRWPRSRASQAWELLSQPPIPIPAHVARAKSRLLRALVAQLRVMGTTLGEYKAEIEGFFASMPVADVARSLPGGKSGVTVPSLWAELGDAPGRWGSFQHLQGQAGAVPVTKRSGKSSVVHFRFACNKTLRHAVNQLAFLSLRYSTWAPAYYRQQRRKGHTHHQSLRALGAKWLKIIFVMWRDQTPYDEERHLANIARQTMYQAA

SEQ ID NO: 314225 - protein, 349 aa, unidentified
MADKLIVGIDVSKDWLDLCASNAAGVERIANTREAVAAWLERVAPGLIACEPTGGYERTLIAAARERGIAYLRVHPNDVIAFRKSRGIKAKTDAIDARLILAFVCDKAARAELRPSLIGDDRLQALAARRRQLVDALQAERCRLDAAALPAVRASLEAVIAVLRQSLETLEAELAEAIAAHPPTAELAKLLQTIFGIGPVAAITLIADLPELGLLSAKQIAALVGLAPHTKRSGKTRYRETTGHGRPGVRRVLFNAARAAVRHPSLFKDFYDRLVTDNRRPGKVALTAVMRKILITANAVARDRQPWRGRPAAGTPCRPHAEQTARRAGRVKTAAAPRAVARSASLEAA

SEQ ID NO: 314226 - protein, 320 aa, unidentified
MSASSVVVGIDVAKAHVDVSVLGAKLDVQRFDNEAEAHSALAAALKPLSVSLVVMEATGGYEAALACALQAAGLPVAVVNPRQARDFAKSMGRLAKTDRIDARMLAEFAAVLVRRDDLASFIRPLADAQQQALAAMVTRRRQLVTMMLSERQRLQLAIAVVRPSIEAMIEAIRKQLDDVEAQMVSHVQKHYAELDKLLRSASGIGPVASATLIAELPELGKLNRREIAALVGVAPMANDSGNSKGRRRVQGGRFEIRRVLYMATLTAARHNPAIKSFYDRLLAAGKLPKVALVACMRKLLTTLNAMVKTNKPWDKSLHGA

SEQ ID NO: 314227 - protein, 407 aa, unidentified
MLFVGDDWAEDHHDVELMDAAGRRLAKARLPEGVAGIARLHAMIGEQLGEDAGDAVQVKVGIETDRGPWVQALIAAGYTVFAVNPLQAARYRDRLGVSGAKSDAADAHMLADMVRTDSHQLRPVAGDTAGAEAVKVVTRMHKTLIWERTRAGQRLRHALREYFPAALEAFEDLDAADTLELLAKAAEPAGAARLSAAQISAALKRARRRDITEKTAKIQAALRSEQLGQPAVVTAAYAVSVRALVAVLDTLNEQVKVLQGQVEAYFGRHPDAEIVLSQPGLGPILGARVLAEFGDEHGRYASAKARKNYAGTSPITRASGKKKTVAARFVHNDRLIDALMTQASVSLRTSPGARAYYDRQRNRGANYNAALRQLANRLVGILHGCLKTGTPYNEATAWSHHLTQVAA

SEQ ID NO: 314228 - protein, 482 aa, unidentified
MKKRNIYQNQSQELLSLFEQADNNAKVMCVPIDYAKKDHVVMFCNGYGDILRKPFSVKNSPEGVDYLTDQVIRSCRQRAISEKHVFFGGEQVGSFADNFVTTLRSHGWLVAGVNAHEAKTQRENLQASTDRLDLMGIAKTLLNRRANCSPAQSGIYLNMRTVVRHRRKLVDITTEVRNRIHAVVDRLFPGFLNESKSGITPFSKSSLWLMKERFSAPQIRRRRRSTLIESMRRLGTKKPECTADKLQQYATQVLKPPQEYVHMLQLSLAQHVKHFSCLQESIGQLETEIAVNLAQTQGAFLTSVRGIGIVLAAGVSAEIGNPFEQKSLNNLVSYCGIIPRVKQTGGPQGETKTGKVAKRCNRILKDYTVQSASHLGLHGPADLMSDYKRRDAAGQHADFGMARRYLRMAMCLMRTSQIYLPSRLRKAQAQIEQRADYYLMNWPYLREKWQKLGALETAFKADHPLGQWRKIVQQFYGIKLTL

SEQ ID NO: 314229 - protein, 324 aa, unidentified
MSKHSMVCAGIDTGKYKLDVALNGSRQQLQIDNTTDGHAALSSWLKRHKVERVGIEASGGYERNVVTRLRGDKFVVVVFQPAAQVRAYAKFLLQRAKNDKIDAALIAACTAATKKIHAPPDPRLAPLAERMTLIDQLTDQIAGFKNYREGSRDARMRQFWKEQIACFNKHLRAELKELVAAIRQHRDLAERLELIESVDGVGLKTAVAILVRMPEIGRLTREQAASLAGLAPFDDESGTHVGIRHIAGGRERLRGSLYKASLSAAFHWNPQLIALYQRLIAAGKLHKVALIACARKLLIFVNTVVERGTPWVSNRSSSAVRAAA

SEQ ID NO: 314230 - protein, 429 aa, unidentified
MTRISVGVDVSKNRSTVCIIDQDGKVIMRPFLVCHSTEELDFLADTLKRLNGEVRVIMESTSIYQYPIALHLKEKGIFISIVNAYKVKKFANTDFRGGKTDKKDSRTIASYGISYWDKLVEWQIPKDTYFNLDLLNRTYMNAKKHRQIILQELQHYIDCAMPGMDKELRSLNLSTKKDFMLDFVEKSWHRDEIVNMTEAEFTEVFTAWAKKKGYRPVEGKAAKIYAIAKSCIPYYPANPTVKTILQCIVDKLSGVNRTLVTIVTQMIEEAKKLPEYQIVREMPGVGDPLAARFFGSAGDIRRFKNSKALVAYAGIDSPPDESGDFSSTHRHITKKGSKVFHDTGYEIMMALRAQKRTWEKVRKNPEVYDYMLRKEAEEKPRKVAKIAALNKFLRIVYARIKELYDNMALAERAKAKTKSKTKAKTKATA

SEQ ID NO: 314231 - protein, 369 aa, unidentified
MENSTTETIGCDLGDKMSDVCVMDAAGRTRRARVASTRKGMTTFFSREPAHVVIEVGGHSRWVSELLEGLGHRVTIANARRVKLISASDNKTDEHDAELLARLGRADARLLAPMVHRSSALQADLAIAKARDTLVATRTKLVNHVRGTVKSFGERLPKCGASGFVRHTRALIPASLEAALTPVYETIAKLDEQIRAQDKLIEGKAEANPDVAVLEQVDGVGALTGLVYLLTLEDKDRFASSRMAGAYLGLRPRKQKSGNDDPQLRITKAGDPFVRRLLVLSANYILGPFGKDSDLRRWGLKLAERGGKNAKKRAKVAVARKLAVLLHRLWVTGEVYEPLGYKARRLEDATPQAVTPAPTPSTAGANAAA

SEQ ID NO: 314232 - protein, 391 aa, unidentified
MVCVGIDVAKDKHDCCILDSDGTIRADCITIPNNMDGFKQLLQTIRDCTKKSDKIKVGLEATGHYSYNILGFLLDNDLAVYVMNPLHTNLYRKSLSLRKTKTDRVDARTIATMLLSDVDLKSYTDTAYHNEELKSLTRYRFDKVRERAKLKQSVSRLVTILFPELEKLVTSLHIASVYALLSEYPGAKQISEIHLTKLTNLLATASKGRYGKDKAIQIRDAARTSIGSVMPAKFLELKHTIKLIRELTSEIDEIEVSIQKIMDELNPPILSIPGVGIQSAAMILAEIGDFSNFESPDKILAYAGCSPSTYQSGKLTNCYAHMEKRGSRYLRYALYNATKYVCHWNPVFAEYLAKKRAEGKHYNVALSHATKKLVRLIYALQKSGKAYLVAA

SEQ ID NO: 314233 - protein, 358 aa, unidentified
MAQSKKINFNGQNIYIGIDVHLKSWSVTIMTESGYKRTHSQKPSAKELFEHLKKHYPDGKYQAVYESGFSGYSTYYALKEYGIECMIIHAADVPTSQYDHVMKTDAIDSEKLAKSLKGGLLRGIYIRDKEELDDRSLVRLRKTLQKQLGGYKSRVKHLLYNNGIDYPDCFENSRSHWSNHFIFWLENEVKLLSSTRHSLDLLLEQVKLFRKNLLKATRMVRELSKKSLYSQRYENLISIPGIGVVTAMSILTEIGDASRFHNQREFASFLGLIPSCHSSGESIANAEKTFRGNKHLGTLVIESAWISIRHDRAMAMAYGEYCKRMKAQEAIIRVARKMSNRILSVLKSGKKYQYDKIR

SEQ ID NO: 314234 - protein, 354 aa, unidentified
MDSTHLSYVLANYSGEHTMLKFNVIGIDLAKNVLQICVINKHGELVSNKMVSRQKLKERLAKSSPSIVSIEGYVSSHYWGLLAESFGHDVRIISPKKVKGFLEGHKTDANDALAIANAAMQIGLKYSKPKNEEQQSLQSLENIRIFLSRNITSLSNHIRAMLYEYGIVSAKGAARLRKVIEDTFEENNALPTCLISTLSIVGTISKLEKAKNSIVRQIKPCKQLMALEGVAEVCAGMLYSSIGNGKQFKNGREASAFVGLTPKKYSSGGKVFMMGIDNKGGVKELRTALYQVAMSIVTHLPDEPKKVKQAWLIQLVKRVGIKRICLTLANKTVRTAWAMLRHESKHKQQQLIAA

SEQ ID NO: 314235 - protein, 352 aa, unidentified
MEIHTVGIDLAKTVFHLVGLNAHGEVVVQRKCSRSQLLRFTSNLRACLIGMEACGGAHFLARALRDQGHDVRLMPAQYVKPYVKTNKNDYIDAEAIAEAVGRPRMRFVPIKTDDQLDLQSLHRIRERWVVRRTAVINQIRGLLLERGITIRKGRLYIEASLPAILEDADNKLSGILRVLLTQLQLEMQYLGRQIDESDKLILEIAKGMDSCRRLIAIPGIGPLTATATIAAIGNGAAFKKGRGFAAWLGVVPGEQSTGGKQKLTGTGKRGNKYLRKLFVQGAHTVLLQKNKQSAGLSKWLADLTARKRKQVATVAMANKMARMVWAVLTKGEAYRPPLLLQPAGNGLQMTPA

SEQ ID NO: 314236 - protein, 409 aa, unidentified
MRITCGIDWSERHHDIALLNADAAIVTRARIGDDLAGFRRLTELLAEHAGPDGPTSIEIAIETDKGLLVAALVAAGFTLFAINPRAVARYRERHGQAGGKSDPGDAAVLADILRTDRHRHRPLPADTNLARGVKAVARQHQEAIWARQQTVNRLRSLLREFYPAALAAFPILTQRAALTVLRAAPTPQAAARLTPSRMGTLLRRAGRRIDSGLPERLSTQLRQEQLRQPAEVEQAFGVAAAGLIDVIVAMTGAIDALQEQLTGLFTRHDQAQIVTSMPGLGTVLGARVLGELGDDRSRFTDIAGLRGFAGTAPITRASGKTKIVSARYIRNQRLADACHWWAFAAITKSAGARVHYDQRRAAGDTHNGALRNLANKLLAKLWHCLHNGVLYDEATAWPTPREKIESAAA

SEQ ID NO: 314237 - protein, 367 aa, unidentified
MKKVSTVVAKQSRNFSSPKLTIGLDLGDRSSWYCVLDEAGAIVLEQKLGTTPKAMKEVFGAIPRSRIALETGMHSPWVSRALSELGHEVIVAHARNVRLIGESRKKDDRLDAQTLARLARIDPQLLSPVKHRSAKAQADLTVIRARAGLVRARTALVNTARGLAKSYGERLRGCNVRNMNAEKAQGLSPELRTALEPLLAGIESLSERIRECNEGIERLAQEGYPQVAQLKQVKGVGTLIALTFLLTLEDAHRFRQSRDVGCYLGLQPGRRNSGQSEPQMHISKEGDPYLRTLLVQGAHHILGPFGADSDLRRWGLKLAERGGKSGKKRAIIAVARKLAVLLHHLWVSGEVYEPLHNSKQRAMPAAA

SEQ ID NO: 314238 - protein, 419 aa, unidentified
MAFKIFRKNCCGLDVHKTWIYACIGITDTNGRTEYKQARFSSFSKGLTELADWLAKYSCTEVCMESTGKYWIPVFNILEKSCFVTLAHPKYTKPQKGNKTDRKDAKWICDLFMCDMIKPSFIPPADIRQLRDLVRYRTKLTNILTGEKNRALNCLTVSNLKLDDVFSDVFGKSSRSIIGYILEHPGQSFDVTPFVDKHCKKPIEEIQAAVDGAISREQAAKLKECLRHIDEIRAHKQNIELEIQRLAEPYAYALELLQTVPGLSSDPITAISVISEIGADMSVFPTSKHLVSWAGCCPRNDKSDSKVKSTRISRAGTYLKPLLVQVANAVIRSDKNPEFKERYRRLKARRGHRKAVIAICRMLLTAIWNILSKLVPYSPNGYLKDKITEHSVLISKAEGLALLRKRGYIFKDEVAASSS

SEQ ID NO: 314239 - protein, 367 aa, unidentified
MNYSAIDYHKKNSFVSTVNEQGQRVAEAKIKGNAPAAFAQFFAGLGGEATKVVVEACWNWGWLYDVLEQIEEVEEVVLAHPYKTRVIAEAQVKSDKLDARILSQLLRGNLIARAHAPSWSTRQRRFLLRQRMFWVRVRTMVRNRVHALLARQHGLELPHRHDLFGSGGMKFLRSLSLSGIDGALLRQDLEVLEQLDSQVKASEREIARELGADPEVERLQTIPGIGKLLAAVIAAEFDGAERFRTNKKLWGYCGLAPSTRSSDQHTWHGPLLGQCNKWLRWAFVEAAWVAIVHSGYFGAIYSRQIERGKIANQAIIVVARRLCEIAWKVLREKRSFQSSAPSKISHRPHVILADAPLTKCASRPRSD

SEQ ID NO: 314240 - protein, 400 aa, unidentified
MRAVFGIDVSKVSSEVAILVNGEKVHNYTMSNDAIGFSRLLGDLRTVHKPEIIFEATGVYSRRLQSFLDEHGYAYTRLNPLEAKKQLDSLRVRKTDQIDAEKLAQSQFVLNRKSTYVQEEVYQNLRDLSRFYQNLTEDIVRAKNRLHKVLQVTFPELENILSTPTGEQYWNLVIAFPCKDFVLELSKDKLLESIRQSTSKRISDKRVAYLAEKLIALANQSYCAVKKTSPMLEEVRYYTKELLRLSEQRQAVLDEMVELAQPLPEYDILRSIPGIAETTATSIIGELGDIRRFQSANQINAFIGIDLRHYESGNFLAKEHITKRGNPYARKILFKCIHNVASASHTNPCHIADFYEKRKRQSQTTSTKPHTIASIHRLIRTMYYLIMHNKLYDYASTQNR

SEQ ID NO: 314241 - protein, 266 aa, unidentified
MAAVGIGVGKTNLDVAVEGRQGVTRYANTPSGITKLVKWLGGLEAPRIVVEATGGYEEPVLEACCDAGLWICRVNPRQARNFARATGELAKTDAIDARQLALMARLRVDRLRPHVAPQAWQRELRDWLRRRGQIVMTLQGQKQQAAMAPSAVRTLTLRTIAALARELKAVEQAINRLIKQHATPAVCSSKGLGPVFQASMLALLPELGELSRREIAKLVGVAPMNRDSGQGQGKRRIHGGRAPVRVALYMATLSARRPPAFSSRLI

SEQ ID NO: 314242 - protein, 336 aa, unidentified
MSRDIKYIGMDVHQEAIVIAVLNGSGKLVMETILESKASSILQFIHGLRGELHVTWEEGTWAAWLYDLLQPQVQQVVVCNPRRNALLKEGNKSDKVDARKLAELLRTGMLRAVYHGENGLRTLRELGRSYQTLSKDLTRVMNRLKALYRGWGIPCAGTQVYAPRYREEWLSKIAQVGVRRRAELLYQQLDELQALRRTLRPEFLAESRKHKAAKLLRQIPCIGPIRAARLIALMQTPHRFRSKRQLWTYSGLGIETHDSAQYRFVGGQLQRSKKPQQLRGLNQNHNHEMKEIFKGAATRASCGRGPFRDFYAALLAKGMKPEMARLTLARKIAAIL

SEQ ID NO: 314243 - protein, 340 aa, unidentified
MNNTTKCYLGIDVSKPYFDVSILKVINHQKQDIETTRLDNSVPGIKTFDKWLRKQQVTFDANTLLVIENTGIYHRLLWAYCNRKNLPIHIGNAAHIKWSFGIARGKNDKIDSIRLCRYACKESDTLTLTMALAPELLLLKDLMTSRTRLLSQKNSIKVYLKELSNVSDKGVQKLLQQAHKTAIDGIIKSIKTIEAQIAGIISANPVFKTNYDLLLTVPGIGNLLAIYLICCTNNFATKITGKQLACYAGVVPFDHTSGISIKGRSRVHSMANKTLKKMLHLSALTVIQHYTEFKTYYNRKKEEGKHSMSILNAIRNKIILRAVAVVNKQNPYVDKTKIAA

SEQ ID NO: 314244 - protein, 338 aa, unidentified
MDHFAGLDVSVKETSVCVVDDTGKIVREVKVASEPEALLAVLKNPAYHFKRIGLEAGPLSQWLFSALAEAELPVVCVETRHMQAVLKAQINKTDRNDARGIAQMMRVGLYRPVHVKTLRSQKLRMLLTHRKLLQSKAIAVDNDLRGTLRNFGLKVGMVGTVKFEARIKELVENLPDLAGLVEPLLVVRRVLREQFVILHLRLLAIVRDDEVCRRLITTPGVGPVVALTYRATVDVPARFRKSKSVGAVFGLTCSKYQSGEIDRSGRISRCGDEMMRVMLYEAAQSMMWSKKWSWLKAWAMQIARRRGMKKAIVALARMLVRSCDHAQNKAAARGKADQ

SEQ ID NO: 314245 - protein, 422 aa, unidentified
MKTTDYAAYVALDWGDTQHAFALQMAATSEVKTGQFDAGAETTHEWLKQLGAHCAHRPIALAVEAGCDALIAALLEHKWIVIYPVHSSMSARFRKALVPSGAKDDVPDATVLLTLLLRHGEQLKPLQLDSAPTRELSALVLGRRGAVDRRSQVSNQLRSVLKGYFPQALKLVGDEMAGTLALDFLDRWPDLATLQKARAATVRSFYLLHNVRRPELVEARLRQIAQAQPLTQDAATIVPAVLQTRMLVAVLRTLQRHIAQFDACIAEKFASHAESAFFRQLPGAGPQLAPRLLVAFGDRRDRYPDASSLQKYAGLAPVKEKSGRQLWIHWRWNAPIFLRQTFVEWAGQTVVYCGWAKAFYLHQKQAGKGHHAIIRALAFKWIRILWRCWQRKEPYDEARYLEALRRRRSPFVAELDATPAQS

SEQ ID NO: 314246 - protein, 438 aa, unidentified
MWWNSQWLLSIFQKGALPVKIVYQTCCGVDVHKSFLVATIIKTTSGVQPSYQKKRFSTFNNSILEFKKWLLDNSCQDVCMESTGKYWVPVFNLLEDELNVTIANPKWVKAVKGNKDDTKDSKWIGDLFRLGLVPGSYIPCKPIRILREFTRYRYKLTSCRSSEKNRFQNALTVCNIALDSVVSDIFGKSATSVIDYLLEQSDNSINHEEISSRLLRSLKKKSESVIESIEGYQMTDAQKYRIRLVHAHMDYITSTISDIDSMIDSLVEPYENAVQLLCTIPGIDRSSAITIISEIGTDMTQFSNPKRLCCWAGLTPGNNESAGKKKSVRITRAGVYLKPALVQAAHAAVQSNKSPYYKAKYERIMKRRGKKRAIIAVARMLLTAVYHMLSTGEAWNPTDLYKIDMPEPLKNKQKEKAVKQAMKLLIAEGLIKESLLTS

SEQ ID NO: 314247 - protein, 371 aa, unidentified
MSTTSMTPQPMVIAIDPHKASWTAAVVDASLQPVAMIRVPVSHEGYRALRRFANRWPDPTWAIEGASGLGAPLTTRLRTDGINVVDVPAKLAARVRMLSTGHGRKNDDADAVSVAIAARTAPRLNSAAADATITALRAIVEHRDDLVKTRTQTVNRLHVVLTHLIPAGASRNLTAERAAELLRGIRPRDAAGKTLRTLAADLVTEVRQLDRRITKAAADIQAAVTESGTTLTDLCGIGALTAGKILGRVGTIDRFRSAAAFATYTGTAPIDVSSGDVVRHRLSRAGDRQLNLCLHVMALTQIRQDTPGKTYYLRKRTDGKGHKEAMRCLKRRLSDVVYRQLRRDADRPGAGPGGHSGAALSSSAASSNPAH

SEQ ID NO: 314248 - protein, 373 aa, unidentified
MTANPASRYVVYIAIELSASTWLVALQRPMLKKVRLRHLEAGDTQGLLALISEERSLAEVGVEAELVSCFEAGRDGFWLHRFLLAHGVKNLVVEPTSILVTRAARRAKTDRLDAQGLLRVLAAAFTGDHEACRVVSVPTVDEEDAKRPHREREHLVQERIRIENRIAALLATQGIPRRPSLRSWEADLDAMRSGDGRPIPPLLKAELSRLRRRLSMTLELIREVEAEREQTADRQEDAGGQMAKALSKLRGIGDNFAAVLAREVFYRSFGNRRQIASYLGLAPTPFQSGGIDRDRRINRAGNGRARKTLIQLAWLWLRYQPESSLTTWFRNRVGSLQGRTRRIAIVAMARKLLIAVWRFATMGVVPEGATVSA

SEQ ID NO: 314249 - protein, 352 aa, unidentified
MAQFIGCDAHKKYSVFRAINEEGKLGPTDRVGHDREQFRAYLTQLPPASSIAVESSGHWYWLIDEMERAGHRPRLANASEAKRRMGKTKKTDKLDAGGLAILLRNGTLPEVWIPPAELRDQRELLRLRMFLSALRTQVKNRIHGTLGRYNLQIAVSDLFGVEGRLLLAQRLGELPEQTRRSVERELATQDFLELQMEEIEKGLRQVMQTVAEADLLRTLPAVGPILSAVIALEIGNVNRFPSAENLASYSGLVPRVHSSGGRTRMGQVGGDVNRTLKWAFVEAANLIVMQQRRLAGTHVLRLYQRIRARKNHQKAAVAVARHLAEAAYWVLRKKEAYREPLARKPAVASTHG

SEQ ID NO: 314250 - protein, 352 aa, unidentified
MVVAVQYRRPSLNKNVMVQIYGIDLGMSSFDVSFLSESGSVRHLSGVKNTVHGISKFLLSLPSSAVLCAEHTGVYGDLLLRLCTLNRTCLCFVPGYQIKHSLGLQRGKSDPLDACRIREYAERFYDLLRPCFYPGEEMSELQELYRTRSLLVDSRKRLDTLNIGDNCKSSVSLAADHARRAVLAELNTQISGLDHEIEALIQNSSEFSRNYQILTSIVGVGPVTSCELIIKTENFRKLDTAKKCAAYAGIAPYPKESGKMKCGHKISPMGDKQLKTLLFLCARSAKEHNKEIRLYFLKKHKVEKKHFFVAMNNIANKLLRLIYSLIHKQQTYDRDYIQRDPRCVVISDTHKC

SEQ ID NO: 314251 - protein, 418 aa, unidentified
MSKKLDTTFIRVVHPVCCGLDVHKKKISACLITVDEHGQEQYDIEEFGTFTNDLLNMKEWLTDNGCPIIAMESTGVYWRPVHNVLEGFMEVILVNARHIKNVPGRKTDISDSKWLAGLLRHGLLRGSFIPPKEIRQWRELTRLRRTYTESLADYKRRIHKLFETANIKIDSVVSDLFGVTGRNLISLLCDESELSLENIRENAKRGLKSKAKELLSSVQGFFEDHHRFQLIGMMEVIAGFETKIAEITDRLDALTAGHQDLLDRLDEIPGIDKKSAQSIVSEIGVTLDEFMCMAALASWAGLCPGNNESAGKRKSGRTSVRSHPFKTILIEVAWAAVKKKGSYYRAKYFKLKARRGPKKAIVAIAHRISKAIYNIIKNGDTFRELGEDYLTAQTKQRTIKNIKQRAKQLGYKLVPCVN

SEQ ID NO: 314252 - protein, 354 aa, unidentified
MMIIGCDYHPGFQQIAFVDTGTGELQERRLEHREEAEKFYRDLAAQGMKVRVGMEASGHARWFERLLGELQLELWTGDAAAINAKRVRKQKTDRQDAQLILRLMLKDDFPQIWVPSWENRDLRRLLWHRHRMVQARTRIMNQLQAVALNEGLRSKKRLWRDAGREQLETFRLAPWASRRRRDLLELLDRLTPTIAELTAAIEQEVEKCPAAQRLQTHPGVGALTALAFVLIIGRAERFQCGKQIACYLGLVPLEDSSGQRRRLGHITKQGNSLLRFLLVEAAQVTVRSLPEWRSKYCHMALRRGRKIAKVAMARKLAVRLYWMMRKEWDYEQLRKFGSHAGEPGHRDGVKQNTE

SEQ ID NO: 314253 - protein, 428 aa, unidentified
MNDLELSRVEAYRQLKNEIRGSKEYLIVGIDVAKSKHNAFFGTATGKSLLRRVAFENDMEGFERLLLHVDAVKVEHALDQVVFGLEPTADYHKPLAEYLIKGGYRVVLVGGEAVKKNRVLLDGRWDKHDMKDSANVADLISQGKCLHYDFPSIELRDLRNLLSLKRRLKKQEHGWKVRIRNHLLAQYFPEMDRYYGQSETQGLPIIRWCLNPDVVARLDFDSFIGLVAPQCRMVQHRERLRMIWEKAGGSIGCEVGESVEFEARLSVEGLTQAQDAVRECKKKIEEICRGFPEYPCLLSIPGFGPDVSAKVLGAIGNPFRFHNGQQVLKLSGMDLSASRSGKRSDRAVPVISKKGKAELRYALYQAALIASVKNRHFKIYFTNRLRGREREKGIKTKMRIKLAAKMLLIAWHLMKKQETFDPQYLNLH

SEQ ID NO: 314254 - protein, 406 aa, unidentified
MELTTLHKRVIACDVHQAQVTVCAILEEPEGSVRIEQQRFGAFQRDRRALAEWVGARRPDVVVMESTGIYWKSLYAALEAVGIRAVVVNARHVKNVPGRKTDIGDAQWLATLARAGLLRGSFVPPATLRELRLIARQRQKLMGQLASEKNRLHKVLTDGGVRLGVVVSDLHGQSARAMVKALIRGQAPHEVLRHASRRLKATRAEILDAVQGELTDSHRFVLDELMQHIEDLEARVARFEARLLAGLADQRPVLALLQTLPGVDLIGAALLLVEIGADMDVFASADRLASWVGICPGNNESAGKRKSGRIRKGNPYARRLLCEFAHAASRTPSAFQGKYKTLVVRRGHKRAIVALAHKLLRTIFFMLKRGEPYRDSATDYEALAVQRNAPRWIKALTRFGYITPAA

SEQ ID NO: 314255 - protein, 367 aa, unidentified
MSSVASPEGLIHLGMDTSKNTIVVATLLPGEENPVTDRVFNEEEAIRRLAGRFPDRSVLRAWYEAGPGGYDLYRLLTSMGVACQVVAPSLIPKGGSDKVKTDKRDSRRLARLGRAGELTPVRVPSPAEEAVRDLARARAVVLDDRKRARQRLTAVLMRHGRIWRGASYWTAAHRAWIAAQRFGEPALASAVGHYRAALEVREAELAAIEAELAPWAAREPLAGPVARLGCYRGIAELGGLTLAAEVVDWRRFPAARAFMSYTGLVPAEYSSGERTRRGHITKAGSEPVRTALTEAACAYRHAPAIGAGLRRRQHGAAPETLARSWKAQRRLHARYVHLVHAGGKAAPEAVVAVARELAGFAWAEMTA

SEQ ID NO: 314256 - protein, 425 aa, unidentified
MNKDVLSTLFVGIDVSSASNYFCAINFEGKHILDFSITNDLPSSEIAVERIFNALQENDLKYVTMVLESTNVFSFHIANFLASNNSLFNFNSKVFVINPKESSNFRKTYSDMDKTDPQDAFILADMARCGRINQQPYKASQLFALQRLTRQRFHLVKTIMREKAYMMSNIYLKFSSLYIAEKEDEPFSNLFGNTSKSIIADFTPDDIVNMSDEDMINFIMEKGKSRFSNPEENVKLLKKIARDSYRLDKIAYNPINVAISSSFNTINALEDNLKVIDKAIEKNVKGLCDNEFTILKTIPGIGDVYAAGIISEIGSIDFFKDNNALAKYAGLTWRKTQSGYFEAETTRMTKTGNKYLRYYLIEAVSSVKNHSKEFNDFYTRKYNEVSRGAHKRALALSARKLVRLVFGLLHHNQLYSATKLDNRSN

SEQ ID NO: 314257 - protein, 401 aa, unidentified
MVKIRERIWVGIDVGKASHHACAVDETGKVVFSQQTANGQAAIQALIARAGKAGGEVCWALDMTSGTAGLLLALLWQTGQPVRYVPGRLVNRMAGAFAGEGKTDAKDAKTIAETARLRTDLVTVTAADPIVADLQVLTAQREDLMGDWVRGVNRLRALLASIFPSLERAFDYSTRSALVLLTGFQTPTSLRDAGRDGVQAYLTEHDAWPRGIPVMADKALDAAGEQTVVLPTEKVTAPLIARLAADLLDLDRRIKDLDKQLTDRFEEHGHAKAITSIPGFGPILGAQFLADTGGDLQRVFGTPGRLAAYAGLAPVPRDSGRVKNNLHRPKRYHRGLRRVFYLAAFSSIRADGPSKTFYQRKRSEGKVHTQALIALARRLVDVIWALIRDDREFQPTVAAAA

SEQ ID NO: 314258 - protein, 419 aa, unidentified
MKKTKTKKLETVNEKTLIVAIYIGKTVHYGYFRGPQGHDIKSFPFCNTWRHFEDFWDKIVLYKTEHKLANTIIGFESTGSYAEPLAYYLAQKPVHLVQINPMHTKRIKELTDNSPNKTDRKDPRIIADVIALGHALTVVIPEGSAAELRRLIQARERAIKIRTIITNQLHHMIDLIFPEFTQVVTNIKTKSALYLLRNYPTPENIVSLGLKSLLLFLKKVSHGKMQRERAVRLFEAAQHSVGIHEGRQSMLLEVEHLVSGIENRNRFIDQLEEKIQYHLDCIPYSQSMLSIKGVGPVTIAGLIGEVGDFGKFKTISEIMKLAGFNLYKVSSGKHSGQRHISKRGRSLMRKLLFFAAIKTVRSNGIMYRKYQEMLDRDMPKVKALVAIARKLLRILFALARDNMVYCDDYNEVHKVALAA

SEQ ID NO: 314259 - protein, 368 aa, unidentified
MLKQSHYRVGCDAHKRYSVFAVCDGKGKVLDRVRVNHERGAIQGFLSQFPSGTPVALETVGNWYWIVDEIEVAGCVALLAHAGKAKAMMGHTHKTDKLDAEGLATLLHNGTLPTVWIPPGDLRDERELPRTRMALSKVRTMLKNRMHSTLAKYALSLDTESDIFSHKWRPQLLDLLRRLPGETQRCIHQELELLDQVQEQIHRLEARILERVQKTPTIQLIRSVPGPAEILSIVIDREVGSIDRFPSPKNFCGYAGTVPKVKGSGGKYHYGRMIKQANNYLKWAFIEAANVVVRQRQHPNWRNKHVVKLYERTRRRKGHAVAVGAVARYLAEATYWVLKKGEPYREPVPRRPVAAKSPISLRQGQTRA

SEQ ID NO: 314260 - protein, 379 aa, unidentified
MLIDSNHSIYRDLLHRHVSATDMGAVKAPTIRRSQVMQAITTIGLDIAKSVFQVHGVDAKGNVVLRRQIKRRYVLAFFQKLPPCLVGIEACASAHHWSRQLQALSHTVRLMPPAYVTPYVKRHKNDAIDAEAICEAVTRPNMRFVATKTREQQSCLTLHRTRHLLIRQQTSVINAIRAHLAEFGIVAPVGRNGVDQLLGIVADASDKRLPELARACVAALGTQLGTLKAQILQFDRLIMAWHRSSEASRRLDEIPGVGPALATALVATVADPQAFRSGRNFSAWIGLVPKQHSSGGKDRLGSISKRGDRYLRFLFVAGALAVIRYAKIHGTKHRPWLTALLARRHTKVAAIALANKIARMTWVIMAKGEHYKEHVALAA

SEQ ID NO: 314261 - protein, 383 aa, unidentified
METLNKSVAANDTEQQQAKLYVALELGQATWVVGLHSPIADKISIYRIEGGDTDKLMALIEKKRVQAARQLGRAVQVVCCYEAGRDGFWLHRFLIRSGIDNRVLDSASILVDRRARRAKTDRLDARALLRVLMALVRGEEQVCRVVRVPSIAQEDERRLSRERERLLHERNSHIARIKGLLILHGVRDYRLIERDWRERLDAVRTAEGQALPARAKMEIERECRRLWLVKQMLAEVEREIDQMIAQDGAVAGKLIRVRGIGPTFASVLTHEVYYRSFDNRRQVGSYLGLVSIPWQSGRVRRDQGITRSGNARARRCAIELAWLWLRHQPGSALASWYRTRVGTMTGRMRRIALVALARKLIVALWRYLHNGIVPEGAALKAAY

SEQ ID NO: 314262 - protein, 362 aa, unidentified
MNQEETSRRLYTTQHPFYCGIDLHARMMSVCILDQSGEILVHRTMKTDPETFLKAIAPYRQGMVVAVECLCTWDWLADLCADAGLPVVLGHALSMKAIHGGKAKHDQIDSHQIAALRRGGMLPQASVSPATMRATRDVLRRRRPLAHKRAALLAHVQNTHSPYHLPAMGTKIASKANREGVAERCADAAVQKSIAVDLALITSDDALRRDGELPIVTTAKHHDAHTLSLLHTVPGIGTMLRLVLLDAIHDVHRVPRVQDVVSSCRLVQCARASAGTRYGTSGATLGKAHLTWAFAAAAVLFLRDHPAAQKYLARVEKKHDTGHALTSLAQTLARAVSDLLKRPGACETETFFQRYTIREGSG

SEQ ID NO: 314263 - protein, 347 aa, unidentified
MTQAQIYIYGIDLGKNWFHLVAMDRMGHVLTKQKLTRSQLKQFISTTPPCRVAFEACPGSQYWGRLFQQAGFEPKIIPAQFVKPYLKSNKNDFNDATAIAEAGSRGTMRCVPLKSHEQLALQATHRVRQRFIVERTATVNQMRALLLEYGLTVPVGRKVFERSLPTILEDAENGLPDFIRALVLRLRERWQQLDIQIDDMSLMLGQASSTSSLCQKISTVPGIGPIVSTALIAAIGNGSQFKKARDLSAWLGLVPRQYSTGGKSSLGGISKRGNSYLRQMVIQGAKALKIHMKRDKSSLGEWVARLEAGHHHHVVLIALANKIMRICWKVLTSGRDYQPYPNTSSAV

SEQ ID NO: 314264 - protein, 365 aa, unidentified
MNTITIGVDLAKSVFSVCEVDGSGHVLRRLDLKRDAFAVWLAQVPAGTVVAMEACSGAHHWGRLCLEYGLQPRLMATQFVTPFRKNRTAKNDRNDAEAIATAARQGNMRFVPVKTIDQQARLSWHRVREGYKVESLAIGNRLRGLLAEFGVVVAKSDHALRVALADLDQHTALPPEMRELLRDLSAHWAQVRTAVDACSARIDAHARADERCARMRAIIGIGAITADAVIVTLGDAKEFRNGRQVSAWLGLVPTQHSSGGHARLGAISCRGDGYLRTLLIQGARSSLQRAKAVSAEKSTPEQVWIRQLACRMPFGKVLVVIANKHARQLWAMLAHDETYDADAWLKHPMVQRPAGKHAITMSVVA

SEQ ID NO: 314265 - protein, 424 aa, unidentified
MKVTYQTCCGVDVHKSFLVATIVKTTGGIEPSYQKKRFSTFNNSILEFKQWLLDNDCHDVCMESTGKYWVPVFNLLEDEINVVIANPKWVKAVKGNKDDTKDSKWIGDLFRLGLVKGSYIPCKIVRILREYTRYRYKLVSCRSSEKNRYQNALTVCNVALDSVVSDIFGKSSMSIIDYLLEQSGTSINHEEIASKLLRSLKSKEDAVIESVEGYQMTDAQKYRVRLVRAHMDYITAEINDVDKMIENMISSNPDFENAVQLLCTIPGVKRDSAITIISEIGTDMSQFSSSKRLCCWAGLTPGSNESAGKKKSVRITRAGVYIKPALVQCAHAAVKSDKSPYYKKKYESLVKRRGKKRAIIAIARMILTAIYQMLSTGEQWNPSDLYKIDMPVALIEKQKTKAIKQAKKLLQREGILPPDEPLAS

SEQ ID NO: 314266 - protein, 345 aa, unidentified
MKIVGCDLHTRYQQIAMLDDETGELIERRLEHESGEARVFYATLTGSVRVGIEATGHTRWFERMLRELGHELWIGDAAQIRAAMVRKQKTDARDAAHVLDLLLNGRFPRIWRPTMAERDLRQLVWHRQKLVWMRVAVSNQLHALAMGEGVCRKKKLFTKKGRVELEGLVLDPWASRRRHELLQMLDQFDTTLDELDSAVAEQAEQNPAAVLLMTHPGVGPVTSLAFVLTLGPVGRFERSKQVVSYLGLNPREHSSGGKQRLGSISKQGNPMMRSLLVEAGHSAARLDTELKQDYQRLKLRRGNGVAKVAIARKLAVRMYWMQRSQASYTQLVRMQGSPWATLVKE

SEQ ID NO: 314267 - protein, 345 aa, unidentified
MREASVSEISIIGLDIAKHVFQAHGADALGRAVLRKKISRAKLLPFFASQPRCRVVLEACGGAHHWARELARLGHDVQLIAPAYVRPFVKRQKNDAADAEAICEAAQRPSMRFVPIKSEAQQAAAMVFRGRDLLVRQRTQISNALRGHMAEYGWVAPKGLAHLDKLATLLADPTAVPEGVRSVCTALLENLALLDRQIAALDKEIVRRSREDEIARRLMTIPGIGPITATAITALAPPPGTFAKGRDFAAWVGLTPRQHSTGGKQKLGAISKMGERTLRRLLIIGSSAVVLQASKRGAPRGSWLEQMLARKPRMLVTVALANKTARIVWALLTSEEDYRAPVAAA

SEQ ID NO: 314268 - protein, 320 aa, unidentified
MMAQNDRVVAGIDVAKDKVDACIRSLSLRQTCPSGAQGQRKLMVWLRKHQVGRAVMEASGGYERVWAKVLREAGIEVRIVDPKRVRNFALSAGRLAKNDAIDAEMIAWFAETFSDAPSQAYNAAHEELQTLVKARLSLIDFRMRLVSRSEHAAAGLVRKGHAHILKSLASEIAKLEAAICAKVKSIPDFAERAEIIESVPGFAETSSANIVAGMPELGQVSDKIAAALIGVAPYDDDSGKRRGERHINGGRRWVRNAIYMPCVGAATLNNPVLKAYYQRLIAKGKEPKVALIACMRKLIVILNTMIARRQKWDPGRYALS

SEQ ID NO: 314269 - protein, 333 aa, unidentified
MTTHSQNRATTQENNENFVGIDVAQDELVVHVLPTNQQFTEPNSAKGIKALIRRFQKILPKQIVFEATGGLERNLLINLTAAGMPCVVLNSRQARRLAEGLGQLAKTDKVDAMILAQVASLQCFTPRPVPEQRTFEMNDLVTRRRQLVKTRTVEKNQLHAATQTNQAKFILSGHKKMIAFINKHIDEIDARIQAMIDENTDWDEIDRIIQSIPGCGPGTAQALIAGMPEMLNGSLDRHQVASLAGVAPFKDKSGKRDGKAHIYGGRLDVRCPLYMAAINVIQQEGVFKSLYDRLLAKGKLKKVALVAVMRKLITVINAMIKTKTLWNEHGVRS

SEQ ID NO: 314270 - protein, 392 aa, unidentified
MFYIGIDVSKDKHDCFCCNDDLQPVFQFQFSNDSIGFNLLFEAIKSLDSSFDNIKIALEATGHYSYNITSFILDNSLPLAIINPLHSNLFRKSISLRKTKTDKVDANVLARMLIAYPDLKFSTSLDDNDIILSELKSLTRFRLSLVKDLSKLKTSLSRIINIVFPEIEKVFSSTNSLYELLYNFPSAKEIANAHLTKLTNVLIKASKGHFSKEKAIQIKKLAQNTVGNSSYALTLELKHTIKLINEYNSSIDKIDKEITTIMDKIASPITSIPGIGITLASIIIAEIGNFDNFDSPDKILAFAGMSPTIYQSGKYVASSAKMEKRGSKALRYALYNAARLTSIYCPVFREHLARKRSQGKHFSVAISHVVKKLVRVIYHLQTKNELFKNTIN

SEQ ID NO: 314271 - protein, 361 aa, unidentified
MHYVGLDVHAHQSTYCVLDGNGKVFQRRTVFGSWHKLIGKLDKMPKPFAVCYEASLGYGFLYDRLSKIAERVEVANTSQLRLIFRSKHKNDRADAEKLAKLLFIDQVPVIHVPKPEIRAWRSIIEHRHSLVSERTRIKNGLRAILRSRAIVPPMRLWTKAGITWLAGIDLDSDLDALRRDMLLERLCSVEKMVARVEKTLDARGTAHPGVRLLMTIPGVGLRTAEAVMAYIDEPGRFTRNKAVGRYFGLVPTQDASSRKNHLGHITKEGSPTVRKLLVEAAWQGKRRSRRIKAFYERILRDDKQRKKIAIVATAHYILRCMLAMLTTGEVWRNRGTDKIYSPPQRLRRVIDKPILAAVAGN

SEQ ID NO: 314272 - protein, 403 aa, unidentified
MNSVGIDISKGRSTIAVMRPFGEVVISPFEVRHTGSELSKLAKQLKSLDGETRVVMEATGNYHAPVAKLLHDAGLYVSVVNAKLVHGYGNNELRRVKTDRKDAVKLANYGLDRWLTLPRYIPEEDTRLLLKNCYRQYRQYSKVQTVLKNNLISLLDTVFPNANRLFSSPIRGDGSEKWVDFVAEFWHCRCVSEKSERAFTGKYLRWCRKHGYNFREAKAHTIYAEASGHIGVMPKFETTKLLVEQAVAQLRATSTALAALKHEMQSLASQLPEYPVVMDLFGVGPTLGPQLIAEIGDVRRFYSKKALVAYAGLDAPPNDSGDVTGRHKSMSKIGASSLRRTLFLVMSVYLQTAPLDEPVCQFMDRKRAEGKLYRVYMMAFANKFLRIYYATVKAYLESLEHTA

SEQ ID NO: 314273 - protein, 445 aa, unidentified
MHYKRLLTWIDGSSSYLSVGLDVGADFTWMSIALPNGAFIGKPFKIVHSDPRSRDLAVTKIKEAQETYSLKSRCFLESTGIYHIPLLCFLRDKGFDCSVINPIITKNSTNINIRKLHNDKFDSKKAALVGLNVSLKASIIPEDSVVDLRNLVRDYYYFKDLQSAVALKLTAELKMSFPAYAKVFSKVTTQSSLKLLSSYPLAGDMLEASKDDIVETIRSTARFGEAYALRKYDAVIAAAQDASVFGRALPSNAVRIRLYIDTYQEYQKHLDALLKALHETVDRLQDTLIYDQICLLQSLRGIGFLSAVVLIAEMGDFKLFPSPKKLYAYFGLDPAVKQSGKLNGDKVHMSKRGSSLARRVLHMVALNNVKVDKGSGTPVNPVIYDYYTRKCSGKKKPVAMGAVMHKICNIIFAMLRDNKPFEIITPEEHCQRFAAEYPDKIRKAA

SEQ ID NO: 314274 - protein, 346 aa, unidentified
MVLIGCDFHPSWQQVSWLDRETGEAGDQKLVHEPGAVEKFYRQFPAGTRIGMEATGNCQWFVELVTGLGHQVLVGDAAKIRASDSRQQKHDKRDARLLVQLLAEERFPEIWVPSREQKDLRQLLIHRYKLVRIRAQVKNGLQHLAMNQGVLKKRKLWSQAGERVLRELPLAPWASRRREDLFKVREMLNGQIDQLDQAVVDAAEKNEKARLLMTQPGVGPITSLAFVLTMGDVNRFQRGKQVASYLGLIPREYSSGGHQRLGSISKQGNTFLRMLLVEAAQGAVRCDPGFRNEYLHHCHSKPKGVAKVAAARKLAIRLYWMLRTNTGYPEVVRVESISRVPLVGAS

SEQ ID NO: 314275 - protein, 341 aa, unidentified
MDTIYYIGLDVHKKTIAYCVKRSDGELIRHGTVKSERKALLEWLSGQPGSWIGAMEATMFTGWVYDFLKPHALELKVAHPEMLKAITAAKKKNDRADAEKIADLLRVNLLPECYMAPSQLRELRRILRYRNMVVRTAVMMKVKISSLLMEVGASYDKRRIHGKRYFDSLLERVEDVPASVKELLALSRSNLELFTAVQKKLLNTLKGNELIRQRVERLMSIQGVGEVLALTWVLEIGDPSRFRSSSKAISYCGLCSAQNESAGKQYRGPISKKRNKHLQTMLIEAAKLAPRWNDQLAMVHAKELARGNRNRATLAVARKLVKYLLAVDRRNSDFEPLQQAV

SEQ ID NO: 314276 - protein, 316 aa, unidentified
MKNEVFVGIDVSKQHLDVAVRPQGRHFITPNDDRGLKQLLKRLTALKPQLIVLEASGGYELLATAALAEAQLPVALVNPLAVRQFAGATGKLAKTDKIDAQVLAHFAEAVRPELRPLPDQEQQLLKAALQRRVQMVKMIGQEKNRLEKTFIPQLRQDIQAHLAWLQQRLAQLDRDLNDQIRRSPLWRDRDRLLQTIPGVGPAVSRAVMAQLPEAGRLPGKKAAALVGVAPFNRDSGRFRGKRMIRGGRSYLRRMLYMAAVVAARWNPVIRTFYQRLLAAGKPKKLALTACMRKLVLILNAMVKNNQPWNQFIAQVP

SEQ ID NO: 314277 - protein, 358 aa, unidentified
MSTMLSGQVDFVIGVDTHRDTNVAAIVEAVTGGVVDHLHCSTDAMGYKRALAFATLHAPGRRVWAIEGTGSFGSGLTTFLLENGEWVVEIDRPARPARRDGAKSDELDAVRAAREALSREHLAAPRARGDREAMRVLLAARHGAVVGRTKAIGQLKAMIVNAPQQLRDQLRRGTTDQQLDRCARLRTLPSHSVEHRATVQAIRATARRALYLEAEAAEYETELEQLVMNACPELLALPGVGVITAAQFLICWSHPGRIRNEAAFAALAGVAPIPASSGNTVRHRLNRSGDRQLNRALHTVALSRLQHHEPTRAYAARRTAEGKSTRDIKRCLKRAIAREIYRHLQTYAHTLNQKQTAA

SEQ ID NO: 314278 - protein, 365 aa, unidentified
MRIDIGVDLHTTQFTVYARGEEKLGVNGQYLTNEEGYMTFLRKLGAWTRSGHDVRIGVESTGNTRYFKHRMEEKGYPVIVINTMKFKVIHESVKKTDKHDAATIAEFLSKDMLPESRLCSEASEHLRRLLKVRSTLVRARVTVKNQIHGLLVSMGMKDTKASLQSTRGRQKILDTLAGAGNGLVVQPLVATIDRLSENVKAIEGEIEKLVAGDKVVELLQTIPGCGPITASSIRAYTDDIQRFANHKKYASYAGLAPWVQCSNETEHYGRITKRGPEELRTAFVQLVMGIRRSRQSASWRLMERYEAMKRVKGSGKSIIATARKLSRIVWVMLTRGEEFNVSLMTDRKLESGAKSMRTSTVTLSA

SEQ ID NO: 314279 - protein, 406 aa, unidentified
MKLYIGLDWSENKHDLAFVNESGAVLFQLTIPHTPEGFLKLDEKRQQVGVECSDCLVGLETAHNLVIDFLWNRGYTRVYVIPPNVVKSSRGRFGQSGARTDRSDARLLADLLRTDRARLQPWRPDGLLTRQMRAKVSLIGHLTRSSTRLSNRLRAVLLRYYPAALYVFSDLTTQIALHFIQTYSTPRLAAELSYAQFEAFARQHRYPNQSKLPGCFARLQQEHPRACPEIVLAYASEASLLAHLLLDTVQAKIDALRDLDKLFGQHPDRHIFNSLPGAGQLLAPSLLIKFGDDRQRFPSVASVQSLAGTCPVTDASGKRKVIKFRRSCDKQFRHITQQWARCSLRKSAWANTYWRRVRPHCDSNSHAYRCLANRWLAIAWKLWQTQQEYDEDYHLQQCALRRKPRR

SEQ ID NO: 314280 - protein, 395 aa, unidentified
MELVALHKRVIGLDVHQAQITACAILEEADGTTRIEQRQFGAFKRDRRALADWVAALSPDEVVMESTGIYWKSPYAALEAVGIRGQVVNARHVKNVPGRKTDVGDAQWLATLSRAGLLRGSFVPPARLRELRLISRQRQKLVGQLAAEKNRLHKVLTDGGIRLGVVVSDLHGQSARAMVKAIIEGHSPNEVLQFASRRLKASREEIFDALQGELTDSHRFVLDELMHHVEEIEARIARFDARLLEGLKDERNALALLQTLPGVDLIGAAMLLVEIGTDMEAFGSADRLASWVGICPGNNESAGKRKSGRLRKGNLYVRRLLCEFVMPPAVPSRSCSRSSSPSSCDAATNVPSWLWVTKSCAPSSSCSNGANLIGIPPPTMKPSPFNATLLAGSRL

SEQ ID NO: 314281 - protein, 392 aa, unidentified
MYYIGIDIAKKSHEVCFLNQDGGVLDGNSFKIPNTLSGVDKLQKMLDKYALTPENSQVGMEATGHYWLVLYSWLHEKGFTIKVINPIVTDAMRNMRIRKVKNDRIDAEIVARVLLFGDYQETAVAQGDTLALRQLCRFRLWQVQTVGDLKRKVISLLDQVFPEYADLFTDIFGMSSKQILLEHTTPEEIASLHTRKLTTMLNKSSHGRFGKEKALELKAVANGSLGIRIATDAFAFQIRQMLEQLEFVEDQIKLIDGEIEKYMAKLDSPVTTIPGVGPVYGAVILSELGDIHRFPSAKQIVSYSGIDAHVTQSGEFTGSNSHMSKRGSPYLRRAIWGAAFIASWSDPQLKAYYQSLRARGKPHRVAVGAVARKLCYIIFAILTENRPYEVRF

SEQ ID NO: 314282 - protein, 345 aa, unidentified
MKIVGCDLHTRYQQVAMLEQETGELIERRLEHENGEARAFYAALSSPVRVGIEATGHTRWFERMLAELGHELWIGDAAQIRASMVRKQKTDARDAAHLLDLLISDRFPRIWRPTLEERDLRQLVWHRQKLVWMRNAVGNQLHALAMGEGVCRKKKLFTKKGRVELESLPLGPWASHRRQELLKMLDQLDASLQELDQAVAEQAEQNADAVRLMTHPGVGPVTSLAFVLTLGPVERFQRSKQVVSYLGLNPREHSSGGRQRLGAISKQGNPMMRSLLVEAGHTAARLDAELRQDYQRLKLRRGSGVAKVAMARKLAVRMYWMLRSQAGYAQLVRTQGSPWATLVKQ

SEQ ID NO: 314283 - protein, 320 aa, unidentified
MAMQIEPRLLGADVAKQEIVIAASGQEALVYLRNQRPAIRRYLQDLPAGTCLAVEATNTFHLALLEEAQALGLTVYVVDGYQLKHYRESLRGRAKTDATDARLLLRYLQHERAALRPWSPPPRGYSQLQRLLRRRATLIQAKVALSQSLKELPELKAAAALVLRQLEQLDRLIQQQLREQLRRLGWAADAARVQALEGIGPITAAALATVFRRGPFKDSNAFIAFLGLDVRARDSGQYRGRRKLTKKGDPELRRLLYLAAMQAARSATWQPFYQRHLARGLSKIQALVILARKLARVAFALMKNQTDYQPRPRQEACSGT

SEQ ID NO: 314284 - protein, 323 aa, unidentified
MCKNTEKVGIDVSKDTLDVYSKRLGSKQYLNAPKGFKSIVKDFGAGNHFVMEFTGAYYSQFALYLHEQGLLVSVVNPLVIKRFMQMKLQRNKTDKSDAEMISLYGQEQEITCWLPDAAYVSDSKQLYSALELYSKQSTALKNQFHSLKIRGITTGLLIRSLKRQLKSLAAEMLVLETKLEDLVKEHQGDLYARLKTIPGIGRKTAALLIVSTDGFKDFESNGQVSSYFGLAPTERSSGSSIRGRSRISKVGNKKVRNHLFMCSFTACKCNPQCHALYERIVNKGKSKKLALIAVANKLVKQAYGIAKSDLAYDPNYKSVLMKR

SEQ ID NO: 314285 - protein, 371 aa, unidentified
MKKSSMFIGLDIHKTSIEIAIAEAGRDGEVRSYGAIDGTLTALDKVVRKLVSKGCNLHFVYEAGPCGYDVYRHLTTQGFDCVVVAPSKIPRQSGNRIKNDRRDAQMLARLHRAGELTAVYVPCVEDEAMRDLTRAREDAKALERKAKQRLLAFLLRHGHCYSGKSPWSRAHFRWISILKMPHPAQQIVLQESLDTLAECTRRVDRLTEQIQTLSPQWRLFPVTQALQTMRGVSLIVATTTIAEIGDLTRFKRPTELMSYLGLVPSEHSSGRATRRGSITKTGNGHVRRVLVEAAWAYRLPARVSRKLLIRQEGMSQDVCAISWKAQLRLCARYKRFIAKGKSHQLVVTAIARELCAFRWAIANEVQGPVKV

SEQ ID NO: 314286 - protein, 425 aa, unidentified
MNYKQNEKINQVKESTLVIGIDIGSTTQYARAFDWRSIELGKVFTFSNSREGFEAFKAWMRHLQDKYRKSDVIVGIEPTGHYWFDLGAYLEDEGILLVMVNPYAVKQTKELDDNSQSKNDRKDPKVIAKLVTEGRYSAPYTPDGVYADLRIMVANRKRLIREMTQIKNRFARWFAIYFPEYTDVFGDYEAQSSMLLLKKVCTPEAIVELGAEKINQIWRDAKLRAVGMKRATTLCETAKRSIGLKKGSSAARYEMKLLLEDYEYKKAQLDAVMEEIEKLCRKIPESEQMLAIKGIGVITVAGFLAEVGDVRRFESPRQIQKLAGLSLRENSSGKHKGQTTISKRGRRKLRAVLFNAAIPLIAKNPEFKSLHEYYTTRANNPLKKKQSVIAISCKLIRVFYAILANGVTYDAQKMLSDIHRQPQAA

SEQ ID NO: 314287 - protein, 412 aa, unidentified
MDILYRCCAGLDVHKKTVVACVRRHDSRGHVHKEVRTFGTMTNDLLALADWLAEHGVTHVAMESTGVYWKPIWNLLEGRFEVILVNAHHIKQVPGRKTDVKDSEWIAELLQHGLLRASFVPPPPIRELRDLTRQRAQLVAEKAAAANRLQKVLEDCNIKLASVATDILGVSGRAMLEALIAGEEDPEQLAELAQKRLRQKIPALQLALRGRVTAHHRFQLRLLLDHVAHLEGLIGRLGVRIEEVMAPFAAAAERLTTIPGVDQRTAEVVLAEIGADMGRFPTAGHLASWAGLCPGNNESAGKRKSGKTTKGSRWLRQVLTQAAWAASHTKGTYLAAQYRRLAGRRGKKRALVALGHTLLVIMYQVLKDGTTYQELGADYLDRLEPERLTRYFVKRLERLGHQVTLQPKEGAA

SEQ ID NO: 314288 - protein, 403 aa, unidentified
MQYTAGLDWGSVGHAACVIDEQGTVTARLDIQHTAEGLKKLLADLARIAPPQELPIAIERPSGLVVDTLVEAGHPVVPIHPNVLKACRPRYHAARCKSDPGDAYILADVLRTDGHRFRALRPASDEIKALRTMTRTRDDLVAERVVVANQLRSLLDAFWPGAVAIFADIDSPIALDFLDRYPTPASTRHLGPKRLAAFMARNGYCGRRSPEELLARLQSAPNGLAGEAEEEAKGYMVKALVAVLRTLVEQIRRVTATVEHAVAQLPAGQVVMSLPRAGKVNAAQILAELGDDPERFQTEDQLAAEAGVAPVTHESGKHRAVVFRFACNKRLRQALVTWADNSRHASPWANHVYALARAKGFRHPHAIRVLARAWVRVLWRCWRNNKPYEAALHGAAKPFLETA

SEQ ID NO: 314289 - protein, 367 aa, unidentified
MREKLRFLGLDVHAETIAVAVAEADGEVRSLGTIANREESIRKFIRKLGSPEQLRACYEAGPTQLGVECDVVAPSLVPKKPGDRVKTDRRDALKLARSHRSGDLTAVWVPDGDSEALRDLVRAREAAKQDQLRSRHRLTKFLLRTDQRSPLGVKAWTERYVEWVQQVRYTHPAREATLLDCLNEVQHMDQRVKRLEESIVEVIQMAPAPMQEVVRGLQALRGIAHISAVTIAVELGNITSRFENARALMGYGGVFPSEDSSGERIRRGGITKSGNAHLRRIVVESAWSYRHRPAIGARLRKLQEGLPAEITEIAWRAQIRLHKRYMKLMARGKEQRKTMTAVARELLGFIWAIGIKAEAACKQQMAA

SEQ ID NO: 314290 - protein, 354 aa, unidentified
MSQKLDSEIAVIGIDIGKNSFHLVGQDRRGSIVLRQKWSRGQVEARLANVQPCLIGMEACVGAHHLSRKLKALGHDARLMPAKYVRPYSKGEKNDYRDAEAIAEAVQRPTMKFVATKSADQLDLQALHRVRERLVGQRTGVINQIRAFLLERDIAVRKGLKFLRAELPTILAKRTDVLSPRMLRVIEDLAGDWRRLDERIDALSDEIMTLGRQDKGCERLMTVPGIGPIISSAIVAAIGTGDAFAKGRDFGAWLGLVPKQMSTGDRTILGSISRRGNRYLRKLFVQAAWVVLAKITPEGWERYGLKSWIEAAKQRLHRNVLAIALANKLARIAWAVLHNGRAFECVKTNAPRPA

SEQ ID NO: 314291 - protein, 358 aa, unidentified
MESQDIKYVGIDCGKKSLEVVRIHSENSLKERRQFSTTETGINNLLKWLTQNDIVGLEAGTQSFRIAKSILNKGIQVIVLNPGDLATIYQSLKKTDKEDSLKIARLIQRYPMEELPVVPVLTDEEEDNRRLCTEQENWTRQLTQGKNRLHSLFTQAGLTEITKKHLRTKSSRETSVTLLPSRYQKEAERILQVLDLVEQNLKLIEEETKDALKKNPAYVQTIMSMPGIGMVTSLAIMSYMGDCKRFSSGKQAAYYAGLVPRVDISGDTVRYGKIVSRGCHSIRRVIVQAAWSLVRCQHGGKLKEFYERLYSKKGAKKSIIAVSRKMIEVLYSMIRTGALFDSMPEEVLHRKLAQHGLM

SEQ ID NO: 314292 - protein, 459 aa, unidentified
MASQKGKRTMKKAKGFGEVNRFVAGIDLAGSADHYVCGPRKDDGSHDIEHFGTTTAELQRMLAWLKERNVVSVAMESTSVYWIPVYDVLESGGIKVSLVDTRQVHMVPGKKSDVQDCQWLQRLHSCGLLRGAFRPPERYNAIRSVIREKANVLAMRVQSIQAIQKSMDQMNIRLHHAVSDITGVTGMKILGAIVAGERDPHVLASMRDWRCKKSESEIAGELTGNWREEHLFTLGQAYETLVFLDQRIAAFDQKIRSMYAKLAAESDKPDPPEPEDRGKRKDKVDASSKRNLAKLLGGFDPTTLDGVDFGLAAAIVAETGADLSMFQNEAHFISYIGLKPSLGKSAGKNVRTGRKAKNTSRIGQYFRQAAFTLTKSDCEMGARYRCVRSRTCPATAIKDVARELAKRYYRGVRFGQKYVDIGEAAYLQRRRERMLHSMKRNIAKLQISAEELGFLEKAV

SEQ ID NO: 314293 - protein, 379 aa, unidentified
MHSMTQQDTTLVVGGVDAHADAHHAAVLDQRGALLSTKRFPTTTPGYRQLLDWLSSHGKIDVVAVESTGSYAAALVRYLRQHGVTIVEVNQPHAHTRRRVGKSDPIDAEMAARLFQAGKAKAVPKQTDGIVESIRLLRVARNSAVKSRSAALVQVRDLIITAPQELRDQLSDRKTLRGKVTVCSRFRPSGNDLRPPSQAAKFALRSTAQRIQALDEEIAALDRELDQLVAAAAPRTVQLLGISTGHAGQLLVTAGQNIERLRSESSFSMLCGASPLPASSGKTTRHRLNYGGDRQANRALHLIAVCRLRYCERTRAYAKRRTAEGKTQRDIMRCLKRYIAREVFNSLRADLADTAQPRPAVSTTIMCGNPGFGINRIRT

SEQ ID NO: 314294 - protein, 338 aa, unidentified
MEFKRISIDTSKHVFTIHGVDDQERPVLRREIRRAQVEPFFAKLAPTEVVLEACAGSHHWGRVLGAMGHRVRLIPPQYVKPFVKRSKNDRNDAEAISEAAARPTMRTVPVKSAEEQAATIIVKHRELMVNQRTQAINALRGHAAEFGIVTAKGCANVTALLAVLSTEEAIPAIAKAMFEQMGRHITDLDAKIEVLEKQLLEQHKTNAVSRLLAAIPGVGPITAITMALSVNPANFETGRHFAAWLGLTPREHSTGGKHRMGKISKAGNERLRQLLVVGAMAVIRYAKPGSKSATAWLLQLLERRPRKVAAIALANKMARIIWAMMARGEAYRRQPVAV

SEQ ID NO: 314295 - protein, 341 aa, unidentified
MEEYIGLDVSMKETAVSIRRAGERIWRGKCASDPSIVAELIRKRAPSVKRVVFETGPLSVWFYHSLRTEGLPAICIDARHAKAALDMATNKTDANDADGLAQLAEVGFFREVRVKGFDSMLTRTLVAARTRLVRITTELSNQIRGVMKTFGLLVPAGKGSTFEKNVRSLLADQDRLASIVLPMLEAWRGIRIRAAELGRQLVRDARQSRACRILMTIPGIGAITATSFTTAIEEPDNFRKSRSVGAWIGLTTRRYQSGEVDYDGHISRRGDRPLRGLLYEAAAVILTRSSTHSTLRTWGLQLRERIGFKRAAVAVARKLAVIMHTMLKTGQLFNPNAGAAA

SEQ ID NO: 314296 - protein, 347 aa, unidentified
MRFYIQSRQYYCGIDLHTRWMYICILSQTGEIVYHKNLPASEESFLKAVAPFREGLVVGVECTFTWYWLADVCARERIEFVLGHALYMRAIHGAKVKNDRVDSRKIAALLRAGMFPMAYVYPREMRATRDLLRRRTYLVRRRADLLAHIQNTNHQYNLLEFGRKIARKVHREGITECFPDPAVQESIRVDLELIDHLDLLIEELNALIERAARKHNPQALMLLKTIHGTGRILALVILYEIHTIDRFETVQQFCSYARLVTSKHESAGKKSGKSRRKIGNQHLKWAFSEAAALFLRGNPAGMKYKKRLEKKHGKAKAMAILSHRLGRAVYFMLKRGKAFDMQTFLAT

SEQ ID NO: 314297 - protein, 342 aa, unidentified
MKVFYLGVDVSKKKLDLCLRSNGKDILYDVIPNDLSSIKSWLTRTFEKFFLSEDSLVVCAEHTGQYTYPLVCATKSIGVYLCLEDAAKIKYCHGIPRGKNDKIDACRIAMYAERYNDCLQPYTASELIIQKLKNLSTERSMLVADRAKYQSQLKDQVDYMEHSIYIAKCNRVEGIINTFTDYIAQIDLEIKELINQAPVIAHQMDLLMSVDGVGERVALKMIMETDAFTSFTDPRKFCCHAGVVPFVYVSGSSQRSKNRVSNRADKSIKHLLHMAALSVSQVKNSPLKKYYDRKVEEGKNKMSVLNAVRAKLVTIMFAVIRTDAFFFEKLSKFACVIHKNRG

SEQ ID NO: 314298 - protein, 351 aa, unidentified
MVLLGIDPHKDTHTVVAVDQAGRQLDQTTVPARTLGHGELVGWARTRWPERLWAVEDCRHVTGRLERDLLAAGERVVRVPPRLMAGARQAVRTPGESDPIDALAVARAALREPDLPTAGHDQASWEVKLLVDHREHLVAERTRTINRLRWHLYQLDPDLEHATRRLPGPGLGRIIARLAQAAADAGCLVQVRICQAQVTAIGALSDQIGQLDHQLRQRVARLAPSLLSLPGCGPLTAAKLIAETAGVVRFRSEACFAMHAGVAPVPVSSGRTDRHRLSRGGNRQLNAALHRIAITQLRLPGPGQTYYQRRRAQGDATGEAVRALKRRIARAVYQQLKQAQPPPTTTATTAA

SEQ ID NO: 314299 - protein, 411 aa, unidentified
MKMAGIDVHKKVLMVVVIETTSPEEKPERRRFTTLPGDLSRLSSWLRAQGVQEAVMESTAQYWRTVWLELEPHMLLHLAHAFSNRAPRGRKHDFKDAERLVRRLFADELILSFVPNGEQRIWRNLTRMKMQLTRDRIRLQSQMECLLEEMRIKLSSVVTDLLGASGLRILRALAAGETEAKRLAALGDNRLKCTEEQLLDALRGSSQPMHREMLALQLERLQLIDTQIAKLNNLIAQGMKPHQEAVIRLAEVPGLGVDSAQQIIAEVGVQAGTFSSAAELTSWVGTCPGKDESAEQNHSSRSAKGNKYLRRVLNQAAHAAVKKRGSYLQVVFRRLLPRLGYQSAIWAIAHRLCRVVWKILHEGVRFIEKGSEPDPQTKKKRARMLVQALRRLGYDVAITATHLATQNAMQL

SEQ ID NO: 314300 - protein, 310 aa, unidentified
MNKIHAGIDVSKATLDVATSNRKETKTFPNDESGITRAVSYLKKEMPTLTVMEATGGLEKLLAASLVEASIPVVVVNPRQVRDFARAKGKLAKTDNIDAHILVEFACDIHPEIRSPTDKQTEEIKAMMVRRQQLISMITMEKNHLCSASTAVVPSIQENIKWLKQLLNNLDNNLENHIQNSPIWREKDDLLKSVPGVGSVLSMTLLGALPELGNLTRKQVAALAGVAPFNRDSGKYRGKRTTKGGRTRVRPPLYMATLVATRFNPVIKAYYDHLLKMGKIKKIALTACMRKLLIILNAIIRERRQWKYAS

SEQ ID NO: 314301 - protein, 403 aa, unidentified
MFAGWDWATGSDDVTVIDQAGKRTDRWASAHTETGIATILSRLCGHGDPAGPPVAIETTRGLVVDRLLAAGHPVIPIHPNAFNAIRPRWGAARAKSDPGDSFKLADYLRTDGHRLRTLAPTLPETLELQALTRQRADHIEARVAAINQLAALLDEHWPGGKAVFASLDSDIVLAFLDRYPTPQDAAGLTAVRLEAFCKRHGYSGKRPGSVLIERLRTAPVTASRLGLPVIARLVGVQVRLVRSLRATIRELDTAIAEAIKTHPWAELIAGLPRIGTVNLGQVIGEIGPMLERATSGTQLAAETGAAPVTKESGKHRTVNFRHAVNRRARQALTTWADNSRHGNDWAARIYNDARARGKRHPHAVRILARAWLRIIWACWRDKACYDPNLHHATNKINTTQGLT

SEQ ID NO: 314302 - protein, 395 aa, unidentified
MKDLLEISCGLDVHKEKIVACILTGPLGKPTRSEIREFSTLIPDMIALRNWIVSKNCHHVAMESTGIYWMPIYEILEDAFYGDITLLVVNARHMKNVPGKKTDMRDSEWISTLLRAGLLNGSFIPEKRIREFRDLNRYRKSVIRDITSQKNRIEKFLQSSGFRLSSFISDIFGASGRNIILHLIEHGQIDKTALDSCLKTKTRNRIDEILMSVNGTLSEHQKAFLRILMTHYDSLKKHLAEIETSLEKDMAPFALQVEQLNSIYGISTTASCAIIAEIGIDMKPFKTAEHICSWAGLCPGNNESAGKRKSTSVTKGNPYIKSMLCEIAWVIAGKRNTYLSAWYWRIKQKKGAKKAIVALARKLLVIIYTMLKQGTLFDESCFETRRKHCEPMSLT

SEQ ID NO: 314303 - protein, 383 aa, unidentified
MEVLYKRCCGIDIHKNMMVACIFTSVRKKEIRQFSTITEDILQLVSWLKETDCEMAAMESTGSYWKPVYNIFEEEQILIMVVNAQHIKGVPGRKTDVKDAEWIADLVRHGLVKASYIPNRDQRELREITRYRQEVIEERARELNRIQAVLEGCNVKLSSVITDISGKSGMTILKAIVSGETDPVVLSELAEGRARDKIPEMQKSLQGRISEHQQKMLKHQLGNIESLTALIMDLDADIKKTESINWAIEALDDMPGIGRKSAERILAETGVEMEHFQNESRFSSWAGLVPECKESAGKKMSTRIRKGNKYLKATLVECARAGIRNKQSYLYSRYQRIAARRGGKRALIAVAHTMLIAIYHILKEKVPYHDLGTDYYSIINQKR

SEQ ID NO: 314304 - protein, 322 aa, unidentified
MSQPNPLCVGIDVSKTTLDIAASSDIAQFTVSNDSDGFDAVITGLRRHSVALVLMEATGGLEVAVACSLQAEGFEVAVVNPRQARDFARAMGYLAKTDRIDARVLAQMAEVINHHPERKRFIRALPDAERQALAAMVVRRRQLIAMLVAERNRLHPSHPQNKKSINTIIKALEDELVRLEKEMDSHIRNHFKEIAERLSSIKGVGTMTVSALLAEIPELGTLSRREISALIGVAPVNRDSGTMRGRRTIFGGRAGVRSALYMAALVATRFNPVIKTFYVRLLAAGKAKKVALVACMRKLLTILNAMLRKNEEWDESYYHVAP

SEQ ID NO: 314305 - protein, 406 aa, unidentified
MPCGLQAEIGPIRTHDVLVIDETSRQVSSCRVTHTVEGLRQLQAFLLSICGPARKEEMACIIETTHGLLIAARLPAGVPVYPVNPKTVDRHRRASGAKTDQIDAYLLAKHGRAEWADLRRLEPDSSIVAELKALTRDQESLIQSQTRLVNQLTACLKAYYPVALTLFSKLHQRSTWLFLQTYPPPEVAMAASAQQITLVLKKAKHPQAEQVAAKIYHKLHQPHLRADAITTRTKARLMQVGIKQLLPLLEEIATYDEEIERLFLMHEDNEVFSSLPRAGKRLAPRLLAEIGDDRTRYAKTASLQALAGTSPVPYESGNYSKPHRRYACSKPLRNALQQFARPRTQTEAWAQDYYRRKRQEGKSHSEAVRALANLWVRIIFAMWNKKEKYQTRTFEEAQRLHAKRTA

SEQ ID NO: 314306 - protein, 426 aa, unidentified
MRKLDTMQIQLMEESFMYNAVGIDASKFKITVTVIQPAGIVIRKPFDVLHTSNELNTLVTYLKSLEGETRAVIECTGRYHEPVVKSLEDAGIFISAVNSKLIKGQKQNSLRKVKSDPADARKIARYALDNWAELRQYSSMDTIREQLKTLNSQFDFFMKQKVAAKANLISLLDNTYPGVNKLFDSPAREDGSEKWGDYAYSFWHVDCVRKIGLKAFTERYEAFCKKHHYNFQKGKPAELFETAKQLVAVFPKEKSYKLLIHQSIQQLNLASEHIEILRKEMNQLASTLPEYDTVMSIYGVGETYGPQLIAEIGDVSRFTHREAITAFAGVDPGVNESGQFRQRSNRASKNGSTKLRKTFFQIMTTYLQNKPVNEPVYQFLDRKRAEGKPYLVYMTAGANKFLRIYYGKVKECLHNLEQDSLPPEES

SEQ ID NO: 314307 - protein, 343 aa, unidentified
MKDVRILGIDLGKNSCSVVGMDTAGRVILRRRMRRESIIALAAKLPGCVVAMEACCGAHHLGRLLVAQGHEVRLMSPEYVRPYVKAQKNDDRDAEAIAEAATRPTMRFVALKSEAQLDVQILHRVRDRLVGQRTSLTNQIRSILLERGIVVAQGRRKLLDALEALSSANDNGAVGPRVRRLLNDMLDQWQALDTRITALDEEFAAMARNDPVARRLATIPGIGVLNATALVAAIGDGRTFGRGRDLSAWLGLVPRQATTGGTPKLLGITKRGSKYLRKLIIQGARAALPSLARTATPLGAWLRGLLARAHGNTVVVALASKLARIAWALLRNEAAFATGGRVA

SEQ ID NO: 314308 - protein, 338 aa, unidentified
MNKFSGIDLHSNNSVVVVSDEADRVVYQRRLPNDPVQIRVALAPHREDLVGVVIEATFNWYWLVDELMNDGYRVHLANPAAIRQYEGLKYSGDFTDAAHLAQLLRLGLLPEGYIYPAEDRPVRDLSRKRMQLVQCRTAQILAIENLFSRHTGGQMGGEQVKRLDQTKVSGFGFAPDVALAMQANMAVMQSLQEQIGILEKRLMERVKPNPDYALLNSVPGIGPVLATTIMLETGTISRFTKVGNFSSYCRCVDSRRESNSRKKGQGNTKNGNKYLAWAFVEAANFAIRSCPEARRFYERKKRARNRIVAIKALAHKLARACYHMLREHKPFEITRCFG

SEQ ID NO: 314309 - protein, 396 aa, unidentified
MMTEQPKQSPQKLRRIVGLDAHPDSFAAALLEGADADSARVVRTTTRQALCTLEGWMLKHTAPKEVVVLEASANSFAIAERLRAIDRVPIILESQRAAKIGQAYLANDRVDAVKIARIYLSGLARRAVWQPDARTRERRELLSTYQRCIKESTRARQHLRSYLNEQCLRLPGGFRLCRPEAIGRLLVLKEWSSLQQLLLKEMHMHLVAVRARRQRLRRLMALEIESDPKLLRLYKLCGLNLVTTYALVAVIGDIERFATSKSLVNYLGLNPSVDQSGNYEGSSALKRHGRGPLRALLIQAAKMLLRVENPLQKWGLGVALRRGVNRAAVAVARKLTVAVWHIMKDHWSQALEVTKTLTTKVFKLATELGLETLHKLGYSSKAEFQQKKLYVLQTCP

SEQ ID NO: 314310 - protein, 347 aa, unidentified
MEIRTVGIDLGKSVFHLVGVNALGEVVVRKKFSREKLLHFTANLRVERIGMEACPGAHFLGRSLRAQGHDARIMPAQYVKPYVVNNKNDFIDAEAIAEAVWRPKTRFVPIKTDDQLDMQSLHRAREGWVHRRTSLINQIRGLLLERGITIRKGRRYAQEALPSILEDPNMNLSGPLRTLLGQLQDEMKQLQRQIEEADAVICKVASEHESCQRLMAIPGIGSVTATAIIAAIGNGMDFEKGRGFAAWLGLVPRQHSTGGKETLLGISKRGNCYIRCLLVHGARSVLQFKEKQSPGLSAWLIKLTARTHHNVAVVALANKLARVAWAVLAKGEIYRPSLFAATESVIA

SEQ ID NO: 314311 - protein, 394 aa, unidentified
MTATRTPVIDQKTPALYLAFELGWSEWKLAFAAAPADAPRLRRIGARNTQTLLKEITQAKKRFGLPEDAPVRSCYEAGRDGFWLHRYLLAQGIANSVVDSASIEVQRRGRRRKTDRLDAAKLLNMLQRWHGGEQKVWSVVQVPGADDEDRRQLHRDLVELKAERTQHVNRLKGLLAGCGLALAQVNETFPEVLAGLRTWDGRPVPPALQQRLLREHERWRFVGRQIKDVENERDRTIRKSEEPPVSKVRQLLNLRGIGVNSAWLYVMEFFSWRQIRNRKQLGSLAGLTPTPYQSGDSAGEQGISKAGNRRLRTMAVEIAWCWLQYQPDSALSAWYQQRFAKGSSRQRRIGIVALARKLLVALWRYLEVGEVPKGATVVDWKTKYRGRKQAAAAV

SEQ ID NO: 314312 - protein, 347 aa, unidentified
MRFYTRQHVHYCGIDLHARSLYVCILDQEGKTLVHRKLPCDREKLLETLAPYREDLAVAVECLFCWYWVADLCSEQGISFILGHALYMKAIHGGKTKNDRLDSYNIAALLRGGNLPYAYVYPRQMRATRDLLRRRLFFARKRGELLAHIQNTNTQYNLPVLEERAGKAKDRGAIIEHFDDDTVQMSIAADVALLDSYDQVIRDMELYLLHEVRQDHNRDFFLLRSIPGIGEILSLTLVYEIHDLSRFPRVQDFLSYARLVKGTHESAGKTKKLAGGKMGNVHLKWAFSEAAALFLRGNSVGQKYFARLEKKHGKGKALSILAAKLGRAVYYMLLRSRPFELQRFVTT

SEQ ID NO: 314313 - protein, 339 aa, unidentified
MELYSGLDLHSTNTYIGILGADFKRVFKKRVSNNLDLILETFQPFEDQLKGLVVESTDNWYWLVDGLMDAGYGCVHLANPSAIKQYEGLKHSDDKHDAFFLAQLLILGILPQGYIYPKEDRPVRDLARKRMFLVKHKTAHILSLQSLIARCSGQRISSNQLRTFTSADLKHLLREDHLVLSAQANLDSISFFKQQIHRLEKVIKNKLKLNQAFNGLLTVPGIGHILAMTIMLEVGDIGRFAKVGNFTSYCRCAPTQRLSAGKSKGSGNRKNGNRYLSWAFSEAAQMSRRYNQRFRRYHDRKAAQTNTIVAARALSNKLARVCYYIMRDQVAFNEELILH

SEQ ID NO: 314314 - protein, 366 aa, unidentified
MVSVYVGIDVHRKRSQVAVVGEDGRVQLNRNVVNGSQPMLGLLGGLPPGTPVAFEAAFGWGWLAGLLEDYGFQAHLVHPLRCKAIASARLKNDKVDAAILAQLLRADLLPEAWIAPPAVRALRALLRHRIQLVRLRTLLGNRIHAVAADHGYDRPAGYWSGPGRAWLASLDLPPASRQVIDDDLALIDALAGPIAALDEQVCRRAKAEPGVKVLTQLPGVGEFTALVILAETGDITRFGSARKLAAWAGLTPTVRGSDRTVRHGRISKQGSAWLRWALGQAAQTAKRSPEFAATYQAIAARRGKQIATTAIARKLLTRAWHLLTAAGIPGPAASPAPRLSPGKGRHAQGALAEYMSRHHRRARVAD

SEQ ID NO: 314315 - protein, 341 aa, unidentified
MVHVGLDLSRTRLDVHVMDEAGSPLAITTAAPDRGGLAVLASRIDGFGGPVYAAIESMNGARFVHDQLELAGWQVEIADAQKVKGLAPLACKTDKIDAWVLAALSRRDLVPAIWLPTPTVRAERERARWRLHLVRHRTALKNRIHATLLAFGHPCPVSDLFGVGGRELLHRLELPEPWAADTTAALQLIDQLDTEITAGERALRRLGADHRYVPLLMTTPGVGWVLGYTIAAEIGDIARFATPTKLAGYTGLCPRVYQSGGKDHRGPLSKNGPKYLRWALIEAATHACRHPIYAERYRRTKTRLGRQRGPKIAQVDLARRLSEAIWHMLSTNRPFAPAGAA

SEQ ID NO: 314316 - protein, 313 aa, unidentified
MSYTSRFVGIDISKSSFDICILPEKQSARFANTAEGIAAFIAFLAPFSGIERLLLEPTGGYERRVARALQAAGLPVVRINAKQIRQFARASGQLSKTDSIDAFILADYGRRMETKLLVPRSAAQDMLTDLVSRYRQLSHMIVQEKNRREKCNDATRHWIEQLLQVLLDQRQAVVAAMTACLQSDAELSKRADVLMSLKGIGLRTACFLLAGLPELGLMDKGQIAKLVGVAPLNRDSGLMRGKRMIAGGRKPVRDALYIAALPAIRFDPVMKAVFERLKAKGKPGKVALVAVMRKMIIILNARMREHRATVLDV

SEQ ID NO: 314317 - protein, 318 aa, unidentified
MMSTQYNYAGIDIAKRNFVIGITSLQRTKTETNNPKGIAHTIEYLKKHKVALVVMESTGGLEIPAAKAIHRAGIAVIIATPRQTHQFAQSQSLTKTDAKDAQMLAFFAQMMMQKEDWQTMLYHPPTEAEEVLEALVNRRNQLVDMRTAEKNRLHQVHETQVESVKQLIAHFDRLIDELDKQIDDHTHTHFDGKAQVAEQIKGIGSITTATLMAMLPELGRLSHKRLASLVGIAPHPRESGETKFKSRCFGGRSAVRKALYMATVVATRFEPLIRDFYQRLLSKGKPYKVAVTACMRKLLTILNARMRDYFAENGIQTA

SEQ ID NO: 314318 - protein, 422 aa, unidentified
MTKTDYLYIGIDVHKEIHTAVIMTYMEEYIGEIEISNNLKGFQRLTAYVEKCRAKKDLKNLIPLYGLEDVTHYGRNLAIYLLDQEHTVKEVNSALSYMERTSYPSVKKNDMWDARCVCAVLMRRYERLPDADPKDYYWIMKQLVHRRNALVRTKSALLQQFHEQIQYDYPSYKKFFHEVECNTSIAFFERYPSSGVLAETPVEELAGFLRIPSHNACSTKRAEKILELIEADAVKEHEYQFGRDFIIQSMMRNIRFILDELERIDKLQKKLLKEIDYHLETLPGVNTVTACALIGQIGDISRFKSADKLANYAGVAPLCFSSGGKGKNVQNKNQGNRELYSVLYLLAMQQVHVNTKGQARNPVLRAYFESKVSAGKTKTQALLCIMRRLVNILYSMMKNNTVYRMPELPATEVTDEKERMIS

SEQ ID NO: 314319 - protein, 434 aa, unidentified
MSLKIVRFNCCGMDVHKDIIVATIGITDKSTMITEYFQETFNSFNSDLYRLCDWLSSHQCSEVCMESTGKYWIPVYNVLEEKGFIVCLAHPKYTKAIKGKKTDKKDSKWICDLYKHDLVRGSFIPPREIRELRDISRYYNKLIGMNSSESNRYQNCLTVSNLGIGSIFTDVNGKSAKRIMEAVLNADDPNKLSDEDILKLVHKSCKKKDQLLDAVRGCRIESDQRFKMIEIQKHKEELDQHITNCFVEMFKRATPFFDQFLHITEIIGLSVLSAILIISEIGVDMTVWQNSRQLCAWAGLTPGNNESANKKKSTRITKAGQFLKPLLVQCALAAIKNPDGYFGIKYRRIKKRRGHKKAIVAIARMMLICIYHMILTGESFNPSDYDELMNPKPRKPRELTIESAVDFLKSSGADIDAIIASLKEAPPDQITVQS

SEQ ID NO: 314320 - protein, 348 aa, unidentified
MDHYAGIDVSLECSSVCVVDANGKIVREGKVASEPEALIAWFGWFGASLGRIGLEAGPLSQWLYAALRDAGLAVDLLETRHVRDAFKAMPVKSDRNDARGIAQLMRLGWFRPVHCKSLGAQEMRAMLTARKLVQSKLQDVENSLRGILRGFGLKVGKTTPRSFVGRIRELVAGHPNLATIAQALLSVQAVLLREFNAFEKRVRAIARSDLRAKLLMSTPAVGPIVALTYTSAIDDPARFKSSKQAGPHFGLTPKKYQSGQTDYSGRISKIGDAAVRAALYQAAHVMLTKPVKGCPELKSWAMRIARRAGHNKAKVALARKLAVIMHRMLADGKPFNPNAKAETMAAAA

SEQ ID NO: 314321 - protein, 350 aa, unidentified
MMIIGCDYHPGFQQIAFVDTETGECGERRLQHREEAERFYRDLAAQGMKVRVGMEASGHARWFERLLAELQFELWIGDAAVIRTKRVRKQKTDRQDAQLILQLMMEDRFPQIWVANWENRDLRQLLWHRHRMVQARTRIMNQLQAVALNEGLRCKKRLWRDAGREQLESFPLAPWASRRRRDLLELLDRLTPTIAELSQAIEQEAEKCPAAQRLRTHPGVGSLTALAFVLIIGSAERFQCGKQIASYLGLVPSEESSGDRRRLGHISKQGNALLRFLLVEAAQVTVRSLPEWRNKYFHLAMRRGRKIAKVAMARKLAIQLFWMMRKEWDYEQVRRFGPHAGQPEHRRGVQ

SEQ ID NO: 314322 - protein, 341 aa, unidentified
MSLIAPVFSFDLNGYTGSGLALQDKAEKRLMQITIGIDISKETLDAYRFPDNHHIQVANGRAGHKTLVRWIGKQNGSLVVFEATGAYHRNLEAALAANGTAFAKVNPRQARRFAEATGRLAKTDRVDAIMLAKMGAILGLTAHEPKTEALHILRELITARRALMKDKVAAKTRLQTTRQTLLKNQINARLKQIKIQIQQVDAAITEKVAQDEALSNKLDILTSIPGIAETTAFSMLIEMPELGTLEGKQAASLAGLAPMSRQSGKWQGKERIKGGRAFLRRAIYMPALVATRYNPGLKAKYDQLIRAGKSGKVALTAIMRKLVVMANALLRDGRTWSELRP

SEQ ID NO: 314323 - protein, 485 aa, unidentified
MAKRKLSTFDRLRLGAALNRKERRAVEQRLNSTDPGLEIVNGDAAGIDVGNESHYVAVPLGRDAQPVREFGSWTAALEEMAQWLISCGIRTAVLQSTGVYWIAVHDVLEKQGLKVHLVDARATKNVPGRKSDVQECQWLMKLHTYGLLRACFLPAPEIHSVRTVWRLRDQHVKDAGRCIQHMQKALIEMNVQLHIALSDISGLSGQAIIRSLLAGQRDPKALAALRDPRCQASEEEIVHSLQGNWKPDVLFELQQAVDAYDFYHQQMAKCDQQLKQYMAVLPVRKAEMPVPPAPSSPATHTSNSSHSYKPRKPKGNQPSFDLEAELERILGVNATTIDGIGVMTIQTVLAEVGPDLSAWKTEAHWASWLNLAPKRDISGGKVIRHVRQRQSNRVGNAFRMAAQSLLRSQSYLGARCRYLRARLGGLKGVKAMARVLACLYYRLLTKGQVWVDRGVEEFDRRSQQRELAALERKARKLGMQLVAAA

SEQ ID NO: 314324 - protein, 358 aa, unidentified
MEPKYIGFDIDSKNTVACVVQQGRKDVFQSFPTDTRRMQKYLRQLGRDGSPLHLTFEISGEAGYRHDALRPYVESLTVSNPNKMTWIFRTSRKNDRIDARKQAVLLSIDEVPKVHIPVLEVRQWRATIQHRRLLVNRRTAVKNRIRALLKAHGLAQPPHRGSWWKRANQRWMEQLTQDWSEVSGETLWRVQLKNLLEELTLLGGQLKQVTSYLDQYLDRHPGGVLLMSIPGVGPRTAEAVLAYTDDIRRFLRSKQYCAYFGLTPKLDESGLRRRLGHISKEGPSVVRWLLVESAWRVVARVPAFQAFYERVQAGQPNRRKVAVVAVARKLLAIMRAMLQSGELFNESLVAAVPAKSRR

SEQ ID NO: 314325 - protein, 351 aa, unidentified
MKSINKQVQGEELFVGIDLHKHRWHVTVRTADVEIFSSSIAGRWQELKKVLSRYNGCPIHAVYEAGYFGFWLFDHLTQYGVDCIVTPPSLIPQEHGNRVKTDRLDSRKLAQLLAKGLLKSVWVPSAEERFHRQVIRRRRQLVGDRVRTQNRIKSELCFYGIDLPTPRGPWTQVYFANLQRIKFNNRWMQQSFNQLLEQYEFLCAQIDKQTQLLKQLSQLPLYRDRVKILCSIPGIGILTAMEILLELQDFSRFRRAEQLAAYVGLTPSQYSSADKIRMGRITGAGKNAVRSALVESCWHLIRKDKAMRKRYEQIKTRAGGKRAIVAVSRKLLLCIRRLLLDNRPYAYEPVI

SEQ ID NO: 314326 - protein, 341 aa, unidentified
MEQVNTIGLDIAKHVFQVHGADAAGHALFRKRVTRAKLLGFLAAQPACVVAMEACAGAHYWGREIGKLGHRVRLIAPAYVKPFVKRQKNDAADAEAICEAAQRPSMRFVPVKTEEQQANGIVFRARDLLVRQRTQCVNALRGHLFEYGYVFPQGITHVATLVALVEDPQSSLPESARVVLKLLVNTFTALDGQIAALDAEINQRSKTDPTARRLMTIPGVGPIVSTAITALVPIAEDFRAGRDFAARLGLTPLQKSTGGKQKLGAVSKRGERTIRRLLIIGASAVVQQARRRRAPKGSWLAQMLARKPKMLVTVALANKMARIVWALLVKGGVYRAPVAAA

SEQ ID NO: 314327 - protein, 342 aa, unidentified
MSNIKLIGIDLAKNSFQICALNQANKVIFNKKISRKKLPEFMQQQEPTLVAMEACGSSNYWAKMFIKMGHEVKLVPAQHVKPFVKGNKNDRNDALAICEATLRPNMKFVLIKSNDQQDIQMIHRVRQLLMKNKTATANQIRAYLSEYGIIIPKQLHNLIKQLPTILANEQNDLTPLARELIQTQYSDLLEIQAKVVDLNQKIASNNKQNDYCERLQELPGIGPLIASGLYAAVGNGSQFSKGRQMSAWLGLTPAHFGTGGKNTNVDTSKKGDHYLRTLLIHGARTVVSWSAKKTDPLSLWIQRLVARRGKRKAYVALANKITRAAWCVLQGEHYQISKIAQH

SEQ ID NO: 314328 - protein, 403 aa, unidentified
MNAVGIDVSKGKSMVAIMRPFGEIVVSPFEIKHTSSDINSLIELIHSVDGESRIVMEHTGRYYEALAHELSAANLFVSAINPKLIKDFDNDSLRKVKSDKADSVKIARYALDKWQNLKQYSVMDELRIQLKIMNRQFGFYMKHKTAMKNNLIGILDQTYPGLNAYFDSPARSDGSQKWVDFAATYWHVDCVRKMSLYAFTCHYQKWCKRKKYNFSQSKAEEIYGKAKELVPVLPKDEITKLIIKQAVEQLNNASATVEELRALMNETASKLPEYSIVMNMKGVGPSLGPQLMAEIGDVSRFTHKGAITAFAGVDPGVNESGTYEQRSVPTSKRGSSNLRKTLFQVMDVLIKTMPQDDPVYQFLDKKRAQGKPYYVYMTAGANKFLRIYYGRVKEYLATLPESN

SEQ ID NO: 314329 - protein, 423 aa, unidentified
MGRSIGLDVHRDFCQVAIADGGRARSAGRIATTPQQLELFAQSLAPTDRVVLEATGNALAIARILEPHVAEVVLAHAKQVRAISHARIKTDKVDAKVLADLLAAGLIPAVWIGDERVRMLRRLVSRRRGLVKRRTQVKNEISAVLHRNLKGRNPASDPFGKKGRAWIAAQQLPIDERLSVDGCLRQLDFLTGELAQVDAIIAEHALGDEDVRRLITIPGIDVVTAVTLAAVIGDVRRFPTARHLVGYLGLHPTVRQSGSGPARHGRVSKEGPAAARHVLVEAAWSAAKSPGPLRAFAQRTAARRGRHVATVAVARKLAVLAWNLLTRGEDYAFARPSLVRRKLRTLELKAGATRAKPGPSATPIWNTTRDAAEKHLAEQAEIAYRRLVADWQASGAKAGAGATPERASQRPSKGKAARQATSS

SEQ ID NO: 314330 - protein, 461 aa, unidentified
MNQKRPRGKKEKSAPKQTDWKALEIKHPDAAGIDIGGSEHWVAISPERDPEPVRCYGCFTADLREMARWLVEKGIRTVALQSTGVYWMPAFEILEQHGLEVYLVNAQHTKNVPGRKSDMEECQWLLKLHTFGLLNNSFQPTDEIRTARRLWRHRGSLVADAGSAIQRMQKALIEMNVQLSTVLSDLSGVSGMRILEAILKGEREGATLAALVEPEVKATPEDIAKSLQGNWRPELLFVLRQEVELYHTYQQKIADCDLEVHEHLESLQGKVDLKEQPIGAKPKGKKGSRNAPAFDLRSELYRITGIDWAQVNGIDVLTAQTVVTEAGPDLNAFPTEKQFTSWLGLAPTNERSGGKILNRRTRKVKNRATTAFRTAASTLLRSQSYLGAQYRRLRTRLGAPKAITAMARKLACLFYRLIKHGQQYVDKGTEYYEARYREQQIRALARKADKLGIQLVIPKPA

SEQ ID NO: 314331 - protein, 385 aa, unidentified
MSKPDDLSKPLVALDHDSTLVCVIEMSGSSWLVAATVPGVDRRPLQKLPVDPARLLAQVERWRQEAARAGRTITRTVVAYESGRDGFWLARLLRGHGIEVYVIHASSVAVSREQRRAKTDRLDTEMLMRALLGWLRGEPGHCRMVAIPTIAQEDARRPGREREGLVAERTRLTNTIKAELALGGIQGFKPGLRKAAEHLEALRTVEGEPLPPNTLARLHRLLKRRTLISDQIKAIELAAAQAIERDPTGPNAMVLMLAQIKGIGLETAQMLVHEVLSRNLRDRRAVARYAGLTGTPDESGSKRREKGISKAGNPRVRRGMIQLAWRLLMFQPDAALVRWYRERTAGGKGAIKKTMIVALARKLLIALWSYATAGVMPEGVVLKAV

SEQ ID NO: 314332 - protein, 369 aa, unidentified
MHDDITAFVGLDVHKDTVAIALAPAGRDAPRFVGTCGPKLAELIKAISKLGKPANTLLAYEAGPCGFALARELIAAGWRCQVIAVSKVPVRPGERIKTDRRDALTLAGYLRAGELTPVVIPDAHDEAIRDLSRAREDAVRARLKVRQQICAMLLRHGRYYPGKTRWGPTHERYLCEIAFAHPAQQIAWAEYRSAMTEAHERVQRITAALREQAELWRFGPVVNALMCFKGIDFVAAVTLVAELGDLHRFEHPKQLMAYLGVVPSEHSSGQSRSRGCITKTGNSHVRRILIEAAWCYRYSARMSRPVTDRNRGQPKAVRDIAWRAQLRLCSRYQRLAARGMHSNKVCVAVARELAAFVWEAARCVEPAKT

SEQ ID NO: 314333 - protein, 333 aa, unidentified
MKNYLFYVGIDISKLKLDITILDVSSLKSEHFVVENNIKSISLFVKNLSKKIDINQTLFCCENTGVYTNHLSSASMDLKLDLWIVPAVEIKRSKGISRGKTDKSDAKDIAYYSYRNIDKLKLFTLTAIDIQKLKILYTEREKMLKSLLLLETTKENKGFASKEVFKEVSSINQSLTKTIRNAIRKIETKMKEIIKANAQLNKQTQLIRTIPGIGEQTSIYLIIATKGFTAFKNWRQFACYSGVAPFECSSGSSIKGRTKVNHMADKKIKSLLQMCAMTTLKYDPQLKEYYNKKKAEGKNSMLVLNNIRCKLISRVFAVINRETSYINTYKFAS

SEQ ID NO: 314334 - protein, 345 aa, unidentified
MDKYIGIDVAKATLQVYIPRNSLELEIENSPKGLKQLYSKIKKQYKKELSEVIFVYEPTGSYSTLLDCFIMAHNILCFKVKPAQSSAFAKTLDHRNKSDRIDAKLLHRIGILAKESDISVIHIDEDAHHLQSMFKYYRRVLKDRISASNYLEASLLHQEDPFILKRLRANIKRLQKEADDVLQRMLDFINTHEQYKEAFENIISIKGIGENAGIALLYLFLRYPDASRSHITALCGLDPIIVQSGTSVNKRSRISKQGNRAIREILFMPTLSALAYNDEMKTFYNRLKDNGKHSTAAQMAVMRKLILLAHSLYKNKEKYDPKRYMIFQQPRKEKAVVHRLSTQYF

SEQ ID NO: 314335 - protein, 398 aa, unidentified
MNPVVGVDVAKGASVVQAFLQRNKPFGKSKQIRHTPHGFEQLHALLKQLQRETNQKPKIILEPTGHYHRILVLYLKDQGYEVILVNPLQSHRAKQTGLRKVKTDAADAWHLGQLYYQQSDWTTQRRHEEDRMDLQYLTRQLEFITGLYVQAKLNMGALLDQVFPTYPTVFKDVYSKVSLNLLEASLSDSFSDYTFEQWASLLRKSAVRTPAETWITEKVQRLQTAILQNPVRKIPYGLERALQSMIGCIRVFQEQMTELEKLIEATSATVPDVLLLESIPGIGTKLAAVIAAELGDISQFNHPKQVVAFAGIDPSVFSSGQFVASENRITKRGSKRLRRAVYLAVTCGLRKDLNSRIKPYYDKKKSEGKPHKVAVIACANKLLHHIYSILRKREPYAL

SEQ ID NO: 314336 - protein, 299 aa, unidentified
MGLDSTGKVVIRKRCSRRQLLAFTANLQVQLIGMESCSGSHFLGRALRDQGHEVRLMPAQYVKPYVQTNKSDYIDSEAIAEAVQRPRMRFVPIKSEEQLDLQALHRVRERWVMRRTAVVNQIRGLLLERGLTLPKGLKLELEQLSARIDQLDVAILERAKEDEACQWLTTIPGVGPVTATAVIAAVGNGSAFGRGRDLAAWIGMVPGEHSSGGKQTLPGISKRGNSYLRRLFVQGARSVLQRHRQAPGLSSWLAQLLARKHQNVVIVALANKLVRMAWAVLCKVNAIALPSLCPPKIPV

SEQ ID NO: 314337 - protein, 644 aa, unidentified
MVSLTSPTRGATVAAPVLASQALTAIGVGIDTARYGHVVSFLRSDRQPAGKKLLVMENHDSYQALRERLEQLHQQHPQAHFHVRIDAAGQYANNLERFLRSLPLSMTLTVGEPKRNRDYQKAHFPKRQTDETESIAMARFAVVEGPAATAAVPEEMLVLAEVAGRLQAQTKQATQAINRLHNLLARVFPELATCVHNVGAACVLELLAKYPSAAKIGQARLASLEKIPYLPKAKAQALHQAAGQSVASLRGPVAEALIRELVAAVQHSQASESTLRQLLIKTYQALPDGNHTHLTSIPGIGATTAAILVAKIIDIDRFATPENLVGFFGIFPEEHSSGVDKNGRPLPPGTMVMSPRGNDLVRAHLWMAALSGLRSNPALRALFRRLKAKGKRGDVALGHCMRKLLHLVFAVWKTGQPFDAKHYPWIQDNDTPTTEIPTTTTPDAERPNTEAPLRKVTAPTLITTLESKAGNGKAVGHKRDKVPAKQVVTTAACSVKPVAARVNRPQAPAVTRPKVDFAYLRQQVTMAQVLGHLGILGLFKGTAQQRRGPCPVHTEAPATLHAKKHTCSVQLSKNIFQCFQAECAAHGNTLDLWAAVHRLPLYEAALHLAATFHLPRNREELVMAAQNTTAKTSSNGAVITANGD

SEQ ID NO: 314338 - protein, 342 aa, unidentified
MEYYVGLDVSLKQTSICMVDQSGLVVREGVVDSDPEAISVFVRSKAPGAVRIGLETGPTSTWLWTELKRLGLPVICIDARHAKAVLKMQINKNDRNDAIGIARIMQTGWFKEVHVKDIDSHSVRALLASRALLVKIKRDLENHIRGLLKNLGLVIGRATFNVFAVRAEELIEDRPDLVAAVRPLLEARNAVEQQVSELDRKVMKLARRDAQVQRFMTVPGVGPITALAFKATIDDPARFARSRSVGAYVGLTSRRHASGEIDWSGRISKCGDGMPRSYLFEAAGVLLTRVPKWSTVKAWGTRLAKRNGLRKAKVAVARKLAVILHRMWIDGTEFNWSKEVAA

SEQ ID NO: 314339 - protein, 337 aa, unidentified
MQTVTTIGLDIAKSVFQVHGVGAAGQVVIRRQLKRRTVLAFFQQLPPCLVGIEACASSHYWSRELQGLGHTVRLMPPAYVKPNDMADAEAICEAVTRATMRFVPTKTPEQQSCLVLHRARHLFIRQQTAVINSIRAYLAEFGIVAPVGRRGVEELLHVVADPSDKRVPEIARACLAALGTQLLSLKEQIVKFDRMIMAWHRSNETSKRLHYIPGVGPMLATALVASVADPRTFRSGRNFSAWIGLVPKQHSSGGKDRLGSISKQGDRYLRSLFVAGALAVIRYAKIHGTKHRPWLTALLARRPTKVAAIALANKIARMAWAMMAKGERYKQPVALAA

SEQ ID NO: 314340 - protein, 412 aa, unidentified
MKDLLEISCGLDIHKEKIVACILTGPLGKPTHSEIREFTTLIPDMLALRDWIISENCHHIAMESTGIYWIPIYEILEDAFSGDITLLVVNARHMKNVPGKKTDIRDSEWISTLLRAGLLNASFIPEKRIREFRDLNRYRKSIIRDITSQKNRVEKFLQSSGFRLSSFISDIFGASGRNIILHLMEHGQIDKISLDSYLKTKTRKRIDEILMSVNGTLSEHQKSFLKILMCHYDSMKEHLIEIETHLQEDMLPFALQIEQLNTIYGISTTASCAIIAEIGTDMKPFKTAEHICSWAGLCPGNNESAGKRKSTSITKGNPYIKSMLCEIAWVIAGKRNTYLSAWYWRIKQKKGARKAIVALARKLLVIIYTMLKQGTNFDENCFEVRRKNCEQKQLSRYIRELEKHGYTVEAQV

SEQ ID NO: 314341 - protein, 389 aa, unidentified
MLYVGIDIAKEIHEASLINEQGKLQGRSIRFSNTLTDFQKFLEWLPSDPLEMAMEATGHYWLPLYDFLKAQGYEVIVLNPLQTEAHRRGQIRKTKTDKRDSFIIADLLRTKAISPSYIPDEWIHQLREITRFRFGLIDTICDLKRQILCVLDKVFPEFESLFSNVFIKSAQALLKEGAMPEEIAEMDLSELTGILNSSSHGRFGLAKAQDVQSKASSSVGISYLKNSAKVQLRCLMAHLEFLQSQIEEVDACIQDLMAQRESFLTTIPGISQTLAATITAEIGDIDRFESPEKLAAFAGIDPTVYNSGKFTGTRMVMSKRGSPYLRRALWLASTSARRFDPELAAFFQRKLAEGKHYNTAMGAVCRRLLNRVYSILKEHRPYQPKSVSL

SEQ ID NO: 314342 - protein, 338 aa, unidentified
MATVRVFVGLDYHDAGVQVCVLDPQGRVLANAACPNDAAALAEFVGRHGGPVFAAVEACTGSADLADELVGQFGWSADLAHPGYVRRMKQTPDKTDYSDARLLADLERVGYLPRVWTAPAAVRDLREVVRYRHQLAAQRRAAKVRIRALLRQHRQKPPAEVNPWTIAWHKWLRDGTTLPATTRWVIERHLAELADLARRTKAADTELARRTADDPLVGHLLAIKGIGLITAVTLRAEIGRFDRFRSGKQLARFCGLSPRNASSGERQADAGLIRAGSPLLRMIVMEAAHRLARYQPHWRALKAALVARGKPAGVAVAAVANRWVRRLFHEVRPVALAA

SEQ ID NO: 314343 - protein, 370 aa, unidentified
MKEPTTSYIGLDIHKESIAIAIADADRAAPRFIGTINPVPAELCKAMRRACTKESTLIVYEAGPCGYGWVRYLRKQGWACDVIAPSRITRKPSERRIKTDRRDALLLARESRSGNLTSIVVPDERDEAIRDLVRAREDARAARHRVRLQMQAMMLRHGRHYQGKSNWSQAHDRHLSTIRFEHPAQELAFNEYRLASKEACERVERFTQALRVQCEDWRMNPAVKALMCLKGFDFVAAVTLVAELGDLTRFAHPRALMAYLGLVPSEFTSGPNRRQGEITKSGNKHARRILVEAAWNNRFKAQVTRGLEVRQEGQPKIIRDISWKAQLRLSKRWRSLSMGRKLAQNKICVAIARELSGFIWDVARHVKLSP

SEQ ID NO: 314344 - protein, 451 aa, unidentified
MLIQGSSDPPRLVRVGIDAAIVAQHEVCIRATDAEGRVRTDRFHVQPTLAGLRSLTDRLAQMPGVVAVAEPTSMTWLGLSVALADAGCGLSLLGARHAARLRGAISGKHKSDVIDADVLARAGEVFDLHPLQPVDPAQLALRRACVRRGTAVIDGNRYLRRLISLARWAFPDVWNGFGGSLPTAIAVLQRWPHLAQLAAARRSTLTGVVALHTRGVSDVPERVEVIRSSAAAWASFWEGHVDLDALAFDVTEHLSDMATAKARIERATTQARRYWEQLYGDDELLMSIPGVGPVTACVIRGFLADGSAFPSAKAAASYVGLNPSTWSSGTVSQPSRAITKEGPAVLRLAFFQAANAARRQDPQLAGFYHRLMTAHGHCHTQACVAVARKLVERTWTVLHRGTPYQLRDSRGQPISHLEAKQVVKDRCTVPDHVRASARAHSAATNRGKLTR

SEQ ID NO: 314345 - protein, 305 aa, unidentified
MDVAKDWLDAHIRPAGVFQRFGNDAAGIADLAELCRGHGVGLVVMEASGGYERTAFLLLWELGVGCALANARSVRRFAEAMGFLEKTDRIDAGVIAHYAAVKSISPTPPPQAAQVRLSALVTRLSQVTGDLVIQKQRRHAARDADSRESLDEVIALLVRQSRTLEGEIASRIDDDPLWARLDAAFRSIKGVASRTVARLMAELPEIGLVSNKAIAKLSGLAPIANDSGKRSGHRPVRGGRSGPRGILFLVAQIAARYDPHLASFQQRLQSAGKPKMVIRIALARKLLVILNAKARDARKEFQNAT

SEQ ID NO: 314346 - protein, 416 aa, unidentified
MNAVGIDVSSRKSTVAVLRPLGEVVCLPFDVSHDADGLASLAEKLKALDGETRVVMEHTGRYYEAVAKALHEAGFFVCAVNPLLIKEYGANSLRRVKTDKADAVKIARYALDNWADLRDFTPMDAIRYDLKTLNRQFQLASKQRTASANNLIALLEQSFPGIRKCFDSPVRSDGTQKWVDFAHSFWHVDCVRKQPFAAFCERYRKWCKRHAYLFKLSNAEEVYALAKRAVVLTPKSKVVKVLVQEAANQLSSISRSVEVYRAEMDRLAAMLPEYPVVMAMYGVGKSYGPQLMAEIGDVRRFERKQALVAFAGIDPMPNQSGDKNVRSNKSSKRGSPYLRKTLFNVIRTYLQCAPQDEPVFQFLNRKRAEGKPFYVYMLAAANKFLRRYYAKLRDYFASLDTLQPVDPIPTILKATL

SEQ ID NO: 314347 - protein, 369 aa, unidentified
MEKDTTYVALDDSKRKIVAGILRPNDTAPELREVANDPHHIRRLLTRLQRERPVSACYEAGVSGYDLYRQLRALGVACDVIAPALTPRRPGRRIKTDRRDAAKLVHLYRAGELTAIHVPDEVEEGGRDLIRCRDDIRRDVLRWRHRLLKLLTRHGRMYVAGRNWSQVHWRWIREQRFDVPPLQRAFEATLFTLEQALARQAELDKEIEALAATVPYREPVGWLRCFRGIDTLSAMILLAEVIDFQRFHRPRELMAYLGLVPSEYSSGETQRRGALTKAGNAHARRVLVEAAWHYRHRPTIGHALATRSQGQPPAIVAQAWRAQQRLHRRYRHLVGHGKRPPVAVAAIARELVGFIWAAMTGHESRLQTA

SEQ ID NO: 314348 - protein, 444 aa, unidentified
MAAVSIPIVDWLDKPQSFHFAQGYEDRFLWNTVVANDTRSDAYMIYLGIDVAKNSHVAAAMSSEGEVLLMPFSFANSADGFTLLREKLNNLPKLPLLVGLESTAHYGENLICFLCGNGYHVAMINPLQTAAIRKSAIRKTKTDKVDAFVIAKALMMEGYTELQQSDIQILKLKGLCKTRQNLILMRTRCKIQLGSFVDQLFPELNRFFRSGLHINVSYTLLKAHPRPAEVGALHLTYLSNLLRKASRGKYKKEDAIRLRELARNSIGTDNPALALQIRQAVSQIELFSAQLKQVESEISTIMDSLDSPIMTVPGIGYLNGAMILSCIGNIQRFSSPAKLLAYAGLDPAVVQSGNFSAKSTRMSKRGNSMLRYALINASHNVVRNNETFAQYYNSKIAQGKSHYCALGHTAHKLIRVIFALLIISLALSTTIRQPQRSVFTEAHA

SEQ ID NO: 314349 - protein, 429 aa, unidentified
MSYRIAGIDVHKKMLAVVVSDVEVDGEFRFERRMFGSNPEQLRTLAAWLLEQEVEEVVMESTAQYWKPVWETLERYWKPLREKREGASRKSGTLHLALAQSNRGRRGRKRDFPDAERLVKRLVARELTLSFVPDAEQRLWRTVTRRKYQLTRDRVRLQNQLESLLEEAHIKLSSLVSDMLGASAQRMLKALAYGETNPAALAALADRKLRATPEQLCDALGACTDLKPVYRRLLKMALEQLQFLEQQIGQLDQEMASLLSPHQDAVERLAEVPGLGVDSAQQIIAEVGPTAATFPSEKCLSSWVGACPGDDESAGVNYSHRSPKGNRHMRRVLNQCANAAARTKGSIFEIVYRRSVPRLGHNQAIGAIAHRQCRLIWLILHQGVRYEERGPAVTKQSKQNRTARMIRQLRSLGYRIEQTNPQPSQAQAQ

SEQ ID NO: 314350 - protein, 369 aa, unidentified
MENIIYIGMDVHKESFSLCALHGTTGEIVREARCASNVSLVKKFVEKLKTKYGEDINIKAGYEAGCLGYSLHNLLEQNGIDCDILAPTTMYSSSKNKMVKNDKFDAKMIALNLANGTYKEVYVPEEEDVAVKEYIRMLSDFKTSLKKMKQQIKSFLLRQGCVYEGKSSWTIAYMKWLKNLDLQGLFKETLDEYLLQYDVLVDKIERFSLRLEKLSHSERYEEPVAKLRCLKGIDTTAAMIVHIEIADFTRFPTAKAFMAYLGLTPSESSSGEKISRSSITKQGNSTVRSTLVECENALVKGTIGLKSKRVKARQKGQQSEVISYADRAVERLQRKYHRMMYQGKPRNVALTAIARELGCFIWGLETGKI

SEQ ID NO: 314351 - protein, 344 aa, unidentified
MDQIIRIGVDTSKTVFQLHGVNASEQAVLRKKLRRSEVRAFFAKLAPTLVALEACGASHYWARELTKLGHDVRLIPPQYVKPYVKRNKNDAADAAGLCEAASRPHMRFVPIKSEQAQADLMLTGARDLLVRERTQLSNAIRGHAAEFGLVAAKGLDKIEPLLERTAADQALPERARKLFEILGRQYADLEARIEQIDAELKAWFKSSEEARRLADTPGLGPISASLLVMKAPDARAFKSGRDFAAWIGLTPKDHSTAGKLKLGAITRAGDEALRSALVCGATSLIKQVSRGKGPNWPWLKALVARKPPKLAAVALANKLARIAWKMMTTGERFRPERMQPAAAA

SEQ ID NO: 314352 - protein, 473 aa, unidentified
MQRRIVGLDLGVATDHTAVVLDESGAELARRRVQPTRASFEALRAAALSGAEEATVLEVVMEPTGPAWLPVAVFFGAAGDRVYRVSPQRASDLRRYFRRHHKTNRIDATTLARMAIVEGDALRPVELARGDAAALDREVRVTERLTEEIATRKVRIRDLARQLMPTSATALSKQLSRADLEVLRTWGNPKALVAAGVEAVDELVQSIGRGMHGRAKAEAFVAAATEALDLYGDSDAVPFEALAADLATEIALLEAIEAARAPHERRREELYGRVDPEGLARSVPGIGDKGGPLAVAVVGRAGRFPNADAFCSYTGLVPKASETGETDHKGQAMTKAGNRKLRRMLYRAADTARKEDPQLARIYWTQMVERGANHTKALAVVAAHLARRLWRTLQRQSPYVVRDTDGNEVDRARAKVIIAERWTVDEETRRRRRSRKKVGKAPQQVLKGHAQNGARSASTRRPSPATIVDRAAS

SEQ ID NO: 314353 - protein, 350 aa, unidentified
MLIIGCDYHPSFQQIALVNTETGELQERRLMHREEAEQYYRALGTAGAEVRVGIEASGHAGWFERLLAELNIELWMGDAAKIAAKRVRKQKTDRRDAQHILTLMVKDDFPKIWVPSWENRDVRQLLWHRHRMVQTRTRIMNQLQAAALNEGLRYKKKLWRESGRQQLESLPLAPWASRRRRDLLEVLDRINPTIAELTRAIEQQAEKCPDAQRLMTHPGVGALTAIAFVLIIGKADRFSCGKQIASYLGLVPEEDSSGERRRLGHISKQGNSLLRFLLVEAAQVTVRSDNRWRNRFFHLAQRRGRKIAKVAMARRLAIRLYWMWRRGWSYAQLESSGSHVGQLGNRHGVQ

SEQ ID NO: 314354 - protein, 405 aa, unidentified
MSNDVFVGLDWAARTHSVCLIDATGAVLDRIEVAHDRDGLAELMRRLARHGQRLRIAIERPSGLIVDALVEAGHQVFPIHPNAVKASRPRYRSHGAKSDASDAYLLADLLRTDGHRWRALAAQSDEIRALRALVRSRDNLVAARVAAANQLSSTLQAFWPGAASTFADIASPIGLAFLRRYPSPSSARRLTEAQLLRFCQRQHYSGRRSPAELLHRLRAAASVRVGQHTEQALAAVVQAQVAVLEPIVAQIAELTRRIERFMHSLPDGLLMMSFPRAGQLCAAQILAELGDVRERFPSADQLAAEAGAVPVTYQSGKTRSVAFRWACNHRLRKAITCLADNSRHANAWARNLYQAARARGCDHTHAIRILARAWLRVIWRAWTDRQHYDPALHGSAVALASTQGR

SEQ ID NO: 314355 - protein, 423 aa, unidentified
MMKLKYSICCGLDVHKNVIVATIVITNKDGISEYLQKSFSTINSDIQRFHNWLIENNCYHVCMESTGKYWIPIFNYLENDIDVCLTHPKYVKAIKGKKTDKKDSKWIADLYKFDLVRCSFIPPKDFRQLREIARYRFKLVCMKSSEKNRIQNCMTVSNVGIASVLSDPFGKTATEIMSYLLEHTADSIDEKAVRKLIKKGAKAKSDEIIEAIKGCNIETDQAKKLELACGHLEYLDDMITQTEVELYVRIKPYYEFVEFVSTMPGMTELSSTIVLAETGVDMNIFDDAKHLCSWCGLSPANNESAGKKKSVRIAKAGDYLKPMMVQCALAAIKSKKQPYFAIKYGRIKKRRGHKKAIIAIARMMMVCIYHMVSERNPFTPTDYEELMDPQNHVERVVLNENNVFAYLESLGYDSSKLVKRNDN

SEQ ID NO: 314356 - protein, 342 aa, unidentified
MEQYVALDVSLKEISVCIIDSKREVVFEGKTAADPATLVELIRSKAPQVKRVGLETGATSPWLFHALASAGLPVVCMDARHAHAALSMRPTKSDRSDARGLADMLRMGWYREVHAKSVTSHEHRTILGARHQLVTMRSELDAQIRGILKTFGLILGTGNKDKLIQRAEKLAAGHPVLSGLVAKLADVRRHVASQIAAIDRDIRHLVHTEPTLKRLMSVPGVGPITALAFLSAVDDPRRFKHARDVGPYLGLTPTRYQSGETDRQGRISKCGDTFTRTCLYEAAHVLLTRVQRFSPLKAWGMRLAKRIGGRKARIAVDRKIAVILHCIWTDGTEFWWTREKAA

SEQ ID NO: 314357 - protein, 369 aa, unidentified
MAKSITYIGLDVHKDTIVVALAEAGLRGEVREHGKIPNAPAALKALAMKLASAGRDLRFCYESGPCGYGIQRQLAGMGHDCAVVAPSLIPRKPGERIKTDRRDAINLAKLHRAGELTPVWVPDQAHEAIRDLVRARQAAVRALRQARQQLSGFLLRHGYHYHRPAWTQLHRRWLASLKFEQAVHHIVLEDCIAAVEATTARRDRLEAHIEAALPEWSLASVVQALQALRGVGLVAAATLVAELGDITRFANPRQLMAYLGLVPAEHSSGGTRRQGGITKAGNGAARRMLIEAAWSYRFPARISREQLLRQERLAKPIRDIAWKAQERLCRRYRRLARAGKLPTVITAAIARELAGFIWAIAKQAQPTAP

SEQ ID NO: 314358 - protein, 355 aa, unidentified
MPVAGLPIACDTKVAVITIGIDPHKSSLTAVALQPSGDVSATIRLEVNRDTVTRLQAWAAGWPQRQWAVEGAAGLGRGVAQGLAAADEPVVDVPAQLSARARLLNTGHARKTDPIDAAAVAMVAQHNRRLHPVRAEDDSLVLRLLSERRDDLAGERTRTANRLHALLRDLIPGGAKRNLSAEKAAALLRAVQPVTAVDVQRKQLSRDLVADLRRLDAALQRNSEDIATAITASGTSVTQIHGVGAVLAAKIIGHSGVVGRFPSRHHYASYCGTAPIEASSGEQRRHRLSRAGNRQLNRALHLVAVCQIRTNSPGREFYQRKLGEGKTPAEARRALKRRLCDTIYRHLNGDQQAAT

SEQ ID NO: 314359 - protein, 358 aa, unidentified
MQSNKISFKGQKIFIGIDVHAKSWKVAIAPEVGAVKGHSQKPSAKELFDFLKKNYPDGEYQAVYESGFSGFSTYYALKEVGIECMVIHAADVPTTQYEEVMKTDRIDAAKLARSLKAGQLKGNYVPEKQYIDDRSVVRIRRTIQKQLSGYKSRVKHLLHCHGVEMPERFSKIQTHWSRAFITWLMKDVKLMSDTRTSLDLLIRQVEVIRGTLLEATRQLRKMSQMERYKRRHDLLRTIPGIGPIVSMCILTEVCDVKRFHNENEFAAYLGLVPTSHSSGEKTVHGEKTFRGNKQLGPMVVEAAWVAISWDAGLGSQYFQYKKRMEPQEAIVRVARKLSNIIFSVLKNEKEYVPYQTGN

SEQ ID NO: 314360 - protein, 322 aa, unidentified
MKKDRVHAGVDVSKSSLDIAVYATKQQWSFPNNDKGISQAVSLLASLNPTLVVFEATGGLEVPLVAALGVARIPVAVVNPRQVRDFARAIGRLAKTDALDAEVIAHFAAAVNPAPRPLPEAMAQELTAIISRRRQLQQMITAEQNRLHTARKSMAQRIRMHVSWLEEELASIDDDLGRMVRESPAWRGKDDLLQSVPGIGPVTSTSLLAGLPELGSLDRKQIAALVGLAPLNRDSGTLRGKRTIKGGRTHVRGALYMPTLVATRFNPVIRSFYQHLLSAGKPKKVAITACMHKLLTILNAMLKHGTVWNHATSQFKFIGPCS

SEQ ID NO: 314361 - protein, 351 aa, unidentified
MPHKLNSGIAVIGVDIGKNSFHVVGHDKRGAIVLRQKWSRGQVEARLANLRPCLIGMEACVGAHHLSRKLQMLGHDARLMPAKYVRPYSKGQKNDFRDAEAIAEAVQRPTMKFVATKTAEQLDLQALHRVRERLVSQRTGIINQIRAFLLERGIAVRQGLRFLRAELPRILAASCDALSPRMLRVIEDLAGDWRLLDQRIEGLSSEIGALARKDKDCERLMTVPGIGPIISSAMVAAVGTGDAFSKGRDFGAWLGLVPKQISTGDRTILGSISKRGNRYLRTLFVQAAWVVLVRIGPKHWDRYGLKSWIEAAKKRLHHNVLAIALANKLARIAWSVLAHGRAFEATKIQAA

SEQ ID NO: 314362 - protein, 379 aa, unidentified
MRTVCGLDVHKDSIFVCILNENGILFQDKIGVLTPDLERLVDVLHEHNATEVCMESTSIYWMPVWRILEPYFSLKLVNPYFIKQLPGKKSDVKDAEWIATCLLKDLILGSYVPEDRIQQLRQYDRRIFDLNKDIVYKLTKLDAALQRCNIRISNYVSTTDGKSYQKVVEKISEGTTDPKVLTGLIHGRTLNRVGKDVIAASLTGVITQTDIDVIRQIRDEVTLAQKHRKECLDKMEELCNKWFPDQMKNLQTVPGVSLRSATSVIAELGTDMSSFEDAAHLVSWSGLKPRNDESAGKIKSRKITHGNKFLRKTLIECTWAASKTRGCFYNKFSYHQTVVRRKNKMKVQVAIARKMLTAIWFILHDNVPYRDYTPDIAAE

SEQ ID NO: 314363 - protein, 355 aa, unidentified
MTTITINPHQYDCFIGLDVHSKSYSVTYKKHNSMKLKSFTTTSNPSKVTDYFKKHCPEDRLVFVYEAGPTGYALHDHLTKNNQRCIITHPGNVEKAAKDRVKTDRLDSVRLAESLSSGQIRGIRVPEDIYRQLRHICSSRQQYAGSIRRAKQRIESMLLFESISIPTPEQSRWSRQHIQILKELQLDHVRRVKLDSYLDDLEYAKHKLLFFHKQLREFYRDNPSIHYNIQLLRGIPGFGFVVSAYFLSRIGNPEHLRSIRSIGSFSGVVPSEFSSGKKIRKGNITHMGDPVLRSLLIEAAWATIRKDKELKQFFNRIKTKNRGDKGSRIAIVAVARKLTHRAHCVLKNKRPYIVL

SEQ ID NO: 314364 - protein, 428 aa, unidentified
MTTCSTTQSQRTFVAIDIAKQHHEVLMECPDGSRQRWRMANTRHDYDQLRHRLEAVEAPVLIGFEATGVYHRSLGHYLHQCGFELRLLSSLAMARTRDALYNSWDKNDPKDAQVLLHLLKTGVSQHYHDPLVHAINDLQELAQTHFHISQRKVRVQHSIMTHYLPLYFPEAERYFTNSRAQWFTHLLHRFPCPAAIIRYDREAFYQEAGPVVGRKVNKRGFLDDLYTTALDSIGLPVAEDSEAIHMFRVMLAEHQHLCTLRTSIETQADQTLHPHPDYQRLRTLPGVGPILALTILAEAGDLRRFPHHRQFLKYCGFDLCTYQSGQSRSLTHLSKHGNGRLRYAFWMAAQGAVRMRENTFRQKYARSIKNDPLNPDRKRKALCAVAAKMARVAHGLIKTATDYRPYFEPTSPRGALRSPGPSRHMVTS

SEQ ID NO: 314365 - protein, 399 aa, unidentified
MLDVHSDSVVVCARISVRNKVSRETGRFGVTTPDLMALGDWLETRGITHVSMEATGVYWKPVWHILEDRFTLVLANAAEVRNVPGRKSDVNDATWGADLLAHGLIRPSFVPPAPVQELRDLTRTRRQLTREMVQHIQRIQKTLETANIKLATVITDIVGFSGRRILRAIVAGETDAARLAGLGSKRLRCSRSELVAALTGRITPHHRFMLGQHLDLIDEIERRIAVFDARISELLRPFRDTVERLSTIPGVSTHTAEVILSEIGFDMSKFPTAGHLLSWAGLVPRLDESAGKRRSTRVRKGAPWLKPVLVQCAYAAGRKKNSYLQAQFYRLKARRGAKKAAIAVAASILTAAYHMLKDGTFYQDLGADHLAKRDAAKVVARLAKRINELGYEVQYQVAA

SEQ ID NO: 314366 - protein, 357 aa, unidentified
MDGRQRRRPKHGMVVMKQYVGLDVSQKETSVCVVDESGKVVFQGRARSDPGALAELLSKRAPGAERVGFETGAMSSWLWHELNRIGLPVVCIDARHAKAVLSVRMNKSDENDAQGLAELVRVGWYREVKVKSPESQATRSLLVARSRLVAIRRDLENQVRSMLKEHGLQFSRSIGSQFRRKVLELLAEDHPLRSVIGTLLRVHEQTCEEQEKLDRQVRRLAHDDCTTRRLMTVPGVGVVTALTYRHTIDDPSRFSSASDVGAYLGLTPRRKQSGETDVSGRVSHWGDRLLRTYLYEAASVLMHRTKKWSTLKAWGIRLSKRIGMKKAKVAVARKMAVLLHCIWVDGTSFQWGSEKRA

SEQ ID NO: 314367 - protein, 340 aa, unidentified
MDEYDGRQYVGVDLHRRRSVIVRMTPEGDRLGPAVRIDNDPFTLAEQVASWGENPEVVLEATYGWYWAADVLAEAGAVVHLAHPLGVRGFAYRRVKNDERDAADLADLLRMGRLPRAWIAPPAVRGLREAVRHRCKLVAIRSGLKAQVHSVLAKQGVRVPVSDLFGVGGQQLLDQLDLDAPYAARVVSLRRLIDAFTFEIDVLGRRTAADLRGHAGWRAIQAIDGVGPVLAAVFVAEIGDVHRFARPQQLCSWAGMTPRHRESDTKVHRGRITKQGNHLVRWAAVEAVQRLHGGPLGSTRARVAERRGANIAKVAAARKLLTLVYWGLRDGHIRCLARPA

SEQ ID NO: 314368 - protein, 460 aa, unidentified
MKKIPKRRQPSKLHRASQLSVLQANVAGIDIGSREMFVCGPADENEQREMRVFGTTTEQIRECVGWLKRQKVTSVAMESTGVYWIPVLEIMESSGWEVVLVDTRPLARVPGRKTDAEDCQWLQTLPSHGLLQGVYRPGEQISEVRRMVRQKTVLVRQQADLLRRMQQCLDQMNVRIHPAVKPLQGATGMAMLRAIVAGERDPQKLAKLRDAGCQKSASEMVKLLTGHGRSDHLFNLGQLLRQYDFLSEQIAQYEQEIERRLQELTPLERPHLTVPPLANREKRQNQKRHQEAKRQVLYRMIGADLTAIDGIGVETAEVFVSEYGPDLSKFATEGEFVKHIGLAPHRPVSGGKVLKKRRQEKGTRTAEVLRNAASALKASRSALGAYYRRIARRKDSAIAVFATARKPAQAIFRLLRHGQAYLDIGQAEYERRYEAAHLRALQARAKQSGYALVQLEPATA

SEQ ID NO: 314369 - protein, 435 aa, unidentified
MANGDREPFAAFVALDWGDRKHVWALQLAGSEEVEQGEIEATPEAVEAWAAGLAQRFGGRAVAVALEQSRGALLFMLAKYEHLVLYPVHPGTLANYRKALCPSGAKDDPTDGALLLDLLRRHRDRLRAWEPDTAQVRTLQFLVEDRRRLVQEKTRQSNRLTARLKLYFPQVLSWFDDVDSALVGDLLRRWPTLEELQRARPATLEEFFHQHNCRSAERLRERQEQIRQATPATRDAAVIASSVSLVKILVALLATLREGIAELDRQIAEQFAQQPDAALFEALPGAGPVLAPRLLAALGTRRERYQSAAEVQCYSGVAPLLERSGKKQWTHFRRACPKFLRQTFHEWAGHSIGSSDWARHYYQQQRDQGKGHHAAVRALAFKWIRILYRCWKDRTPYDEARYQEALHRRGSPRPNAPTKFQWETCAGFSRFVGAS

SEQ ID NO: 314370 - protein, 312 aa, unidentified
MAMLSFCGVDVSKDRLDVVVLPEGWFFSVSNDTAGWAELVARLRPLTVSAIGLEPSGGYERGIIRALLAAGLSVRRINPNKLRQFARARGVLAKNDRLDARLIAEYVAIMPTRVVQRDAAVERLAEIVTMRRQLCDEHVAVENQAAHLEDAMLRRLSKRRQMRLEADIRLLDKRLAEMVAANVALAQRYELLTSMPGVGPVLAFTLIALLPELGKMSRKQIAALVGLAPYDFDSGKLKGHRSIYGGRMSVRNVLYMAALSASRYSPALKTFHKRLAAADKKSKVIIVAVMRKMITTLNAMLRDSAAWRPRSA

SEQ ID NO: 314371 - protein, 365 aa, unidentified
MNEITILGIDLAKNVFQLIGVDKHHKEVMKKRVSRVKLQEYVEALPRCTMLMEACGGSNHWGRTFRAMGHEVKLISPQHVTPYVANHKNDYKDTEALLEAGTRPRTKFVSIKTIEQQDMQSILRIRERLVGNRVSLSNQIRGLLLEYGIDIAQGYSHLKKKIPQLLEVGNEQLTAQMKEVLADCYEEFKGLSDRIVAYDKRIDNISNQHESCRLLRSIPGIGPIASTALYAAVGNGSQFKNGREMAAHIGLVPKQHSSGERQVLLGITKKGHADLKQVLIHGARAVVLHAKKKTDWRSEWINKLSQRKHTNVVTTAVANRTARIAWAVLTSCKPYDAGDTKLAESGACYPQPFHALHKIGGSEHE

SEQ ID NO: 314372 - protein, 372 aa, unidentified
MENIIYIGMDVHKESFSLCALHGTTGEIVREARCASNVSLVKKFVEKLKTKYGEDINIKAGYEAGCLGYSLHNLLEQNGIDCDILAPTTMYSSSKNKMVKNDKFDAKMIAINLANGTYKEVYVPEEEDVAVKEYIRMLGDFKTSLKKIKQQIKAFLLRHGYIYEGKSSWTIAYMKWLTNLDLQGLFKETLDEYLLQYDVLVDKIERFSLRLAELSHSERYEEPVAKLRCLKGIDTTAAMTVHVEIADFTRFPTAKAFMAYVGLTPSESSSGEKISRSSITKQGNSTVRSTLVECANALVKGTIGLKSKRVKARQKGQRSEVISYADQAVERLQRKYHRMIYQGKPRNVAVTAIARELGCFIWGLETGKIQRK

SEQ ID NO: 314373 - protein, 410 aa, unidentified
MEALVKRSCGLDVHKKIIVGTILLEQPDGSVIEETKEFGTTFKDCEALAMWLSEQGIGLTVMESTGIFWKNIYAALEKKGVPVSVVNARHVKQVPGRKTDVKDSQWLARLARYGLLKGSFIPEKDLRELRLVARYRTKLNRTLSSELNRLHKILDDAGVRLGNVVSDINGLTASDIIDGIIQGESIPQLLTYTRGQLKKKKEALKAQLEGEISERHLFLLKKLKDHIHYLTKEIHEIDEYIFAAMKPYQQQWEILQTIPGISEISAALLIIEMGIDMQAFGNREQFCSWAGICPGNNESAGKKKSGKTRKGNNQLRYLLCESANAAAKTDGQFKQKYKSLLVRRGHKKAVVAVAHKILRVIFSVLKEREGYQEPNMNYEQLVVNKNSARWVKMLKKYGYIGVKEPDKVTV

SEQ ID NO: 314374 - protein, 397 aa, unidentified
MAVLEDGQVRQVGRLRTTPAALRTFAQRLQPTDEVVLEATCNTYAVVQLLRQFAGRVIVSNPHRTRAIAEAKIKTDTVDAEVLVRLAAGGWLPEVWVPDAQTQALRQQAAHRVRVVHQRTRLKNRIHAILHRNLVLGCPRSDLFGKAGRQWLVGHALPLLPTHEQAIAQMTLRELDLLDEELKAVDRALATCVVERKEIHRLMTIPGIDLPVAITLIATIGDIRRFRSPTKLVGYVGLDPRVRQSGGRPAVYGPISKQGQASARHMLVQAAWAAVKAPGPLRAFYHRIRARRGTQIAIVATARKLTVLVWYLLARGEDYAFARQFLIGRKLRELERLVGLPARRVRRDLAGARDIREFRQRELQLCLQAERTYQKLTGRWKVRSAKQDAGATTGVRL

SEQ ID NO: 314375 - protein, 414 aa, unidentified
MHTQLFVGVDTHKDSHTAAVLDSYFGTLATITFANSFKGFSQFTEKLEKIAKGKTCLFGLEDSQGLGNFLAEFLLKKGFSVVDINPISTDRGRRLTVHRDKSDDRDAILITKTLIAENSNLNPVRINKNSIALREMIRYRQTLVEESTRVKNRLHVLLFNQYMRVLDLFSSLFSRCALAFFAKYPNPSLLKDTDLDTLATFLKANSKGRYGREKARAILSTTSNSVAGSLVDTRAYIIRKHISKLLEIQGELEKIKDILCPLIEKSSYSCLRSIPGIDTVTAAKIISQVIDIDRFSSSSKLAKFIGIAPREKSSGRKKKYQKSKYGKKFLYSTIYFMTLTHISRTRDGRDKNPISRAYYLKKVSEGKTKKEALTCLARRLCDLIFAIMRDRSIYNFSKSKFTKQHSVVLDTVVA

SEQ ID NO: 314376 - protein, 420 aa, unidentified
MKAYDVDDFAALIGIDWADKKHDICEHPKNTEQYHYTIIKHKPEALHKWAMDLKLRYPDQKIAIVCELKKGPLIYALAKYDHLVLFTVNPSAVANYRKAFTPSGAKNDPTDAFIQTEIIKLHMDKLSVIEPESSSMRALAQLVEYRRSLVQDSVDLSNKITVTLKNYYPQALEWFKEKDTFIFCDFISKWPSLTAVKRARKQTLVDFFNRHNSHYETVNNARLLSIKSALPLTEDEGVIGPNQLLIEVLIMQFKVLLKGIEQLDKTIKQMYKKQNDKAIFDSLPGAGPQLAPRLLVAFGHNRERYTDASQMQKYAGIAPVIESSGKKTWTHWRYSCPTFLRQTFVEWAGFSIRYSFWAKAYYEQQKSKGKPHNSIIRSLAFKWIRIVFRCWKTNTPYDESKYLEALKRRGSPLLKFAINS

SEQ ID NO: 314377 - protein, 326 aa, unidentified
MTSLPNPTHDERLTVGIDVAKTTLEVAISGRAATLAMSNDEAGYASLLAELSGLNLGLVLLEATGGFELACATALQLAGLAVAVINPRQARDFARAMGYLAKTDRIDARVLADMARTLLQRGDLYKLVKPLPNAKQLELQGLVTRRRQLMAMKLAEDQRTKMPGLLQRRSLNTIIKALDREVARVDKALQAFVGTHHAELAALLDSVKGVGKATISTLLAEVPELGKLSGREVSALVGVAPINRDSGTMRGKRSIFGGRPDVRRVLFMAALVASRHNPVIKAFYQRLLAAGKPKKVALVACMRKLLTILNAMVRSGKPWDQALHLG

SEQ ID NO: 314378 - protein, 335 aa, unidentified
MLIIGCDLHTRFQQIAYLDLTTGEIVTRQLEHESGEAQKFYSGLGEKARVGIEATGCTQWFERLLGELGHELWVGDAAKIRARVVRRQKTDTRDAEHLLDLLLSNRFPRIWIPTPEERDLRQLLRHRSKLVSMRTSVKNQLHYLAMNQGVCRKRKLWTKLGRAELLALNLGPWASRRRQELLELLDRLDPRIEELDEVVKAEAEHRPEAVILMQQKGVGPVVGLAFVLTVGPVERFANSRKVVSYLGLNPCEYSSAGHQRLGHISKQGHDMLRWLLVEAGQSAAQHDPELRRKYQRLRFRRGAHVAKVAMARQLAVRLYGLLRSHGCGTAGSHAR

SEQ ID NO: 314379 - protein, 344 aa, unidentified
MNISTIGLDLAKNVFQVHGIDDTGKVIVRRSLRRRQVLPLFGKLEPCLIGMEAFGTSHFWARALQALGHEVKLMPPIYVTPYVKRGKTDAGDAAAICEAVTRPTMRFVAIKSAEQQSILALHRTRALLVRQRTQLINMIRAQLAEFGFVLATGIQHALKLVDQLVEGRAPDIPALACKIVISLAEQIRALQARIATLEEDMKSWFRGNELAKRLKTIPGIGFITASALAASVTDPHQFTSGRQFAASLGLTPKADCSGDKQRMGRISKMGDRYLRRLLVNGMTSQLQAARRKPEAHPWVTRLLASKPNKLVAVAMANKAARIAWVVMTRGEVYRARYPATEATA

SEQ ID NO: 314380 - protein, 431 aa, unidentified
MIFVGVDLGKQQHAVCFLAADGREVARPLRVPHTGAGVRRLEEQLGRLPGPQQVVMEASGAHWLGLDRRLRAAGLAVQVVNPLQTAGLRKMGIRKTKTDASDAKLVAELARIGRARPSYVPDDAVLELRELVRFRWHLADQLGDAKRRVLAVLDKVFPEFAAQLSDPFGATGRELLGRCASAAEFAALELGDLAARIRRASRHQLGRAKAEALRAAAADSLGVGCLEGVARLQIRALLAQLRLLERQIARADALLERRVARRAPHLLTVPGVRGLLAATVLAELGDVARFGRVEQVVAFAGLDASVFESGDFQGTRQHISKRGSPHLRRALYLAAFKAIETDPELAAYMRRQQAAGKAYRVALVAVSRKLLARVYRVLRDGRPYRPASSVAETTPPDAEPVSQASDPGAHSASRPRVGGSVVWTWFGRTGG

SEQ ID NO: 314381 - protein, 340 aa, unidentified
MSLVLQSILPYPDSCLGTSPHQQGWDTKMAELSFGGIDVSKDRLDVLLLPEGLCFSVCNDAPGWAELIVRLRPLAVCAIGLEPSGGYERGIIRALLAAGLSVRRINPNKLRQFARARGVLAKNDRLDARLIAEYVAIMPTRVLQRDDAIERLAEIVTMRRQLCDEHVAAMNQATHLEDAMLRRISKRRLLRIEADILLLDKRLAELVAADPRLAHRYQLLISMPGVGPTLAYTLLATLPELGQIDRKQIAALVGLAPYDFDSGKLKGHRCIYGGRMPVRNVLYMAALSASRYNPALKAFSNRLAAAGKKSKVIIVAVMRKMIITLNAMLRDNTEWHPAAA

SEQ ID NO: 314382 - protein, 366 aa, unidentified
MREPKILDFTGKCFYLGIDVHKSNWKVTIRSNDTFLKTISMDPSPLKLSKYMKQNYPGGTYYSVYEAGFSGYWAHRQLDTLGFKNIIVNPSDVPTTHKEKDRKDDPIDSNKLSRELCNGSLQSIYIPNTYMESMRILSRCLLQYTRRSTQVKCRIKALFNFTKESSSIDEYKRWSQAYIKEISTYTLNEKSTTFVLKHHIQELEHIRKARLKILQEIRIISKQEPVLKLLRTIPGIGCITAFTLFAELVDIKRFRNLDHLASYVGLVPSISKSDNSEVIRGITNRHCKHIRHMLIESAWISIRTDPVLTIAFDELTKGKHRHSKKTAIIRIAKKLLNRIRAVWLEGKPYAIGTIETQKAVKVAIKK

SEQ ID NO: 314383 - protein, 366 aa, unidentified
MRKSSTVAMSRIENFKEHKLTIGLDLGDRFSHYCILNESGEVIGEHNLPTTPKGIDDVFGRIPCSRIALETGTHSPWVSRQLAPLGHEVIVAHARNVRLIGDSSRKDDQLDARTLARLARIDPGLLGPVQHRSAKAQIHLTVIRARSGLVGARTALVNAARGLTKSYGERLQKCGTQQMNREMAKGLSQELRDALDPLLGEIESLNERIAEYDRRIEQIAKEVYPQVALLKQVKGVGTLIALTYVLTLDDPHRFRRSRDAGCFVGLRPGRRNSGMSQPQLHISKEGDVYLRTMLVQGAHYILGPFGQDSDLRRWGLRLAERGGKNAKKRAVVAVARKLAVLLHKLWVSGEVYEPLRNNHKAVTAVA

SEQ ID NO: 314384 - protein, 401 aa, unidentified
MVSDFRKGRYNLMKIYVGIDIAKLNHFAAAISSDGEIIIEPFKFTNDADGFQLLVSKLESFDKNSLIIGLESTAHYGDNLVRYLVTELYQVCVLNPIKTCQMRKNNVRKTKTDKVDTYVIAKTLMIQDNLRFISFFDLDMMDLKALGRFRQKTIKQRTRLKIQLTTYVDQVFPEIQYFFKSGLHQHAVYALLKEAPSPKEIASMHMTHLANLLKVNSHGHFTKEQAKELRVLAQKSVGANDSAISIQITQTIQQIELLDSQLEKIEAEMTDIMKFNDSVIMTIPGIGYINGGMILGEIGDIHRFSNPNKLLAFAGLDPSVYQSGNFQAKTTRMSKRGSRVLRYALVNAAWNVVRNNATFKAYYDAKRAEGRSHYNALGHCSGKLVRVIWKMLTDEVEFNLE

SEQ ID NO: 314385 - protein, 407 aa, unidentified
MEVMYPRCAGLDVHADSVTACMRIASGREVTYQQRVVSTTTRGLLELADWLTAAGCTHVAMEATGVYWKPVWHVLEGAFAIVLATAMHIRNVPGRKSDTNDATWIADLLAHGLIRSSFVPPAPIQELRDLTRTRKQLVREIARHTLRIQKTLEDAHLKLVRVVRDMLGISGRAILKALIAGETDAGRLADLTKGRLKAPRAQLVDALHGRVTPHHRYMMQRHLTQIEALEAAVIDLEAHLGDALGPFRAAISLLTTMPGISDTAARVIVAEVGVDMTRFPTAGHLVSWAGLCPRLDISAGKRHSTRTRHGAPWLKTTLVQAAWGATRKKHSYLQAQFLRLKSRRGPKKAILAVAASMLTAAYFMLRDGVEYHDLGPQHLAQRDKEHVAKRLLQRLRDLGVNVEVKAA

SEQ ID NO: 314386 - protein, 386 aa, unidentified
MRKPNDLSRSLVALKQDATVIAVIEMSQSSWLVAGIVPGVERQPLKKLAVNEEALQQLLHRWRKEATQAGRTIKRITVAYEAGRDGFWLARWLRAHQIEAYVIHPSSVPVSREHRRAKTDRLDTELLKRAFLGWLRGEPNHCSMAAIPTPADEDAKRPSRERESLVSECTRIVNRLRANLARLGIRGFKLTLACALERLTALRTPEGISLPANTLAEMRRDLARLCFVREQIKEIERARVQQLEQRPGHQRTASVRLLSRVVGVGIQTADMLVQEVFSRKLRDRKAVARYAGLTGAPNESGQKRRERGLSRAGNARVRRGMIHIAWGFLVHQKDSPLAAWYRTRTAGGRAGLRKTMIVALARKLLITLWRLVTTGEMPAGLALRPV

SEQ ID NO: 314387 - protein, 386 aa, unidentified
MQKLNDLSRSLAVLEPDVTLIAVIEMSLSSWLVAGIVPGVERQPLKKLAVDESALLKLLHRWREEAEKAGRRINRIVVAFEAGRDGFWLARWLKACGIEAYVIHASSIAVSREHRRAKTDRLDTELLKRAVLGWLRGERDHCKMVAIPTIKDEDAKRPNRERDSLVGERSRIVNRMKAALVRLGIRGFNPKLKRAAERLDGLRTPEGEPIPPNTMAELRRDMERRRLVNNQIRQIEEARLERLEQTPSDGPHAMVRLLARVIGVGIETADMLVHEVLTRNMRDRRAVARYGGLTGSPDESGRRRREKGLARSGNARVRRGMIQLAWRFLLHQKNSALAQWYRARTENARGTRKPMIVALARKLLIALWRLVRQGVVPDGVVLRLAQ

SEQ ID NO: 314388 - protein, 392 aa, unidentified
MYIVGIDIGKTHHEASIVSPEGKQIGRSLRFATTHKGADSLMSFIFKNIGNSPCVFGMEATGHYWYPIYSFLKAKGYTIYVINPIQSDSLRKMYIRQTKNDSIDSFLIAEVIRFGQFGTTSMADENILAMRQLCRYRDSVISSRTEIKLRIGTIMEQIFPEYEKQFSSLWVSTSMGILEKYLTPENIENAPIDELFEIIKDKSHNRLTRAKAISIKEAAADTFGIKIAQDAFSFQLKQLIDRMNFLDKQIEALDCQILEYYEKFDCYLHTIPGIGMIAAATILAEIGDINRFKSSSALVAFAGIDPTVRQSGEFSSTHNHMSKRGSPYLRHAIFLAATTCSFHNSPLNAYYKKKRDQGKHHLTATGAVARKLTSVIYAVLRDSKPYEPKSFC

SEQ ID NO: 314389 - protein, 393 aa, unidentified
MRVANTKSEIDGFVEALRALGHRCEIAFEPTGDYHRPLAYVLGQAGFHLALVSSLAVARTREALYNSWDKNDPKDAQVILHLLKNGTTQRYLDPLVTGHLDLQEMANTYQQVSLRKVRLQHSLLTHHLPLYFPEAERYLHSSRAEWFTALLLFAPCPAAVRQYSKAAFVKAASAQIAGRKVDRARWLADFYETACHSVGLPVTPESETVRMLRVVLEEYRALCALRKRLEVDITTQLATHPDFVRLQTLPGIGPILAMIILAEARDLRRFGCTRQFLKYCGFDLCTEQSGQFRGSTHLSKRGNARLRYAFWMAGTVAIRMQQNSFRRKFEDYIRPDPKNADRRRKGYTAVAAKMARVAYAVVTSGLDYRRFPEATRPGGTIPSLGAVEAHATS

SEQ ID NO: 314390 - protein, 396 aa, unidentified
MITCGIDIGKGKHAVAIIDELGRQLVRTRFYDNTMAGAEKLMEELARHAEPAQVHVGMESTGNYWRAYYDFLSKKGCVVDVINPIVTSASSAGDIRGRKTDKRDAESIAEVVMRGKYVRRRDEGLQERKLRALTRQRGFIVEERSAAKLHLSSMVAEAFAEFESLFEDPYGPLALAVLSKYPTACHMARARKPSLAKIVRAHTRGRDADAEARRLVDAAKDSISLACEITDALARCIVSSIQTITALDERVKDIEKAIMDFDPPDLAAKLMAIKGSGKVMPMVVASEFGDISRFRTNPKNGSETGMHKRLLAFAGCEPRIRESGKWRGRKFISKRGSRQLRTALYLIANNIRQWDPYFKAVYDRKVEAGKHHNVAVFYVVAKLLEVLCALYKSGRS

SEQ ID NO: 314391 - protein, 361 aa, unidentified
MVKAKTLVGLDVHASKVVAAMLDAETGELRFGRLAGGMDRTLALCAGLEPPVRVAYEAGPTGFGLARALTAAGVDCVVAAPGKIPRAAQDRVKTDRRDAEHLVRLLLAGKLEPVRVPSTEEEALRDLVRAREDVRGDLMRARHRVSKMLLRHDQRFSAGQRAWSQRHRDWLGRVELDDPVAQLVLSDYLASVEAMLIRRDELERRISELVPGSPWSELVPRLRCLRGIDTLSAVGLCAEVGDFERFARPGQLMSYLGLVPSEHSTGDKRRLGAITKSGSRHARRLLVEAAWHYRLGPQPSRELAKRQTGQPEHVIAISWKAQQRLGRTWRRLAQERGKRRTLVAVAVARELAGFVWAIARA

SEQ ID NO: 314392 - protein, 331 aa, unidentified
MCYFTGIDVSKEKLDIAWLRDALTGKKKTKVLKNTTQGHQQVEHWLLKNLKVPAQEIVVVLEPTGVYHEALLYALHESGFKILLVNTGKAKKYAESINATHKTDKSDALMLANYGYAQRHQLALWQPEAPEVRELKVMIRRLDALEKDLQREHNRQEATRVSLSSDRVAQSLQAMIQTLMAEIKRLTQDIDNHINRFPALKRNRALLESIKGIGPVMSRELVYLFAAKQFKNAKQAAAYLGLIPRLRESGTFKGRTMLSKVGSARIRAKLYMAAVCASTHNPDIKAQKKRLLKAGKVKMQAIGAAMRKLIQICFGVIKHQTEYQPRLPVMG

SEQ ID NO: 314393 - protein, 341 aa, unidentified
MKLTTIGIDLAKDVFQAHGVDERGKAVLRKQLKRAQMLAYFANLTPCRIGMEACGGAHYWARKLQALGHTVQLIAPQYVKPYVKRNKNDAADAEAICEAVLRPNMPAVPIKNGEQQAILSVHRARQGFVTARTAQSNQIRGLLAEYGIAIPVGIGNLVRRVPEVLEDGANEMPGSFRRLIERLLDHLKELDRQVKELQLDIERWHKENAASQKLAKIPGIGPLTASAISASIGDARNFKNGRQLAAWLGLVPRQHSTGGKSTLLGISKRGDTYLRTLLIHGARAVIRVIERQSVPDPWLQKLLIHRHKNVAAVALANKNARTIWALLAHDREYQPHYGVAA

SEQ ID NO: 314394 - protein, 331 aa, unidentified
MKKALGIDIAKQKFDVALLGTKNKHKVFDNNKKGFYELSKWLVSNDSENVHACMEATGCYGKPLATYLYDKGHIVNVVNPLKIKAYGRSKLLRNKTDKVDAKIIAEFCGQMEDIRPWKPKPAYIEELSDLTKRLDDLNDMKRQERNRLESSSKDIAKFIKSIIKQLDKQTELIQKQIDSLLNKYSDLRDKKELLETIPGIGIKTIPKILSILDNIEDFKNAKEVAAYAGLTPRNFESGSSVHGKTRLTKIGNSKLRRSLYFPAITAMTHNPAIKIFCDRLKKNGKCAMSVIGAAMRKLLHIIYGILKSGKPFDLELAKGNQLNKKFVIKPA

SEQ ID NO: 314395 - protein, 347 aa, unidentified
MRFYTKQHKYYCGIDLHTKKMYVCILDAEGQRRLHQNIKTDPEALLRILTPFREDVVVAVECMFTWYWIADLCTQENIPFVLGHALYMKAIHGGKAKNDKIDSHKIATLLRGGMLPQAYVYPAKMRATRDLLRRRNHFMRKRAELFAHIQNTRSQYNLPDPLGCIAKPQNREGIVERFDDPSVQKSMAANLEMIKAYDRLLTQLEHDIIASAKEHDLRSYALLQTIPGVGRILALVLLYEIESIERFPQVQDFVSYSRLIKSIKESNGKKYGSNGKKIGNAHLKWAFSEAAVLFLKGNEPAKRFLERLARKHGKAKALSILAHKLGRAVYFMLKNKEAFNQKKFLGL

SEQ ID NO: 314396 - protein, 343 aa, unidentified
MDYFAGLDVSVKATSVCIVDDTGKVVREVKVTSEPEALLSVLRNPAYHFKRIGLEAGPLSQWLFSGLAEAGLPVICVETRHMRAVLKAQINKTDRNDARGMAQMMRVGLYRPVHVKTLRSQKLRMLLTHRKLLQSKAIAIENDLRGTLRNFGLKVGMVGKVRFEARIEELVENFPDLAELVEPLLIVRRALREQTVILHRRLLAIVRDDEVCRRLMTTPGVGPVVALTYRATVDVPARFRKSKSVGAVFGLTCSKYQSGEIDWSGRISRCGDEMMRVMLYEAAQSLLRSKKWSWLKAWAMQIARRRGMKKAIVALARRLAVIMHRIWVDGTEFRWTREQAVAS

SEQ ID NO: 314397 - protein, 474 aa, unidentified
MRTRAKQRPNLQAVPLLKHEPLYIGIDVGKMKHVAGFVSTTLLERHQRFEACPVLAFENTREGFRALLERIHSLAPLEHCFVLLEKTGHYHFSLQQYLQECDLAVYTVHVQTRPAGMLKTDKRDALGLANALYNQLQLGAQIADKTQLVRRAEPPTAAAAQLKGLVRHRYELVRESTQRKNKLTAICDEIFPELTQVLKDPNLPTALTLREKFPTPHAIATASLTALQEARGYTRTLPDSKLLELQRLAASSIGTKDLTRQRGLVLEQGQLMKELRLLQEHVGQLESKIKTIVDQAREGKILLSMGIGPIQAATIIATIGSILNFPNAGTLKSYCGWAPMREQTGTTFDRSHLTPRGSRTMRQMMFLIVASMTRQETEWAYLYKRLVQTKCPYDEHTGERKGKLRVMGRVAGQMLETMYALLKKDAEVLSKVPPGQEPPPPILYDPALHRKHREGHYQPLKTSPHPSVIMLQPK

SEQ ID NO: 314398 - protein, 413 aa, unidentified
MLLFLGDDWCEEHHDVELQDQTGRVLARAKLPEGMAGMTRLHAMVGEHAGEPAGEGDDEVSVLVGIETERGPWVQALVAAGYRVCAINPLQAARYRERHRLSGAKSDPGDAHVLADLVRTDHHQLRAVAGDSQLAEAVKVVTRAHKTLIWEKTRHTLRLRQALLDFFPAAVAAFDDLAAPDALQLLTIAPDPVSAAGLSIEQISQALAVARRHHRAARAQQIAATLRGDQLGQPPLVAAAYAATVRAQAAILTVLHTQITVLEQQVQAHFGEHPDAGVYLSQPGLGRVLGARVLAEFGDDKQRYRDAKARKNYAGTSPITRQSGKRKVVLARHVHNDRLLDALGLQAFCALSVSPGARAYHDRQRARGAGHRAALRQLGNRLVGILHGCLKTGTLYDENTAWPHQQENLATAT

SEQ ID NO: 314399 - protein, 359 aa, unidentified
MQSECTQVQFAGQHVHVGLDVAKRSWKACVFLGPAFHKRFSQPPDPKALVHYLHKNFPGAVYHSVYEAGCFGFWIHEALVNLGIDSMVINPADVPTTDKERRVKTDKVDAAKLGRALANGELHPIYVPERTAQEDRTLVRMRTTFVSKQTRCKNQIKGLLRFYGIQKSEDLPEHYWSRAYLRWLESLTFKEESGTIAFKAILNELLTLRTTIADLTRRIRLLAHDTRYRSQVELLCSVSGISLLSAITFLTEVVSIDRFKNLDRLASFVGLVPGEKSSGDAEADTGLTPRYNTSLRCLLVECAWIAQREDPALLKAFTSYCQRMPKNVAIVHIARKLLGRMRFVLKNNQPYVTGVLKNG

SEQ ID NO: 314400 - protein, 422 aa, unidentified
MSYCPVAGIDVSKRFSDMCILSPDNKIFAQEKIYHDETSINRANALLQKAERLFFSKPVIVMESTSHYHLILFQFFSEHGYDVIVVNPLQSNSMKDFSIRKRKTDRVDAFKLAMMYRTKTLRPSQIPQTATRALRQLCRHRAELLNDVSSYKNRLTALLDQTFPGYDKVFSDVGGVTSCAVLVRFPTPTILLVEEESELVEVIASASKSGYSFAKKKAGLLISAAQKAQTLGIHSCADETLIVCTIQMLRTLSESVLQIETAIDNLLAQIKEMRNNVSLLQSIPGIGSHSAALLLGEIGDISLFKKPKQLAAYFGLDPTERQSGSFRGTKNKLSKRGSSYARAALHMGIVNSICKRGKDSAANPVLLSYYEKKCKNKPAKVAQAASMHKLVFIVFAVLRDQKPFELKTPEQHAVEQGFVKAA

SEQ ID NO: 314401 - protein, 322 aa, unidentified
MQANAVLGVDISKKKFDVCLLVGNKERYKVFQNNHDGFEKLVAWCNHHGAELIHLCLEATGCYSEDIVNFMYDLEHNVSVVNPAQIKAFGRSELLRNKTDKSDAAMIARFCIANKPNLWKPAPPEVRRLRDLYRCLQALKDDKLQQMNRLENKNTDSHCKQAILEVIATIDTQTAALEKEINEHVNNHLHLKNITEKIKTIKGVGHLTAVAVVAEMPSVDNFDNARQFTAFAGLNPEHYQSGSSVSKKSRICKIGSERIRKALYMPAIVVKNHNSYFQKFCQRLASKGKCPKVIIVALMRKLMHIFFGILKNDQPFNGNLVR

SEQ ID NO: 314402 - protein, 340 aa, unidentified
MKLYCGIDLHGNNSFISIIDETDKVMFEKRMDNNIEVIVTALETYRKDLVGIVVESTFNWYWLVDGLMEKEYKVHLANPAAIQQYDGLKFSNDKSDARWLAHMLRLGILPEGYIYPKKERAVRDLLRKRGQLVRYRTSNLLSINNLVARNYGSSVSVRQIRQLDKEGEGESKMSRNLGLAVNANLAVLRCLDEQIKVIEREVIKSAKLRPEFALLHSVIGIGDILALTIALETGYIGRFPSAGDFSSYCRTVSSERISNGKKKGKGNTKCGNKYLAWAFIEAANFAVRYNEQARKFYQRKSAKSNPVVARKALANKLARACYYIMRDKVPFENERLFTTK

SEQ ID NO: 314403 - protein, 328 aa, unidentified
MLRPDGSDFEKVTTIKSDKLVRYLSNKADWVIGIEASGGVNHFVEECKSIGVTVKIINPNKFRGIGIGGKKTDERDARALANALRVNFVPEVHHRSLFNRQLKSILTTREHLVESRVRNINHIRSTLREYGVKLATGVENFYEGVRPALEKLECAVIQEALGRMVDEVFRLKENEKIIELQLKELTKEDSRISLLQTIPGIGFIGAVMLVSVTDDISRFKNSKLFAAYLGLTPSIHASANVCHMGSITKSGSEMCRRYLIHGARTWMRYSKLSDKNRSWAEQVKNRRGMNKAIVALAHKMARIAFAVLRDGIGYKQFKKIQKPIVEAA

SEQ ID NO: 314404 - protein, 387 aa, unidentified
MSKQTAATSIEITAAEPTLMLAFELGETGWLLGFSAGYGERVLRRKIASRDTAAVELEIERAKQQLGLPAEAPVRSCYEAGRDGFWLHRFLASRGIENVVIDSASIEVNRRSKRAKTDRLDVLGLVDLLARHLAGSRKPVFSVVAVPAEEDEDLRHLGRELKLLKKDRTRVSNRIKGLLANQGLTIDRKKAMAAQLSRLRLWNGGPLPRHLRGRLERYVSDYRYYTERIGALERERKALLRANEGAATEKVWRLLSLRGVGIETAWCYGTELFGWRAFRNRKQVGSIAGLTPTPHDSGGQEREKGIAKDGIRWVRAMAIELAWGWLRFQPRSELSRWYQERFGGGGKRLRKIGIVALARKLLIALWRFVETGLVPEGAVVTPAIRLA

SEQ ID NO: 314405 - protein, 402 aa, unidentified
MNAVGIDVSKGKSMVAIMRPFGEIVSTPFEIKHTASDIHSLIELINSVEGESRIVMEHTGRYYEVLAHQLLEANLFVSAINPKLIKDFDNDSLRKVKSDKADSVKIARYALDKWQNLKQYSVMDELRNQLKTMNRQFGFYMKHKTAMKNNLIGILDQTYPGVNTYFDSPARSDGSQKWVDFASTYWHVDCVRKMSLNAFIDHYQNWCKRKKYNFSKSKAEEIYGKAKELVPVLPKDDITKLIIKQAVNQLNSASTTVESLRTLMNETASKLPEYPVVMAMKGVGTSLGPQLMAEIGDVSRFTHKGAITAFAGVDPGVNESGSYEQKSVPTSKRGSSDLRKTLFQVMDVLIKTHPQDDPVYQFLDKKRAQKKPYYVYMTAGANKFLRIYYGRVKEYLASLPES

SEQ ID NO: 314406 - protein, 422 aa, unidentified
MNSQPQSLSPVEPSFGAFVAIDWADQQHVWSLQAADSDQREHGEIQHTPEAIEAWVGGLFSRFPAQPIALAVEQSRGALVFMLSKYEHLHIYPIHPRAAAQFRAALYPSGAKDDPVDANLLLDLLVHHRGRLRRLSPDTEQTRLVQQLVEARRKLVNEKTRQGNRLTSKLKLYFPQILTWFDELDSALVGALLKRWPTLEALQKARQATLRSFFTQHNCRRAELIEQRLEQIRQAIPAIRDAAVIQSAVAMVSVLVSLIATLRQGIAALDRQIEQAAAAHPDFAIFDSFPGAGPVLAPRLLAAFGSQRDRYQSAAEIQQFSGIAPVLVRSGKTAWVHYRWACPKFLRQTFHEWAGHSIGFCDWARAYYELQRNRGAGHHAAVRALAFKWIRIAFRCWKDRVPYDDSRYLQSLRQRGSPLAVR

SEQ ID NO: 314407 - protein, 387 aa, unidentified
MPQPNDLSRCLVSLDQDSTLIAVIELSQSSWLIAGTVPGVERQPLKKIVPDEATLLRLLHRWRDEAIGKGRTITRIAVAFEAGRDGFWLARWLAKQGIEIHVIHSSSVAVSREHKRAKTDRLDTAMLTRVFLGWLRGERGHCSMVAVPTIEQEDAKRPSRERESLTGERTRIINRMKSALARLGIRGFKPELRKAPQLVDALRTPEDALIPPNTLAEIRRDLARLAILREQIKEIEQARLKHLEDAPQSTPNAMVRLLASVIGLGIETAYLLVLEVFSRDLRDRRAVARYAGLTGAPDESGSKRREKGLAKAGNARVRRSMIQLAWRFLLFQKDSALAQWFRTRTEGTGGARKTKMIVALARKLLIALWRMVTTGEVPHGVVLRQAA

SEQ ID NO: 314408 - protein, 360 aa, unidentified
MTTTTTQTATAADTILALDLGKYKSVACVYRAADDLRFTTVTSSRQELGRLIDTCQPAIVLFEACLLAGWVRDLCADKGVKCLVANTTSEAWKFKHLKRKTDRDDALRLAEVYRLGKFPAVALPEKEVREKRGLIEARQKLVGRRVALQNRVRAILVSQGLPAPRGARAWAAPGLAGIAAYAQPIGGCGPLELWRGRLHLALTELGHVKGLLGQAEKKLDDMGKADERMKLLDTIPGVGPRTAEAVVAFLPAPERFRTAKQVSAYGGLVPRQYQSADTDHRGRITKRGPRTLRKLLVECAWVMLRYNRWARSVYERLTHGGRSRKKQAIVAVARKLLVRCWAMLRDGTAWRAEPAGAVAR

SEQ ID NO: 314409 - protein, 360 aa, unidentified
MIGEGTSVGLDVHARSVVAAALDGVTGEVWQRRLTPDPSEALAWVRSLPGPVRVTYEAGPTGFGLARFLAAAGVECLVAAPSKLQRPSGDRVKTDQRDALHLAKLLKLGEIVAVTVPSVGQEAARDLVRAREDARGDLMRTRHRLSKLLLRQGIVYSGGQPWTGAHDVWLRRQTFTELGRRLAFESAYEAMLFTAARRDRLDTAIAEMAEASEFTDVVHRLGCLRGVSTLTAFGLAVEIGDWHRFTGSTIGAYLGLVPTEHSSGGSRSQGSITKTGNTHARRLLVEAAWHHRKTYRNPGVTMRTRWEQASPAARARGHEGNHRLHHRWETFTDRKKKPVVANVAVARELAGWCWSLATLE

SEQ ID NO: 314410 - protein, 455 aa, unidentified
MPKQGKAKRKSKRDPFSGLPPLNLDAAGIDVGNAQHYVAVPPDRDPQPVRSFDTFTCDLHRLADWLQACGVRTVAMESTGIYWIPIFEILEARGFQVCLVNARHVKNVPGRKTDVLDCQWIQKLHTFGLLNASFRPANDVCVLRSYLRQRDNLITAASTCIQHMQKSLSEMNIQLANVISDISGQTGLTIIRAILNGERDPVRLAQMKDYRIRASKDTIAKSLEGNWREELLFNLQQSLALYDIYQGLIAECDRQIHKHLATFDDKIAIADHPLPPRKSTKRPHGNAPNFDLRQELYRISGADLTRIDGIDVVTAQLVISEIGLDMTRWKTEKNFASWLGLCPDNRITGGKILKRATRPVVSRAAHALRMAASTLRKSNSALGANFRRLKARLGAPSAITAIAHKLARLVYRMIKYGHQYVDKGMAYYEAKYREQRIKWLKKQAKEFNLQLVEQT

SEQ ID NO: 314411 - protein, 385 aa, unidentified
MKGKTFKPTDYEVFGGLDVDKRSISVTFTNHQGFIRSLRMPYSVEHLVNHVRKHFGDQKVAFAYEAGPTGYGLYDGLVAKAYPCLIAAPSMIPKAPGQRVKTNRLDSRGLSENLRGGQLRSIHVPSALYRELRHLTQLRDTFVSEMVGMKQRIKSLLLFEGIEFPPAPAGRQWSFMVKDKLRKLECSKTVRFKLDQLLDSLEFSEKQVLKATREIRRFCRNDAELSQCIEYLMTIPGIGWIVASQLVARIGDWRELKNIRQLGGFLGLVPTENSTGERTDRGSITHTGDGRLRSKLIQASWSAIRQDGELREFFRSVCRTHARHLASRVAIVAVARKLSVRISVVLMKQRPYEVRQKVRSTPLTQGETSPQGTPRRQAEPGEKNS

SEQ ID NO: 314412 - protein, 461 aa, unidentified
MRGEPLRPSAWEGLKIVHPNAAGLDIGSTEIWAAVSPERNSEPLRRFGTYTPDLQALADWLKASGVDSIAMEATGVYWIPVYEVLEARGFEVYVVNARHIKNVPGRKSDIQDCQWIQGLHSVGLLRGSFRFTTEIATLRAYLRHRAALIEHRAAHILHMQKALGQMNVQLTQAVKDITGVTGLAIIRAIVAGERNPHKLAALRQTGVKKNEQEIAKALTGNYRPEHVFALKQALALYDAYSGQLLECDAEIERQFANLKPTVPPDDLPPLVSADKPETNSKNGPSYDARTLLYQWAGVDLVAIRGLNASTVQTILSETGIDLSAWPSEKHFCSWLGLAPHNDISGGKVLRSRTLKTHNRAGQAFRMAAQSVSRSPNSTFGVFYRRMRARLGSRQAIVATAHKIARTFYYMLKHRTPFHDMGGEEYERRARERELHNLQKRAAKLGMALIAAPILPTAPAVS

SEQ ID NO: 314413 - protein, 456 aa, unidentified
MKIPQSTIRLLTGRLVKILLNREVSTMKSNTQNAKIEAITEKTLVLGIDVGSETHYARAFDYRGVEYSKKPFKFSNTEAGFVTFKAWVLDIKEKHGKDKVIPGMEPTGHYWFNLGKFLQDNEMKPVLVNPHHVKKSKELDDNHPTKNDRKDPKVIAGLVREGRYMIPYLPDGVYADLRTASNIRFQLQAELTRIQNRINRWFNIYFPEYKTVYGKPDAKSGILILKEAPLPEDILTLGIDGVNQIWRDAKLRAVGKARAKTLIEAAEHSVGSKEGAVSARMEIRMLLEDYESQNMRLQEVMVLIEELVKEIPMAEKLLEIKGVGIKTVSGFLAEVGDIRRFNDPKELQKLAGLALVENSSGKHKGKTTISRRGRKRLRYLLFEVAMSLVAKNPEFRELHNYYTTRRLNPLKKMQSLMAIAAKLLRVFYAILTKGVGYDPKKMVNDIRRPAAYAQAA

SEQ ID NO: 314414 - protein, 512 aa, unidentified
MITIPAVRERCAGIDVGKRGIAVAVMTGPADKEAAIQTRWLGTTVPELEAVREWLLQEGVTSVAMESTGSYWIPIKNILEKSLEVMLVCSKKHHPKKGEKTDFRDAIQLAHLHRHGMLTGSYLPERGVVELRDLTRRRKKLLGNLSSEKNRIQKVLEVANVKIGNVITDVFGISGQEMVEALLSGREIAAEEIAGMAKSQLRSKIPQITETLQGHQMNDHHRWLIQQSIEHIVLLDRQLEELEDRIMLKIEPYRKQYDLICTVPGFKEMNGAALLAEIGLDMSAFPTGDHLCSWAGRCPGNNRSAGKSKSGRVKKANKFLACALGQAAVCAVKKKDCIMRRKFQRWVKRMGGKKANVAVGHSLLKVVWCVLTTGQPYREPDAGAMHEMERQKLVRHHARRLRALGAETEAVEAIVEQLLCPAPTAEQSPSAVAIEEACKAEEVQVAAPRKRCGAACPPKGRGEVYRGKLGFRAGQRRKPPSAVKGQPGPNDVSGNKKRSRSQRRKGTGNDSA

SEQ ID NO: 314415 - protein, 386 aa, unidentified
MDSSLRRRGSPDRGGVHVCQTLFRSRAGAPADRSSLGPWRPPGSSIAGCSRVRIPNSRLDPFGVRIHKDGKLHMHKEVFVGIDISKDQLDVHLLPEDVHTAVKNDAEGIASLIMRLQEENPTIIIMEASGGYEISLAAEFGSANLPVAIVNPRQVRDFAKGIGKLAKTDAIDAYVLARFAETIRPEPQPLSTEDEKQIKELVTRRKQLVDLRASEKNRLHRARSTRVRQSIQRVIAALDQEIQDIEKNTDNIIKGSPLWRETEDLLKTFKGVGSTTAMTIVAKLPELGETGRQKISCLVGIAPLNKDSGKMRGKRMITGGRADVRSVLYMVAISAIKCNPVIKPFYQRLIEAGKPFKVAIVACMRKILVILNAMIRDKRPFQVVSA

SEQ ID NO: 314416 - protein, 337 aa, unidentified
MTLYCGIDLHSNNSVVAVLDEQDRTVYEKRLPNDLETITEVLCIYQSELAACVVESTYNWYWLVDGLMAAGFPVRLAHTSALPEYSGLKYSNDFSDARQLAHLLRLGLLPTGYIYPKEERGLRDLLRRRLLLVRQRSLHHVSLQSLIARHSGQRLNTLQIKQLTKGQLADYLQGHALLGGEITRQARCWLETAVKRIEQELQRHIKPREDYQLLQSMPGVGPVLGTTIALETGTIERFASSGNYASYARCVKSEKISNKKYKGQGNKKNGNKYLAWAFMEAGHYGAIWDPRIKRFYQRKKAKAHILVAKKAVANKLARACYHMLKRGEVFDVTRAFS

SEQ ID NO: 314417 - protein, 405 aa, unidentified
MVFVGIDWSEKEHDVELSSETGQRLRRLRIRHGVEGLTKLQETISEFASQPSQVVVAIESDHGLLVNALVASGYAVYPINPLVAARYRERHSVSGAKSDRRDAEMLANLVRTDRHQHRPLAGDSEIGQEVRVRARAHLRAIRLLIRQRNQLRSLLSEYYPALLPLLSADDIRDALAVLAVAPNPFLGRQLSLSKLQSTLGRHGRQRNLEAKAAEIQALLRAPQLELPLPRVVAAYSDEVASLVRRLLQARAEVAELEKQLAAAFRGHPDAEIYLSLPGLAYVLGARVMGESGDDPTRYANARARRNYAGNAPITRASGKKKQVTRRVVRNRRLADATFRWAESALTASPGARRFYDQLKARGNPHNTAIRKVANRLVGFLHACLQKHELYDETRAWPTAVIRDAA

SEQ ID NO: 314418 - protein, 440 aa, unidentified
MPLRARTPVSVSSGPSPGGVLDATLEGGLLETIRERVAGLDVHRDRVAACVRLAGGGGRVRLVRGSFSTMTAGVADLAEWLVEHEVTTVVMESTGVYWKPIFYGLEGHVSELWLVNAMHVKRVPGRKTDVSDAEWLADVAAHGMVRPSYVPPAEIRQLRELTRYRKTQVDARTREIQRLEKVLQDAGIKLSSVASGTWSKSAQAMIEALIAGERDPMVLADMSKSRMRAKKDALAQALAGNFGEHHGIAARQILDHIAFLDASIDTLSRAIAGRLAGFEPAIGLLCGIPGWGRTTAEVFIAETGGDMSVFPTAQQLASWAGVAPGTHESAGKRRAAASVAGNRWLGRALIESARAAARTKDTYLATQYRRLAARRGPNKAAVAVAHTMIVAAWHMLSSGETYRELGADYFTRREDPDRQARRLTRQLEQLGFNVDLTPAA

SEQ ID NO: 314419 - protein, 387 aa, unidentified
MEIRIENTPSARTNNDPVHCFVAIELSKSSWVVGFQTPLSKQTSRYQVKACDAEPLLQLIERVRSRVTREVGRPVEVTSCYEAGYDGFWLHRVLEAHGIHNHVLDPASLQVNRRARRPKTDRIDADRMVRALIRHLRGEPEACSVVRVPSPEQEDARRLHRERGRLIAERVGHVNRIKGLCATQGIYNYEPLRSDRLERLDKLRTGDGRALPARFKTEIVREIKRLEVVLEMISTVEAERDAILKDKKSTHINADKIKMLAKLKAIGAEFSTTLVGEVFYREFANRRQLGSYVGLASSPFCSGSLDRDQGISKAGNSKARAMMIELAWTWLRYQPDSALSRWFQARVGNLKGRPRRIAIVAMARKLLVALWRYLQTGVIPTGAELKA

SEQ ID NO: 314420 - protein, 341 aa, unidentified
MSDYSYFGGIDLAKNHFSIHVVDSQGKVILHKSVTRSKLLTTIANMPPMRIGLEACGGAHYWARTLNKLGHDARIMAVKYVVPHRTKGKNDLNDAVAICQAVQHASTRFVPVKSPEQQAILSVHRMREHWVRERTALMNRIRALLSEFGLIIPVGRSSLMKQVPLMLEDAENELPHLARTVIADAYYHLEQLNQRIVDTEQVFEAFSKVSENVQRIMKVRGIGPQTATAILASIGNGSQFDKSRDFSAWLGLVPKQYSTGGKPRLGRITKHGDKYLRTLLVHGARTVIANLGDKQDRLSQWCRGVLERRGMNRAIVALAAKNARIIWSLLHNQTEYENYAA

SEQ ID NO: 314421 - protein, 409 aa, unidentified
MEVIYERCCGLDIHKRSVTACVLVPGGTGKPRREIRTFETMTGDLLAMSDWLVERGVTHVAMESTGVYWKPVWNLLEGNFELLLVNAQHIKAVPGRKTDVRDSEWIADLLRHGLLKGSYVPDRPQRELRELTRYRTSLIRERTAEVNRLQKTLEGANIKLAAVVTDIMGKSGREMLEALVAGSTGGAAMAELAKGKLRAKLGELERALEGRFGEHQRFMVAHQLGHIDYLDDTIAQLDAEVRRRMRPFEDEIERLDGIPGVGRRTAEALVAEIGTDTERFPTPGHLASWAGMCPGNHESAGKRQKGKTRHGNPWLRAALVEAAQAAGRKRDCYLSAQYRRLAARRGKKRAAVAVGHSILVIAYHLLERGNTYEELGGRYFDERDRQGMERRLVSRLEGMGYTVTLQPAA

SEQ ID NO: 314422 - protein, 416 aa, unidentified
MEVIVSRCAGLDVHKNTVMACVRVPGPNGGRTSTVRQFRTFTAGLRQLRDWLVAEQVSQVVMEATGVYWKPVWHVLDATPGLELMLVNAHAVKNMPGRKTDVADAVWLAELGECGLLRPSFVPPPVIAQLRDLTRYRKKLIEERARETQRIQKLLEDAGIKLDSVVSDILGVSARQMLEALIAGVRDVAALAELARTRMRPKIPQLRQALEGRFGAHHALMLRMHLEHVDQLSVSIDRLDSEVDRVIRPFRSVLQRLITIPGVGRRTAEVIIAETGADMRRFRTAGHLASWAGMCPGNHESGGKRRSGRARKGNAALRAALCEAAWAASHARSGYLPAQYRHLLRTFGKKGQTRAVFAVGHSILVIAWHLMAHDRDYADLGGDHFTRATDAEARERYLVRQLEALGHKVTLEPAAA

SEQ ID NO: 314423 - protein, 368 aa, unidentified
MKKRIIFVGLDVHKNSIDVALADADRNGEVRHYGTIGGGLDDLDRLVKKLLSPDKELHFVYEAGPCGYEIFRSLTEKGFDCAVCSPAHIPKSPAGRVKTDRRDALMLARLHRAGELTYVFVPRADDEAMRDLTRAREDAKKAQRVAQQQLSGMLLRLGFRYPRDHWTKAHFGWLADQKMPTPSQQVVFQEYIHAIKETTDRVARLTKQIEALVPSWRMAPAVNALQALRGVSLLVAATTIAELGDLTRFENPKKLMAFLGLIPSEHSSGERKKRGGITKTGNGHVRKVLVEAAQAYSHPARITRLLLKRHEGVSQDVLEIAWKCQVRLCARFRRLMARGKSRNAVVAAIARELAAFMWAIATRTPIAV

SEQ ID NO: 314424 - protein, 396 aa, unidentified
MSDPEVFVGLDVGKTEHHCVALNMIGDRLVDRPLPNDEAALRELFSQLASHGPVVLVVDQPASIGALPVAVAQDMGLATAYLPGLAMRRIADLHPGTAKTDACDAYVIADAARTLPHALRSTDIAGPAMAELAVLMGYDDDLRDQVTAATNRIRNLLLSIHPALERALGAELAHPAILALMARYGGPSGLRKAGKARIDAVLKKKAPRLHAALTERIWTALGEQTVVVAGSSAVESILPKQAQALAGLLDQRVQIAAEVEKVLDDHPLARVLTSMPGVGVRTAARILVEIGDASSFPSAGHLAAYAGLAPVTRRSGSSIKGEHPARGGNKRLKNALFLSAFAALHDPESRAYYDRKRSQGKKHNAALICLARRRTDVIYAMLRDGTCYQPKTPAAA

SEQ ID NO: 314425 - protein, 331 aa, unidentified
MNFSLFIGIDVSKSTLDVHLKPIGCYKAFSNDPHGFITMVEWIMDQAGKFCHKELVFGLEHTGLYSENLILFLDQNDFAFTVIPGLELKRSLGIRRGKSDKADARNIAEYIYEKREKIKLYKLPSETLERLKKLASLRERMVKERAAYQVRMDEYLEQFPDSTFETYLQTQQELIHCFNSQIERVEKDIERLIKEDSSLSDQYKLINSIKGVGPQTAIMMIILTNGFSSFDNWRKFASYAGIAPFPNQSGTFNGRTKTNKLANKRIKSLLTMCASTAIQFNPEMRKYYENRVQMGKNKMSTLNIIRNKLTARIFAVISRNTPYVEIHKYAA

SEQ ID NO: 314426 - protein, 356 aa, unidentified
MTSTKKYVGMDVHKESISIAVMNSVGKIVMECVLETKASMILQFINGLRGDVRVTFEEGTWAAWLYDLLKPHVSEVLVCNPRKNALLKDGSKSDRIDARKLAELLRGNHLKPVYHGEEGLRTLKELARSYLTISKDVTRVMNRLKALYRSWGIACAGAQVYAPRHRSEWLGRISEAGVRRRAEHCYQQLDVLRLLRHQVRRDLLLESKKHQAWKLLRLIPGIGPIRAALLIALIQTPHRFRTKRQLWTYSGLGLETHDSAQYRVVEGQLRSKKSVTLRGLNQDHNHDLKDIFKGAATRVSSSSSGPLHDFYEHLLAQGRKPTMARLTLARKIAAITLIVWKKEVHFDASYLTSQAA

SEQ ID NO: 314427 - protein, 355 aa, unidentified
MKRAYYIGLDAHKLTCEIAVVRENGQLVKRMECRTAIDQLAALLQTVPRPRYLCFEEGPMADWLWRNLKWCMDDVTVCDPFRNHLIAKEGEKDDPIDAGKLADLFRGGFVKAVHHPESFEQALFKQHVQLYHDRVRHRVAEAHRLSSLLRRHGIMVRANSFDNAEHWAKVVEQLPKYKTLREDIDLLWQAFAAATAQEKTMRRRLQQHCKNYDVIRRFTDVPGIAWVRAATLYVFLDTPWRFRSKQALWKYLGIGLERRGSGAGPMLLQVPKRVNRLLKSTILGAAKTAAALKDNPYAVQYRRYIENGLTKRLARRSVARSLAATLWGLWKNGSAYCPEWVGVAAAAMRAAEVSL

SEQ ID NO: 314428 - protein, 345 aa, unidentified
MRKIQDYIVKDKEIFIGLEDSKKTWYLCVCSEGMIIHEISIPVSYKNLRNYILKRYPGCQVNVIYEAGFNGFWLHDLLTKDGIECIVTPPNKVTEEKSNKVKTDRIDAKRLSKILENSDYKRCFVPDKQLREDRQISRTLIAVQKDIRRTKCRIQMFFHFHGLHNMIEKWTDTTYQRVRSFSLGPSLELSLKVMLDHLDFLKDCQKQLKRSLKELSKKERYATVFKHFKSAPGVGWVSAIRFVLEWSADFSRFKRAKSFSGYLGLIPGECSTGEKVRRGHITAQSNNFVRAWLIQCSWTAIKKDPVLLQKFQDVRNNSGSKKKAIVAVARKLSARLWHMAVPDED

SEQ ID NO: 314429 - protein, 358 aa, unidentified
MSEITRVGVDLAKNVIQVHAVDVVGKVITNKALQRDKFMLWCAQLPPGCLIAMEASSSAHHWARKLVALGLDARIIAAHLVEPYRLQGKSGKNDANDAAAICEAASRPTMRFVAIKTVAQQGMLSVHRLREGLKEERTACTNRIRGILAEFGLVFAQSSKVLRENLSTVIEDASNELAGMARLVIERAQSQWAELDAHIEWCDQRIAAHIKQDEHAKQATQLLGVGPVTASAVVATVGDFKQFKNGAQFGAWLGLVPKQNSSGGKNNLGSITKRGDMYVRMLLIQGARAAVLTAHRRDDPISKWAYQLREKSGWQKAVVALANKNARILWAMFARGKPFDAHHVSVKPGTAQATMSAA

SEQ ID NO: 314430 - protein, 356 aa, unidentified
MKRMAELEPTRVTVGVDTHRDVHVAVALDQLGRRLDQIEVATTRAGYKRLLAWAENLGEVEAVGIEGTGCYGAGLARHLRISHVRVVEVMRTNRQTRRLKGKSDPTDAEAAARAVLSAEATVSPKAGDDLVEMIRVLRVARGTAIKARTQAINALRSLLVTAPPELREQLGARSTSRLVNMAARVRPGLLGSPLAASKLALRQLARRCQTLETEITSLDAELAKLTAAASPRLIEAFGVGADTAGALLVAAGDNPERLRSEAAFSMLCGSSPIKASSGKTNRHRLNRGGNRQANAALYRIVLVRMRYHQPTRAYVVRRTSEGKSKREIIRCLKRYVAREIYTVLRQTREQKLARAA

SEQ ID NO: 314431 - protein, 432 aa, unidentified
MSITTQKKEQYEIVNKKCAGIDVHRDYVNVTVVIENEEKEIFTSYQVFATTKDSLLQMRDWLLSYGCTIAGMESTGKYWYPVYFALEEHMQVNVYNAKNMRNMPGKKTDKIDSEWIAKVTRHALIRPSFIPEPRIRDARLFARERKSLVKERSSVRQRILGILDSAGIKLSSVISDVFGVSGRILLEEMIKRRKLTPEYVKNRVYGSLKDKVNDIMAAVDGYLRETHITLLKILIKHEKSLTESIEKIEKLLTEFLIDSDQSRAVLARVITIPGFSERSGTLLLAEVGFDLKAFPTNKQFCSWLGLAPGIKESAGKNVSGKIQVRQRYLRALLIEIALASTRLKGTYVRAKYWILKGRIGAKKAVVAIAHYLAKAVYRAIYEEKVFVELTEAYSSMRQMRTDFKMLDKIKQRQGLDSMVAYLNQNPENEPNS

SEQ ID NO: 314432 - protein, 389 aa, unidentified
MLHDHPSVGPTAILTQFGAIFVSLELSRSKWVLTSLSPGNGEKMSQYSLTAGDIGGLLARFADLKRKAKERTGSDYPIITIHEAGLDGFWVHRVLQNEGIESYVVDAASIATSRRRRRAKTDKIDGEALLRALLAFKRGEPRVCAMVVAPSPEEEDRRRLCRERQTLIAERIIHVNRIKGLLFTQGISDYAPLRRDRRKRLEGLRTGDRRPLPVHLKTQISRELDRLELLLDQIRKVEAEQEALLAAESKAAPEGEPHNAVAMLLAVKGIGEHSAAILWSEGLCRQFSNRRQVAAYAGLAATPWRSGAVIHEQGLSKAGNPQLRTTMVQLAWLWLRHQPQSALACWFRARGERGRKGSIVALARKLLVALWKYVTHGVIIEGAVMKPAA

SEQ ID NO: 314433 - protein, 344 aa, unidentified
MTVEITVLGLDLGKNSCSLAGLDAAGRVVLRRRMHRDGVTRLAAKLPACVVAMEACCGAHHLGRVLQGQGHEVRLMSPEYVRPYVKAQKNDERDAEAIAEAATRPTMRFVELKSEAQLDLQTLHRARDRLVGERTALINQLRGVLGERGILVPQGRRKLDLHLQALIAEDEVPLSPRIQALVEDMQVERRELDRRIQAFDDEFTALARTDPPARLLATIPGIGVLNATALTAAIGDAQTFRRGRDLAAWLGLVPKQMTTGGRPRLLGISKRGNVYLRKLIIHGARAALPTLSKSETPLGEWLRGLLARAHVNKTVVALAARLARIVWAVLRSGQPFAMRPAMAS

SEQ ID NO: 314434 - protein, 343 aa, unidentified
MQTITTIGFDIAKSVFQVHGVDAAGQVVIRRQLKRRSVLAFFQKLPRCLVGIEACASSHHWSRELQALGHTVRLMPPAYVKPYVKRHKNDMADAEAICEAVTRANMRFVPTKTPEQQSCLMLHRTRHLFIRQQTAVINSIRAHLAEFGIVAPVGRKGVTELLHVVANPSDKRVPEVARACLAALGNQLLSLKQQILEFDRMIMAWHRSNETSKRLHYIPGVGPMLATALVASVADPRTFRSGRNFSAWIGLVPKQHSSGGKDRLGSISKRGDRYLRSLFVAGALAVIRYAKVHGTKHRPWLTALLGRRPTKVVAIALANKIARMAWAMMAKGERYKQPVALAA

SEQ ID NO: 314435 - protein, 387 aa, unidentified
MYFVGIDISKYKHDCFICTETGEVIESNFSFPNTSDGFEQLLNLLKSIDNFKEIRIGFEATEHYGMNLKLFLEKNNYSFMEFNPKLVKEFISGQTLRKTKTDKKDAYQITKYLISADYKPHPKQFYHKYSLKSLSRMREKLVKQRSYYEVALTNVLDHIFPEYKPFFNNTFSASSIFILSKYKSPDKIKNMKDYDSIRKISRGKFTSAQFFLLKDLAKNTIGTSNEIFELELETLLILRSQIEFEIKKLESNIEEIIKELNPPILSIKGIGYILGAGIVSEYGDVSRFKSADAMVAFAGIEPSICQSGTESHTGHMVKHGSGHLRYYLLNAADCIFLHEPIFTEFYYKKRNEGKSHRVALNHVAKKLIRIIYKLETENITFDSSKVK

SEQ ID NO: 314436 - protein, 340 aa, unidentified
MKKITTAKKNHKTLSKTEKKQIWQKASQQRLTVGLDLGDNQSCYHILDEAAETVSTGRLLTTKTGLKSLFEKMPSSRVALEVGTHSPWVSRLVTEMGHEVIVANPHKVRLITRSVKKNDGIDAEKLARLARVDPALLSPIRHRGEVAQADLAVIRGRAGLVEARTGLINTARGLVKPFGERLKSCDADQVGEGLQEGLSEAVGTAVRPLLRSVETVTEQIRVYDEEIEEIAKRYPEVELLRQVYGVGQLIALTFVLTIEDPSRFEHSREVGPFLGLTPKQGESGERQPQLGITKAGDQLVRSLLVQGAHCLLRKGAPESDLRKWGMEKMEKGGRTPSGGR

SEQ ID NO: 314437 - protein, 345 aa, unidentified
MQKISTTRTNGRKIFKGQLTIGLDLGDRSSSYCVLDEAGKILLEQRLPTTQETMKQIFGRMARCRIAMETGTHSPWVSRLLTALGHEVIVAHAQNVRLIVKSRRKDDRIDARTLARLARIDPELLSPVRHRSAQAQLHLTEIRARAGLVSARTALINAARGLVKSYGERLRKCGSFQVSREIGSGLSTELREALQPLLREVESLNERIQEYDRRIEKMAKERYPEVALLKQVKGVGDVIATTYVLTIEAPHRFRKSRDAGCFVGLQPGRRNSGDSEPQLHISKQGDEYLERCWSRERTTFWDLLGKIVIYGAGDRNSPSEEVRTPRNERWWRWHASWQYCCIGCG

SEQ ID NO: 314438 - protein, 350 aa, unidentified
MKKVAYLAMDVHSGHCVLGHMDFDGTFIGNRRFPTSEQHIIEALKAIKAKEKYLALEESNLAYWAAQVARAYVTEVISSDPKENALIYRSPNKRDKVDTHKLCRLLRLGELKRVYHPENDERAIFKAAVQHYIDLRDQQVVLKNKIKAMYRHWGVIDVAGQAVYGTNRDDYLKRVKHLHIRNQLHRLYCLMDKTESMQKKALKAMKQLGRKYPEIKQFEKMPGIGEILSHTFDAFIQTPHRFADKRKLWRYCRLGITDRSSDGKPLGFKRLDRSGVSELKALSYRAWLCALGSDNEVRRFYSRSLRRTHSHVHARLNTQRKIIAVMYGMWKRGEAYRPQLFLDSPPMSVV

SEQ ID NO: 314439 - protein, 354 aa, unidentified
MSQKPNTAIAVVGIDIGKNSFHIVGQDERGAIVLRQKWSRGQMEARFANMPPCLIGMEACVGAHHLSRKLKALGHDARLMPAKYVRPYSKGQKNDFRDAEAIAEAVQRPTMKFVATKTADQLDLQALHRVRERLVSQRTGIINQIRAFLLERGIPVRQGLRYLRAELPRIMATPSDVLSPRMVRVIEGLASDWRRLDERIEGLSGEIEAIACQDAGCERLMSVPGIGPIISSAMVAAIGTGEAFSKGRDFAAWLGLVPKQMSTGDRTILGKISKRGNRYLRVLFVQAAWVVLIKPKIWERHGLKPWIEAAKKRLHHNVLAIALANKLARIAWSVLAHGRDFEARTNINATAQAA

SEQ ID NO: 314440 - protein, 337 aa, unidentified
MDYFAGLDISMDETHVCVLDREGMVVYESKAASTADTIAGELAKAPRCRRIVFETGRMAPILFHGLSQLGLPVVCVESRQAYQALKSLATHKTDRNDARGLAHLARTGFFKPVHVKSLGAHAIRSLISARKKLVGQRVTLENQIRGLGVVFGIRLPRALTAAFIDQALKASEGIAGLSAAMRGLIAARTAVMTAVAAIDADMRRMARASAACSRLMTIPGVGQLTALAFVAAIDDPSRIRRSRDIGAYLGLVPRRYQSGEVDYVGSISKCGDRRVRTLLYEAANVMLTRYKGQLKLKDWAFAIARRSTMRKARVALARRLAIIMHAMLRDGTEFASA

SEQ ID NO: 314441 - protein, 422 aa, unidentified
MNEDVYYERCAGIDVHKKFLVVCLRVGRKAETRNFGTLTHELRELAGWLKGNACQMAAMESSGPYWKPVYNVFEQEGLPVMVCNAYHIRNVPGRKTDVNDAQWIAKCLSQGLLNPSFVPEREQRELRDMTRFRKSQIEERARNVNRLQKFLEGANIKMSGWLSDVEGKSATRLLELVIGKPDFTVGEVAERMHKSMKATADEMFRSLEGCMSPAQREFFGHVMSIIREQTAQIEKTDAMIKRSLNDNYKAAVAALDAIPGIGEVSAEQIVAETGVDMSHFRSQHSISKWAGVCPGNNESAGKRKSGRTPPGNKALKSTLAQCATSAKKNKNSFFCAQYNRLVSHRGKNRATMAVAHSMLIAVYFVLSGHEYKELGADYYTRFNRDKKINSHIKQLSKLGVTFPDDVLRNALTQPPETQARSA

SEQ ID NO: 314442 - protein, 397 aa, unidentified
MVAVMIGVDPHKGSHTAVAMGAAEEPLGELRVGASVGQAQQLLAWAAAWPERTWAIEGAAGLGHLLAQQLVAAGERVLDVPPKLGARVRLLAAGAVNKNDPNDARSVAVAALRSASQREDKAGDHAAVLKVWAKRHRDLGRTRTQVAGRLHAVLCELIPGGVLKRITAAHAAGLLEHITPPGAVEAARCELATAFTEDLRRTGAQMRDAKNKLTAAVRASSTTVTEVFGVGPVAAATVIGAVRDVSRFADRDHFAACNGTAPVEVSSGPRKIWRLSRRGNRRLNHAIHMAAVTQISHRHSDGRAYYERKLAEGKTPKEALRSLKRRVSDAIFARLQADAHRAAARLTPKEPGRATGERLNRQRGPLTPPPPALRPSHSRARHHPTARSPTLDPEGAS

SEQ ID NO: 314443 - protein, 351 aa, unidentified
MMLIGVDYHPSFQTIAFFDEETGECGEQELNHSDGQAERFYRGLQQRGICVRVGMEATGYSRWFERLLAELGIEIWMGDPAEIKAKRVKKRKTDRNDALLLLRLLRENNFPQIWVASPENRDLRQLLWHRHRLVQMRTRIMNQLQALAMNEGYRWKKKLFSEQGRAQLEKLVLAPWASRRRQELLELLDRMNPTIEELTAAVEQEAKKRPEVLRLMTHPGVGPLTALAYVLIIGTPTRFQRGKQIGTYVGMIPCEDSSAHKQRLGHISKQGNSLLRFLLVEAAQAAARSHPDWRRRYLHLALRRHQSIAKVAMGRRLAVRLYWMWRNGCEYSQSLKFGSYAGQLGTGHGVK

SEQ ID NO: 314444 - protein, 334 aa, unidentified
MKIVKQCIGIDVSKNSLECCMGSADSDQQHSYSNTKTFDNTLVGFKELYSWVKKKQNCTDISFVLEATGVYYENLAYWLHEKDLSLSVLLPNKVNHFAKSHNIKTKTDWVDAQILSMLGLERTLQPWTVPSMLMHEIKYLTREYRELKRKGTCTKNQLHAKTSAYKCPKSVERRLKKQIRLLETQIAEVEAELRVLVMSDDNLYEKIERLESIPGVNFMTIICVLGETNAFALVNNAKQLTSYCGLDIQHKQSGLKQGKTRISKKGNSFIRHALYMPALSATQHNPTLKSFYNRLSERKAAKKIAVTAVARKLLILMYVLWKNQTEYNPDYQKL

SEQ ID NO: 314445 - protein, 394 aa, unidentified
MPAAGVAGWLANEEPPVRVLTAVWLERGTCTDDLKQECPRGPNSCETTEVLMTVIIGVDPHKASHTAVAIGHDESELGRTRVRATRKQVLQLLAWAQPLGARRWAIESAGGLGYLLAQQLVDAGEIVLDVPATLASRIRVLGTGRSDKNDPNDALSVAIAALRTPTLRKVRPADHAEVLRLLAKRNIDIGNHRTRVVCRLHNAVMELAPGGIAKELYASDAVALLDRIEPATPVEQARHDLAVELLADVQRLDAQLKESHRRIRVAVKASGTTLTDLFGVGPIIACYLIGFTGDVGRFTSRDQFAAYNGTAPVERSSGGRVVHRLSQRGNRRLNHALHLAAVCQIRQPHSDGRAYFDRKLTEGKTKKEALRSLKRQISNVVYRQLLSDANRTTP

SEQ ID NO: 314446 - protein, 351 aa, unidentified
MRTSQKVTGIVTTIGIDIGKNTFHLVGFDQRGAIILQQKVSRSQLERRVANIPRCVIGMEACSGSHHIGRQLAEIGHDVRLIPAQYVKPFLKGHKNDYRDAEAIAEAVQRPTMHFVTIKTPEQMDLLALHRVRSRLVGRRTGVINQIRGFLIERGITVRQGPMPLRKALSEILRSDTGALSPRMVGLIADLAQDWRRLDERIAAVSTEIEALAEQDHSCQRLMTVPGVGPIISSAVVAAIGNGTGFKQGRDFGAWLGLVPKQESTGDRTILGKISKRGNKYLRTLFVQAAHVVLERRPSAAMRGLWPWVEQASKRLHRNILAIALANKLARIAWAVLARGGTYQPRITHAA

SEQ ID NO: 314447 - protein, 338 aa, unidentified
MQLYCGIDLHSNNSVVSLINDDDQLISEKRLDNNLEAIEHHLQPYQDAISGVVVESTYNWYWLVDGLIEHGYPVHLANTLAIQQYNGIKYTTDATDARYLAHLLRLGILPTGYIYPKAMRHVRDLLRRRLLLVKQHTAQLLSLQSLIGRHTGLRLSCHQIKQLKPEDLAQHFESPVTVFAAQQTHQLMQQLHTQIEAMEAFVLARCQQSEAYTLITTAPGIGKILDMTILLETGPIERFAQVGNYSSYARCVPTDKISNGKSKGKGNVKNGNRYLAMAFVEAAHYATIWEPTIKRYYQRKCKKKPVMVAKKTVANKLTRACYHMLKNGTAFDVTRAFG

SEQ ID NO: 314448 - protein, 392 aa, unidentified
MFYVGIDIAKTKHFGTIIDEKGNRLTKPFPVLNTSEGGAFLINKLASISSDKSQFRIGMEATGHYWIALYSFLEENGYHHISVLNPLQTNAWRKGTDIRKRKTDSIDSLLIADFIRFHQTSTSPFAQEVLFNLRQLTRFRHVLTTNIGDVKRRIVVLLDQVFPEYESLFSNTFGKASMALLNIFISPQDLAKLSLAELTHIITQASHGRLGKEKAQELKDLASGSFGIKFGLESFQLQLKLLLEQLKLLIQQRDGCDKEIASIMVEIDSPITTIPGIGPILGAIILSELGSIERFSKASKIVAYAGIDASISQSGNSFSDAMKLSKRGSSHLRRAIFQAAMAACRSAPLFQRYYDKKKKQGKHYYVCIGASSRKMCHIIYAVLKNNTAYIEK

SEQ ID NO: 314449 - protein, 356 aa, unidentified
MTASYDYHIGVDYHKSYSHLVVQDSSGKTLRSGRVKNDRQSLGGFLERYREHSHAVVEATRNWMVIYDWLDDICDDVVLAHPLKVKAIADAKIKTDKIDATVLAHLLRADLVPEAWAPGERARELRIALRERMFYVRLRTMTKNRIVTVFDRYPEQTAQLKKLGDLFGKAGRLQLAQVKVSDIDRIQIDRGLDFIDDIDVRIKQSEATIRAMTKANANVKLLKTIPGIGEFFARLIDAEIDDITRFRNPKKLAAYAGLVPSTYSSGGKTFHGKIIKQGNKWLRWAFVEAVAPAIASDAQLRAQYEHLKIRGVNKARVAMARKLLTIAFQILRDQRAYERRGESNTEGASTISRLSR

SEQ ID NO: 314450 - protein, 470 aa, unidentified
MKYKQRRKDTWSKRRGPLSLLERIQPDAAGIDCGEKSHFVAVPPDRDAMPVREFRTFTPDLHQLADWLVRCGVKTVAMESTGVYWIPVYEILEQHGLEVVLVNARHVRNVRGRKSDVLDCEWLQQLHSVGLLQASFRPAAAIVPLRSYLRERGILVEEVAARIQRMQKALTQMNVLLHTVISDLTGATGLKIVRSILAGERDPEVLAAHRDSRCHASREEIVAALTGNYRAEQLFSLRQNYTAYQFHLQQIGECDSAIEALLNTLAAQQPQPSAALPPARRKSNPKGHEPRFDIRTPLHRLTGGADISQIDSIGAQAGLQLIAEIGTDMSRWPSENHFTSWMTLAPNNKVSGGRLLSSRTTPSANRAAVILRRCAMSLARTPTALGAFYRRLAARTSKPTAITATARKLAVLVYRVLSGKLIYNDPGAAAYHELNRTRELKSLRKRASLLGLELVDRCTGAIVLKPDTVS

SEQ ID NO: 314451 - protein, 343 aa, unidentified
MQTVTTIGLDIAKSVFPVHGVDAEGNVLIRRQLKRRYVLAFFEKLPPCLVGIEACATSHHWSRELKARGHNVRLMPPAYVKPYVKRQKNDAADAEAICEAVTRANMRFVETKTPEQQSCLMLHRTRQLFIRQQTSVINAIRAHMAEFGIVAPVGRKGVEQLLDVVADARDRRVPEVARACIAALGAQLRLLKAQILEFDRRILAWHRSNETSRRLDELPGVGPALATALVASVADAKAFRSGRNFSAWIGLVPKQHSSGGKDKLGSISKQGDRYLRSLFTAGALAVIRYAKIHGTKHRPWLTALLARRPTKVAAIALANKIARMAWAMMARGERYKEPVALAA

SEQ ID NO: 314452 - protein, 371 aa, unidentified
MGESSKKLFVGLDVHKDTIAVAYAPEDRGADVESVGAIGTRQCDIDKVIRRLESKGATLVFVYEAGPCGYWLHRYLTRQGFSCAVVAPSLIPRKAGDRVKTDRRDAMTLARLLRSGDLTSIYVPTVADEAIRDLSRGREDAVGDLKRSKVRLKAFLLRQDIRYEGRANWNAAHLRWLARVVCPTPAQQIVFQEYVHTVTEQSERLRRLESELLTAVKTWRLYPVVEAVQALRGLDRTGAGTLIAEVGDLMRFDTPRKLMSYLGLTPSEYSSGAHRRQGGITKAGNGHARRALVEGAWAYRYPAKVSRHLQLRLEHVPPEVRAIAWKAQVRLCKRYRLLSARGKHVNQVVVAIAREMAAFAWAIARTVPVAS

SEQ ID NO: 314453 - protein, 414 aa, unidentified
MKLFVGIDVSSQELEACFMNPDGDKLETLTVKNNLDGASHLRDRIVAIADKHSSSEIHIGLEATSVYSWHPAMYLHQDPALQERKAKVFTLNPKLISKFREAYADMDKTDRLDAWIIADRLRFGRLTTTIVMQEQYVALQRLTRMRFHLVHNLAREKQYFLQNLFYKCNAFTTEVDSSVFGHAIMEMLSEKFSLDDIAGMDVADLADYLRDKGRNRFPDPERVARCIQQAARASYRLSKVVEDSIDLVLGTSIESIRSIQKQLKDLDKAIERVLDGIQGAPCLLSVPGIGKVYAAGLLGELGDIERFKDQAAVAKYAGLTWRRHQSGVFEAEDTARIKSGNRFLRYYLVEAANSVRMRDEEFGEYYRKKYHEVPKNQHKRALVLTARKLVRLVDALLRSGQLYTPRKKVTTAKD

SEQ ID NO: 314454 - protein, 354 aa, unidentified
MNKDKYVAMDVHKASVVVGIRNAGGKYITEAIVETKASTLLELVKGMSGTIHLTFEEGTQSAWLYDLFKPHVAELIVCDPRRNKLLEEGSKGDRIDVQKLSELFCKGMLKPVYHGDHGTRALKELAHNYESLVSDRTRVKNRLKAIYRGRGISYQGAGIYQPKQREEWLGKLNERGVKSRAEILYQQLESLEALVKAARRGLLAESRRQKVSRYLRGISTLGSISVALLIATVDTPHRFRTKRQFWTYCGLAVVTRTSSDFYFDQGQLRRSRRPVVTRGLNQNYNRRLKRIFKQAALTASRQGPFKPCYERLLGRGLSEELARVTVARKIAAVTLAVWKKGERFDPEKILKPTT

SEQ ID NO: 314455 - protein, 337 aa, unidentified
MKLYSAADLHSNNHFLTIIDEQDRRILEKRLPNDLAITLKTLEPYRTEITGIAVESTFNWYWLVDGLTEAGYPVQLVNTSKVRQYEGLKYTDDRYDAFWLAQQMRLGILPTGYIYPKQQRAVRDLLRERRRLIRQRTTNVLSTQSTLWRHTAIRLPSKVILGEKEAPWPELFDKNVQLGIQAHRATIKVLNKQIEVIEATILKHLKPVPEYRMLLTVPGIGPVIAWTIVLEAGDLRRFADVGHFASYCRCVDSKRTSNERKKGENNRKNGNPYLAWAFFEAAHFAIQYLPTARRFYERKAAQRNPILAMKALSHKLARACYYVMRDRVPFDPVRLFG

SEQ ID NO: 314456 - protein, 313 aa, unidentified
MIIPLRCVGIDVSKQYLDIFDEGLGVPERIANATQAITQIAARWRCDVLVVFEATGVYDLELREALSEAGIRFARINPARARDFARASGQLAKTDPIDARMLAAFARAMQPATEPTANPARNALAGLAKRRDQLVRMRAQEKNRRSETDDRAMAERIGRLIEVLDGEIAEIEADIRGLIKAEREIADDARLMRSLPSVGPVACMQLIAKMPELGHVGAKQIAALAGLAPFNVDSGAFRGKRKIAGGRKRVRDALYMAALNAVRRADPFKAFYARLRRAGKPAKLALIAVARKLLTVLNAMMRDRKPYLKANPT

SEQ ID NO: 314457 - protein, 328 aa, unidentified
MFNCIGIDVSKASLNIHIRKNSQDLEIENTLQSVKKLYAKIKKIYKKELNEVVFIFEPTGSYSELLRKFCSQKEIKCFIINPKQFSNYAKALGEEVKDDDIDARVLSQAIILAKEGEVKVPTYDTDVEKMKELMSFYKFTTKQTSQLRNHLESLESKEGDSFAIKELQKSIKLSKEKEKKVIAKVQEMIDANPKYKKAFENITSMIGIGQIGGIALLHLFIKYPEANQRQITSLVGLNPIYKKSGSSLQSLYKISKSGSIFYRGSLFMGVMTAIRYDENFKAFYARLKAKGKHTTQAQIAVMRKMIIVAHSLYKNDKKYVKPSKSIEV

SEQ ID NO: 314458 - protein, 343 aa, unidentified
MYYIGLDVHKKTISYCVKDAAGCVHQEGKIGSTRRELDAWVRTLPQPRMIAMEATIFTGWIYDHLLPHAEKVKVAHPLMLRAIAAAKKKNDRIDAAKIADCLRCDFLPECHMASTAIRDRRRTLRYRNLLVKQKVQMMNRVSGLLMETGVSYNKRRLHKVGYFAKMMATNEEVSDCVRPLLRLSREHIDRAQRLDYALVSSLERDPLLAERLRRLRTVPGVGPITALTWALEIGDFTRFRSVKEAISYCGLCGDESSSADKVMRMPISKQRNKHIQRVLVEAAKLAPRESHELAVVRQRELERGNPNRATLAVARKMVCYLLAVERRKQDFVPAEKFKQVAAA

SEQ ID NO: 314459 - protein, 426 aa, unidentified
MKVMHDRVAAIDVHKDMVKVAVRVPGERRGTRKTDVLEFRTFYGVLEEMGRELRRRGVTHVVMEASGVYTEPVYYALAGLDFTEVMVINPAHAKALKGHKTDARDAIRLLDLYECGLLSGSYIPAPDLKEVRDLARYRIKTVQARASEIQRLQKTLETAGIKLSSVVSDVTGVSATAMIEALIDGERRGAVLADLAQGRLRTAGKMADLSMALAGRFTDHHALMCRLHLDRIQVLGEAVAGLDATIAPRAARHAREAALLKTLPGFGDVIVAGWLGAIGPAPHQHFATAQRLASWATVCPGNYMSAKKSKGGRTGDGGNYIKPLLVQAAWAAVRVTGRLQARFHRLVRRFGGARNKGAIKRAIMAIAHTLLKIAYQVLKTGTPYTDLGADFYASRETPQARQDYLIRQLQKLNPGCVITVTPAETA

SEQ ID NO: 314460 - protein, 363 aa, unidentified
MIIIGCDYHPGFQQIAFVDMETGDCGEQRLQHREAAEKFYRGLAAQGIKVRVGMEASGHARWFERLLAELRFELWIGDAAEIRAKRVRKQKTDRQDAQHILQLLVEDRFPQIWVPSWENRDLRQLLWHRHRMVQARTRLMNQLQAVALNEGLRCKKKLWREHGREQLESFRLAPWASRRREDLLKLLDQLNPTIAELTHAIEQEVEKCPEARRLMTHPGVGALTALAFVLIIGRAERFQCGKQIACYLGLVPVEESSGERRRLGHITKQGNSLLRFLLVEAAQVTVRTIPEWRSKFFHLAMRRGRKIAKVAMARKLAVRLFWMMRREWNYAQVQKFGSHAGQPENRHGVQENTELLTGASRSS

SEQ ID NO: 314461 - protein, 415 aa, unidentified
MERVLERCCALDVHKRQVTACVHVPDREGRRSELRAEFRTVTSELLALRDWLKGLGVTHVAMEATGVYWKPVYYLLEDDFELWLVNAQHVKNVPGRKTDVQDAQWLCQLLEHGLVRASFVPPKPIRELRDLTRYRKSLVWERAREANRLQKLLEDANIKLGDVASDVLGASGKAMLGALCEGDTDPEALAELAKGKLRAKLPALRLALEGRFSAHHALLVSHLLSHVEYLDETIASLCEEIEERVRPFERQRELLCTIPGVAERTAEVILAEFGPDMERFPSHRHAASWAAICPGHDESAGKRRSGKTRKGDRWLRTALIEAAQSAAGRTKDTYLHSQYLRIKRRRGHSKAIVAVAHSILVAAYYILSEDKPYEELGGDYFIRREDQERLTRRLVRQLERLGQRVTLEPATVEAR

SEQ ID NO: 314462 - protein, 338 aa, unidentified
MSLYAAIDLHSSNSVLAVIDGQGKPLLQCRRPNDLPRLLTDLAPYREELVGMAVESTYNWYWLVDGLMDHGYTVHLVHTAAIPQYDGLKHGDDHTDALHLAQLMRLGLLPEGYIYPREQRATRDLLRRRFALVRQAVRLMLSIQSSFSRSTGKQLSGNALRQLTPTRLVELFPDLATRYGVLIQFKLWLTLQDQIAALEQWIGKDIARPDLLMRLRSVPGIGPILGMTILLESGDIDRFASVGDYASYCRMVESVRLSNGKRKGHGNRKCGNRYLCWAYVEAANHAIRFDPLIRRWYDRKRARKHRVVAIKAVAHKLARACYHMLHEGTPFDPARAFG

SEQ ID NO: 314463 - protein, 378 aa, unidentified
MSQSTTLYVGLDVHKDSIDIALAEPSRDAEVRHLSTVAGGNEAVTKALRRLVSAGHRLHIVYEAGPCGFALQRHLGALGWRCDVVAPSSIPRPSGERVKTDRRDAMKLARLARVGELVAVRVPDSADEAMRDLVRGREDAVREQRNARHRLKALLLRNGIAYSGRAAWSGAHLRWLAGVKLGHPAQQIAFQEYLHAVTEAGARIVRHEQALRDALSGWTLAPVVLALQALRGVQLIAAITLVAEIQDFWRFASPRQLMAYLGLVPCEDSSGPRRRQGVITKAGNAPARRMLVEIAHQYRLAARVSPSIARRQSDLELPKAVTDIAWNAQTRLCSRFRRLSARRLPHNKIVVAVARELCGFVWAIARQVTPEPSLPQAT

SEQ ID NO: 314464 - protein, 317 aa, unidentified
MNSRTTESFAGIDVSKASLEVAVSGGRRVLSFRNDKRGVRALTGYLRDEQPALIVLEASGGYQRLVVAALIAGELPVAVVNPRQVRDFARATGTLAKTDAIDARIICHFAAAVRPELRRLATADEQELSDLQARRQQLVEMITAEKNRLRTSGPRVARQIGRHVRWLEKQLKDVESELRDLVQSSPVWRAKDELLQSVPGIGPALSGALVANLPELGELNRHEIAALVGVAPLNRDSGVFRGKRRVWGGRQNVRTKLFIGALVASRYNPAIKSLYQRLCAAGKPKKVALVACMRKLLTILNSILRTRTPWNPKPAYA

SEQ ID NO: 314465 - protein, 404 aa, unidentified
MKGPIVSIDVSKGKSDYQAFKDLNVKYTGSRSIKHTKEGFDEIVNLVREMEKKLETEVCVVYEATGVYHRVLKKVLEDNNIKQFIINPLLSAKTRKNDSLRCPKTDKLDPKSIAKTYYSHSLHNSHKQETIYHELRELSRYYEDILVHLRKDKVAFRAQLDIVFPGYDTLYDDLYGPVALTVIEKYPHPEMLQKKKINTVSKVIQNKTCHRQAVSDTMADKAIEYSKTIYSGCDKDDIEVLILQRLIKKLNEDMAEAERTIGEMINLAQELPDFSIIKSIPGIGDNLAARIIAELGDMTRFKKKNELVAFAGLDPRISESGQNDGDHMHITKKGNKRLRCLLYLAVTCSIRLKRDDNSIKDFYIKKKQQSNPMCSKAAKTACASKLVRIIYSMCKTGELYQYNK

SEQ ID NO: 314466 - protein, 323 aa, unidentified
MNKYIAIDVSKQTLDVCFYKDGKWHHFKTVNQKQGFKKIASLGSEEDWFVMEASGPYYLKLAMYLYENNLKVSVVNPLVIKRYSQMLMQRAKTDKKDAHTIGSYAMSNTLKRWHPEEPAIQEMRQIITAMQLLETQIRQNKNQQEAFKSSGTLSASLSKALKSVERSLKKQRCILESELESIANQNYEETLKRVRTIKGIGKKTSIMLIVVTNNFKKFENYKQLIAYVGFSPRIYQSGTSIKGKGHICKMGNSQIRKMLYMCSWTAKQYNKGCRQMYERLKSNGKPEKVIKVALANKLLKQVFAIVINETYYDEDHKSQLKRA

SEQ ID NO: 314467 - protein, 400 aa, unidentified
MISVGIDVSKGKSTVCILKPYGEIVCSPFEVLHVEKELNALEDLLNKLDGEIRIVMEATGIYHLPILTFFHEKGYFVSVINPFAMKKYAKDNSIRGAKTDKLDSIMIANYGIEKWFKLQKYKGDEEIYGELKFLGRRYRHYMELHVKALQELTHILDYVMPGIKKMFNSWNEANGKDKLSDFVEQFWHFDLITSMSLEKFTEEYLVWAKEKKYHRSRSKAEAVYELASNGISTLSSGTPSTKMLVQEAISVLRTVDSSLFLILTRMQELAKTLPEYSTVREMGGVGDVLAVKLIAEIGDIRRLHSAKALIAWAGIDPPPYESGQFIGSKRKITKRGSSTLRKVGYEVMRVLKSHPAPKDDAVYNYILKKESEGKSKKHAKIAGLNKFLRIYYARVMSFYQ

SEQ ID NO: 314468 - protein, 398 aa, unidentified
MTESSDYESVQVFIGVDVGKDTHHAVAINRSGKRLFDKALPNDENKLRSLISDLKQHGQILLVVDQPATIGALPVAVARSEGVLVGYLPGLAMRRIADLHASEAKTDARDAAIIAEAARTLPHALRTLKLADEQIAELSMLCGFDDDLAAQTTQASNRIRGLLTQIHPALERVLGPRLDHPAVLDLLQRYPSPEKLASLGENKLAAQLCKLAPRLGKRLAADIAQALAEQTVVVPGTNAAAVVLPRLALQLITLRKQRDEVALAVEQRVLAHPLYPVLTSMPGVGVRTAARLLTEVACRAFASAAHLAAYAGLAPVTRRSGSSIRGEHPSRRGNKALKRALFLSAFAALRDPLSRAYYTRKMSQGKRHNQALIALARRRCDVLFAMMRDGTFYTPQAS

SEQ ID NO: 314469 - protein, 400 aa, unidentified
MLRPFGEAVRLPFDVAHNTEELASLAEQLRSLDGETRVVLEHTGRYYEPVAKALHEAGLYVSAVNPLLIKEYGANSLRRVKTDKADAVKIARYALDNWTDLRDYTPMDTIRYDLKTLNRQFQLASKQRTACSNNLIALLEQSFPGIRKCFDSPVRSDGTQKWVDFAHTFWHVDCVRKQSLNAFSERYRKWCKRHGYFFKQSNAEEVYALAKNAVVLVPKSEVTEVLVQEAANQLTSISRSVETYRAEMERLASMLPEYPVVMEMYGVGKSFGPQLMAEIGDVRRFERKQTLVAFAGIDPMPNQSGDKNIRSNKSSKRGSPYLRKTLFNVMGIYLKCAPQNEPVFQFLDRKRSEGKPFYVYMTAASNKFLRRYYAKVRDYLATLENLPPVDMDSTGLQESN

SEQ ID NO: 314470 - protein, 382 aa, unidentified
MAAAPKGATDMTTTSVEERRGEDPGTAVEEVVLGVDTHLEAHVAVALDGLGRRLGELTLPTTEKGYQGLVSWAEDFGRVRCAGVEGTSSYGAGLARHLRAAGIGVFEVERPKRRHLRRKGKSDSRDAERAARAVLAGETAGVPKSEDGKVEMIRVLRAARRSAVKARTQAANQLRGVRVTAPEAMRHRLRGLSTKELVSVAARFRPGDDPDDVGEATRLALRSMARRYQYLSEEIAELDAQLGRLVAQTAPELTSLPGIGTDHAATLLAVAGDNPDRLGTEASFASLCGVSPVEASSGKVVRHRLNRGGNHDANRALHLICVVRMRVDERTRRYAARRASEGKSKKEIIRCLKRYVAREVYRVLATSVTFADSYVDEGRSSP

SEQ ID NO: 314471 - protein, 420 aa, unidentified
MKDSGKRYIGLDVHKHYLIALGVDEDLNVVLPAQRVELSHLETWMKKTLTRQDNVVLEMTTNTWQVYDELCVYAGSVLVVHPPHVALITRSQVMNDKIAASILARLLAKGLLVGVWVPPQEIRELRGLVAQRKKMTGLATQAKNRLQAVLQRHHLVAPEGIPFHKSQQSWWLALPLGALEKVNVQSDLETLQFAQAQQMRLTSMMEEIASQQEQITRLLQLPGFGVVTAVTVWAAIGNIQRFADAQHLVGYAGFGTKVHDSGMTSRSGRITKAGRRDLRVVLTEAAQVAANSHPHWKAELARLQPRLGRNTPALAGGAREAIVAIARKLLVAVWYILAHHKTDRFAQPEAIAQKFLKFAYQLGKANRPAGQSAAQFVRQRLDTLHLGSEMTSIAWGSKKPIPLPPSTNKVSDVPNGALAP

SEQ ID NO: 314472 - protein, 388 aa, unidentified
MPQSNDLSRSLTAFDQDSTLIAVIEMSQSNWLVAGLVPGIERQPLKKLSPDEDELLKLVHRWRNEAAQAGRVIKRIVVAYEAGRDGFWLARWLRRRGIEAYVIHPSSVAVSREHRRAKTDRLDTELLMRAFLGWLRGEKRHCSMAAIPTIEDEDAKRPSREHEKLVGDRTRIVNRMKAMLARFGIRTFKPTLRKAEERLDGLCTAEGTPLPENTRAELRRDMMRLRMVREQIKEIEQERLRKLTAAPAEKGPPTMVRFIARIIGIGIETADMLVSEILSRGLRDSKAVARYAGLTGAPDESGRRRREKGLAKAGNARVRRGMIQLAWRLLIFQKDSALAQWYRARTADARGATRKTMIVALARKLLIALWRMATTGEIPEGVSLRAAT

SEQ ID NO: 314473 - protein, 402 aa, unidentified
MTQNQSYAAFIGLDKSDKKINVSLQQCAKNKMERSIVKGGAEALHAWVAALCARFPGQAVAICLEQPASGLIHALMSYDFIVLFPINPMTLARYREAFTPSRAKDDPTDADFLCELVALHREQLKAWQPDDVCTRKLRHLTLSRRRSVNMRTRFSNQLKALLKTYFPQALELCGDDLTTPMACALLQKWPSLQQLKKSRAETIRRFYYAQNARRGDVIEKRLALIAQAVALTNDPALIESSIITVQALTLGLRAAHTAISCYDREIARTFAQHPDASLFAALPGSGTAYSARLLAAFGSRRELFESAEAMLNFSGVAPVLKRSGQATITHRRYARPLFVHQSFIEYANESIRHSLWARAFYQMHKAALEKPLGHHPRLGLQMDPYPLPLLAAAHALRRNPLP

SEQ ID NO: 314474 - protein, 470 aa, unidentified
MAMKEPEEICDDAHEQIFERVCAIDVAKDSGKVCLRLAAESGTGRRVSRVWDVAARSRAVSDLADHLAELGVQKVTVESTSDYWRIWFYLLEARGLDVQLVNARDVKNVPGRPKTDKLDSVWLAKLTEKGLLRPSFVPPKQIRVLRDYTRLRVDLTAERARHWQRLEKLLEDALIKLTAVASRIDTLSVRDMIEALIAGERDPRRLAGMARAQMRVKHADLVEALTGQFDDHHAELARLLLDQIDGLNRQIETLSDRIDALLADLPIPPGPNGSPGAAAHHHGPSSEVPDAGASPEASRPIPPPIGTARDLADLLDEIPGIGRHVAEVVIAEIGLDMSQFPTAGHLVSWAKLCPKTIQSGTRSTAGKTGKGNRYLKAVLGDAAAGAGKTKTFLGERHRRILKRRGKLKAVVATARSTLVIIWNLLGSPGTRYTDLGEDYFVNRMDKGRRVRNHVRQLEALGFEVTLAVAA

SEQ ID NO: 314475 - protein, 331 aa, unidentified
MSNIIGIDVSKAGLDCAYLRDLDQDKAKRKNCHNKVRCFASLVAWAEARSGLPVQTLAFIIEPTHVYHEQLVQFLHNTGATVYLVNPGRVRKFAEGIGILSKNDLIDADLLTRYGLLARNLIAYAPVAQEVNDLRSLLNRLDVLERNLRSELNRQEKVGKTMVFHRLEQQPIARTVKRLKTEVITFKRAIRECVKSTPSLQQNFDLLHTIPGVGAKTAWIMMVILGSRAFRSAPEVASFLGLNPIEKRSGKSQYRRPRLSKSGSGNYRQKLYFPAMVATRKNPDIQALYERLLAADKTKMCALGAAMRKLVHICYGVVKNQTPYQAQTIPS

SEQ ID NO: 314476 - protein, 343 aa, unidentified
MKLSRVGVDLAKNVYQLHGVDRHGKTVWKRRLRRGQWLQALMDKAEPGCEIGMEACAGAHHWARELQSRGYTVRLIAPQFVKPYVKSNKNDANDAEAICEAMSRPHMRFVTVKSVEQQDIQAVHRVREELKAHRNAKANQIRGLVAEYGLVASKTLLALRRAIPEWLEDAENGLTDSFRSLLHGLWEDLLSLEDRFKKLNKEIEKLARNNEVTRRLQQLRGVGPIVSTALVATVGNGEQYSNGREMAASLGLTPRQNSSADKRRLLGISKRGDVYMRTQLIHGARSVVSQAKHRDDPLSRWVTDIAKRKHPNVATVALANKTARMAWAMLHNETNYNPSLAVG

SEQ ID NO: 314477 - protein, 356 aa, unidentified
MEYYAGLDVSLRSCALCIVDGKGTVLFERELPCEVGDIAECLLEFPHPIERVGFEAGSMSQHLFFGLTGEGFDVVCMEARQVSAALSAMRNKTDKTDARGIAQILRTGWFSPVHMKSREAHGLRALLSTRKTLLKKTIDLANEVRGLLKVFGVRLPKTVKHGSFDSVVRPMIEIDDVLAHALVPLLDARAVLYQHYLELDRRVKRAASQDDVCMKLMTIPGVGPIAALSFKSAVDDPTRFKRSRTVGAYFGLTPRRYQSGEHDNPGRISKSGDRDVRAVLYAAANALLMRTMASSQIKSCAARQAMPASLRGGMRLMRTKGRRRAVVAVARKLAVLMHRCWIDGSEFRQDQVGGMA

SEQ ID NO: 314478 - protein, 321 aa, unidentified
MTRIICGVDICSSSLAARIGPAGTQTSFSNHTEGIAELASFCHAHQVELIAMEATGGYEQQAFAQLSAQGLPVAILNPRAVRQFAKSMGRLEKTDAIDAGMIAWYAEVKQSQPLCVAPRTQQHLRALVTRLRQLTEIRTAQLNQQRLIVEPVVKTSFDDLLALIARQIRDLEQRIAALIQADPLWSQLNQAFRTIKGVADRTVARIMAEMPEIGTLSNKTISKLAGLAPLANDSGKHHGKRAVRGGRATVRDILFLVGSVVARYEPDFVAFQQRLRAAGKPPKVVRIAVAHKLLVRLNAKARQVRQQSVNLQQICLASQQP

SEQ ID NO: 314479 - protein, 403 aa, unidentified
MNSVGIDISKGRSTVAVMRPFGEVVISPFEVRHTDSELSELAKQLKSLNGETRVVMEATGNYHAPVAKLLHDAGLYVSVVNAKLVHGYGNNDLRRVKTDKKDSVKLANYGLDRWLTLPRYVPEEDTRLLLKNCYRQYRQYSKVQTVLKNNLISLLDTVFPNVNRLFSSPIRGDGSEKWVDFVAEFWHCRCVSEKSEKAFTSKYQRWCRKHGYNFNVEKAHTIHAEASGHIGIMPKSETTKLLVEQAVAQIRATSAALTALKRGMLALAAQLPEYPVVMGMFGVGPTLGPQLIAEIGDVRRFYSKKALVAYAGLDAPPDDSGNVTGKHKPMSKIGASSLRRTLFLVMSVYLQNAPLDEPVYQFMDRKRAEGKPYRVYMMASANKFLRIYYATVKAYLESLEHTA

SEQ ID NO: 314480 - protein, 389 aa, unidentified
MIYVGIDVASEKHDFFMMTSEGEVFTKRSISIPNNQIGYEKLHKCIQQFCGVSQDSNVRIGLESTGFYHFNILFYLLKKKYAVTVINPLLTNMYKKSRKVHSPKNDNLDSQSICMYLCDNRNDFKPYTLKSYHTEALKSLSRDRFSVIEELRLAKTDVYRILSQLFPEYLNLFSNIYQGSALNILKKYPGPKMLSKAHESTIAKMIHGRCKVKAIDVIDAARHSIGNDNEYLSFSLTQVIKTLEFIQSKVDEYDAMIKKYVDSLDTTILSIPGIGYTTAGLILGEIGDISRFKRAEQLVSFAGLDIEVYESGKYKATNHRISKKGSKYLRYALYQVAKVCWVHDPTLNAYYLKKKAENKHFFVILAHLEKKMTRIIYSILKSGNTYIPQ

SEQ ID NO: 314481 - protein, 379 aa, unidentified
MGDCSEAFVGFDTSKLRNAVAIADGGRDGEVRFFGEVENSEAATAKLVRKLAAQYQRLTFCYEAGPTGYGLHRQIESLGYECIVAAPSLIPKRPGDHVKTNRRDAVNLAKLLRAGELTAVWVPDRHHEAMRDLTRARETAMLDLRRKRQQITGLLLRQGRHYQEGNQERRKPWTKIHKAWLMRQKFEHPERRLVFEEMMLAMREAEERLARLEQAIRVAVADWSLAEVCTGLMAMRGIDLVSSAGFLAEMGDLNRFPTPSELMANLGMVPSEKSTGETIKRGPITKAGNRRARRLLVECAWAYRHPPRVGVTKQAKVAAAPRAVREIAWKAQHRLYGRYRTLIRRGKLKNVAIAAVARELAGFIWAVNREITVAGAATR

SEQ ID NO: 314482 - protein, 343 aa, unidentified
MLRTNVIGIDLAKNVLQVCHISRQGELLSNKAVSRQKLKELLAKSKPSLVALEGCASCHYWGRYAESFGHEVRIINPKKVKAYVDGHKTDANDALAIANAALQIGIKYSKPKSMEQQTLMSLEANRQFLSKTIVSLGLHIRGIINEYGIVKAKGTKGLAALVTSTLYESDVLPVSLVTTLSMLWQQYLNLKEELSKLQKSMNSTTRQIESCKSLMALEGVGETTASMLYATLGNGTQFTNGRQASAFVGLTPKQYSSGGKVTMLGIDKFGGVKDLRSMLYLGAMAYIYRLPESPKNQKQAWLIKLVDRVGFKRACIALANKTVRTAWAMLHYETEYQPKPLSI

SEQ ID NO: 314483 - protein, 402 aa, unidentified
MNCVGIDVSKGKSMIAVMRPFGEVVVSPFEVRHTASELSELARLLKNLDGETRVVMESTGNYHAPVAWLLHGAGFYVSVVNAMLVHDYGNNSLRRGKTDKKDAVKLANYGLDHWLTLPRYVPEEDTRLMLKTCYRQYQQYSKVQTMLKNNLISLLDTAFPDANRLFTSPPRADGSEKWVDFVATFWHCECVCGLSKKAFTAKYQKWCRKHGYNFSQDKALDIYASACGRFGVMPKTNTAKLLVEQAISQLQTTSAALAALKQEMQSLAASLPEYPVVMGMFGVGPTLGPQLIAEIGDVRRFHSKKALVAFAGIDAPPYQSGQIDVRSRSISKRGSASLRRTLFLVMGVLLQCAPMDEPVYQFMNKKRSEGKPYRVYMIASANKFLRIYYASVKAYLESLEHD

SEQ ID NO: 314484 - protein, 345 aa, unidentified
MSQEVKITRLGIDIGKSSFHVVGLDQAGRPVYRHKFTRDRLLQFLARASPMIVGMEACPGSNWLARKAASFGHQVKIVPAQFVKPFVKSNKTDMVDAEAIAEAISRPTMRFTPPKTEAQLDLQALHRVRERLVSSKTSVINQVRAFLLECGITIPTGAAHFVRDMPGVLSDEQNGVTPAMRNLLESLWIEYRSIEERIQFLRRQIESIAQADDVASRLTSVPGIGQLTATAITAFAGNGVQFKSGRHLASWLGLVPKEYSTGGKQRLLGISKRGNPYLRKLLVHGARACVTHMDRTQSRLGVWISQMEAKGTHPNKVVVALANKIARIAWVILTGKNAVYLQQPQ

SEQ ID NO: 314485 - protein, 410 aa, unidentified
METLVERCAGLDIGKADVKACIRIPGPGKRRRQEVRTFATTTPALLELRDWLAAHQVTVVGMEATGDYWKPVFYLLEDAFDCQLLNARHMRNVPGRKTDVADSAWIARLIEHGLVRPSFVPPPPIRRLRDLTRYRTVVTQERTREIQRLHRVLEDAGIKLSVFVSDILGVSGRAMLDALIAGERDPHVLADLARTGMRRKIGALRDALTGRFDDHHAFLCTTMLGRIDAATATITDLTAQVETEIAPFAAAVDRLDGIPGINARIAQIIIAETGGDMTRFPTAGHLASWAGLCPGNNESAGKHYSGRTRRGDTWLRGALGEAASSASRSKTTYLSAHYRRIATRRGSKRALVAVSHTMLVIAWHLLHDQTTYRDLGPDYYQRRQDPERQTRKLVHQLQQLGHQVTLTASP

SEQ ID NO: 314486 - protein, 391 aa, unidentified
MINIGIDVGKFKHCATVLDDSTGEVLIKPFFLTNDRKGFDILYSKTKQFIHRKHSVGMEDTGHYMINLTNYLLDKKFTVKYINPRATFLRRKELGISAKNDRKDALLIAEMLSEKRFWRSISVRSIENSKFRDITRLYHQLQEQQNQDMNRLQRALDIVFPEVNSLSWTRYSKAYMKFLSTYPSASSIALEDIRNLRKALKTEGKGRQSKVTAEEIRELAKCSVGEDNISIDLEVTSIIAIINTREEQIRILGKKIEEFSHKLNSPIISIPGISHISGMTILAEIGDINQFQNTGNLISFAGMDPLVYQSGKYDAAHMPISKHGSRYMRKALYQAVFTVCKYSPTFHDYYTKKRNQGKSHRCAQGHCARKLLRVIYKLLSTNSLYDQKHIQ

SEQ ID NO: 314487 - protein, 367 aa, unidentified
MKIIHWIGIDDHADKWTIAQFKANDDKPAREFELVPDAKGYRNLIKFAKELTGEVRIVYEAGPCGYELYRRLTKAGLKCEVAAPSLTPRKPGDRVKTNRRDAAKLARYLRAGDMLTLIVVPDQGRESLRDLVRARHAVQKDLLSIRHRITKLVLRYGHRYREGKTAWTNRFWIWLNKIKLEGEHSQFVLAELITAHEQRLKQRGRYDDEIEAAAKMPQYAPYVKALTVLRGIDRLSAMTILSELGDLRRFATAPQLMAAIGLVPSESSTGDKTTRLSITKTGNAHVRHIAVEAAWQYERRISNGRVIRGRRKDQPRALVDIAEKCDLRLNRKFHRMTSRGKRSTVAAVAVARELMGFIWAIGQTMNA

SEQ ID NO: 314488 - protein, 378 aa, unidentified
MEQLIERCCGLDVHKATVSACVRVTQRLGGELKQEVRTFATTTPELLALREWLSEQRVTHVAMEATGVYWKPIYYMLENDFELLLVNPAHFKQVPGRKTDVADCAWLAQLLEHGLLRSSFVPPAPLRELRDLTRYRKSLTEERTRAANRLHKVLQDAGIKLSSVATDMLGVSGRSMLMALVAGTTDPTMLADLARGQLRKKLPQLRQALTGRFGPHHRFMLSRLLADIDYVEEASAELSRRIEELLAPFAAAVERLITIPGVQRRTAEVMVAEIGADMSRFPSAAHLSSWAGMCPGNHESAGKRRSGKTRRGNRWIRTALVEAGGAAGRTKHTALGRTLSSHARTRRAWTSSAGGRPQCPRNRLPPAWRTDHLPRTRD

SEQ ID NO: 314489 - protein, 392 aa, unidentified
MRKPKQCRPHNDLSRSLIPLNLNHTLIAVIELSQKSWLVAGIIPGVEHQPLKKLEPGEDALSTLLDRWRKEANKAGYKVERIAVAFEAGRDGFWLARWLRAQGIEAHVIHAASVAVSRERRRAKTDRLDTEQLKRAFLGWLRGERDHCKMAAIPTFAEEDAKRPSRERESLVGEQGRIVNRMKATLARLGIRSFNPKLKNAAESLEDLRTAEGEPIPPNTLTELHRDLERRRLVIEQIRQIEAARLERLRRTPKAKPNAMVLLLARVIGVGIETADMLVQEVLSRNLRDRRAVARYAGLTGSPDESGSKRREKGLSRAGNARVRRGMVQLAWRFLQFQKHSALAQWYRVRTEHARGSRKKMIVALARKLLIALWHFARDGVVPEGVLLRPAH

SEQ ID NO: 314490 - protein, 347 aa, unidentified
MLADQLDYVVGVDPHRDTHALAIVDVRTGAIVLEASVAASSSGYARALELAELHAPARRAFAIEGTGSFGAGLTRFLAGHDERVLEVGHLRRERRSGGKTDALDAIRAARSVLAQRRPAEPRAGGEREALRALMAAREGAVNAKRAGLCQLRDLLVTTPEPLRSELRPLTRAQLLHRLAAVRPTRHRDVELRGALQALRTVARRIQHLTAEERELAREIETLTQTLAPQLLDQPGVGPLAAAQLVISWSHPGRIRSEAAFARLAGCAPIPASSGQTIRYRLDRSGDRQLNRALHMILVTRRRTHPPTIAYINRRISDGKSRREANRCLKRYLARSLYRLLEHPPATT

SEQ ID NO: 314491 - protein, 346 aa, unidentified
MTHSTTVGVDLAKNVIQVSVVTARGKELLNRSFTRRKFAEFLGKQKLALVAFEACATSHYWARAAQRHGHEVRIIPAKFVAPFRQGHKTDSNDALAVAEAARRPNIKEAPMKTVEQQGLQAIHRSRQLLVQESTALSNHLRGLLMEFGVVIPQGFASLLRAIPEVLEDGESELPDLYRPTLQRMYSRLLELREDLQVITKEVGRLAKNHPICKKLMALEGVGPIGALLLYATMGSGAAFSGSREFAAYLGLAPRQYSSGGKTNIVGLSKKIGNSRLRSVLILGARSYVYKLKEPKSSKDKWLKANIERNGESRAAVALANKNVRTAWAMVTQGTEYQRRPQLEMAA

SEQ ID NO: 314492 - protein, 414 aa, unidentified
MTEEETISWFAGVDWGSERHQVCLLDARGTTVGEREFPHSGEGLAELGGWLLSMASAASTVAVAIEVPHGPVVDALIDRGFVVYAINPKQLDRLRDRFSVAGAKDDRRDAYVQADSLRTDRRLFRRLQVADPRLIELRAWSRLAEELRAERVRLSNRVRHQLWRYYPQMLKLTDDLAAPWFLELWAIASTPAKAGRLRKSTVERLVKQHRIRRMEAETILRILREPAIKVAEGVAEAASIHMRSLIVRLRIVNRELREAERKLDELCTAIGEIEQKLGESLQRRDVAILRSMPGIGRINLGTLLSEASGPLSRRDYEGLRTLSGAAPVTKRSGKSLIVVRRYAAHVRLRDTVYHWARVASQRDPKCRARYTALRKRGHSLGRALRGVADRLLALACVLLQRQTLFDPYFGRSTA

SEQ ID NO: 314493 - protein, 335 aa, unidentified
MLADQLDYVVGVDSHRDAHALAVVDVVSGAVVFEATIEANSDGYAKALRLADEYAPGRRAFAIEGTGSFGAGLTRFLSGRGEQVLEVGRLRRERRSGGKTDALDAIRAARSVLASERPATPRAGGERQALQALVAAREGAVNARRAGLCQLRDLLITTPEPRRNQLRPLSTVRLLQRLAASRPAGRSDPELRGSLLALRSIARRVLQLSAEERELAREIETLTRKLAPQLLEQPGIGPHAAAQLVLSWSHPGRIDSEAAFARLAGAAPIPASSGQTIRYRLDRSGDRKLNRALHMILVERRLQEGKTRREANRCLKRYLARNLYRLLEHGPPPAT

SEQ ID NO: 314494 - protein, 321 aa, unidentified
MNYVGIDVSKATFVVAYSSAKGSETKTFENTTKGVHKFIQTITSEDTHCVMEATGNYSMLLVYLLSKAGITVSMENPLKIKNFARVMLSVVKTDEIDARMIAMYGEKMNPAPFKLRSDSLMVLKQKRTVLRQLKKQLNANTNLQESMEALPFIDSVCKKILDKTVKFLMKQIKEMEEELSSLANIEYKKQMDLLTSIKGIGVTLATALIVATGGFTYFDNAKQLTRYLGLSPTYQQSGTSVNLKGHINRNGDSYLRSQLYVAAFSSLRCNTECKACFDRLRANGKPGKVAVVAVANKLVRQAFAVVTQGKKYVDGFISAKK

SEQ ID NO: 314495 - protein, 348 aa, unidentified
MTDPVYILGIDLSTIRLDCALLPDERSFQVPYSPAGFQTIIEHLVDRRAQGWRVLAVVEATGGYERALVEAFHAADLPVAVVNPKRVRCYAKALGILAKTDRLDARVIARYGQDVRPRPAAPVTPERRDLIELLAYRSQLASEIAARTQQKRLYTSAAMIARADTAIARLRQEKRELDREIARMLEAGEALKDRASLLLSVCGIGAVVAAVLLAYLPELGRLTEKEIASLAGLAPMARDSGQRRGRRHIGDGRAKVRHALYMAVVAALKNNARLRGVYDRLIKAGKPVKVAIVAVMRKLLVMLNAMLRDGETWEPDARKRRERRADRSSALPEESSAAPEPASETATA

SEQ ID NO: 314496 - protein, 344 aa, unidentified
MSKTPIAVLGIDLGKNSCSLAGLDASGAVVLRRRMSRDGVLAFTAKLAGCVVAMEACCGAHFLGRILQQQGHTVRLMAPEYVQPYVKAQKTDDRDAEAIAEAATRPTMRFVSLKSEAQLDLQVLHRARQRLVAARTRLTNQLRAVLLERGAIMPKRRAALRQRLAELLAGSPELSPRALRLLKDMQDEWADLDRRIKAYDDELAALTREDEQARRLATIPGVGVINATALLAAVGDASAFSRGRDLAAWLGLTPRQHSTGGKTKLLGISKRGNSYLRVQLIHGARAAMTHFARQPTSTGEWVRRLMARAHPNVVVVALAAKLARIAWAVLRHGRSFAPQPAIPA

SEQ ID NO: 314497 - protein, 348 aa, unidentified
MKNKSFVGIDISKNVIDVSIFREDTNIKMLPHEVFNNTRKGFGDMCSWLKKSRVVLSQALFGMEFTGCYSLDLEKFLTSKNYSFCMLSTRIVKHHPMGTIDKRDKNDSAKIADFLYRYDGTECAKPYKLPSKAMQQLKQLVNERKFLVEQRTNFMNRMQMFETKEDSAMYESYIKKLNHDIEKIDQEECELMSKEEDVFDTFQNLLTIPGIGFVNATNIIAITRNFTAFDTARQYARYVGVAPCSHTSGTSVKWRARPSAHCNGQVKADLSMAALRAVEYDVEMQMFYNRKLGGRKDSDTKRKALNAVKFKLIRRMFAIGKQKRKWEVLNTSDDRKNLHIEKSKASEL

SEQ ID NO: 314498 - protein, 430 aa, unidentified
MEVIYPKACGVDVHKSFIVAVICDSTSVKPQYLRKRFSTFNNSLIEFRNWLLANDCQNVCMESTGKYYVPVYNALEGHISNVVVANPKWVRCIKGEKDDNKDAKWIADLFKLGIVRSSFIPNKDIRILRELTRYLYKLTNMRTSEKNRFTNALTVGNCKLDMVFSDIFGKSSSAIINTILSQNEYNDEDILKNIDKHCKSSNEDILNSINGISWETAQKQRMNIIQEHIDYLDKVIKSVREIIDSIIAPYESAINLLCSIPGIDRKSAITIISEIGTDMSQFSSHYRLASWAGLAPGCNESAGKKKSVKISRAGVYLKPALVEVAHCAVKDKSNDYYAKKFNLISKRRGKKRAYIAIARKILVAIYHMLSTGEFFNPTDASKVETSDKDKIKFTKNNFMQSTKQLISLGLTIDELQTLIISKIPESTPVI

SEQ ID NO: 314499 - protein, 377 aa, unidentified
MTGRLFEALVGMVAEWFGHHPKEKRMSAYAGLDVSLNETSICIVDSQGSLLLESRVASEPEAIAQSLNSHAENLRSVGIEASALGGWLQRELTALGFEAIVIEARHTHVSLSSMRNKTDRNDARGIAQLMRLGWYKVVHVKSPEAQRLRVLLGCRQLASRKLVDVENEIRGVLRAFGLKVGSVSRGRFAARVLSLAEQAGALIEEVVQRMLAIRGTLLIEYRRLHQLVVKATVLDPVCRRLRTVPGIGPVAALAFRCGVDDPHRFKRSRTVAAHFGMTPRRHQSGEVDYTGRISKCGDREVRQALYNAAGSLLRRSRKASPLRTWGLRIRKRSGMKKATVAVSRKMAVIMHRMWLDGTDFRCSNDPAAAALAPAASA

SEQ ID NO: 314500 - protein, 479 aa, unidentified
MIDDRRLVGIDLGIASDHTVRVLDGRGGEVCRRRARPTVESLAAVETAALAGVAPGTRLEVVIEPTGPAWLPIAVFFTARGHQVFRVSSAKAADLRRFLSRHAKSNGIDADTLARLPLLAPASLHPLELATTAETAALDRRVRACDRLTQQGALHQRRIKDLVRQLMPVTPLTGELTKTDLAVLGRWPDPRALLGAGRARLLTVITTVSHGHQGLDRAEQWRAAAAAAVELYAGHPAMAWADLAAEVATEVALLAAARAELAGHAAARAEAYRFTDPARLAASLPGLAEVGAPTVTAIVGRAARFRTGRQFRSFTGLAPRASETGQTDRKGQPMSKAGNRLLRTTLIRAADNARRHDPQLAKIYYVQMVERGAEHLKACCVVAAHLAERLHAVLVRGMPYVVCDTDGTPVDPATAKQIIAEHWTVPREVRARRRSRKPEPGSRAGKAPQHVLAGHDRSDPRRVDRRGDLPRAASCSRPA

SEQ ID NO: 314501 - protein, 413 aa, unidentified
MQLLFVGDDWAEAHHDVEVQDDTGRRLAARRLPEGIAGIAAMHALLAEHLPADAAADQVVVGIETDRGPWVQALLAAGYQVFAINPLSASRYLQRHVTSGAKSDPGDAKVLADLVRTDRQHHRPIAGDSELGEAVKVLARAHQNLIWTRQRQTNALRSTLREFYPAALLAFAEDLAGRDALAVLTAAPTPERGKALPVGQIEAVLRAAGRQRNLTARAEQINAQLRTEQLTAPPLVAAAFGASVSALVAVTAELVRQTATIEEQLASAFEQHPNAEILRSLPGLDLVLSARVLAEFGDDPHRYADARARKNYAGTAPITRASGKSRIVLARVARNRRLADALYQWAFSALTASPGARAYYDARRAGGSTHHAALRALANRLVGLLHGCLRHRTAYRENTAWPTTNEEAHKTAA

SEQ ID NO: 314502 - protein, 340 aa, unidentified
MLYIGLDVHKEFCQACVIDESGRALSNERFSSTSEELDRFLDRFQDAKFVLESTGIWEFIYEGIEKRGFEAVLAHPLRVRAIAEARVKTDKVDAETLAQLLRADLIPRSWIPPKDIRDLRQLVRQRAYLVRQASRFKNRIHAEILRRGVRRPENLKTPFAQRSIRWMRSLDIPTVTSCLNCLENIQAQVEEMNIQLLEEYNRRPDAQLISTVPGIGFYGALLILAEIDDVSRFRHPEKLCAYAGLVPTVSQSASSVKYGSISKDGSAYLRWILTESVHVHTRYEPGSQLSRFHARLAKRRGRRVATVATSRKLLRIIYWMLVRHEPFHSHGFNPVKRVHC

SEQ ID NO: 314503 - protein, 406 aa, unidentified
MEILIERCCGLDVHKKSITACIITPKGKEIRSFETLTRRLVDLVDWIKSERCTHVAMESTGDYWKPIYNLLELEDVKPVVVNAQHIKAVPGRKTDVKDAEWIAKLLRHGLVQGSYIPNREQRELREVIRYRRSIIEERSREVNRLQKVLEGGNIKLSSVASNVLGVSGRNMLEAMIQGETDPSILADFAQKKLKAKKEQLKLALEGSLGPHQLLMLEKQLGHIDQLNGLITELDEEIERRMAPFAEDLKLVDTIPGVGKRTAEQILAEIGTDMTRFPSAGHLCSWAGMTPGHNESAGKKRSARTRKGNKKLRSALVESARAAGRKKNTYLSAQYHRIAGRRGKNRAAVAVGHSILAIVYVLLTRRQAYKELGFDYFDQRNREMVMNRSIKRLESLGYQVNLSEQSA

SEQ ID NO: 314504 - protein, 370 aa, unidentified
MKMSIGVDLHKTQFTVCFLGEKRQMVESGIFSTNKSGYDDFLKKAKEYSESGYVLQAAVESTGNARYFRNKLLVAGIDVVVVNTLKFKVVNESVKKTDKHDAKTLAEFLEKEMLPESVLCSQESEDLRRVLKTRSLLVKTTVSVKNQVHGLLLGYGIESKRGQLQSKKERQRILNGLEDHECFGNAAKAVVPLFDTIDQLYAQVKKLEIVIEELVLEDKDVELLMTIPGVGIITASTIRAYMDDINRYDSPKKFASYIGLAPWVQNSNETIHHGHITKRGPVELRTAMVQSVLGMVRSSKTTGNYRIMSKYRVMKKVKGSGQSIIATARKMSTIVYMILKTREPFDPLRMVPDKRYMEMQAAAWNVVKAG

SEQ ID NO: 314505 - protein, 414 aa, unidentified
MERVYERCCALDVHKAQVTACVHVPDRQGARSELRAAFQTMTGDLLGLRDWLLGLGVTHVAMEATGVYWKPVYYLLEDDFELLLVNAQHVKNVPGRKTDVQDAQWLCQLLEHGLLTSSFVPPKPIRELRDLTRYRKSLVWERAREANRLQKVLEDANIKLACIASRPLGASGKAMLRELCEGNNDPVALADLAKGKLRAKLPALRQALEGRFRDHHALLVSHLLAHIEYLDETIGSLSGEVEERMRPFEHQRELLCTIPGVAERTAEVILAELGPDMDRFPTHRHAASWAAVCPGHDESAGKRRSGKTRKGDSWLRTALIEAAQSAAGRTKDTYLHSQYLRVKRRRGHRKAIVAVAHSILVAAYYILRDEVPYEELGADYYVRREDQERLTRRLVRQLEKLGQSVTLEPALEAR

SEQ ID NO: 314506 - protein, 310 aa, unidentified
MDIIAVGIDVSKDRLDVAVHPGGEAFVVERNGAGLEQLTVRLKQLAPSIVALEATGGFETIAAAAVGGAGLPIVVVNPAQVRAFAKALGQRAKTDPIDASVIAHFAAATRPEPRPLPDEATRFLSDLVTRRRQIVDMIGAERQREKRATSQHLRKSITRLIKALEKELVSVDTDIDDAVRSSPAWREAEDLLASVPGVGPIIPRTLMAELPELGRLNRKQIAALAGLAPYTRQSGQWRGKSFIGGGRQTVRTVLFMGAMTARRHNPVLKAFFERLVANGKPKLVALIAVARKLLTILNVMIRTKTPWQPA

SEQ ID NO: 314507 - protein, 362 aa, unidentified
MNYVGVDIHKKYSVLCAVDERGRKLREARVEGNAPFGFAQFFSGLGGPSKAVVEACWNWGRIHDELEELEGIEEVVLAHPYKTRLIADAQIKTDRLDAYALSTLLRGNLVARAHVPRRETRMRKNLLRQRLYWARLRTMLRNRIHALLDRQRSLELPQCSDIFGVRGLSFLRRLELPETDAALLREQLALHDLIAQQMKAQEKRIGLEFGSEAIHRQLMSVPGIGPTLAAVIACEVDSIERFSSAEKLCAYAGVVPTTHSSGGKTRHGQLLPFCNKWLRWALIEASWVAIGCSPYFGALYKQHRARGKKANSAVLIVARRMCRIIWQLLHEKRDFEKRPLRPNFNFPGCSVVRLTAATAARP

SEQ ID NO: 314508 - protein, 345 aa, unidentified
MKIVGCDLHTRYQQIAMLDDETGELTERRLEHASGEAKEFYTKLTGPVRVGIEATGHTRWFERMLAELGHELWVGDAARIRAAEVRKQKTDARDAALLLELLRNGRFPRLWRPTNEERDLRHLLWHRQKLVWMRNAVGNQLHALAMGEGLCRKKQLFTKKGRGELQALKLDRWASRRRQELLQMIDPIDASLKQFDEAVNQQAAGTPEAVRLMTHPGVGPVTSLAFALLVGPVSRFSRSKQLVSYLGLNPREHSSGGRQRLGAISKQGNPMLRGLLVEAGHTAARLDPELRQDYQRLRLRRGGSVAKVAIARKLAVRMYWMLRRQVNYTQLVRMQGSSRATLVQQ

SEQ ID NO: 314509 - protein, 366 aa, unidentified
MKKISTVRVNGKMIFKGHKLTIGLDLGDRWSNYCVLDEAGEVLLEQKLATTPEAMKQTFERMPRSLMALETGTHSPWLSRLLKELGHEVLVAHAQKVELITKSNRKDDRHDARTLARLARIDPELLGPVRHRSAKAQIHLTVIRARAELVSARTALVNAARGLTKSYGERLPKCGTEQVSRELAAKLSAELREVLEPLLNEIESLNERIKEYDARMEKIARESYPQVALLKQVKGVGTQIALTYVLTLDDPHRFAKSREVGCFLGLKPGRRDSGESQPQMHISKEGDRYLRTMLVQGAHYILGPFGADSDLRRWGLRLAERGGKNAKKRAVVAVARKLAVLLHRLWVSGEVYEPLRNSHKAMRAVA

SEQ ID NO: 314510 - protein, 468 aa, unidentified
MSTNRTPKKRHLDDLTCVYPNAAGLDIGSAEIVVAVPPERDAEPVRVFATFTADLHALIAWLLACGIDTVAMESTGVFWIPIYELLEQHGIVPYLVNARHVKTVPGRKTDWNDAQWLQKLHALGLLQASFRPDAEIRTLRTLVRYRAEVIERRAPHINHMIQALKHMNIQLNLVLTDITGVTGLAMLRAIIAGERDPQRLAEFRQSGCKHSEAEIIKALTGHWDDAHLFALQQAVDLFDYYTTKIVECDTKLEQHYQAMESRWEPDAPLPDLPPAKPDSKSKNALTFNARAQIARVIGVDLVAVMGLSAVTVQTILSEIGTDMERFPSVKHFCSWLGLAPHNDISGGKVLRSRTMKVRNRANQAFRQAAQSVAKSDSSFGAYYRAMRARLGPKQAIVATAHKIARTVYHLLKMGEPYREESAAEYDHKRRERERKHLERRAQKLGYCLTAIPATAPESQPEGGRAGSF

SEQ ID NO: 314511 - protein, 424 aa, unidentified
MKVTYQTCCGVDVHKSFLVATIVKTSGGIEPSYQKKRFSTFNNSILEFKQWLLDNDCHDVCMESTGKYWVPVFNLLEDEINVVIANPKWVKAVKGNKDDTKDSKWIGDLFRLGLVKGSYIPCKIVRILREYTRYRYKLVSCRSSEKNRYQNALTVCNVALDSVVSDIFGKSSTSIIDYLLEQSGTSINHEEIASKLLRSLKSKEDAVIESVEGYQMTDAQKYRMRLVRAHMDYITAEIKDVDKMIENMISSNPDFENAVQFLCTIPGVKRDSAVTIISEIGTDMSRFSSSKRLCCWAGLTPGSNESAGKKKSVRITRAGVYLKPALVQCAHAAVKSDKSPYYKKKYESLVKRRGKKRAIIAIARMILTAIYQMLSTGEQWNPSDLYKIDMPEALVEKQKAKAIKQAKKLLQREGILPPDEPLAS

SEQ ID NO: 314512 - protein, 339 aa, unidentified
MTYTLYVGIDIAAQSAAVAWQVPARGEWQALEIKQQQSDYTRLMQQLRRQATPAETLVVMEATGVYWLALADALHRQGFQVGVINPLQARRFAQLHLQHAKTDAIDARLLAAYAQHMQPTPWTPPPAIYYHLQQRLAYRQDLVKMRTQERNHLHALCHHPHADAAIIQRQRQHLAYLNGQIKALEAEVKTLLAGDHPWREAARRLQTIKGFGPIVTAWLLVATQCFAFCDTPEQAAAYAGLVPYPRHSGSSLRATRSTGRTGHAQLRTMLYMAALSAARHTPPVKALYDRLLARGKPNKVARVAAARKLVHIAWAVVVKERDFDPYYNTPSHQAVPIPT

SEQ ID NO: 314513 - protein, 365 aa, unidentified
MQFIGVDLHTNKFTCCYRDEKKDKKETATFELNDCGMASFYRTLTPRTYVLVEATITTFAFVRLIQPLVKEAIVANTYELKQISLARKNTDKIDADILCRILKMQVLSGEQAVSPVTVPPVEIQELRGLFTTYRLHKKQTTQIKNRIHSLLKENLYGFTQEEIFSKKSREKIRVIENGTTMSFQVNELLDSLEYFETKIDSLEDKIKEYAGLYMKEIDILTSMKGVSVFIAIAVITDVITVDRFKNSKAFTSYLRSAPRVSNSNTSTSIRGTNKKGRKLSSTLLTQSLNHVLDSSLKLRRWYNRLTEYKKAGLVRSGLRRRVFAEMFQMLKKGEYHYGREALKHEAKMCQYKRFLEKRKNLLKTA

SEQ ID NO: 314514 - protein, 355 aa, unidentified
MDSAKYIGMDVHKESISIAVRNSAGKVVMESVIETKANMVLQFVDGLRGEVHVTFEEGTWAAWLYDLLRPHVTGLVVCDPRRNALLQEGNQNDRVDARKLAELLQNNQLRSVYHGDHGLRTLKELVRSYLTITKDLSRVMTRVKAIYRSWGIPCTGKQVYSPRHRAEWLGKISEPGVRRRAEFYYYQLDALRVLRQEVRRDLLAESKKHKAWKRLCEIPSMGPIRAAVLLGILQTPHRFRTKRQLWTYSGLGIEVHSSADHQVVKGHLQRKKKHIEIRGLNENCNHDLKNLFKGAAVVASTKPGPFEEFYAALLSKGMRPEMARLTLARKIATIVLIVWKRGVCFDAQHLKPQTA

SEQ ID NO: 314515 - protein, 389 aa, unidentified
MDEYDGRQFVGIDLHRRRSVIVRMTETGERLGVARIDNDLVALGLEIAKAGRSPEVVLEATYGWYWAADVLAAAGARVHLAHPLGVKAFAHRRVKNDVRDATDLADLLRMGRLPEAYVAPPEVRELREQVRHRAKLVMLRSGLKAQVHAVLAKEGVHVRASDVFGVFGRAQLDKLPLGAPYRARVNSLLRLIDAYTFEIDTVTARLQAQLAGQPGYQALLEIPGVGPVLAGVFYAEIGQVRRFRTAKQLCSWAGLTPRHYESDTTVRRGSITKQGSALVRWAAIEAVQKLPADGGWLVANRARLLSAAAGTSPPWRPPASCSPWSTTACATGTSALSSRPRLRREQARMRPGAWPLLGLTRHGEAAHMIGPTRPRSYRSMPRHQPRAKG

SEQ ID NO: 314516 - protein, 403 aa, unidentified
MSICFAGLDWASRTHAVCVIDERGSVLTQFEINHDASGLADLHRRLRGAGVTAVAIERPSGLIVDALLEAGLSVVPIHPNVVKASRPRYRSHGGKSDASDAYLLADLLRTDGHRFKPLAPQSDDIRSLRALVRGRDDLVATRVQLANQLRSLLHSFWPGATEVFADVDSPIGLAFIRRYPTPASAQRLGPKRMAAFCSQHAYSGRRSPEELLDRLHQAPAVALGKLEMAAKGELALSLARTLDRLGDQIRLLTRRIENHVSSIDDGRILMSFPRAGRICAAQILAELGSVRERFDSDEHLAAEAGVAPVTYASGKSKAVTFRWACNHRLRAALTCLADNSRHANAWAASVYAKAKARGCDHPHAIRILSRAWLRVIWRAWTDRKPYDPALHGSAKLLLKTQGG

SEQ ID NO: 314517 - protein, 368 aa, unidentified
MNNEYYTTIGMDVSDRTTKVCVMAKERGARRILEETTIPTTVDGLRTYLSGKCADWPVVFETGSHSRWMKREVESLGMKAIVANPSRLRMVTESNTKNDRNDARELARFALADVGLLHPVRLRGERCQQVLRLMKARDMLVKVRTMHVNELRGFAKSMGFRLPGCPANKVHALDKAGWPDDFESLAWPLMDMLETIDLKIRAYESQIRSLAESGELRDKIDRVREVYGIGLLSGAALVASIDADPGRFRKARDAGAYFGLVPKQRQSGEMDVQCHITRAGADFVRRLMIEAAQIAMRESARDTDIKLKGLRICARGGKIAKKRALVAVARCLVVTAVALLKKPDADYVPLSERARLEFEAMRSAETAA

SEQ ID NO: 314518 - protein, 421 aa, unidentified
MKSKAYRAADVNKINLSELRLEEGSANTVHAGLDIGKAFILCVLRWGVNDFDRPWRVRNPHDLPRLVELLLEVKRSRCVVVAMEPTGTYGDPARQALEQAGLLVHRVSPKNASDYAEVFDGVPSQHDGKDAAVIAELSAQGKSWQWPMAKLTETEQELGYQVDWIDAQRRQMVVWSGRLEAMLSRHWPEATEIVGLTSGSLLNCLAAYGGPRGLAADAESPKRNWARYLSSTKVESLLLSGRQTRGVETGRWDEERLRRYAQQIQSCRKEIREGVRRLRELAREHGKIRAMGKVVGVPTACVLWADLGNPERYSSGPAYRKGMGLNLAEHSSGKWEGTLRISKRGSSRVRRWLYMAALRWVNKEPVRSWYLKQKAARRGEGKPAVIAVMRKLALAVYAVGGRNEPFDQKKLYESVTAIPLA

SEQ ID NO: 314519 - protein, 361 aa, unidentified
MAADNIIGIDPHRTTFTATALDPRGGELGHAPFPNTRAGHPAALAWAAGFGPADRWGIEGASGLGRELAEFLVGAGCDVRDVPPHKTSARGHGRHEGKTDRLDSHRVAAQTQTNLRLAPAFKQAVSAAPNSVREQIALWHNARRSLTKVRVQLLGELDALVHDLPAALRSQLGASHTVRARVNSLEPARHLRGERPHGGRPAAPHRAPRGDAARCSRAGQGGHCRTHQLVNVTNSTLTALVGIAPRAAAEIIVEVGDFRRFTEAGFARFNGTAPIPASSGEGDQAPVRHRLSRGGNRRLNATIYRIAMIHLRYEPRARRIHDQARAHGDTRREAMRVLKRHISNVIYRTMLRDARRAPDLT

SEQ ID NO: 314520 - protein, 355 aa, unidentified
MERQRLEDSEIVGGVDTHKQAHVAAAVDGVGRLLGTSEFPATSVGYRELLRWLRGYGDVSLIGVEGTGSYGAGLARYLAREGVSVVEVIRPNRQLRRRRGKSDPVDAEAAARAALAKEADVTPKSADGPVESMRMIRLARTSAVKARTQAANQIDALVTCAPQSLRSQLKGLSLRRLAERARRWRPGDIQDPLSACRATIKGLARRWSQLGAEIAGYDEQLLRLTRRVCPELLARPGVGFEVASSLLVAAGDNPDRLHSEASFAALCGVSPLDASSGQQRRHRLNRGGNRDANRALWVVAMTRLRVDARTKEYSARRTQEGRTRPEILRCLKRYIARELYSILLRATDAKALDAT

SEQ ID NO: 314521 - protein, 344 aa, unidentified
MDNHTQYSGFAGVDLAKKVMQIHFVTGDGEITDKQVKRAEFLDFFRNRTKCLIGMEACGASQDWARKLEAMGHEVHLMSPKAVKPFVSGQKNDYNDAIGIYKAMFNGVRRVPVKSTEIRDLQTLRRIRSQVTKDKVKEINHVRGLLAEYGIVMGKSITAFNKGISSALESLKERGDVSPLVAEELQTTVESIKTKIERQKRLDREIEQLARGCKNYENFLKTPGVGLFTAAMLCVLLCDPAIFANGRQFAAYIGLAPRSRGSGGKNFIIGIPSKFNCDSESRAVFVECAQALARYKNKSPWVDGILRRKPKKVAVIAIANKLARQVWAMANKGESFKQMTILTA

SEQ ID NO: 314522 - protein, 340 aa, unidentified
MTITTIGIDLAKNVFAVHGVDQNGKTVLVKSRVTRADLPGLIASLPPCVIGMEACSGAHYWARLFLQYGHEPRLMAAKFVSPYRMAGKSGKNDAADAQAICEAVRRPHMRFVPVKDESQQAMQCLHRTRQGFIEEKTATYNRLRGLISEFGVIAPQSTDALRHMVSAQKSSLPLQVQQCVDDLLEHVDRIEANITEYDRILSRIAKTDHRSQRLMKLKGVGPTTACALVACIGNAHDFKNGRQLAAWLGLTPSQYSSGGKSKLGRITKAGDSYLRTLLVQGARSVLIGAEKRTDSFSRWVCSLVERRGYWRAVVAIAAKNARLRWASLHYGDDFRLYSAS

SEQ ID NO: 314523 - protein, 360 aa, unidentified
MNLQRTSVGLDVHARSVVACGLDRQTGEVFERRLCPDHREILEWIGGLPHPVAVTYEAGPTGFGLARALEAAEICCVVAAPSKLVRPAGDRVKTDARDARHLARLLHLDQIVAVTVPSMQQEAARDLVRAREDCRADLMRTRHRLSKLLLRQGIVYYGGEAWNAVHERWLRRQHFDTAGLQMAYQEAFDAMLVTRDRRDRLDAAITAMAVDSEFTTVVTRLGCLRGVSTLTAFALAVEIGDGHRFTGRSIGAYLGLVPTEFSSGATRVQGGLTKTGNGHARRLLVEAAWHHRKPYRLAIALRRRQDAASPAARARGNAANRRLHTRWQRFDARKKRPVVANAAIARELAGWCWSLATLDE

SEQ ID NO: 314524 - protein, 352 aa, unidentified
MTVTNLARSVTGGVDTHLDVHVAAALDERGALLGVESFATTENGYKKLLGWLSDFGVVELVGVEGTGSYGAGLTRHLQAERVRVVEVDRPNRQRRRLKGKSDPQDAISAARAALSGDACGEAKTRDGNVESMRVLRVARASARKGRTQALNQMRNLVSTAPDSIRAELRGLNVFHLLERASTYRPGSKRDIVSLTKFSLRMLARRAMTLEEEITEIDAILKPLVKETAPELISTLGIGTDAASALLVAAGDNPERLRNEAAFAHLCGASPLDASSGKSQRHRLSRSGDRQANSALWHIVITRMVYDPRTTEYIDRRRKEGLTKKEAVRCLKRYVAREVYGLLPHEKLGLDSP

SEQ ID NO: 314525 - protein, 425 aa, unidentified
MNCNQNEKISQVKFTTLVVGIDIGSTTHYARAFNWRGVELGKVFKFSNTREGFEDLNEWMRYLMKKNEMSDAIVGIEPTGHYWFNLGSYLRNEGILLTMVNPYAVKQSKELDDNSQSKTDYKDPKVIAKLVIDGRYSIPYMPEGVYADLRVVSANRTRIQSEIGQIKNRMARWFSIYFPEYHSVFRDYEAVSSMMVLRVACTPQAILELGPEGVNQIWRNAKIRAVGMKRAKTLCEAARMSIGQHNGMQAAEYEMKLLLADYDYKMAQYNATMEEMERLCQQIPECEKLLAIKGIGLITVAGFFAEVGDLRRFESPRQIQKLAGLSLRENSSGKHKGQTTISKRGRRKLRAVLFNVVIPLIAVNPEFKSLHEYFTQRPDNPLKKKQSVVAISCKLIRVFYAIVTKDVEYDPEKMLSDIHRPMKAA

SEQ ID NO: 314526 - protein, 300 aa, unidentified
MQIVRIGLDLAKYIFEVHGVDAHGKVVLRKTLRRDAVSSFFANLPPCLIGMEASNGAHYWARVLSGFGHQVRLISPQFVAPYVKSNKNDRNDAEAICEAAGRPTMRFVPVKSVDQLAVQALHRIRSRLVSGRTKLANQIRGILAEHGIVIARNIAKLRQNLTYMIEGDGNGLSSLVRALVGELKAELAELDQRIAAYDRRIRELYRNNELCQRLGKIEGVGPLSATALMAAVGDRQGFKNGRQFAAWLGLVPKQRSSGGPRSFVWHQQTWRSLPTHLADPWCTRLAGSSKGQTGSKKPLA

SEQ ID NO: 314527 - protein, 359 aa, unidentified
MHANTVAVDLAKSVFQLAVADRHWRVVERHRLTRAQFERFFVNREVGVVVMEACGSAHYWARCITSLGIEVRLLPARYIRAYVKRNKTDAADADAMLEAARCADIVPVKIKSVEQQALQALHRTRSLWMGTRTSRINALRGFCREFGISIAAGSRLGLEQISRVLADPQSEVPTLLRPTMSSLVEEVRLLEARITELERELSRLAKHSTACETLLSIPGIGLLTATAMVAATSGEVSHFKDARHFAAWFGLTPKEHSSGGTRHLGHISKRGDRYLRMLLTHGARAVLRAATVARRMGRPLDHLRTWALTVQQRSCHNKATCALANKLARICYAVLRDHEPYGATRLNHKLNRMAFEMPA

SEQ ID NO: 314528 - protein, 403 aa, unidentified
MNSVGIDISKGRSTVAVMRPFGEVVISPFEVRHTDSELSELARQLKSLDGETRVVMEATGNYHTPVAKLLHDAGLYVSVVNAKLVHGYGNNDLRRVKTDKKDSVKLANYGLDRWLALTRYVPEEDTRLLLKNCYRQYRQYSKVQTVLKNNLISLLDTVFPNVNRLFSSPAREDGSEKWVDFVAEFWHCRCVSEKSEKAFANKYQRWCRKYGYNFNEAKAHTIHAEASGHIGVMPMSETTKLLVEQAVAQLRATSTALAALKHEMQALTSMLPEYPVVMDMFGVGPTLGPQLIAEIGDVRRFYSKKALVAYAGLDAPPNDSGDVTGRHKSMSKIGASSLRRTLFLVMSVYLQTAPLDEPVYQFMDRKRAEGKPYRVYMMASANKFLRIYYATVKAYLESSEAPA

SEQ ID NO: 314529 - protein, 410 aa, unidentified
MTKIIVAQDAPVLVAIDIAKARHEVLIAIPDKKRRRRLTVLNKLADFNRLVTALREYRRPVRVAFEATGNYHRALAYHLATAGFEVKLVSSVALARTREALNNSWDKNDPKDAQVILHMMEIGNEQYYHDPLVCGTNDIQELSKTHDIVSKSKTELWHRVLTHYLPLYFPEADRFHRSSRSDWFFTFLERYPSPHFITAMGKEAFTADAWEVIGRKVAKERLLADIYETAKSSVGLPVASDSDAISMFRLVLGEGRSLIAQRNQIEDRAVALLKDLPDYQLLTSIPGIGPINALTILAEAGDLRRFGHHRQFLKFCGMDLATIQSGTFRGQTKLSKYGNARLRRTLWMAGQVAILQRANSFRDKFERYIAKDRHNTHLRRKAYTAIAAKMARTVHGIIKHGEPYRPFFEG

SEQ ID NO: 314530 - protein, 330 aa, unidentified
MKNVREVVGIDVSKNTLDATLYHVKQHAVFTNDDKGYAQLLSWVSDQLEVDSYFFIFENTGNYSLKLSVFLSSKDLVYVEESPMRIKRSTGLTREKTDKLDSYMIARYGWMYREELEPSKIKPKEFQELGRLLSLRDQLVRDRSGLKSTLKEQMHLLSSPSTDSCCKLLVRSIKHIDKQVQHIERRMKELLETDDSLQTNYNLLRSVKGVGLILSCQLLYHTSNFVKFNNWRSFSSYCGIAPFEYSSGSSIRRRKQSHYIGDRKMKTLLSMAAVSAIQSDQELRNYYHRKLEEGKHKMIALNNVRNKILARSFAVIKRGTPFVNIAATNY

SEQ ID NO: 314531 - protein, 382 aa, unidentified
MQASTVDTPTAGHSGTIFVSIELSQKTWLVTLHSPDRDRISRHKLEGGDHAGLLGLLENIRARAALKLGAAPKVVSCYEAGYDGFWLHRLLTAAGITSFVFDPASIAVDQRARRAKTDRIDGELLLRTLMAHLRGEPRVVRIVRIPSVEQEDARRASRERDQLVKEQTAHTNRIKALLRLLGMAVGNPRRGDWLGWLEQQRDRQQHPMPPHLLAEVKREHARLMLVREQLAALEAVQAAQALAVPAPMAERRDALRRLKALGPAFTATLVNELFYKDFCNRREVASYCGLTPSPWRSGGIDREQGISKSGNRRARHKAIELAWLWLRHQPDSALSCWFRARTASAGKRAKRIAIVALARKLIVALWRYLTTGLVPEQATMKA

SEQ ID NO: 314532 - protein, 451 aa, unidentified
MAKRGEKRERRSMVLQPDAAGIDIGAEEIFVAVPPDRDEESTRRFSSFTRDLHALADWLGRCRIQTVAMESTGVYWIPLFQILEERGFKVYLVNAHYLKSVPGRKSDVSDCQWIQYLHSVGLLRASFRPPDAICAIRTLWRHRGSLLEMAAEHILHMQKALSQMNLQLHHVLSDITGTSGQAILDAILSGKRDPVELAQLCHSRVKSPRDKVAQALVGDYRPEHLFTLKQSLAGYRYYQKLILELDQETARLMQALPSATEHPMPPRTKAAAYHPQGNDPQFDLRSELYGIAGVDLTDIPGVSAATAQVILTEIGTDVSRFRHASAFASWLGLCPEKRVSGGKMLSCKTRKVKHRAATALRMGANSLCRAKGYFGEFFRRMRAKLGTAQAITATAHKIARILYHVLLTKEPYAETVFHRCDEQAQRRAEIRLRKQAAHLGFQLLPITTTGE

SEQ ID NO: 314533 - protein, 340 aa, unidentified
MNVTTVGIDLAKNVFSVHGVGREGKVLLRRSVGRADLLPMFAQMPPCLIGLEACSGAHHFARQLRRLGHDARIMASRFVAPYRKSGKNDGNDAEAICEAVGRPNMRFVAVKSVEQQAVLVLHRVRKEVSDQRTALINQLRGMLCEFGVVLPCGRYSFRHKLPAVLEDTGNGIPHLARRLFREVNERIGALDVQILAYDREIEALARRSEAARRLMDMPGVGPVTATAIVASVADMKVFKSGREFAAWLGLVPRQYSTGGKVRLGRITKQGDVYLRTLLIHGTRAVLAALGTKDDRLSKWIRSLIERRGYRKAAVALAAKHARMIWAMLAKGEPYRCASSA

SEQ ID NO: 314534 - protein, 342 aa, unidentified
MVEGTEGSHHKEGSKKMSKDSTVCAGIDTGKYKLDVVIDASADRLQVDNSPEGYRSLSAWLRQRGVERIGIEASGGYEQAVVSFLRADGFVVIVFQPVQVRAYAKFVLQHAKNDNIDAALIARCTAAATDIHEPPDTRLAPLAQRLTMIEQLTQDVAQLKTRREACRDQRIREFWKQEIDRLKRLLQAELKQLVAAIGEHRDLATRLDLIASVDGVGLRTAVAILVRMPEIGRVTREQAAAIAGLAPYDDESGQRRGLRQYQRWAPTIAAEPLRGDIAGGLLLECPIESFVQATDHSRKNSQARPRRLRPQAPNLCQHSRRPRDPLDVRASNHIMVAQHEAD

SEQ ID NO: 314535 - protein, 433 aa, unidentified
MGLIVPTTIHPEQEDQPLPYEWFVGIDWGAQQHQVSVLDRDRRRVGERVVDHDGASLARLADWLWTLSAGQPQRVAVAIEVPRGAIVEGLLERGFHLFALHPKQLDRFRDRHSVAGAKDDRRDAFVLADSLRTDQPSFRRLQLEAPQFLLLRELSRAEETLLAEFRRSANRFREQLHRFYPQMLQLCAAADAPWLWDLITLAPTPAHAMLLSEEQVQRVLKAHRIRRLKATEVLACLQAPALPVAPGTADAAQAHCGFLLPCLRVLAEQLLACSHQVSTLLRTLADEPGKGEGPSDVAMVQSLPGVGRKITAWLCAEATQPRAERDYQMLRTHGGVAPVTKQSGKRRQVVMRHGCNPRLRHALYHMARIAMQRDAHFGSVYAALRAKGQRHGQALRNIGDRLLRILMAMLRDRTGYDASRIRCKPVVEMGQKM

SEQ ID NO: 314536 - protein, 326 aa, unidentified
MMIFENAIGIDVSRNTLDAFNYKTAGKIAIDNTTRGFKQLLKWVRPLDKVIFCFEHTGMYSLPLAMFLTEMKHPFVMVAGLEIKRSLGLTRGKSDQIDARHLAKYAYRRREEITPTILPSEGIRTLKRLLNLRTKMVKQRAGYKASIREFSRFLGLAKNDQVIRTQTKMVRELSKQIKELETEMKAILSADKALNRMFKLATSVKGVGLIVGVSILVYTNGFMAFENWRKFASYSGIAPFEYQSGTSLKGPKKVHYFANKRMKALLSTAAFTSIQFNPEMKLYYHRRLQEGKSKMSTLNIIKNKILARVFATVKRGTPYVQTIAYA

SEQ ID NO: 314537 - protein, 343 aa, unidentified
MVHYVGLDVSLKQTSICVVNQLGLIVREGVVDSEPEAIAAFVRLNAPGAVRIGLETGPTATWLWTELKRLGLPVICIDARHAKAVLKMQINKSDRNDAAGIARIMQTGWFKEVRVKDLDSHSVRALLASRALLVKIKRDLENQIRGLLKNVGLVIGRAKFNVFTVRTEELIEDRPELIAVVGPLLKARKAIEQQTDDLDRKVLKLARYDAQVRSFMTVPGVGPITALCFKATIDDPTRFKRSRSVGAYVGLTTRRHASGEVDWTGRISKCGDAMLRSYLFEAAGVLLTRVPKWSALKAWGIRLAKRNGLRKAKVAVARKLAVILHRMWIDETEFNWSKKEVAA

SEQ ID NO: 314538 - protein, 363 aa, unidentified
MTRKRLSSNHLLDFIGVDEKTPVWIGLDVHKKSYHVALRRADGVCQSWVSPADPIVLARRLSTISQRISLIVYEAGPTGYCLERVLKSNGYKVAVVAPSRIPRSVTNVAKTDKLNCLKLAEYAAKEMIEAITTPTEQESAERSVLRRRNQLVDSTRKTKQRIKSFLLFHGIEEEYGLRYWNRSAKSKLSKLPLQSDLKFVLKSLLRQLSYEEEELAKITNRLSRIAKRRQHGEVVKNLKTVPGVGDIVACAFRTELFRPERFRRAEEVCSFLGLAPAIRQSGEKRQGGWLMRSGQTRLKSLLIEAAWMWRAKDPWARKKYQIHLSRCGIAQKAITALARRLAVILWRLSVENRAYVMLQVDSV

SEQ ID NO: 314539 - protein, 340 aa, unidentified
MAPSRVSAFQPEQLHDAVHSGRSTTGTDLMTIHPICIGIDVAKAHLDLFHPVTGHHRIDNTGAAIEQWLQPLTGTDPFIVFEATGGYDWVLRCALGQARIRHARLNPTQARRYAQATGRLAKTDRIDAAMLCELGERLAPPPQDAVDASRKHLSDLHKRRDQLIAERSAEKVRLSEARGLCQTVLASLATHIAWLDEAIDELDAAILALIEQDSELQRQAALLRTAPGIGFVSAVTLLAQMPELGLRRPGSIAALCGLAPFNCDSGAMRGQRHIRGGRGRVRRALYMAALSAVRTNARIRAFYQRLLDAGKAKKLALIAVARKLITILNAMLRDAQPFIG

SEQ ID NO: 314540 - protein, 340 aa, unidentified
MGWALEEVVENQVFVGIDVSKERLDAALRPRDESFKVANNPRGIATLIKRLKKWRVSRIVLEASGGYEIAAAYDLAAAGLPVAVVNPRQVRDFARATGRLAKTDAIDARVLAHFAEIIQPQTRPLPDMQTRELMALVARRRQVVDMLTAETNRHGRAVDAVNRAIAAHVRWLRKQLADLDAALERAIRNSPLWSEKARLLRSVAAVGSVTVITLLSHLPELGTLNRRQIAALVGVAPFNHDSGKLRGTCAIWGGRAQVRAVLYMCTLGRNPQLQAFYARLIAAGKKPKVALTACIRKLLIMLNAVLRQRIPWNPELATLPSPFSAARGGAVIGAGSIATA

SEQ ID NO: 314541 - protein, 347 aa, unidentified
MTIVSTIGIDLAKSVFQVHGVDAAGNVVIKRQLKRKGVVAFFTQLPPCLIGMEACGSAHYWARELRKLGHTVKLMPPQYVKAYVKRGKNDAADAEAICEAVSRPSMREVAIKTVEQQSVLMLHRSRDLLIRQRTQTLNALRAHMAEIGVIAPAGTDGIAALVAIVSDAADPRLPGVARVALQALAGTLASLGGAIAALDRAILAAHAADATSRRLETVPGVGILIASAVTATVGDARVFKSGRAFSAWLGITPRLDGTGGKVTLGPITKQGDRYLRRLLIMGATAVLGHAKRHPEKQPWAIGLLGRMPFRQAAVALANKMARIIWALMVRGGTYTPKHRPAVLAATA

SEQ ID NO: 314542 - protein, 420 aa, unidentified
MTTPAPAVYIGLDVGKSDHHAVALTSNGETVYDKALPNDETRLRAILDELLKTHGPVLLVVDQPATIGALPVAVAQSCAGVEVAYLPGLAMRRIADLHPGSAKTDARDAAIIAEAARTMPHTLRAIRVDDEQIAELAMLAGADDDLAAQITAASNRLRGLLTQIHPALERVLGPRITHPAVADLLGRYPTPAKLKTAGPGHVRARLCKHAPRLAAPLTEEIFQALGQQTVVVAGTEAAATVVPILAEQLAGLIHQRNKLATQVEAVVEAHPLHPVLISMPGVGVRTAARILTEVVGKDFADAGHLASYAGIAPITRRSGTSIRGEHAPRGGNKRLKRALFLSAFASLHHPASRAYYDRKRAQGKRHNQALIALARRRTDVLYAMLRDGTLYEDPTMPQTPSTVALAVLTGDVDRVDVPIS

SEQ ID NO: 314543 - protein, 381 aa, unidentified
MRKDTRHVGFDVDSEKIAVAVAEPGMDGEVRSLGTIASQEESVRRLVKKLGPASRLRVCYEAGPHGYGLYWQLSKLGVHCDVVAPTLVPVKSGDRVKTNRRDALKLARSYRAGDLTAVWVPDAGHEALRDLVRAREVAKKDQLRARHRLGKFLLRRGLRAAGGMKSWTKSHLLWVKTLRFEHAAQEATYLDYLHEVEHAAERVARLDRAIDQAIEALPAGMRAVIAGLQALRGIKQVSAATIVAEVGPLSRFPRPKLLMGYSGMVSSEDSTGNSIRRGAITKAGNAHLRRIVGEAAWAYQYRPAMSAEMKKRQEGLSEEVKEIAWKAQHRLCTRYRRLMAKGKLRQKVTTAIGRELLGFIWAIGMQIEKEQRLTRTGARAA

SEQ ID NO: 314544 - protein, 383 aa, unidentified
MRHGGILIEANDSEGETMKKHTTNNQSLSADVSACSTVAVDLAKRVFQVAGEDALGQVIFEERIKSREAFQVFLRELPPSVTVLVETGPGAQAWARLLQMQGNPVRILPAQLVASHRSGPKNDRNDALAILRAGRDCKISAVPIKSAAAMAMQALHRARQGYVRRRTAVGNQMRGLLLEHGVAMAQGEVAISQLVPRILEDATQPLPDLLRELIAELLGEWDQMGDRVNVLTGRLEMAAKEDETAKRLMTVRGVGPIIATALIAKQTEPERFANARLFAAYFGLVPSQHSSGEKTRLGKMSKQGDAYLRSLTIQGAHAVLRQLRPDSQQPDDQRLQRWINRLGRKEAAVRLANRNLRILWVLLQNDQTYRRQPGNGQEATMSH

SEQ ID NO: 314545 - protein, 330 aa, unidentified
MKTFAGIDIGAQSVVLCLRRGGRTLSAETFARTEAGYRAIIRKLGRKVACVVLEATGIYYLDLAMALQRAGLPVAVINPRSFHHFAKLKLNTSKTDAVDAALLAEYAECMKPALWRAPDEVLLGLRDIGRQINRLTAARTQAKNRLHALRAKASTLPLLIEDEVEGIAQLDQRLQRLTEAALELLGQQPLYQQHLLNLQQAKGIGQTSAIALLAELCVLPQDMRAAQVSRYAGLDVRLCQSGTSVNKPGRLSKAGNAYLRSALYMPALSAVRHDPNAKAFYLALQLRGKKKIQALCAVMRKYLTGIWACIKLGVPFDSSKLFSEKHLADA

SEQ ID NO: 314546 - protein, 361 aa, unidentified
MFTERTSVGLDVHARSVVAAAIDGVTGEVFRERLTPGNDEVINWVRSLPGPSAVAYEAGPTGFGLARAFTTAGIRCEIVAPSKIQRPSGDRVKTDARDAMHLAKLLRLDEVVSVAVPSLEREAARDLVRAREDVRGDLMRARHRVSKLLLRQGIVYYGGRAWTGTHLVWLRRQHFDVPGLQLAFDAEQEAVLQAEARRDRLDKAIVVMAADSEFTPVVHRLGCLRGVSTLTAFGLAVEVGDWDRLTGASIGAYLGLVPTESSSGASRSQGSITKTGNSHARRLLVEAAWHHLKPYRTPGATMTARWELAPAAARARGHAGNQRLHQRWLHFNDRKKKPVVANVAIARELAGWCWSLAVMDD

SEQ ID NO: 314547 - protein, 401 aa, unidentified
MELDTSRTPVGIDLAKDSCAVAISDGDSQVVRAFPLSQEGLADLIHFLEPYGPFPEAFVFGLEASGPYTEPLLSWLLQRNARVLQLNPLLISRFRRAQSLRRTKTDAIDARTILHFVAQLPPSSMQPCEPGDDLQVLAAEYEQITQQVARLKTQIRQQVHALFPELASSSSLFSQRILGLLLAFPSAQAIAKATPAQLQAACEDLPCGRRSRITAQHLHDSACASIGFTTPQRQAVLQSKIRQLQSLVQESSTMRKALIRAVRAAHPTTWRLLLSIPGVGPITAALFLAQVRSLSRFPSHRQLSAFIGIDPTTYESGQYKGQGHISKRGSPHLRRTLYLMAQSVARYSNTFRLYMAQLRDRGKAYRVAVIACANKLLRVIMALNRSQNLFVDSPVQEVSHS

SEQ ID NO: 314548 - protein, 424 aa, unidentified
MKNTQNEKILQIKNETLVVGIDIGKETHYARAFDHRGLEQAKLLRFSNTAQGYETLETWMQSIMQQKEKTEAIVGFEPTGHYWFTLGDYLKRKGYKLGIVNPFHVKCTRELDDNSQTKSDRKDPKTIAMLLKDGRYRDVYIPADLYQELREAVSERERLQEQIIGISNQVIRWLDIRFPEFTSIFKDWSAKTAMATLKHVPTPAKVAAAGAEGVLKIWQENLKRSSLKKAERLVRVAVESIGRTAGSEAAEVALMNLLLQYELITTQRQQLEELMAELMLRVPHAGKLLEIKGVGMMTAAVIISEIGDISRFQDPRQILKMAGLSLKENSSGKHKGKTTISKRGRRRLREGLFRVMIPILATNEEFRAIHHRNLTREKNPLNKMQSIIALCGKLVRVLYALLTKGCTYDAAKMTQDRNRSMKAA

SEQ ID NO: 314549 - protein, 484 aa, unidentified
MSKRKPSTFERLREGKSLNRQERRELERRLNAVDPGLDVIHPDAAGIDVGDKSHFAAVPEGRDPRPVREFGSWTAALREMAEWLKQCGIRTVVMQSTGVYWMAIHDVLQEYGLEVNLVDARGTKNVPGHKSDVQECQWLLKLHTYGLLRNCFLPPEEIRGVRTLWRLRSQHVADAGRCIQHMQKALIEMNVQLQHAVSDIAGVTGQAILQAILDGERDPHKLAALRDPRCQASEEEIACHLEGNWREDSLFALEQAMAAYKFYGRQMAVCDKRLQRYMATLPSRHQEAEPGAVASPGKGQSKSKAKGKGRKPRKNQPAFHLEAELERIWGVNAKSIDGVDVMTIQTVLAEVGPDLSAWKTEGHWTSWLNLVPRRDISGGKVIRHVKLGNHNRVGNAFRMCAQSLIRSESYLGAKYRYLRARLGGRRAVKAMARVLACIFYRMVTRGLNWVKRGSEEFEKKKAQRELESLQRKARNLGLQLIPAV

SEQ ID NO: 314550 - protein, 368 aa, unidentified
MNRKSSNLFVGMDVHKDSIDIAVAEGAGEVRHHARIGGEMNALSRAVRKLESLGRPLVFVYEAGPCGFGIYRMLKARGHECWVVAPSNTPRRVRDRVKTDRRDSLKLAGLARAGELTPIYVPDVADEAMRDLVRTREDAVAMQRQARHRLAALLLRNDVRYAGKTAWTEAHRRWIARLILPATPQRIAFEEYVQAVKESTERVQRLSRAIEHELVHWRWQPVVDALQACRGIQLIHAARIVAELGDLSRFSHPRELMAYLGLIPSENSSGDRRRQGAITKAGNNSARRALVEAAWAYRHGPAVSSIIVRRQSGLPKAAIAIAWKAQLRLCARFRRLSARGINRNKIVVAIARELSGFVWAISQQVKPN

SEQ ID NO: 314551 - protein, 339 aa, unidentified
MNLYFIGIDIAKDTFVASIYHRPKEPVLTKENFSNDKCGYVKLIIWLEEHHITKANCQVCLEATGVYSQGVSYYLYSQGYRVSVESPLRVKRAFHPAGHKSDPVDSRKIAEYAYRFQDELIPWQPKDDLLEEIRQLLGVREQFVKQQTAIKNAIAAYKLQKVQVLLIVKAHRETLGQLERQIKRIEKEIERLVREDPHILEKFHHLKSIPGFGMLLPVHLLVMTDGFTKIDDYKQLASYIGIVPYEYRSGSSIHKKPRIRHYGPSASRKLLRLAAQSVATHNASFRRYYLRKQAEGKAKALVLNNIANKLLKIACAIIRDNTRYIKEHRSIHPMYVNIT

SEQ ID NO: 314552 - protein, 451 aa, unidentified
MNKNVSMQIINSNAAGIDVGSRSHFVAIGQGSGDVREFGVYNEDLKAIAQWLLANSVTTVAMESTGTYWQSLFAVLQNEGLQVILCNGKFTKNIKGKKTDVQDCQWIQKLHTIGLLSGSFLPDEATEQLRTYCRHRGNLLDGAADTTRKMQKYLRLLNLRLDVVVKDVTGLTGLSIIGAICKGEINAAALASLRHGNCKKSEEEIAKALQTNGRKDYLFALKYEYKMYQNLQSAITSCDAEIEKMLNEQIRNNDDKQQHFIDKKVHKRINKNSPKNIDINLMSYQYFEGVDLLAIEGVSHSTVLTVMSEVGLEGMKKFDTAKQFASWLRLAPNNKISGGKVLSHKVPKGSNRLKIALRNAANAIGNLKDTPLSNFFNCINFRKGRVSAISATARKLAVIIWNMIIKKLPYNNEHGYEFLDQKRKRKVKEMRKLIHKFDIKTDELGLQISGL

SEQ ID NO: 314553 - protein, 346 aa, unidentified
MLADELDYVIGVDPHRDSHALAVVDVRSGGVVFEATALADGEGYASVLRLADQHAPGRRAFAVEGTGSFGAGLTRFLVSQEERVLEVGRLRRERRSGKSDALDAIRAARSVLGQTRPARPRAGGEREALRALSAAREGAVTARRAGLCQLRGLLVSAPEPLRAELRSLTRAQLLRRLAAVRPEGRQDPELRGTLLALRALARRVKALTVEERELAREIETLTRKLAPQLLAQPGVGPLAAAQVLISWSHRGRITSEAAFARLAGCAPIPASSGQTVRYRLDRGGDRRLNRALHMILVTRRRAHAPTIAYIERRIQEGKSRREATRCLKRYLARNLYRLLENPPMPT

SEQ ID NO: 314554 - protein, 374 aa, unidentified
MANIIEAFVAFDTSKLRNAVAIAEAGRAGEVRFLGEIENTEAAITKVVRKAAGKYGRLTFCYEAGPTGYGLYRQIKRLGHECMVVAPSLILKKPGERVKTNRRDAVSLVKQLRAGDLTAVWVPDPRHEAMRDLTRAREVAVEDLRCKRQQISAFLLRQGLHYPGERTWTKVHRNWLMSQKLEYAEHRIAFEEMLLAMRQAQERIERLEQAIRVAVPDWSLAEVVTALMAMRGIDFISATAFLAEIGDLSRFPTPRELMGYLGLVPSEASTGDTIKRGPITKAGNRRARRILVECSWSYQHPPRVGKEKQERVAAAPQAVREIAWKAQCRLSARYRALTRKGKLKTVAVTAVARELSAFIWAINRQIINPRAAAR

SEQ ID NO: 314555 - protein, 370 aa, unidentified
MLAESHDDEQIIARVAALDIAKAELVCCVRVPASAGGKRRLQEVTTHSTMTQALTELANRLVEMGVQRVVMEATSSYWKPVFYLLEAHGLDPWLVNARDVKHLPGRPKTDVLDAVWLCKVAERQMLRPSFVPPWPIRRLRDLTRYRTDLVSARTAEKNRVEKLLEDACIKLSVVASDIFGVSGRAMLAALVAGERDAKVLAQLARARMRGKIDRLERAFDGHFADHHRFLLSRMLARIEGLDADIAAVDAQIDVQLAPFAEAAARLDEIPGIGPVAAAAIIAEIGVDMSRFATAGICARGRSSPRASTHRRVSPKATHLLDMAIRTWHVSWVRPPSAPPRQTRSSPPATAASPDAAANPEQWSPSVAPSW

SEQ ID NO: 314556 - protein, 348 aa, unidentified
MKASLFAGIDLHSNNLTIGIMDQDGRRLKHQKLDCDLTEVVKFLKPFKSRFKSLAVESTYNWYWLVDGLRAQAYPVVLANPAKIEQYSGLKHANDKSDAYFLAELQRLNILPTGHIYDPILRPVRDLLRRRLQLVQHRTALLLSFKSLYHRTTGGALSLSRLKGMELAEVKTLYTHPANCLIATVQKEHIEQLDRSLERIEKAVLKSARELPCYQRLNTLPGIGRILSLTITMEVGEIKRFNAQGNLASYCRTVASQRLSNGKKKGDNNGKCGNKYLAWAFVEAANFAKRYDDQCRKWFDRKAAKTSTVIATKALACKLAKAAWHVMAQDTDYDPARMFPELAQHRTQ

SEQ ID NO: 314557 - protein, 414 aa, unidentified
MDEYAAYVGWDWGQQQHAVDVAAAREVPWQATIEQKPEAIRAFVDQLRKRYGGAAVAVCIEQGRGAVMYALMQYEFLHLVPINPRAVARYREAVRLSGATDDPTDAWLIRELVQRHPEHFAVWSPDDAVTRELRLLSEWRRKLVDQSTATSQQLRDTLLQYFPQVLEDWVGELKSPMAAAFLEKWPTLESVQRARPDTVRRFYRQAGSRSAEKIEQRLEQIRVAEPLTRDAAVIAALSVVTICLARQIRSLENSIADLDQRIARIWADHPDRQIFAALPGAGPALGPRLAVAFGTDRAKWANASSMQCFSGVAPVVEQSGKQRWVHARWQCPTFVRQTFHEFAGQSIKQPGWARQFYDQQRAHGCGHHAALRALAFRWIRVIYRCWKDRKPYDEAFYSAALRRRGSPLAAALVA

SEQ ID NO: 314558 - protein, 350 aa, unidentified
MLIIGCDYHPGFQQIAFLNTDGGELGERRLAHREEAEQFYGKLKEQNLCVRVGMEASGHARWFERLLHNLGFELWIGDAAEVRTKRVRKQKTDRQDAQLLLRLMMEDRFPRIWVADAQNRDLRQLLWHRHRLVQMRTRVMNQLHVVALNEGLRRKKALWRPAGRHELESLTLAPWASRRRQDLLDLLDQLTPKIQELTLALETEVGKRPVTRRLMTHPGVGPLTALAFELVIGTAQRFHCGKQIASYVGLVPSEESSGDRRRLGHISKQGNALLRFLLVEAAQVTVRSQPQWRSKFFHLAIRRGRKIAKIAMARKLAVHLYWMWRQGLDYGQFEKLGSHAGEPGNRHGVQ

SEQ ID NO: 314559 - protein, 421 aa, unidentified
MTQTSHDTFAAFVGLDWADAQHDGCLQGAGSAQREYFQLAHTPEAIDAWVTTLRTRFYGQPVALCLELTKGPLVSALRKYDFLVLFPLNPLTLARYREAFTPSRAKDDPTDAELQLELLLTHRDKLRPLQPQSPTMRALAQLVEHRRRVVGDKVRITNRLPSTLKNYFPQVLHWFQDKDTRIFCDFLSRWPTLKAAQLARRSTLETFFRDHHVRTADVLATRMRAIKTATPLTMDEGIIAPNVLLVQTLVSQLRVTLEAIEAFDHAIAQRAQHHPDFPLFQALPGAGPVFASRLLVAFGEQRERYASAAALQKYAGIAPVTERSGKKAWVHWRLQCPKFLRQTFVEWTAESIRHSFWAQVYYQQQRDKGNTHQAAVRALAFKWIRILYRCWQERTPYDESTYLQALMRRNSSLIQNRVKAS

SEQ ID NO: 314560 - protein, 405 aa, unidentified
MNAVGIDVSKGKSTVTIRKPGDVVLMSPCDIPHTQSAINDLIKQIKSLEGETKVCMEHTGRYYEPVATWLSDAGIFVSAVNPILIRDFGDDSLRTPKTDKADSKKIARYTLDRWAKLKQYGIMDKTRNQLKTMNRQFGFYMAQKTAMKNNLIALIDQAYPGANDFFDSPARNDGSQKWVDFIHTYWHVDCVRSKSLNAFTEHYQNWCKRKNYNFSAEKAAKIYQISSDLIAVFPKNDITKMLIWQAVALLNTASKTVESLRSKMNELASTLPEYPVVMDMNGVGATLGPQLIAEIGDVSRFTHREALTAFAGVDPGKNDSGKHIQNSVRTSKKGSPYLRKALFQIMDSLIKRSPVDDPVYAFMDKKRSEGKSYYVYMTAGANKFLRIYYGRVREYLSNLSNNETI

SEQ ID NO: 314561 - protein, 392 aa, unidentified
MRKPKKQKMPPLNDLSRSLTAFDPNQTLTVVVELSKKNWLVAGIIPGVERQPLKKLPTDENELLKLLERWRAEAEKAGHKITRIAVAFEAGRDGFWLARWLRARGIEAHVIHAASVAVPREHRRAKTDRLDTQLLKRAFLGWLRGERDHCKMCAIPTFAEEDAKRPHRERETLVGEHTTIINRIKANLARLGIRSFDPQLEKASLEKLRTPEREPIPSNALAELARDLARKQFVAEQIQQIEKVRLEQLKQAPKIGTNLMVLLLMRVIGIGIETADMLVKEILSRHLRDRRAVARYGGLTGSPDESGSSSREKGLSRSGNARVRRGMIQLAWRFLRFQNESALAKWFEMRTKNARTSRKKMIVALARKLLIALWHLVRDGVVPEGVVLRPAH

SEQ ID NO: 314562 - protein, 466 aa, unidentified
MTFVNGELQARLMTRVRGLDPQRCLVVPVDVGKAIAVALVADHYGEIVVAPFEFALTETGFAVLSAAIVRAQHERDALIVRVGVEAAGHYHRTLVARLRAAGLEVVELNPRAVKDARGQQLLRTLKNDARDCGAMAELLIRGSGRAPQCRDEALAAQAAWVAHRRRKVAAQVILSNQIHGQLDLIFPGLTGCFAHGLDAASLRVLIRDLPDPDRVRRLGVDGVLRFVRRRGVHMTRPKAEHIVQAAHVALRLPSTERRAPLVVLAADWALFEALDQQIHDAAAELAALLPKTPAGVLLGVPGVGVLTASSYGAAIGDPNRYRDAAAAYRASGLVPISYESAGRARPSTGISREGSVELRRAIVDLGRGVGLHHPDFITYRRQLVARGKPPLVALIAVGHRAHRLAFAMLRSQRPFDASRWTRAVAAHRHPVDEQARHGEPTALGGPPARRDLPAQHTFTHAEASSN

SEQ ID NO: 314563 - protein, 347 aa, unidentified
MTIVENHTQITGGVDTHLDFHVAAAVDANGGVLGVETFSTRGAGYAQLVAWLQRFGPIDRVGVEGTGSYGTGLTRYLRSDGIAVVEVDRPNRQARRRHGKSDTVDAIAAARAALSRAATGQAKHRDGNVEAIRVLMVARRSAVDERIKVLNQIRHLVLCAPEPIRARFHGLTSTSLLNQTSSLRPRDHGDVVDYTTLITLRELGRRAKNLHDENLRLNKLLRPLIRRTSPGLLEVYGVGYDTAAKLLVAAGDNPERLRSEAAWAHMCGLAPIEASSGKTKRHRLNRGGNRQANSAIYHIMLTRLSYDQRTRDYFARRSAEGKTNGEICRILRRYIAREIYKQLPHQT

SEQ ID NO: 314564 - protein, 352 aa, unidentified
MRIIGCDFHPSYQQIAMVESETGVLWEGRLEHEQGEARRFYQGLAGQTVRVGMEAVGNSQWFEKMLAEMGHELWIGDAAEIRRLVGRKQKTDRRDAKHILTLVLDGRFPRLWVPSVEIRDVRQLLRHRQKLVEMRTQVKNQLQHLALNQGVRLKRRLWSRKGRELLEKLPLEGWTARRRSDLLAMLDRLDEQVGDLDRAVRTEAEQRPEVRLLMSHPGVGPVVGLAFVLTIGPVERFPRGKFVASYVGLIPKERSSGDHQRMGSISKQGNTMMRTLLVEAAQNAARFDEELRRDYGRLKARKHSAVAKVMVARKLAVRMYWMLREKKTYGELYAQRPVAHMQGSPSHSVVAV

SEQ ID NO: 314565 - protein, 355 aa, unidentified
MPSKADTAVARTIGIDTGKNTLHMIGLDEKGAIVLREKVSRTRIATRLANVPPCLIGIEAGMASHHVARELVALGHEVKQVPPAYSKPFRQGHKNDFRDAHAVAEAAGRPSTRCVPIKTDGQLDVQALHRVRSRLIINRTAVINQIRGFLLEHGIPVRQGHHFLRQQLPQLLAARADVLSPRLIRIIGDLMADWNYLDERIERLTDEIEALARADEGCQRLITVPGIGPLISSAMVAAIGNGAAFCKGRDFAAWLGLVPKQMSTGDRTILGRITKRGNRHLRMLFIQGARAILLRPASWAKHSFGSWLAAAARRLHRNVLSVALANKLARIAWTVLAQGRRYEARVEPRVEPATA

SEQ ID NO: 314566 - protein, 430 aa, unidentified
MTKFHSTPPDAVLVAIDMSKHRQEVLLERPEGGRRRRMTVMATKADYDRLADDLTTIGRPVIVGFEATGNYHRTLAHRLLSAGCELRLISSVALARTREALHNGWDKNDSKDAQVILHMLKIGATQRYVDPLAAGINDLQEMSKTHEAISKAKTQTWHRILTHYLPLYFPEIERFAGNSRSDWFLALIERFPTPGSITSIGREAFTEQAWPLIGRKVSKARVVNDIYETAGASIALPIDEDSTAVTMFRMVISQARTLIQQRNEIERIAHDALATNSDYQLLRMIPGIGPINALTILAEAGDLRRFSHHRQFLKFCGLDLATYQSGIFRGRTKLSKYGNARLRRTFWMATQVAIRQPNNSFRDKLSRYVDGHADDPDRRRKAMTALTAKMARVVHAVIKTGTEYRPFVERADTRWKDPSLLCREGATATL

SEQ ID NO: 314567 - protein, 353 aa, unidentified
MGEPITVFVGLDVGDKFTDFCVLDEAGAVVETGRFRTIRKSLESELRSYGRVRVVLEVGTHSRWISTVLSDAGHEVVVANARQVQLIWKRPKKTDKVDALLLARLGRMDVELLAPIRHRGREAHVDLACLRARDVLVGARTKLINHVRGALKPFGVRVEGSSSADSFPDAAQVVLPDELTPALGPMLEALHMLNAQIAAHDKQIRQLARNVYPESQRCSQVFGVGDLTALAFQLTIDDPTRFKRSRFVAAFLGLTPGKDQSGESDPQKHITKAGDRFVRKLLVECANRILSPLGGLDSDLRRWGLKLAERGGKNGRKRAVVAVARKLAVLLHRLWLSGEPYRATGYKQAVLAT

SEQ ID NO: 314568 - protein, 407 aa, unidentified
MLFVGNDWAEAHHDVELVDAQGTVLVRRRLPEGVTGLATLHGWIADHLGEDDEPDQVLVGIETDRGSWVQALIAAGYTVYPINPLQVARYRERHGVAGAKSDPGDAHVLAEIVRLDRAHHRPVAGDSTIAEATRLAARAHQSMIWTRQRSTNTLRSLLREFYPAALEAFHEDLAGRDALAVLKVAPDPERGRRLTVSRVKALLKAAGRQRNLQTRAAEIVAALRTEQLPTRAGLVEVYAVSVGALVAVITEMVTQTGVLEEQVKQGFGQHPDREIYLSQPGLGPILAARVLAEFGDDRDRYADARARKNYAGMAPITKASGTKRVVLARWARNRRLADALYQQAFAALTGSVGARACYDRHRARGATHHQALRTLANRLVGILHGCLNHHTLYNEATAWPTKHQLAA

SEQ ID NO: 314569 - protein, 354 aa, unidentified
MDIKYIGMDVHQETISIAVMKDDGGLVMESIIETKASTILQFIHGVRGDLHVTFEEGTWAAWLYDLLKPHVTELVVCDPRKNAVMKQGNKSDKIDARKLADLLRCGYLRSVYHGENGLRTLKELARSYLTISKDLTRVMNRVKALYRSWGILCGGQQVYAPRHRAEWLNKIGEAGVRRRAEFFYQQLDALRALHQAVRRDLLAESRKHGATKVLRQIPYIGPIWAALLIALIQTPDRFRTKRQLWTYSGLAIETRDSAQHRYVAGQLQRSKKPQQVRGLNQNHNHDMKTIFKSAATMASSREGPFHDFYQGLLTKGMEPAMARLTLARKIAAITLILWKKGAHFDAEQLKPQAA

SEQ ID NO: 314570 - protein, 416 aa, unidentified
MNAVGIDVSSRKSTVAVLRPLGEVVCLPFDVTHDIAGLASLAEKLKALDGETRVVMEHTGRYYEAVEKALHEAGLFVCAVNPLLIKEYGANSLRRVKTDKADAVKIARYALDNWADLRDFTPMDAIRYDLKTLNRQFQLASKQRTASANNLIALLEQSFPGIRKCFDSPVRSDGTQKWVDFAHSFWHVDCVRKQPFAAFCERYRKWCKRHAYLFKLSNAEEVYALAKRAVVLTPKSKVVKVLVQEAANQLSSISRSVEVYRAEMDRLAAMLPEYPVVMAMYGVGKSYGPQLMAEIGDVRRFERKQALVAFAGIDPMPNQSGDKNVRSNKSSKRGSPYLRKTLFNVIRTYLQCAPQDEPVFQFLNRKRAEGKPFYVYMLAAANKFLRRYYAKLRDYFASLDTLQPVDPIPTILKATL

SEQ ID NO: 314571 - protein, 414 aa, unidentified
MEVMHERCAGMDISKRDVKVCIRVPGGRGIGYRNEVTTFGSMTDQILQLRAFLLEQRVTLVVMESTGDYWKPFYYLLEDAPFEVVLVNPRHVKVLPGRKRDVSDAQWLADLGAHGLVRGSLVPPPPIRVLRDLTRTHADLTRDRAREYNRLQSVLEDAGIKLTAVATRINGVSCRLMLDALVAGERDPKVLAGLAKASLRGKRDQLTMAMTGRFTDHHAFMLKLHLQVIDQLTASIDELIGQIEVVTEPFRAQLQLLITIPGVSEQIAVVIIAETGADMSKFPTAGHLASWAGICPGHHQSAQVSKKAKTRPGNSYLKGALGQAAMSSMQVHDTFLQDRHHRLKPRIGGLKTIVALEHSILRSIWHMLVNNQPYRELGAGYHQRRHPQNAIRSITRQAQRLGYAVHFEPLPTTA

SEQ ID NO: 314572 - protein, 319 aa, unidentified
MGKNKVEYEQVIDRGCGLDVHKDTVVATVMGKGIITETRTFGTTTSSLNDLGEWLQNLKVTDGAMESTGVYWKPVLHVLRAYPLNLIVVNARHIKNVPGRKTDKADSQWICKLLISGLLKGSFIPPENIQEIRDLHRYKKKLIGIIASEKNRIIRVLEDANIKLSSVVSDTSGVTASYLIKGLIEGRKDLEKLIAECYHRKLQASPQQIKEAINGRLTAHHGFILKSMQKHIASVEEQLAEIDAEIEKYIKDFEKEIELLQTIPGVGKEGAIGIVSEIGVDMEVFPNEHHLASHSGMCPGNNESAGKKKVQKLDMGIKI

SEQ ID NO: 314573 - protein, 425 aa, unidentified
MNQSNHYTQNDYAAFIAIDWADKKHVFSLQVTGQTKKEAGTLEHKPEVIGPWVAKLRERFAGRPLAVAVEQSRGALIHALLTYDFLVIYPLHPTTVSKFREAFKSSGAKTDPLDADQILQILTKHLELLKPLTPDTEETRLLARLAEDRRKAVDLRTSHIQALTAALKEYFPQAIELVSGNLTSRLACDLLMKWPTFESFRQAKPSTIKRFYYGHNIRSSEVIQRVLDLAKAKSLTTDPAIVQSGSRLSQMYTQLIRALNPVIDDYDSSIEKAFEAHPEVNLFNRLPGAGPALAPRLLTFFGTDRSRYQSAQNVHSFSGIAPVTKSSGKIRAVYFRVACPKFDRQTFHEFARLSIAKSQWARNYVDYYTDKGKNFHTIIRALAFKWIRILWKCWQDRTPYCEEKYMQALKKRGCVFATLHLQNKS

SEQ ID NO: 314574 - protein, 396 aa, unidentified
MSRIWAGVDAGKGHHHCVVINGEGDKLLSCRVMNDEAELLSLIADVLGLGDEVTWAIDLPDGYASLVITLLVSHGQRPLYIPGRIVNRASGSYRGKGKTDARDALIIADQARMRRDLSSLRIEDEAMVELKLLTARRTDLVCDRTRASNRLRGLLAGIFPALERELNLTNMGPLILLTGFQTSGAIRRLGASRLEKWLRGRGARWSAALARTAVEASGRQHTAVPGEQTAARLIQALALEMLDLDRKIAEVDEDIAKAFRAHPYAEIVTSMPGIGPLLGAEFVAATSGDMGLFGSADRLATYAGLAPAPRDSGRVSGNLHRPTRYHRGLQCVFYVSAMSSIHCCPESRRFYQRKRAEGKRHTQAVLALARRRVNVLWALLRDGRCFEPAQPAATAV

SEQ ID NO: 314575 - protein, 347 aa, unidentified
MDHIGIDVHKKESQICILAEGGELIERRIPTQPRRFAEELGARPHARILLESSTESEWVARCLEGLDHEVVVADPNFAPMYATRTRKVKTDRRDARALAEACLLGAYRAAHRLSDAQRHVRARLTVRDTLVRTRTRYISLTRALLRQHGWLVPSGSAEGFPRRVMALLLPGRLRSEVAPLLALMRHLQQQLAYLDERITAVTQTDERVRRLQSVPNVGPVTAAAFVAALDDAARFRRAHEVEAYLGLVPRELSSGETQRRGRITKAGSSRVRWLLIQAAVSMLRLHDPRTAALREWAERIAARRGKGIAVVALARRLAGVLFALLRDGTVYEQARREPRDMHAAVPA

SEQ ID NO: 314576 - protein, 407 aa, unidentified
MNETGKRYIGLDVHKHYLIALGVDADLKVVLPARRVELSRLEAWMKKTLTKQDEVVLEMTTNTWQLYDELVQYAGKVLVVHPPHVALITRSQVMNDKIAASILARLLAKGLLVGIWIPPQEIREARGLVAQRQKMVRLATQAKNRLHAALQRHHLVPPAGNPFGASNKEWWMSVSLGKLEQLNLQSDLETLQFAEKQVKRLSGIMEGMAAEQEEIGRLLHLAGFGEVTAVTVWAAIGTIQRFVDPQHLVGYAGLGTRVHDSGMTSRSGKITKAGRRDLRTVLIEAANVAANHHPHWKAELARLEPRLGRNKAIVAIARKLLIAVWYVLQGKTDKYAEPEAVAQKLLRFAYAVGKANRPKGQTAAQFARVRMDALGLGGKLTSIPWGSKKPIPLPPSALKERSDVPNR

SEQ ID NO: 314577 - protein, 371 aa, unidentified
MKSILFVGMDVHKNSYSLCCYDKESGEISREVRCTADAKLIKKYVLDIQKDMKDDVSIKCGYEAGCLGFSLYKSLKTIGIDCDILAPTTMHHSSKNKVVKTDKMDARNIAINLANGTYRPVHIPDDEDLKVKEYIRMTNNFKKELKKVKQQILAYVLRLGYNYEGKSKWTIGHIKWLRNLEMDFIEKEILNEYLAQYDLLVDKIERFTSRIDELSHTERYEEKISKLRCFKGVDTLSAMTIQVETSDFNRFPNAKAYASFTGLTCGEQSSGDKRNTTSITKQGNSTLRTTLVECAQAIVKGSIYAPKSKRLKARQKGQSVEVIAYADKAAERLKKRYDRLIRRSMPHNKAIVAVARELACFIWGMETGNIY

SEQ ID NO: 314578 - protein, 401 aa, unidentified
MAAAGSRAWIGVDIGKTHHWVCAVDKAGKRLLSRKVLNDEAEIDEVIAAVNGLAADRVWAIDILGTPSALLVALLARSGEQVRYASGRVVAAMSAAYTGEGKTDAKDAYVIAETARIRTDLAVIDAESDLVRTLGLLTGHRADLVADRVRMINRLRDLLTSVFPALEREFDFASCKGALVLLSGYATPESIRRMGEARLSRWLRQRRVRGYADVAARAVAAAQTQQTVLAGQDVAASIVAELAEAVLAQHARLKLLDQQIQDAFAQHPQADVIQSMPGFGPVLGASLLVAAGDLAAFPTAGHLAAAAGLVPVPNDSGRRTGNLHKPRRYSRPLRHALYLSAQTSMMRAGPNRDYYLKKREQGHTHSQAVIALARRRTDVLWALLRDNRTWTPTPPPRAQAA

SEQ ID NO: 314579 - protein, 346 aa, unidentified
MAIVGGLDIHRKQLTFDYVDTVTGEVQRGQIAPADRSHLAGWLARRFAGRSDVEFALEGCTGWRYVAEELAASGAVAHIGEPADTAALRGRKRHAKTDRTDSRHLRELLTDGRLPECWIPPAHVLECRALLELYRDLRVEHTAWTQRIHAVLFHQGAQRLTEGGLRTEQGQAELAAIAAAQLSPAGQIQVATALAMLAALDEHLNAVHAQLLHAARHLTGAKVLTARLYGVGPITALALCCWLAGAGRFSSARKAVRFTGLDVTVHSSDGKRSPGHLSRQGPAVLRWCLYEAGKTHARTSAPDHGYYAQVKERIDGKRAAISEARKIVRHACHILGELGDEALTAV

SEQ ID NO: 314580 - protein, 407 aa, unidentified
MQLFVGDDWSEEHHDVELMDAAGRRLSKARLPEGVAGIARLHAMIGDQLGDDVDQSEVAIGIETDRGPWVAALVTAGYTVFAVNPLQAARFRERSGVSGAKSDAADAHVLADMVRTDSHQLRTVAGDSPEAEAIKVVARAHKTLIWERTRHTQRLRHALREYFPAALEAFDDLDAVDALELLGKAPDPASATRLTRGQITAALRQARRRDIETKTDRIQAALRGEQLGRAAVITTAYAATVRSIVAILTTLNAEIKALQGQVDAHFGRHPDAEIIMSQPGMGPSLGPRVLGEFGDDPERYATAKARKNYAATSPITRASGKKKVVAARFVHNDRLVDALNSQAFSALQASPGARAYYDKQRDRGLDHGSALRQLANRLVGILHGCLKTHTCYDETTAWSHHVERAAA

SEQ ID NO: 314581 - protein, 408 aa, unidentified
MKDSRKRYIGLDVHKHYLIALGVDEDLNVVLPVRRVELSHLESWMKRTLTRQDDVVLEMTTNTWQLYDELCAYAGSVLVVHPPHVALITRSQVMNDKIAASILARLLAKGLLVGIWMPPQEVRELRGLVAQRKKMTGLATQAKNRLHAVLQRHHLVPPEGNPCHASQKNWWLALALGPLEKVNTQSDLDTLQFAEQQLARLTSLMTMLASEDEHITHLLQIPGFGVVTAVTVWAAIGTIERFEDPQHLVGYAGLGTRVHDSGMSTRTGRITKAGRRDLRVVLIEAAQVAANHHPHWKAELARLQPRLGRNKAIVAIARKLLTAVWYILAQHKTDRFAEPDRVAQKLLKFAYQLGKENRPAGQSAAQFVRQRLDALQLGQELTSIAWGSKKPIPLPPSQNKVSDVPNTK

SEQ ID NO: 314582 - protein, 411 aa, unidentified
MDVLYPVCCGLDVHKKTITACLRFASARARAEEVRTFGTTTRELLRLADWLTAAGCTHVAMESTGVYWRPVYHILEASFEVLLVNAQHVKAVPGRKTDVKDCQWLAQLLEHGLLRGSFVPPAPLRELRELTRYRRQLVQEHAREANRVQKVLETANIKLGDVATDVLGVSGRAMLQALIAGERDPERLADLARGALRQKAEALREALVGRFTLHHAFMLQGLLDHIEFLDQQIARFDERIEEQTRPFGPAIERLDTIPGVGRRSAEQILAELGDDMRRFPTAAQAASWSGICPGNHESAGKRRNGRTRKGNAWLRSTLVESARAAVRNRGCYLSAQYHALARRRGDKKAVVAVAHSILVAAWHILRDGVEYHDLGPDHFDRLNRERLVQYHTRRLAELGLTVQLPGAQATA

SEQ ID NO: 314583 - protein, 391 aa, unidentified
MIYVGIDVAKDKHDCFITNSDGEVLFNVFTIANNLDGFNDLCQKIASVMEDVTKVKVGLEATGHYSYNLLGYLIDKGLPTYVINPLHTNLYRKSLSLRQTKTDKVDARTIASMLMSDVNLKSYSDTSYHNEELKSLTRYRFDKVKQRAKLKSSVSRLVCILFPELEKLVPTLHMASVYALLSEFPGAKQVANAHLTRLTNLLSESSKGRYGKETAITFRNAARTSIGSNMPAKSLELKHTIKLIQELSSEIDEIENEIKLIMDEINSPILSIPGINYRMGSMIIAEIGDFNRFDSPDKILAYAGFSPSTYQSGQLDGAYSHMEKRGSRYLRYALYNAAKYVCNWDPTFAEYLAKKRAEGKHYNVAISHAVKKLVRVIYHLEKTNQQYIKAV

SEQ ID NO: 314584 - protein, 408 aa, unidentified
MERYYLGVDWSDEFHQVWVSDPEGKKVMEKKVLENVDGLSEFGRWLDESRAKGIELWASIEKPAGRIVDFLLDHGVVVYPVNPKALDRVRDRFRMSQSKSDSFDAYVLAEFLRTEHAHLRALEPSSEQAQELKLLTRDHHRLGRHKTRILNLLGRTLKEYYPRPLEVFGDLESKIALDFLTQYPTPQALSNLKRREWNRFAKREHHLAEARCKELWDNLNTPQLKVPDHVVRAKAQLLTVLVVQLKTLIQAVETYSERVKSFFASMPAAELVHSLPGGKSGTTLPMLWAELGDVKSRWESFKHLQAEAGVVPVTKSSGKSCFVQFRFSCNKHMRYAAYWFAFVSLNRSEWANKYYRDQRARGKSHHQALRALGAKWLKIIFVMWRDHKPYDENYHLANITRQKIRQAA

SEQ ID NO: 314585 - protein, 365 aa, unidentified
MSSVVSPAGLIHLGMDTSKNTIVVAVLMPGEETPVIDRVFNDEEAVRRLVGRFADRALLRACYEAGPGGYDLYRLLSSMGVACEVVAPSLIPKGGSDKVKTDKRDSRRLARLHRAGELTAIRVPTPAEEAVRDLVRVRAAVLADRKRAQQRLTAVLMRHGRIWRNSYWTAAHRAWIGGQRFAEPALASAVGYYRAALQMREAELAAVEAELMPWAGREPLAPAVARLGCYRGIAELGGLTLAAEVVDWRRFPAARMFMGYTGLVPAEYSSGEKTRRGHITKAGSEPVRTALTEAAWAYRFAPAIGTTLRRRQDGACPDTIARSWKAQRRLHAKYKHLLAAGKTPPEAATAVARELAGFVWAEMTS

SEQ ID NO: 314586 - protein, 339 aa, unidentified
MNQVNTIGFDTAKHVFQVHGTDAQGQVFRRKLRRKEVIAYFADLPPSLIGMEACGSAHYWARKLQALGHEVRLMPPAYVKAYVKRGKNDAIDAEASWEAVTRPTMRFVAIKSEEQQSVLMLHRVRDLLIGQRTQTSNALRGHLAELGIIAKKGRGGTDELVALVEGNEEGLMPELARTALQVLADQLRELRVKINKIEREIHAWHRCNAQSRRLETAPGVGPITASAFVATVPDPSRFKSGRQFAAWIGLTPNEDSTGGKQRLGRITRAGDPYLRRLLVVGAHAVLRHSGNAKSAPTRWAAELKGKKPYTVAAVALANKMARVIWAMMMKGEAFRTAEA

SEQ ID NO: 314587 - protein, 371 aa, unidentified
MMQHRQVRYIGLDVHRASIAVAIADEGAPSSYGNIANDPSAIRKLMTRLGGADVELRVAYEAGPTGYALHRQLASMRIQCMVVAPSLIPKRPGDKVKTDRRDALKLARLLRSGDLTPVWVPDEAHEALRNLVRARADAKADQLRAKHRLSKFLLRQGCWPPVGVRNWSVRYFQWLRQLHFEHVADQIVFSDYLAVVTAAGERIKHLEAALHQCAQDSSQVAVIRALQAFRGIGFLSAVAIVAEAGDLQRFRTAPQFMAYTGCVPSESSSGRTQHRGPITKTGNGLLRHILGEAAQHARHAPHVAGTLKQRQADVPQPIVDLAWRAQLRLHARYRHLGCRIGTHKALTAVARELAGFIWAAGQLLEEAPAAA

SEQ ID NO: 314588 - protein, 310 aa, unidentified
MDVIIDKGCGLDVHKETVVACVMGEGIKKEIRTFSAMTGDLFQLKAWLSEKGITHVAMESTGPYWKPVFNVLEDSFEVILANARHIKNVPGRKTDVKDSEWICKLLRSGLLAASFVPPKAIRELRDLTRYRRKLTQAISSEKNRVQKVLEDANVKISSVVSDTFGVSASRMIESIMAGNLDTESISDLAVGKLKGKKEELKKALVGNFQDHHRFMIQASLDHIESLEKIIAGLDEEINRKLKDYHREFELLQTIPGVKEQGAASIIAEIGADMDRFPSEGHLSTWAGMSPGNNESAGKKKAERRPTAIRI

SEQ ID NO: 314589 - protein, 458 aa, unidentified
MSRSNTHPHPRVAEALPHLNPDAAGLDIGAEEIWACVPADREAQPVRRFGTFTPDLHALADWLAQCGVKTVAMESTGVYWIPIYEELETRGFEVYLVNARHLKTVPGRKSDVQDCQWIQRLHSYGLLTASFRPAEEMRVLRAYLRQRALVVEHRAAHIQHMQKALQQMNVQLPQVVSDITGHTGLQIIRAIVAGERDPHVLAQLRHGRCHASQAEIATALSGQYRPEHVFALKQALALYDCYTQQVQDCDAYIEQHYAAIRPTYDDTTPPPPLGPAPKPTAHAKNAPSFDVRGCLYRILGIDLTAVHGLEASTAQTLLSEIGTDMSPWPTEKHFASWLGLAPHNDISGGKVLRSHPLKVRNRAAQALRLAAQALGRTQTALGAYYRRRRARQGPKAAVTATAHKLARIVYHLLKHRDPYHPLSPEAYEHHLRQRELALLKRKAARLGFTLLPRPATAA

SEQ ID NO: 314590 - protein, 408 aa, unidentified
MNKLFVGIDVGSRKNAVYIMLPDGDKHSAFEVQNNLGGAQTISKRIVSAMVDNNFPTVSIGIEATSVYGDNLIYFLREDGALARFERSLFVLNPKQVSKFKESHPELPKNDPVDAFVIADSLRFGRIGLPIQMDDYRYKALQKLTRARFYAVQNLTREKQRFANYLFAKCSGLAQEKVFSDNFGATALAVYEVFETPDDIVNTDLIDLTAFIAECGKKRSPKPDEIAKSVQAAARGSYRLPKTVNDSVNQVLSISISSMRAMQAQIKALEKEIERQFENIPNTLTSIPGIGPVFSAGIIAEVGDINRFRKGQASLAKFAGLAWKENKSGMFEGQNTRLIKSGNRFLRYYLIEAANSLVRCDTEYKRFYDLKYKEVNKYQHKRALALTARKLVRLVFRLLKDNRLYIPA

SEQ ID NO: 314591 - protein, 366 aa, unidentified
MKKVSTVAAGQGRNFSRQKLTIGVDLGDRSSYYCVVDENGGTVVEQKVSTTPKALQAVFGAIVHSRVALETGMHSPWVSRLLTGLGHEVIVAHARNVRLIGKSRRKDDRLDAQTLARLARIDPQLLCPVKHRSAKAQADLTMIRARAGLVRARTALVNTARGLAKSYGERLRGCNVRNMNPEKAEGLSPELQTALQPLLAGIEVLSEQIREYNERIERLAQASYPEVALLKQIKGVGTLIAMTFLLTLEDPHRFRKSRDVGCYLGLQPGRRNSGQSEPQMHISKEGDPYLRTLLVQGAQHILGPFGPDCDLRRWGLKLAERGGRNGKKRAIVATARKLAVLLHHLWVSGEMYEPLHNRNRAVLLAA

SEQ ID NO: 314592 - protein, 338 aa, unidentified
MTIKALGIDLAKNVFQLHGVDGIGTPVLRRRVLRAQLPEVVAQIEPCIIGIEACTSAYFWAERFERFGHTVRIISPQYVKPFRLSQKNDTNDAQAICTALQQPNMRFVPRRSAEQQDIQALHRARQRLVNHRTALASQIRGFLRDRGLVFPRNIGQLRRTVPQILEDAENGLTISARATIAELFDFLREVDRRVTVFDSRIDEAFRASSLAQRIARIEGVGPKISTAVVAAVGDGRDFKNGRHMAAWLGLVPRQHSSGDRTQLFGISKRGDQHLRTLIVHGARAVVRTAARKTDPKSCWANQLRERRGFNRAVVAVANKNARVIWAVLRREEPYRRVA

SEQ ID NO: 314593 - protein, 305 aa, unidentified
MSTITMGVDLAKNLFSVCAVDGAGHVQRRQDLGREAFALWLAQVPAGTVVAMEACSGAHHWARRCLEVGLQPRLMAAQFVTPFRKSRTLKNDRNDAEAIATAARQGNMRFVPVKSVEQQARLAWHRVREGYKTEGLEISNRLRGLLAEFGIVMAQGDRALRIALADLDAAASLPAELKELLRDLSAHWAQVRDRIAACDARIEAHAKADERCVRLRALIGIGPLTADAMVASVGSAKEFKNGRQLAAWLGLVPTQHSSGGHTRLGTISCRGDAYLRTLLIQGARSSLQRAKVTAHPSSTYFCARH

SEQ ID NO: 314594 - protein, 343 aa, unidentified
MQLITTIGLDIAKSVFQVHGVDAEGQVVIRRQLKRRFVLAYFQKLRPCLVGIEACASSHHWSRELQALGHTVRLMPPAYVKPYVKRQKNDAADAEAICEAVSRPNMRFVETKTPEQQSCLTLHRTRHLFIRQQTAVINSIRAHLAEFGIVAPVGRNGVDQLLGVVADVKDKRLPEIARACVAALGAQLQILKAQILEFDRMIRAWHRSSEVSRRLDEVPDIGPALATALVASVAEPRAFRSGRDFSAWIGLVPKQNSSGGKDRLGNISKRGDRYLRSLFTAGALAVIRYAKIHGTAHRPWLTALLARRPTKVAAIALANKLARMAWAMMARGERYKEPAALAA

SEQ ID NO: 314595 - protein, 319 aa, unidentified
MQDILEICCGLDVHKETVVACLFKGNVDHKPQSTTRTFSTLLSGLEELKTWLEEENCRHVAMESTGVYWHPVYNVLESAFDGTIVLIVANASHMKNVPGKKTDMKDAEWIATLLRAGLLKGSFIPSQPIRRLRDLTRYRKSIVEEISAQKNRIEKHLQSCGFKLSTFLSDILGVSGRAIIDHLARFGKISPQEVEQYVKRRAKAKLNEIKQAVNGQMDTLQREFLVILLERLDESIEHLQLIEQKIDEELLKYQRQLEQLDGIPGISKTAAAAVLAEIGIDMDQFKTAQHICAWAGLSPGNNESAGKKSLPEHSAGIPI

SEQ ID NO: 314596 - protein, 335 aa, unidentified
MDRQYVGIDFHRRRSVIVRKSGAGDKLGSVRVANDPLAIASAVAEAGPNPEVVIEATYGWYWIVDWLQVQGATVHLANPSGLNWGARRVKNDERDASDLVDMLRLGRLPEAWIAPPATRELRELVRYRAKLVALRSGLKAQVHAVLAKEGVLPSVRDMFGGSGNAQLNALELGDAYTTRVESLRDLIERYDREVGKLERTIYQRVRDDRGYRAIQRIHGIGPTMAAILVAEIGDVSRFRSAEALCSWAGLTPKHRESDTKVHRGAVTKQGSRLVRWAVIEGTVRYHGGGKLAADWHRIAERRGKHKATVAVARKVLTLVYYGLRDGEIRCLAKAS

SEQ ID NO: 314597 - protein, 375 aa, unidentified
MTTIARLGIDTSKSLFQLHGVDEREAAVLRKQVRRGQFLAFIAKLAPTEIGLEACGASHYWARELQALGHAVVLLPPQHVKPYVGRNKNDKIDAAAICEAMSRPRVRERFVAIKSAEQSAAQMLLGTRDGLLHRRTQLSNTIRGHAAEFGLVTPKGLAHIKPLLERIAADQTVPALAKDLFAILSEEFAELGPRIAHLEKKLKAFQRSNELCRRLAEVPTIGPVIASSMLIKISNPAAFRSGRRCAAWLGLTPKDHSTAGKMRHGGITRAGDEGLRAALVSGATAYIQHVKRGRTKPSPWLAELLKRKPEKLAAVALANKTARIAWKLMVSGERYDRARAEARERLGAPQYGGAPRRAPRSTTHTAAHGNAMIAA

SEQ ID NO: 314598 - protein, 356 aa, unidentified
MSQKLNSAIAVIGIDIGKNSFHVVGQNKRGAIVLRQKWSRGQVEARLANMQPCLIGMEACVGAHHLSRKLQALGHDARLMPAKYVRPYSKGQKNDFRDAEAIAEAVQRPTMRFVATKTVDQLDLQALHRVRERLVGQRTAIINQIRAFLLERGVAVRQGLHFLRAELPGILAKRTDVLSPRMLHTVEGLLDDWRRLDARIEALSNEIGAVACKDPGCDRLMSVPGIGPIIASAMVAAIGTGDAFAKGRDFGAWLGLVPKQISTGDRTILGSISRRGNRYLRALFVQAAWGVLARIGPKGWERYGLKSWIEAAQERLHRNVLAIALANKLARIAWAVLNKGRAFECVKSHASASQSA

SEQ ID NO: 314599 - protein, 342 aa, unidentified
MKGYHYVGMDVHKKVIAYCVKEADGNVLNEGKIAATREELHSWAVGLPQPWVGAMEATLFTGWIYDFLLPYADDLKVGHSYMLKAISQSKKKNDRIDARKLADAIRCDWFPEAYMPSPEIRELRTALRYRNLLVREEVRMNNKTAGLLMEAGAEYDSEKLRGKKYFSELLDRLDYVPESIREIVAASRESSEYFHRAQKRLVDALVKSPTLSMRVGRLMSIPGVGEITALTWALEIDNPHRFANRKKAVSYCGLCSGESESAGKTRRGPLSKQRNKHLQTVLVETAKLAPRWNSQLAAAHQKAIDRGAKKNEATIEVARKLVAYLLYVDKTGNIFSLKENLN

SEQ ID NO: 314600 - protein, 351 aa, unidentified
MYYAGLDLHRRYFTLCVLTSEGEVVCDHRRLPAELEPLTSLLREVGGPVTVTVEATLQWAWLHDRLTAAGFRVLVAHPKQVKLISHARCKTDPIDARKLAELSRVNLLPAIWVPSPEIRAWRQLVRGRAALVRWRTRAKNRIHGALAAENLRVGVTDLFGRAGREWLERAPVSPGTRREITVQLAVIAALEEQIRGYDAEVKRLARHPDAQRLQTIPGIGVFGAALLVGEIGAISRFPTAHEFTAYAGLVPSTRSSGDKTAHGGVGRESNHWLKWILIEAVQTLKQVPGPVRFHYERLLRAKGKPKATVAAARKLGTYIYWMWRQELSYPAWLELEAKRVGCPMQTLASSA

SEQ ID NO: 314601 - protein, 589 aa, unidentified
MAMTTSLDRIGVGIDTARYGHRVSFLRPDRQPAAKPLTVLENRAGYLALQARMMKLHEQYPQAHFHVHIDAAGQYAVNLEQFLRGLDLPMTLSIGEPKRNKDYQKAHFPKRTTDDTESQAMARFAVVEQPAPTPAPSVEMILLREVAGRLQAQVKQTTQAINRLHNLLARTFPELATLTDDIAAGWVLRLLDRYPTAERIAAAHLASLEKVPYLPAERAQALHQAAGQSVASLRGSVAEALVGELVAQVRQGQKAEKDLRKLLAAAFAKLPASPHVQIITIPGIGAATAAALVAKIVDIDRFATPDQVVGYFGVFPEENSSGVDKRGNPLPPGTMFMSRKGNDLVRSYLWNAARTAIRHNPAVGALYRRLRARGKRGDVALGHCMRKLLHLVFAVWKTDRPFDEKHFPWGDPGDTPSSTTIPHDPGAGATSSVNEDAGGHKRDVPAERVVTPAGFSVEPARPSVKPASPPTAAVAVARPQVDFAFLRQQVSLEQVLAHLGLLGQLRGSGPQRRGPCPVHSHPGDRERTFSVHLGKGAFRCFQADCGAQGNALDLWAAIHRLPLYDAALHLAATFGLARNREEEPVNGTR

SEQ ID NO: 314602 - protein, 288 aa, unidentified
MSSNIKYIGLDVHKEAISIAVLNGAGKLVMESIIETKALTLVQFLQGLRGELHVTLEEGTWAAWLYDVLNPRVHEVVVCNPRRNALLKEGSKSDRVDARKLAELLRAGLLRPVYHGEHGLRTLRELGRSYQTISKDMRRVLNRLKALYRGWGIPCSGTQVYAPRYREQWLNKIRQAGVRRRAELFYQHLDGLQVLRRQVRDEFLAESRKHKTVKVLRQIPCIGPIRAALLLALMQTPHRFRSKRQLWTYSGLGVETHDSAQHCYVDGRLQRSKKHSKFVVSIKITTMR

SEQ ID NO: 314603 - protein, 522 aa, unidentified
MHTPNLTSPNFMSIGMDVSDSTAHVCVMDRTGVLQEFVVQLDPAALLAKLPFATPQSGVIVMETGNRAAWLKRTLTAAGWRVIVADARKLKAISGQAIKTDKRDARILARFGFVDESMPSTERLLSDTWVRPLEHQAIFDQLMMRDQMVRRRGDFIREIRSIVKVRGGKLRACSTRSFHKLLCELGADVQALTLPVFQVISALTKSVNDVEASLEAQAKKIPEVQRMLTATGAGTVTVMALYAVVGDPSRFESARDIGPYLGLTPKVDQSGQMNPRLGISKCGNPLARRLLVQCANYIVGPKNKEDSALRKWGLAKIEQSGANSKKVRIAVARKLAVALLAIWKQDSTWRPFPGSAPEAEIPSAPVGTSDDCGAASVHEHVLCEIAASPTDQIQPCSHHAVTTDESAEYRRDSPAGATKAGRKPRPRGQVANPPTGPRLSSGNAARPGGAAKPAAAPKPAAAPKPERESRARSAQRAAEASAATPTQKGPGRDVEAKDDSAALVVGEQRGRRKAGRGGTSPP

SEQ ID NO: 314604 - protein, 344 aa, unidentified
MEHFAGIDVSLKDSSICVVDAAGRIVREAKVASEPEALVAWFRGLGFAVTRIGLEAGPLSQWLHAGLSGAGFEAVLLETRHVKAALSAMVVKTDRKDARGIAQLLRMGWFRPVHRKSADAQEVRALLVGRKLLQSKLRDVELSIRGILRGFGLKVGEISKGRFAARIRELVAGHEMLETVTGAMLAAREALLAEFMRLHRRMLVTVRADAVCRRLMTVPGVGALVAVTFKTAVDDPGRFSSSKAVGAHFGLTPKKYQSGETDVTGGVSKVGDAMVRTALYEAANVLLSRTTRFCALKAWALAVARRRGAKRAKVALARKLGTVLHRMWVDGSTFRWSKEAPAAA

SEQ ID NO: 314605 - protein, 383 aa, unidentified
MKKTQATLKRDATTGRAVLYTAFELSNTKWKLAFSNGDKVRHATVAARGLSQLQREIGKAKKRFQMPEKVRIASCYEAGRDGFWLHRYLTTKGVENLVVDSSSIEVNRRKRRAKSDRIDAGQLLRMLMRYHGGENRLWSVVRVPTVEQEDARQLHRELEALNKERTCHRSRIRAFLIQHGIQIGNPSRLDFLKTLESLGTWDGQVLPSDLKARVVREFERLRVVEEQIKVLNKEQEQRVKRADSSSLRKVAALRRLRGIGPRGSWLFAMEFFGWREFNNRRQVAGASGLTPTPYDSGGSRREQGISKAGNRRVRMMAVEVAWCWLRLQPRSKLSRWFNKRFAQGGSRMRRIGIVAMSRRLLIDLWKYLEYGTVPEGATLKAPA

SEQ ID NO: 314606 - protein, 415 aa, unidentified
MALKIVYKICCGIDVHKTFVVACIASTNDKGITSYESHRFSTYTSGLKTLLQWLLDRNCKDVCMESTGKYWIPVYNILESDCSIVLAHPKYVKAIRGKKTDKKDAKWIADLFKHDLVAGSFMPPADIRQLRDLMRYRFKLTCFKSSEKNRLQNCLTVSNIQLGNVVSDTFGKSAQAILDKILENPEDTSFDLEPLVFKSLKKKLPELRDAIDGYITPEQAGKLKIIKAHYESLESRKAELEELILALAAPYQQELTILQTAPGISSPFTAIGIISEIGTNMEAFPSAKHLCSWAGLTPTNNESAGKKKSVRVSKAGCYIKPLLVQCANAVVKSTKHPEMRNRYLRLKKRRGHKKAIIAIARMLLTALYHMLKNGENYNAELYRKSDLPPVDREITVEQAILIARNQGYKIKSATA

SEQ ID NO: 314607 - protein, 336 aa, unidentified
MTKRSSTPADAVLVAIDMSKHRQEVLIERPEGGRRRRMTVMATKADYDRLADDLAAIGRPIVVGFEATGNYHRTLAHRLLAAGFELRLISSVALARTREALHNGWDKNDSKDAQVILHMLQIGATQRYVDPLAAGINDLQEMSKTHEAISKAKTQTWHRILTHYLPLYFPEIERFAGNSRSDWFLALLERFPTPASMTTLGQEAFTREAWSLVGRKVSKARLINDIYETACASVALPVDEESVAVAMFRMVIAQARSLIRQRDEIERTANAMLSENRDYQLLRMIPGIGPINALTILAEAGDLRRFNHHRQFLKFCGLDLATCQSGTFRGRTKLSK

SEQ ID NO: 314608 - protein, 382 aa, unidentified
MKKDITATRKHKQLSRGKTARNQIRRMAKQQRLTIGLDLGDRHSCYCILNEAGETVSEGQLPTTQAGLSWLLGKMCASRVAVEVGTHSPWVSRHIAGLGHEVIVANPHKVKLITQSVRKNDRVDAQQLARLARVDPKLLSPIRHRGEEAQADLAVIRARAALVEARTKLINCARGTAKPLGERLKKCDAEQVKEGLGDGLSEAVRRAIGPILKSVEAISEQIAAYDEKIEEIAKRYPEVELLTPVYGVGTLIALTYILTIEDAQRFAHSRDVGAFLGMRPKQRDSGERQPQLGISKNGDRVLRSLLVQAAHCMLRKGAPDSDLRAWGLGKLESGGKNGKRRTLVGVARKIGVLLHRLWVSGEVYDPLYQRKAVAGKAKRKAA

SEQ ID NO: 314609 - protein, 450 aa, unidentified
MREPREIEDREDELAVARVAAVDVAKASAVVCTRVPREGGPGRFVTRVWPVGATTNEIIELAAHLAGQRVEKVVLESTSDYWRPFFYLMEAAGLHVELVNARDVKNAPGRPKTDRLDAVWLAKLAGWGMLRPSFVPPAEIRQLRDYTRLRTDLTRERTRHWQRLEKLLEDALIKVTAVASRIDTMSVRDMVEALIAGQRDPRKLADLARGRMKAKRAALIEALTGRFDAHHGELAAILLAQIDGLTAQIGALGARIEELIAAIPGAQGVDADGTTGPQAGRGPDAAALPAIDRLQEIPGISRHAAQVIIAEIGLDMTRFPTAGRLVSWARLCPRTIQSGASERPGKTAKGNPYLKGILGDAAAAAAKTTTFPGQRYRRLARRRGKLKALVAVARTLLVIIWHLLADRAARFEDLGEDYYLNTIDTDRRARSHIRQLQALGFTVTITPAAA

SEQ ID NO: 314610 - protein, 346 aa, unidentified
MEYYAGIDVSLEYSSVCVVDASGKIVREAKVASEPAALIAWFGGLGVAVGRIGLEAGPLSQWLYAAMREAGLAVELLETRHVRDAFKAMPVKSDRNDARGIAQLMRLGWFRPVHCKSMGAQETRSLLTARKLVQSKLRDVENSLRGILRGFGLKVGATTERGFAGRIRELAAGHPNLETIAEALLAVHAVLLREFNGFEKQVRRLARGDTRARLLMSTPCVGPIVALTYASAIDDPARFKSSRQVGAHFGLTPKKYQSGETDYTGRISKIGDASVRTALYEAAHIMLTKPVKGCSALKSWAMRIAKRAGMSKAKVALARRLAVIMHRMLVGETPFNPATKPAAAAA

SEQ ID NO: 314611 - protein, 313 aa, unidentified
MSQNTMTTIYVGLDIAKLNLQLHLAGRVHDLPNTAAGQRRLLKLLASQPGVHVVCEATGGYERDVVAALHEAHVPVSVLNPARVRHFARATGQRAKTDHIDAAVLSAYGQALQPKPTAPRTQQEQQLAELVRRRVQVLEVLVAQRQQAERLTVPALRRQAQSLVRRLERDQAQIEEQLQALRTQAPTLDERVQKLEAITGVGTITALGVLAELPELGTLNRRQAAALAGLAPHPRESGQWHGRRSIGGGRAPVRRALYMAALVAARSNRQLKEFYQRLRAAGKPAKVALTAVMRKLIVLMNHTLKHPNFVPQN

SEQ ID NO: 314612 - protein, 388 aa, unidentified
MLLDHPYDGPAAIHTQFGAIFVSMELSRSNWLITSLSPGKGEKMSKHSVTAGDIAGLLQLFAELKRKAQARTGQTYPIITIQEAGLDGFWIHRVLGQEGIESHVVDPASIATPRRRRRAKTDRLDGETLLRALLAYKRGEPRVCAMVVAPTPEEEDRRRLCRERGTLIAERIRHVNRIKGLLFAQGTADYAPLRRNRRAGLEALRTGDGRVLPPHLKAQISRELDRLELLLEQIKQVETEQDALLAAAKNAAGAEIVPEPVAMLLALKGIGANFAAVLWLEAFYRQFANRRQLAAYAGLAATPWRSGSIEQEQGVSKAGNPRLRTTMIQLAWLWLRHQGQSALARWFKVHSQRGRKSAIVALARKLLVALWKYVAHGLVIEGAVMKSA

SEQ ID NO: 314613 - protein, 424 aa, unidentified
MKIAYPNCCGVDVHKNQITVTHVQYSTDGKPAYSSAQFSTMYDDLECFVQFLKSKQCVDVCMESTGKYYIPVYRILESNGIKAIVAHPKYVKAIKGQKTDKKDSKWIAELFAHGFVRPSYIPQQSVVDLRDLTRYQTKLKQMASGEKNRIQNSMTMSGIMLPNVVSDAFGKAASAILKHKLTHNNAENLDFSQFLHGRMKANADDINRSMKGEFTAEQSIKANLALDHLGYINQVLEQLEVAIELLCEPFEDLIAFLITHPAVTRYSAIRIIAETGGDMSVFESAKHLVSWLGLCPECNESNKNRKSTHISKAGSNLKPILIQVALGAIKSKSHKFYAFKYKQLSKRRGKMRALIAIVRMIMVSVFHMLSKKEVFNADLYDGYYEERTNLYRKKAINQVLSYLAKEGYFAVNTSTGEFYSSDST

SEQ ID NO: 314614 - protein, 363 aa, unidentified
MDILQYIGVDFHPYQQTVAFVDNHGELKTRTFYHSDKANLRRFYGKFPKGSIVGVEACGLFQWFEKMLFENNLELKIGNPRLIRKMAPSVHKNDKRDAEHILDLLLSNRFPEVEKRSPESQIILAWLNYRHSLVRQRTAIANQLQAMARSVGLARFQTKSKSAKQKIVEQTTADELLFLVNSRFTMFENLSREIGLVEEKLHRAAKKNEQVKLLQTHSGIADLTSLCLVHTLGDVSRFARKEQVTAFVGLVPLDDRSAERHRIGRISKHGSKLLRFLLGQAAHSTKDEKLRMFYKQVSRRRGRPKAKVATARKLLERCYLMLRDQITYEEFRRRGEVGLPEKPGKLSDSTRQSLACDGAANHF

SEQ ID NO: 314615 - protein, 346 aa, unidentified
MNNLNVVGVDLAKNIIQVSVVTPAGKELQNKALTRKKFSEFLARQKPSLVAFESCATAHYWSRIAHTHGHTAKIIPAKAVTPFRQGHKTDSNDALAVAEAASRPNIKEAPMKTVEQQGIQAIQRSRELLVHDRTALSNHIRGLLMEFGVVIPQGFAALHRRIPEVLEDAENELPDLYRPTLNLLYGRLITIKDDIDVLNKQIAAIVKQNIACDRLTKLEGVGPISSVLLYATLGTGEAFANGRQFSAYLGLTPKQYSSGGKTVLIGISRYVANKRLRAVLIQGARAYVHRLKDPKTPKERWLCALIQRAGYGRAAVALANKNARTAWALLTQGEEYKREYEVPLAA

SEQ ID NO: 314616 - protein, 379 aa, unidentified
MVENITHVALDDHKKRHQVAVLLPGIDREEAVTWRIENTRAGIRKMVRKVLKMAPGDVRFCYEAGPNGYALLRQISEFDRVSCVVVAPSKTPRRSGDRIKTDRRDAKKLVGLFRAGELKSIVPPLKEEEAVRDLCRCRKAAQKRVTASRHQVDKFLMRNGYVYRDGKNWTRRYREWLRSLKFDDWRRERTFQAYLFGVEQDEDRVKRLDVEIVRAAEEEPYRTLVGFVRCFRGLDTLSAMILTSELYAIGRFTTAPSLMGFVGMVPSEDTTGWDPHRGPITKAGNEHVRRILVEAAKHYRHPARVSKALTQRRKGQPDWVIAIADKAQTRLHQKYWRLVMGKGKHPNVAAIAVARELVGFIWAVLIQAATTTNVEELVA

SEQ ID NO: 314617 - protein, 430 aa, unidentified
MKQYELLHSLFVGIDVSMKENVVHAMPFSPEDHPGHAHLRFSAPNTPAGSVGIVEKVSDFLKFYPDVIQVVIALEATSVYSFHLATFLSVAHFNGHIPAIVYSVNSKEIHAYKKTFTDVGKDDYVDAMVIADYARSNKIRSRPWKGPELLGLRVLTRLRFRIAKLMGIVKNSTGNSIYLECSGLMTGENPFCNVWTTTCQELLTTFQGPDEILSLSDEELLNFITEKGHGRFSHPLDVVEKVKKAARNSYRLDKRVYEPLTSGLSVSFFIIHSLEAAIKKLDKSIETMAKSFSSDSYQILLSIDGVGPVIAGGLLAEIGDIKRFKTDDALAKYIGLTWRGKQSGQSESPVKHLSKAGDVYLRYYVLLATGQIINYSAKYREAYERIRSRKTLFPHRAALNLVARKIVRLIFTLLDKHQLYSDNKVMVTLE

SEQ ID NO: 314618 - protein, 345 aa, unidentified
MMIIGCDFHPSWQQVCWLDTETGETGEQKLVQALGDAERFYRQLSAPALIGMEATGNCQLVDLLSELGHELWVGDAAQIRASYVRQQKTDKRDAAHILKLLVEGRFPRIWMPSSEVRDLRQLLLHRHKLVIIRARVKNELQHLCLNQGVQRKHKLWSRAGQQVLRELPLKPWAARRREDLLRLMAMLDQQIEPLDQAVKAEAQRDKMALLLQTQPGVGPITALAYVLTMGDVSRFPRGKQVASYLGLIPREHSSGGRQKLGAITKQGNRMMRMLLVEAAQSAVRLDPQFRKKYLHRCHAKPKAVAKVAAARKLAIRLYWMLRTQKPYPAVVRIESSPRVPLVGAS

SEQ ID NO: 314619 - protein, 353 aa, unidentified
MDRSITVGLDMGDKQHRICKLQGEREVVGRATVANTVEAVRGYFEKLPPCRIGMEAGTHSGWVSRILEELGHEVLVGHPRKLRMIWKSDVKDDNRDAEMLARIARFDPELLHPIRHRGEEAQRDLDVIKAREKLVKVRGMLITHVRGVVKGIGKRITKCSAETFHLRLGEEMPEELAGALRPLMETIAELTQRIRGYERELNRLCREKYPETEGLREIAGVGPITALAFVLTLEESSRFEKSRSVGAFVGLVPKRDQSGETDKQLRITKAGDGYLRRLLVGSAHYILGHFGPDCELRRFGLRLAERGGKNAKKRAVVAVARKLAVVLHHLWRSGAVYDPFYHNNTKRCGELAA

SEQ ID NO: 314620 - protein, 393 aa, unidentified
MICVGIDVAKDKHDCFILSSEGEVLADVFTIQNNAVGFDTLLQTIRRCTRPEDKIKVGLEATGHYSYNILGFLLDCGLPTYVINPLHTNLYRKSLSLRKTKTDRVDARTIAAMLMSDVDLKSYTDTAYHNEELKSLTRYRFDKVRERAKLKQSISRLVTILFPELEKLVPTLHMASVYALLSEFPGAKQVAGAHLTHLKAVLSEASKGRYGRDMAVTLRDAAKCSVGSVMPAKSLELRHTIRLIRELDAEIEDIEAAIQSMMDEIQSPITTIPGIGVRMGAMILAEIGDFSRFGSPDKILAYAGMSPSTYQSGQLSLSGVYSHMEKRGSRYLRYALYNATKYVCLWDPVFATYLAKKRAEGKHYNVALSHAAKKLVRLIYALEKSGLPYNSAA

SEQ ID NO: 314621 - protein, 319 aa, unidentified
MTVSNQAERVIGVDVAKNRLDIADSQGKIRKTISNTAPAIKKAIVQKVKDGDSVFVVCEATGGYERGLVKTLQDAGISVAIANPRQVRQFASAMGRLEKSDPIDAEAICQFAQTAGLPAAPVKTAEQEARDAVVRRREQVLEMIGQENNRLQQESDPKMKKTIERVLKTLKSLLKKLDAEVARFLAEEAKTNASVEVLMSVPGVGAVTTATLLCELPELGQLNRSEIAKLAGVAPIVHESGQSRGHRSVSGGRSNPALVEFHRRLVSRGKPQKVAIVACMRKLLTILNSMVRTKTMWRTKGEEKVMADQGSATTRAHGD

SEQ ID NO: 314622 - protein, 406 aa, unidentified
MLVYLGIDWSEQKHDLSFQNELGAEILHLRIPHSENGFLTLNQSVANLGASPAECMVGLETAHNLLIDFLWAHGYTQIYVLPPNLVKSNQGRHRQSGAKDDRCDAALIAELVRTDRSHLYPWRPGSLLLQQMRAKVSYLYFLTRDIVQHTNRLRSILLRYYPAATQVFSALDTKICLDFIQAFPTPQQAAQLDFETFSAFARSHHYPQPKRLLLNYARLQQPQPIPAAETVQAFQDEAVQLCQLVKMLVQRKEETLQELDRLYQQHPDHVIFASLPGLGARLAPAMLVKFGEDRQRFPQPELVQALAGTCPITVQSGKSKYVRFRQSCDHEFRHYVQQWAWHSLQHSSWAEAYYLRVRPNCRSDSHVLRCLGNRWLAIAWKLWVSETPCDETYHLRQHALRLRPRA

SEQ ID NO: 314623 - protein, 336 aa, unidentified
MLYVGLDVHSRQSSLCILNSSGGLVNRCEVRGPRAAVVERLRQLNEPFSLCYEASCGYGRLYEQVHPLAHHVAVAHPAKLRLIFGSKRKNNRFDAEKLAKLLLLNVVPQVHVPGVDVRAWRSLIHLRQRLLSQRVMAKNQIRAVLRENDLAGAKWLWSKKQLAWLESLDLHPSARLRLEMNIEELKSLKVKMARVEKELAVYADRHPAIRLLMTIPGVGIRTAETFVAWVDDITRFRRTSQLGCYFGLVPCQDASADKNRLGHITRDGPPVMRKLITEATWTAIKKCPAFKRFFERVMAGKSDRKKIALIATAHRLIRVMGAMLRSGQAYDANYKG

SEQ ID NO: 314624 - protein, 428 aa, unidentified
MEMSASNLEIVAWAGLDWADQSHEIRLQAVGSEVSESCTVEQKPEALHAWIGQLHTRFPQGRIALALEQSRGAVIYALMNYDFLLLYPVPPKGLARYREAFATSGAKSDPADAGLLLELVRTHRDRLRAWQPDDALTRQLRLLVEPRRRTVADRTRLTNRLTALLKTYFPQALDWAGDLRGPAACEFLQTWPTLQAMQQARRSQLRRFYHDHRRLSAENLNKLFHVMDHAQPLTRDRALVEASALMAQTLAGQLEAVIAALQRLDQAIEELFGQHPDQDLFSSLPGAGEALAPRLAAAFGTDRHRFQSAEELQQFSGVAPVTEASGKMHWVHWRMACPRFLRQTFHELAAASIRKSLWARAYYDGQRQRGASHHAAVRALAYKWIRVLYRCWQSRTPYDEKLYLEALRRRRSPLWLAIAIPPTQQARS

SEQ ID NO: 314625 - protein, 396 aa, unidentified
MELMDERGRVLARGRLPEGVAGMARLHELIGEQLGEGADDAEVVIGTETDRGPWVGALVAAGYTVYGVNPLQASRYRERHGVSGAKSDRGDAHMLTDMVRTDSHQLRAVAGDSPGAEAVKVVARTHKTLIWERNRQVQRLRHQLREYFPAALAAFDDLDAPDALELLGKAPDPVKAAKLTRAQVSAALKRARRRDIPGKATVILTALRSAQLGQPPAVTSAYAATVRSLVAVITVLNEQVKTLQGQVEADFGRHPDTEIYRSQPGLGPILGARVLGEFGDAPDRYASGKARKNYGGTSPITRASGKRKIVAARFIRNNRLSDALMAQAFAALGASPGARALYDAERARGTGHNPALRKVANRLVGILHGCLKTRTLYDEATAWPHREKTPQSDIAA

SEQ ID NO: 314626 - protein, 320 aa, unidentified
MMAQNVQIVVGIDVAKQKVDACIRTLSQRNTFPNIAQGHRKMIAWLHKHKVNKAVMEASGGYERDWARVLRLAGIEVRIVDPKRVRSFALSAGRLAKNDTIDAEMIAWFAETFGEAPSQTHNAAHEELVALVKARKRLVDLKIRLQSQDEHAPSGLVQKAHARVLRSLAAEITRLEAAISAKVKATPEFAERADIIESVPGLAETTSAILIAGMPELGQVGDEIAAALTGLAPYDDDSGKRRGERHIKGGRRWVRNAIYMPCLGAATQNNPVLKAFYQRLIAKGKEPKVALVACMRKLIIILNAMIARRQKWDPTRYALN

SEQ ID NO: 314627 - protein, 332 aa, unidentified
MYIGIDVHKRYSQIAVLDQNGEIVEEVRVENANLDDFAQQYAGAEAALEATSNYYHIHDTLSEYLDVTVANPSELNLISDTDTKTDRVDAKQLARMVRLGSIPESYVPTDEVRQARALVRGRQTLVEDRTEYANKIHGLLSDHGITEEVKPLSVEGREFLEELSLPAPWGTLLESYLEIIGTLTEQIESLERVIEERAGSLKETQLLMTIPGVSYFTALTIFAEVGDIDRFERDKEVVNYVGLNPVIRESGDSRFEGSISKRGSGRVRWLLVQASYTAVHTCNDAYLSRFYNRLAQRKGSKKAIVATARKLLVSMYHMLDREEVYDPPGVSA

SEQ ID NO: 314628 - protein, 341 aa, unidentified
MKHYAGIDVSLECSSVCVVDTNGKILREARVASEPEALIAWFASLGFGLERIGLEAGPLSQWLFAAMRQAGLAVELLETRHVRKAFEAMPVKSDRNDARGIAQLMRLGWFRPVHCKSMSAQETRTLLTARKLVQSKLRDVENSLRGILRGFGLKVGKTTEREFAGRIEELVAGHPHLQVIAKALLSVRAVLRSEFAAFEKQVRKMARSDMRTRLLMSTPAVGPIVALTYASAIDDPTRFKSSKQAGAHFGLTPKKYQSGETDYTGRISKIGDASVRTALYEAAHVMLTKPVKGCSQLKIWAMRIAKRAGMSKAKVALARRLAVILHRMLADGTPFNAAAAT

SEQ ID NO: 314629 - protein, 397 aa, unidentified
MIAVGIDVSKSKSTVAILNGHGSIRTKPFDVHHVADELQALVDYIKRTSEPPTILMEPTSHYHYPLLKAFTEAELPVCLINPYQMKKYGDTELRKAKTDKRDSLRIAQYALEKSYSLIPYTPQDQKYEDLRFLSRQYSQRISTLTVAKVQLLSLLDETMPGITTILPLKSRDPDNCVLLRFIKRFKSFDVIRKMGKTRFLDSYQVLVKKTKDRFAGSKGLAIYELVLNSVTTRGENPLSAMTQDQCVDLVSTSQKAADEINLQMRIIAETMPEYKVLRSMAGVGDRLGPIILGEIGDIRRFHSGKALNAYAGNDAPPYQSGQFESRNRHISKRGNPALRKACFEVMQALKLTKPQDDPVYLFLLKKEQEGKPYNVAKMAAVNKFLRIYYARAMELYK

SEQ ID NO: 314630 - protein, 399 aa, unidentified
MLFAGWDWASRSHAVTVLDQDGGVVDRFCLPHEEAGLTGALERLAALCPPGELPVAIEATSGLVVDRLLRAGHPVVPVHPNAFHATRPRWGASRAKSDPGDSFKLADYLRTDGHRLRRLQPLDAPTEELQALVRMRGDHVDARVAAANQLRALLERHWPGAAEVFARVDSEIALAFLGDYPTPQAAARLGEARMAMFCRRHSYCGRKDPAELLRRLRAAPVAAPGLDPQVLAEAVGAQVRLLRTLLATIADLDRAIGAALLAHPKAQVLAPLPRIGELNLAQIVAEVGPVLDRAVDVEHACAELGAGPVTKESGKGRSVHFRWAVNTRARQALSIFADNSRHASPWAANLYAAARARGKRHPHAIRILMRAWLRVIWVCWHSGIPYNPALHGGERRYAA

SEQ ID NO: 314631 - protein, 418 aa, unidentified
MNTKNDNFSAYVGLDWADKKHDICVQVKDEESRAFSVISHSPESIHDWVEGLHKKVKGNIAVAVELNKGPIVYALQKYSFVTVYPIHGLTLARYRQAMFPSGSKDDPSDAELALDMMLNYPKKITPLKPSSEKTRTLALLVEQRRLLVDDKRRHANRIINALKQYYTQPLEWFSHRDTELFCNFLIKFPNLNELKRVRTNTVAKLLNSRGGPTVKKTPERIASIKEAIPLTNDESLIIPYQTFVIALAKQMLVLINNIREYDSQINSIFTSMDDASIFASLPGTGPCLAPRLLAALGEDKSRFSSAQEIQNYAGLSPVTERSGQKSWVHWRWQCSKFVRQSFIEWASKSVGQSYWAGIYYAQQKAKGNSHQSAIRALAYKWVRILFRCWKTGKAYDESKYLKALKEKGSPLLVVEKAC

SEQ ID NO: 314632 - protein, 338 aa, unidentified
MLHSGIDLHKRTLVLSTVTPAGQPVREAKLPATREAVRRYFAALPGRHRAVVESTSNWYWLRDFLVGEGVDLRLGHSKYIKAISYAKVKTDAVDAATLAQLLRSDLVPEAHMVSPEWREARDLLRARLQVVGQQVRCKNTLAGLLAQYNVATPAALPPLVQLRTSLLAEQHALLAAQAKRLGAALNPLLIPTPEVQRLLWVPGIGRIVAFTIWLEVDGIARFPSARDFVSYCRLVPGAGNSGGKARHKRTKDGNRYLKLAFSHAAVRAIQYFPEIRAFYRRMARRKPPALARALVAKELARIVYFMLARQEAFNGTFKGTRLSRTKQPKWPRLASPPA

SEQ ID NO: 314633 - protein, 391 aa, unidentified
MVCVGIDVAKDKHDCCILDSDGTIRADCITIPNNMDGFKQLLQTIRDCTKKSDKIKVGLEATGHYSYNILGFLLDNGLPTYVINPLHTNLYRKSLSLRKTKTDRVDARTIATMLLSDVDLKSYTDTAYHNEELKSLTRYRFDKVRERAKLKQSVSRLVTILFPELEKIVPSLHIASVYALLSEYPGAKQISEIHLTKLTNLLATASKGRYGKDKAIQIRDAARTSIGSVMPAKFLELKHTIKLIRELTSEIDEIEVSIQKIMDELNPPILSIPGVGIQSAAMILAEIGDFSNFESPDKILAYAGCSPSTYQSGKLTNCYAHMEKRGSRYLRYALYNATKYVCHWNPVFAEYLAKKRAEGKHYNVALSHATKKLVRLIYALQKSGKAYLVAA

SEQ ID NO: 314634 - protein, 412 aa, unidentified
MQVVYARCAGLDVHQKTVSAYASVCEPNGKKRRQIRVFGSFTGDLLVLAGWLREQGVTHVAMEATGVYWRPVWAVLEGQFEQLLANPQHMKAVPGRKTDAKDCEWIADLLQHGLLKGSFVPPTPIQDLRDLTRYRVELRQSQSRVANRIQKLLEQANLKLGSVASNALGVSGRQMLEAIVAGQDTPEQLAQLARGKLNNKIPQLVQALQGRVRDHPRFLLAEFIEEWDWFEQRIVRLEAEIDKQINPFEQALALWQTMPGVERVTACSLVAQIGVNMNQFPTAQQLASWAAICPGNHESAGKRKSGKTRDGNKWVRRTLCQAAWAVSRKKNCYLSSQFKRIATRRGPKRALMAVAHTMLVIGYPMLKTGQGYRELGGNYLEQINQDQLQRHFVKRLEKLGFKVTVEPSLEAA

SEQ ID NO: 314635 - protein, 464 aa, unidentified
MEQDKAMYLGIDVSKGYADFFLMDALKQSMEKSFQLDDNLEGHQNLKMYLGKYTSTGQKIICGIESTGGYEQNWLVLLKKLKKQTPVEVYKLNPKGVKHQIESTLRRTITDSVSAEGIADYIANNYEQARQKWEKSTYQDDSIIASQRCFNLIMGLIKQQTARYNQLEKLLYQNFPELLIYCKHGIPNWMLRLLIKYPGATAINRAYTKGIDGIKGISKTKAEKIKLLAQTSVAKLSHPVDEIMIKTLAEDIQYHQNRIEELKGYLIGMYKNYNVSLLKSIRGISDWTASAFVMLLGEIDRFEGTDQIAAFYGVHPRFKQSGDGKWGNHMSKQGNSAMRYMLYIAANNVVLHEPYFKILYHHYISKGKKPKSVRGIIMHKLLRVIYGMLKSQQPFNSSVDEKNQMKTPTYIEQQITDRTRRYQKLNMNAPISRSNYKKRRAVLECQISETDICAASSSTTLLQK

SEQ ID NO: 314636 - protein, 437 aa, unidentified
MTSPCQSYDYKFQEVILLSFKIFRKNCCGLDVHKTWIYACIGVTDTNGRTDYKQARFSSFSKGLSELCDWLAKYNCSEVCMESSGKYWIPVFNILEKADISVVLAHPKYTKPQKGNKTDRKDAKWICDLFMCDMIKPSFIPPADIRHLRDLVRYRFKLTCMIVGEKNRAQNCLTVSNFKLDDVFSDIFGKSARSITEQMLAHPGEIFDVAPFVHGGCKTPIEEIQAAVDGALCPEQAVKLRQCLNHIDELRLHIDEVEREILCLSDKYQAPLDLIRTVPGFNKNPMTAIQVLSEIGGDMSVFPTAKHLVSWAGCCPRNDQSASKIKSTRISRAGSYFKPVLVQVANALLKSKKHPEFITRYRRIKARRGHKKAIIAVCRMLLTAIWHILSDLKPYTPEGFLESRPVNKSKILTTSQALNLLKQRGYIIKDEAAPAMN

SEQ ID NO: 314637 - protein, 354 aa, unidentified
MQYYKEQHNYYCGIDLHARSMYLCILDSKGNVKFHKNLKTSPDALKKAIKPYLDNLVIGVECMFSWYWVADFCKDHNIKFILGHALYMKAIHGGKAKNDKIDSYKIVSLMRGGTFPQAFVYPRDMRATRDLLRRRMHLMRKRAELLCHVHNTNTQYNNDRICKNLRYKSNRKLVDGRFADPSAQKSVDLDIELINYYDKLLVEIEYYIQKHAKINDYQSHMLLNSVPGIGKIISLVLLYEIYDIKRFPRVQDFASYARLVKCKAESAGKSYGTSGAKIGNAHLKWAFSEAAVIFLRDNPKAKAYVAKMTKRHNKGKALSILAHKLGRAVYFILKRKQPFNMEKFLPYKLPQLDA

SEQ ID NO: 314638 - protein, 406 aa, unidentified
MEVVHPRCSGLDVHKKSVVACVMVPGRKEVRTFGTVTAELLRLGDWLQEEGVTHVAMESTGVYWKPVFNVLETTGLELLVVNAQHIKAVPGRKTDVKDAEWIADLLRHGLVRASFIPPRPQGELRELVRYRKTVVEQRSRLVQRIQKLLEGANIKLSDVASDIVGVSGTAMLRALADGETDLDRLVELAKTSLRNKREQLRLALQGSFGSHQRFLLGKQLDQLEFLDRQIAELNLEVEQRLRPFEALLARLDAMPGIGPRNAEQILVEVGTDMSRFPTAAHFASWAKLCPGNDQSAGKRRSGRTGIGSRWLRSTMVEAAWSAARVPNSYFAAQYHRLVPRRGKRRAAVAVAHSMLIAIYHLIKDGTIYQDLGPNHFDEIDRQRITHRAVRGLQALGYRVVLNEVPA

SEQ ID NO: 314639 - protein, 381 aa, unidentified
MAKHIRYVGLDVHADSIAVAVAEESRAGEVRSIGVIPNSLEAIRKLVKKLGPASSLRCCYEAGPCGYVIYWQLTRLGVPCEVIAPTLIPTRAGDRVKTDRRDAIKLARSYRSGDLTAVWVPTPAHEALRDLVRAREAAKKDQLRARQRLAKFLLRRGLRRPAKTRLWGDCHMQWIESLHFEHGAHEATFIDYLHEIRHATERIARLEKSLDEAVEKMPVELKAVADALQALRGVAKLTAVTLVAELGELSRFPRPRQLMGYSGIVPSEHSTGGPGHARRGGITKTGNAHLRRVLFEAAWCNRQRPRISAPLRRRQESVSAEVREIAWKAQHRLHKRYWTLASRRKPQQAVAAVARELLGFIWAIGVHVERHERHNEQRKVA

SEQ ID NO: 314640 - protein, 421 aa, unidentified
MGKRRYSCVEFKHVAWREVRDRIVGERVVVAVDVAKEDFVATVLTGAQEVLVRLRWQHPQETLAVVERLVWLGQGRRLEAVLEPSGTYGDALVWQLRQAGIVVYRVSPKRVHDAAEVYDGVPSLHDAKAADLIGRLHLEGISQEWPVPSEARRTVLAVLTQLRVSKARQQGAGSRLEAQLSRHWPECLGLLGLDTATLPALLEGYGDPASVAADPAGAAALMRRIGRAGLREEKIGAVLASARRSLGVPCFAAERELLQWLAGDLLAARREVQRIERALARQVKREPVLVRMAGVVGTVSAAVLVAAVGSPQSYPTASSYLKGLGLNLKERSSGKHKGQLKITKRGPSLARFYLYFATLRLIAHDPVVKQWYGLKTSRPGAVKNKVVITLMRKLAQAVWQVAHGSPFEVSKLFDLEAVAGA

SEQ ID NO: 314641 - protein, 426 aa, unidentified
MNGSNVNPPQTDYAAYVAIDWADQKHTFSLLESGQRKKESGVIEQKPQLIGAWMAKLRERFSGRLIAIAVEQSRGALISALLSYDFVVIYPLHPTTVAKFREAFKSSGAKSDPLDTDQILEILTKHLELLKPLNPDTEETRRLARLAQDRRKLVYQRTSQIEALSASLKEYFPQAIELLSGNLASRLACDFLKRWPDFEAFQQAKPSTIKRFFYGHNIRSPKVLARVLEVAQRGCPLSTDRALVESGGRLTQAHAQLIATLNPIIEQYDQRIEALFNEHPEAYLYQKLPGAGPALAPRLLAFFGTDRSRYEGAGNVQSFCGVAPVTKSSGKTKSIYMRRACPKFDRQTFHEFARLSVFRSQWARNYLDYYIGKGKKFNTVVRALAFKWIRILFRCWQDRKPYEEAKHMANLLKRGSIFATLHLKKS

SEQ ID NO: 314642 - protein, 388 aa, unidentified
MNTITTTAPNNTILAIDLGKYKCVACILDPKGGAFRFTTFDTARAELQKLIAQEQPGVIIIEACLLAGWVHDLCGELGVRCLVANTASEAWKFKHLKRKTDKDDAMRLAQLQLLGQLPTVTLPTTNVRQWRSLIACRQTWVGRRVAVQNRIRALFVAQGLPAPRGAKAWSTTGLAGIAAQAKPLGECGPDELWRGLLELALTEYRQMGELIVQAEARLDALGKQNADVVLLQTTPGLGPRTAEVVAAYLNDASRFKTAKQVSAYGGLVPRQHQSGELDRRGRITKRGPALLRKLLVECAWCMLRYNGWARGIYLRLTGGGERRKKQAIVALARKILVRCWAMLRDKKAWHDPQAGPKNPLPPSKQKRQAEARKRRQAKPSAVLEGANA

SEQ ID NO: 314643 - protein, 334 aa, unidentified
MSIVSTVGIDLAKNVFSVHGVDASGLVVIRRTVARAKLAQLIAQLPPCLIGMEACSGAHEWARRFATFGHSVKLMAPKFVAPYRKGGKNDGNDAEAICEAVARPNMRFVPVKSIEQQADLTLHRVRQGFVEERTAMLNRIRGLLAEFGHVLPVRAAEVRRRVPELLEKLPTRVANCVRDLLEHAMRLEAKALEYEREIRAHVRTNALAQRAQTRLGIGPITASALVATVGNARDFKNGRQFAAWLGLVPRQYSTGGKTRLGHITKRGDPYLRTLLVMGARAVLQGALRVNDPLSRWALAVQQRRGYHRACIAIAAKNARIAWALLAKDTVIAAA

SEQ ID NO: 314644 - protein, 492 aa, unidentified
MWVTYCSPFDVHSQVYYRSILSELLTLFEEAGNSAKIMCVPIDYAKKDHVVMFCNGYGDILRKPFSVKNTPEGVNYLTEQVTRSCHNRSIKPKHVFFGGEDVGSYAENFASTLRSGGWLVAGVNAHDAKKQRSNIQASTDRLDLMGIATMLLNRRCNCSPAQSGIYRNLRTLVRHRRRLVVMTTEVRSRIHAIIDRLFPGFLDEKKSGITPFSKSSLWLMENRFSTQQIRRRKRSALIEALRRLGTPKPDCAATTLQEYAVWVLNTLDEYVATLQLSLAQHVKHYWCLKENLEQLEKEIAVWLSQTQGAFLTTVRGIGIVLAAGVTAEIGDPFQQKPLNNLVSYAGIIPRVIQTGGPEGQIYTGKVAKRSNRILKDYVVQSASHLGLHGPKDLMSDYTRRDAAGQHADFGIARRYLRMAMALMRNSQIYLPPRLRKKDSKPEERAAYHLMRWPYLRDKWQKLDALEAAFTEDRPLGRWRNMVQGIYDIELKL

SEQ ID NO: 314645 - protein, 326 aa, unidentified
MTTKTSTACSRIIGIDVAQDKLDVFDPDHHIQKEIANTKNDIRRNLVKMLKDQDVFVICEATGGCERTLVKQLQSAGIPVCVTNPAQVRHFAIGIGRIEKTDPIDAYVLSLFGQQVELFPTLPKTPLQEEHESLVRRREQLLQMISQEQNRLRHCHDTQIRSMVEKVLKTLRSQLKVVDGKLGKVLQQVTEIDPQITVLQSIPGVGTVTVATIACDLPELGKLNRNQISKLAGVAPIARDSGKKSGRRRIIGGRQSVRRVLYMAALVATRHNPVIRSFYQKLIDAGKEKKVALVACMRKLLTIMNTMVRNNEPWRHADVEKVVADA

SEQ ID NO: 314646 - protein, 379 aa, unidentified
MYRILKIGMDVHTTNLTLCALESKFCEEDQIIANITVGPDHKNVLDFIKRIKEKMDPKGQDEIDVECGYEAGCLGYSLYHTLTACKLKCRILAPTTMLSEQGPRIKTDRRDAKLIAQCLSNGGYHAVHIPTAEDNAVKEYVRMRDDHKLALKKVKQQTNALCLRFGFFYDGTNWTGMHLKWLRALELPELIREALNEYLATYDELTAKIDRYDKRIQEIAAQSEYQEKVKKLECFLGIKTHTALSLIVETGDFIRFRKGNIYAAYLGLAPGEHSSAESGGRLGITKAGNSHLRRLLIEAAGGICKGQIGKKSKDLIARQKGNPADVIAYADKANVRLRSKYYRLTRHGKKRNVAVAAVARELACFVWGMMTDNIHGNAA

SEQ ID NO: 314647 - protein, 320 aa, unidentified
MIKEPYFVGIDVAKTRLDIAVRPTDQRWQVDYTEKGIRELVEQIAELHPTLVLLEASGGLELPMVTALAIANLPVVVVNPRQVRDFARATGKLAKTDSLDAMVLAHFAEVIRPLPRSLPDTETQALTTLVTRRNQVMGMLVAEKNRLYTSRPPIRQRIQLHIDWLEKELDEIDQDLKETLRNSPVWRDKENLLRTVPGVGPQLAVSIVAYLPELGTLDRKHIAALVGVAPFNRDSGAFRGKRAVWGGRSHIRAALYMSALVASRHNPVISTFYQRLLAAGKAKKVALTACMRKLLVILNAILKHRCSWQYLNPQIIGSCS

SEQ ID NO: 314648 - protein, 427 aa, unidentified
MQYALIQVLPDVPAGGVCAGIDWATADHVACVAGMAGRVKDRFSAAHDKAGLDAMITRLRRNKATEVAIERGDGALVDALLAAGLTVVVITSRQVKNLRSRYGSSGAKDDRFDSFVLADTLRTDRARLRPLVPDTAATIALRAAVRARRDLVAHRVAACNQLRAHLAAAFPAAVGLFYELDSPISLAFLARFGSCDAAAQIGEQQMAAWLQTVPARGNTAPASVLCARLRVSAPGATGAAGTAQAGVTAALTTTLSALSAQVKALETQIAAQLASHPDGHIFTSLPRAGTLRAARLLAEIGDCRSRFPDPQSLAGLAGVAPVTRQSGKHASIEFRWAVNRQLRDAVCDFAAGSRHASPWAASVYDAARDRGKDHPHAVRVLARAWIYVIWRCWHGAAAYDPAKHNALQHLLDRQHAEAADSIWQEDR

SEQ ID NO: 314649 - protein, 412 aa, unidentified
MDNIVAYIGLDWADERHSVHLQPADGKIEHHELEQKPTVLHEWVAQLQQRFAGGKIAVALEQRKGAVIHALLMYDCFVLYPINPKALARYREAFTTSGAKHDPRDSELLLDLVVRHRDKLRAWVPDTVESRKLQALCEQRRKLVNQRVALTNRLTSLLKQYFPQALEWVGDLASVQACDFLVQWPTLDAVQTVRPSRVRQFYCDHNCRKRAVIDARLAAIASARPLTTDAAVIEPLSLSVQTYATQLRTLIAAIATFDARIAAVFAEHADHDLFGSFPGAGDVCAPRLAAAFGTDRSRWASAAELQAHSGIAPVTERSGKSLWVHHRLACPKFVKQTFHEFADQSIRFSRWARAYYDQQRARGNDHHAALRALAYKWIRILFRCWKERRPYDEDTYIDALRRRGSPLAKHFA

SEQ ID NO: 314650 - protein, 311 aa, unidentified
MTDDTIGIDISKATLDIHRLSDGKMMSFSNCPAGFKEFSKFCAQTSVTRVVYEATGAYHSGLERALGALLPLVKVNPLQARRFAQAQGVRAKTDAVDAKMLAVMGNAFVLDPDKPATKLQHDLKELRAFRSGLIKDRTRIMSRQKTQTLSIICRQSKARLAQVDKHIAEIDAEVKRLIQSSDTMARSMKILRSIPGIGAVCASTILIEMPEIGRMDRKQVASLTGVAPMTRKSGQWRGKSFIQGGRKVVRNALYMPALVAMRFNPDLKAKYQAMIKAGKPPKVALTALMRKLIELANALIKADRNWEEKRA

SEQ ID NO: 314651 - protein, 319 aa, unidentified
MAEVAQALYVGIDVSKSTLDVAVGEQGEFWSVSNDPAGIGALVERLRPLAVARVIVEATGGLELPVVAELYAAKLPVALTNPARVREFAKSVGQLAKTDKLDARLLARFGEAIKPALHQLPTPDEQHLSDLLLRRHQLIEMRTAEHNRLGTARSALRPHIEKHLDWLAEAIADLDTELGEFMRQTPLWHSKDEILRSVPGVGRITAYTLLADLPELGTLNRKQIAGLVGVAPLNHDSGRRRGKRRTKGGRTAVRNVLYMATLTATRMNPVIKTFYERLLKAGKEKKVALTACMRKLITILNAMLKQSKTWQVESTAAAT

SEQ ID NO: 314652 - protein, 339 aa, unidentified
MKNYFIGIDFSKKTFDATVLKKDEPCGLGVHQVFNNTESGINNFKKWIIKTTETNKKESILICGENTGVYSKLVSDSLSNLGYSIWLESALQIKRSLGLTRGKNDKKDSRDIAEYAIRHNDKFKQHIPLSKELEALHVLFSQRRLFVLQKKSLSARSKELNDKYSSNSLLSSSRKCDDRLINFYTAEIKKINDQMLKIINQCEELKANYDILISMKGVALINAVALLIYTNNFKRFDFNARRICSYWGIAPFAYQSGTSLNGTPHVSKYADSYLKGLLSEAVICAIRFCPEIRNYAQKLAAKGKHPAIIKNNCKNKMIHILVAMVKNKTLYCEIKKITN

SEQ ID NO: 314653 - protein, 312 aa, unidentified
MERIFVGIDIAKDQVDVHVHPTDERFQLSRDDAGLAGLVARLQPLGPRLVVLEATGGYEIPVAAVLASAGVPVAVVNPRQIRDYARATGQLAKTDALDARLMALFAEAVQPEVRPLPTPEAQALGALVTRRRQLVDMLGAERNRHHQARDLRLQRRIATHIRWLTKALAEIEADLATRIRSSPIWRERDNLLHSVPGVGDVTAYTLIADLPELGHLDRRKIAALVGIAPFNRESGHWRGRRMIAGGRPAVRSVLYMATLTAVRFNPAIAHFYQRLVAAGRPKKVALTAAMRKLLTILNAMLRDQRPWQPQTA

SEQ ID NO: 314654 - protein, 287 aa, unidentified
MYLCIFNQDGAIRVHRHMPAGPEPFLKAVAPSRTDLVVCVACISPWYWLADLCAREGMPFVLGHALSMQAMHGGNAKNDTMDAQKIAVRLRGGRLPQAYGSPAAMRATRDLLRRRRHRRRQRAALLPPVQQTTSQYNWPDIGKKIASKTNRAGGAERFADPAVHKSVEVDRALIDYSDRLLQALELGIVKTAKQHDANPLSLLQTGPGIGKLLRLVLLYASHEIARCPRVQDCVSYCRVVNCAKKSPGKRYGTAGTTIGHASLTWACSEAAVLCLRNNPAGQQYRAR

SEQ ID NO: 314655 - protein, 269 aa, unidentified
MKYIGLDLHKRNIFATVLEGDGRILSRANIRSKKEDINYYLKRQGSSNDLSVAKEASYNWLYYYRVLETITDNITIAHPLKTRIIGEAKIKTDKIDSKVLAYMLRANMLPKVYIPTKTSMENKLLLRSRISLVRIRTGIKNKIHTIIDRNRDSYSDLENLTDIFGKTGIGILKCTKIPEPDYMILTNYLGLIDDINKKIKELETEIDKRLVLDKDIELLKTIPDVGNFTAFILKSEIDYIDRFISKEKFTSYAGLVPSIHQSGSRSYTG

SEQ ID NO: 314656 - protein, 337 aa, unidentified
MELYCGIDLHSNNHVVTVIDDEDRRLYERRLPNDLAITKAALEPFRTQLVAVAIESTFNWYWLVDGLMEAGYEVRLVHTGAVVQYNGLKHTDDEHDAFWLAHLMRLGILPTGYIYPKNERGLRDLARQRMRLVQHRASHITSVQNQVWRSTGVRLRSQTIKGTGKQPWPELRNPDLALSVETGRAAIDALTAQIERLEELLLKRVGLSRPFQLLKTVTGIGPILALTIALEVGDIKRFPGVGEFASYCRCVDSRRLSNAKKKGEANRKNGNPYLAWAFMEAAHFAIRYLPAARRFYERKRHQRNALLAVKALAHKLARACFYILRDQVPFAPERLFV

SEQ ID NO: 314657 - protein, 324 aa, unidentified
MEVEAVYLGIDVSKARLDVAVWPSAECFSVANDPRGIAELVEKVGALKPQAVVLEATGGLEALAASELHAAELTVAVVNPRQVREFARSLGRMGKTDRLDALVLAQFAQSAHSNDRLPELRLRDEAEAELKALVTRRRQLLAMLTAESNRRERAPKVIRRSIVASIRALKRSIAAIEQQVREVMSDSPVQQAKAVLLAAVPGVGPQLTATLLAELPELGSLGRRKIASLVGVAPHPHESGKFYGRRRCWGGRATVRTTLYMAALSGVRFNPALRSHYCALLERGKARKLALVACMRKLLVILNAILRDSASWNPHHQLDFQHSR

SEQ ID NO: 314658 - protein, 344 aa, unidentified
MKVSVLGIDLGKNVCSIVGFDETGAVVLRRRARRETLIGLAAKLPPCIVAMEACCGAHHLARLFANQGHDVRLMSPEYVRPYIKAQKNDDRDAEGIAEAATRPTMRFVEVKAQEQLDIQTLHRSRDRLVAERTALINQLRAILLERGIIVPQGKRKLEQYVTALMEGQDPNGLSQRIRTLIADVRGQWLELDRRIAVFDKEFAAFAKENEDARRLTTIPGVGVTIASALIAAVGNAETFEHGRDLAAWLGLVPRQSTTGGKPRLLGVSKRGNKYLRKLLIHGARAALPHIAERDTALGRWAKNLLARVHKNVAIVALANKLARIAWAVLRRGEKFTAKGLPLAV

SEQ ID NO: 314659 - protein, 343 aa, unidentified
MTSSQTKDISLESQPRLGAGIDVGSEELVLVIRKNGKPFDPQKYSNTRAEHARMVKKLSKLPGVIVCMEATGIYHFDLAIALHDAGIKVMVINPKVSHNFAKVLMKNSKTDDVDANTLAVYAERMDFVAWTRPSNEKIALRCFSRRINALTNQKAATKNHFHALSATEGTPKAVMQDVKLAIAQLEKRIDKLTAEALVLIGEYSELERVLELLTGIKGIANTSAIALMGELLLLPPDLSHREWVKFAGLDPKAFDSGKSVHKKTRISKAGNRHIRAALYHPAMSAVQHDKYINAYYQHLIERGKQPLQGFCAVMRKLLHAIHGMLKHDKPFDNTRFYAIPAAA

SEQ ID NO: 314660 - protein, 347 aa, unidentified
MRFYTNQHKYYCGIDLHTRKMYVCILDEKGEIREHRNLNTDRDAFLKAIAPFREDIVVAVECIFTWYWIADLCHNEGIPFVLGHALYMKAIHGGKAKNDKIDSQKIAVLLRGGMMPMAYVYPEKMRATRDLMRRRNHLMRKRSELFAHIQNTNSQYNLPDSFGCMSRPKNRDGIIEQFEQPSVQQNIAVDMEMINTYDSVLSQLEKSIIKLANHHDPVSYALLQTIHGVGKIIALIILYEIENIRRFESVQDFASYSRLVKCAKESNGKKSGSGGSKIGNAHLKWAFSEAALFFINGNDPAKKYLDKLTKKHGKSKALSILAHKLGRAVYFMLKNKEAFDQKKFLAV

SEQ ID NO: 314661 - protein, 319 aa, unidentified
MAMNTQAIQIGIDVAKEELVIYRQDLDQLDSLPNTIPSIRRWLKTLPKQAALAVEATGTYHMPLTEQAHRAGHRVFVIDGYQLKHYRESVRARAKTDPCDARLLARYLAREGDDLRAWTPPPKAYRTLQSLLRRRSKLIQARVALQQSLGQEPSLKAPLKRLVAQINRIDQLIQKRMDQAVRQADLTEQVARCEAVEGIGPLSACALVMAFLRGDFRNSDAFVAFLGLDVRVRDSGKQVQRRRLSKRGDPEIRRLLHNAAMAARRHPYWANVYQRYRDRGLQTTQALVILARKLARIAFALMKNQTTYQAKARPACGTT

SEQ ID NO: 314662 - protein, 348 aa, unidentified
MDHIAIDLCSRESQVCIRTSEGRIVEERRVGTRSLGKYLAARPKSRVVLESCAEAFSVADGALAAGHETVVVPASLAPSLGVGERGIKTDTRDARNLSEASCRMSKLPSVHIPAKVSRERKSQCGMRETLIQARTKLINTARGWARSQGLGVVRSGSTNTFPLRLKEHVSNRGVTIPPYVGRVLTAIIELSTQINEMDRELEVCAAADPTCQLLMTAPGVGPTTALRYTAAVDDVERFPTAHRVEAYLGLTPGENSSSERKRRTGITKAGPSQLRWVLVQAAWVARRYYKDHPLVLWALEVEKRRGKKVAITALARRLAGIMYAMWRDGRPYDKNHGQPVTRAADAAA

SEQ ID NO: 314663 - protein, 358 aa, unidentified
MQRNKISFKGQKIFIGIDVHKKNWDVAIAPEIGIVKRHPQKASAKELFDFLKKHYPDGDYLAVYESGFSGFSTYYALKDVGINSIVIHAADVPTTQYEEVMKTDKIDSIKLVRSLKAGLLKGIYVRERENIDDRSVVRIRKTILKDLTSYKSRVKHMLHSNGVSLPERFEKPGSHWSKAFIKWLKEDVVLLSSSRNSLDLLIRQVETIRKTLLDATRMIRNLSQTERYRQNYALLMTIPGIGVVVSMCILTELYDVKRFHNEREFAAYLGLIPTCHSSGDKIVHGEKTFRGNKKLGPMIVEAAWVAIYKDAGLGSLYMQYKERMKPQEAIIRIARKLSNIIFAVLKNQKEYVPYHLGI

SEQ ID NO: 314664 - protein, 299 aa, unidentified
MKRVQSNTLDFIGQNIYVGIDVHLKSWSVAILSEHSVLRRFRQDPEPEVLHKYLVSNYPGANYFSVYEAGFCGFWIHEKLTDLGINNIVVNPADVPTMSKEKLRKTDAVDCNKLARELRSGSLEGIYVPGADILEMRSLIRQRNLIVKDSTRAKNRIKSLLRFHGVEIPEEFPRCSIGCWSKRFLSWLHSLELSTEYGKKTLGLHLEQFIRLRKMLLQETRAIREISRKAPFDKPIRLLRSVPGIGVTTAATLMVEIDDIVRFSNADHLASFIGLVPMCHSSGDNDNVGDITPRRHFML

SEQ ID NO: 314665 - protein, 350 aa, unidentified
MTTVAEVVDAVIGVDTHRDTHTLELTSPVGATIAVLEITNTPEGYTEAIRWITEHSPGPRIMTGLEGTRSYGVGLSRALQTAGLVVVEIERPKREQRRGKGKSDPIDARLACLSLLRMDTAALPQPRVDGDREALRILLISRAEQTLTRTRQGNQLHALLLTGSDADRALGKGAFTQTRLRAVLARTLPADASREDQIRHEEATRLAQAMLLADKSLLANNNSLREIVSSMQPTLLQMWGVGPVSAAQALVTFSHHHRFRNEASFAMVNGSAPLHASSGQTRRHRLNRGGDRAMNRALHTIVMTRWRTCPETAAYIAKRRAQGKPDREIRRCLKRYVSRQLFREMNAPTA

SEQ ID NO: 314666 - protein, 403 aa, unidentified
MAQTVQTESTTAASGTLYVALELSKDTWKLGLTTSRIKKARIRDVKARDLEGLLAEVQSAKQRLGLPEDAPVKSCYEAGRDGFWIHRFLEDKGISNVIVDPASIEVDRRSRRAKTDRIDAQKLAQLLARHDDGEEVLRIVRVPSPEAEDERLLPRQLGALKRKRTQASNQIRASLFLHGVDLDPRRGNFAAKDFLKKLKLARQWDGTPLPTELRRTIRMQWDQYVLATRQIKDLEQRQRQALREARRGSTEATPAMRKAAVLSQLLGIGDIGSYMLATEFFGWRDFKNRGEVGALAGLTGTPFQSGDSGRDQGISKTGNPRVRTLMVELAWLWLRWQPESRTTRWYHEHAGKGGSRAKRKAIVAVARKLLVELWHWVEHGVVPEGAVMKEEFAATPVKAETAA

SEQ ID NO: 314667 - protein, 402 aa, unidentified
MNAVGIDVSKGKSMVAIMRPFGEIVSTPFEIKHTTSDINSLVELIKSVEGESRIVMEHTGRYYEVLAHQLSEANLFVSAINPKLIKDFDNDSLRKVKSDKADAVKIARYALDKWQNLKQYSVMDELRNQLKTMNRQFGFYMKHKTAMKNNLIGILDQTYPGVNTYFDSPARSDGSQKWVDFASTYWHVDCVRKMSLNAFVDHYQNWCKRKKYNFSKSKAEEIYGKAKELVPVLPKDEITKLIIKQAIDQLNSSSTTVESLRTLMNETATKLPEYPIVMAMKGVGPSLGPQLMAEIGDVSRFTHKGAITAFAGVDPGVNESGSYEQKSVPTSKRGSSDLRKTLFQVMDVLIKTHPQDDPVYQFLDKKRAQGKPYYVYMTAGANKFLRIYYGRVKEYLASLPES

SEQ ID NO: 314668 - protein, 408 aa, unidentified
MSVYVGIDWSVKKHDVAILNETGSIIAQLTIAHQASGFEKLNKTREQVGVEAAECLVGLETAHNLLIDYLWGRGYEQVYVIPPSVVKSSRGRYGSSEVRTDARDARLLADLLRTDLARLHPWRPDSLLTRQIRAKVSLVQHMTKRTRRVTERLRAVLLRYYPCVLELFNGLQSQITVDFIGQYNTPEAAEALSYEEFIDFARPHRYPRRWLPKQYAKLQKEQPAANSETVAVYEEEGRMLAKDLLGLMQTNRRLKRELTGLFEEHPDQQIFASLPGAGELLAPSLLAKFGDDRARFPTAGSVQALAGTCPVTDQSGKKRIVKFRRKCDKEFRQVVQQWARCSLRRSVWANAYWEEIRSRSHGDNDAYRRLGNRWLGICWKLWQTEEVYDEAYHLRQRRLRRKPRSNRG

SEQ ID NO: 314669 - protein, 341 aa, unidentified
MKNLFIGVDFSKEKVDVAIIFADGLTETAPRVFNEFKTTVSGYKQLVKWVEQNSYGIDSSLWLFCGENTGDYSKGLCNFIYGKGYDMWLENAKSIKDASGLRRLKSDRADASMIAEYAMRNYDKAVMYEPLSESLAQLRELFLYRQMVVRHRCSFQVRRGEKKLTMEKSPIKTMISQSGRHIVSELNKEIEKIDKRIAELIKSDEELTEVFTIVTSVPGIGTQNAVCLMVYTDNFRRFNYDSRKISCYYGIAPFGKDSGTSVHSDPHVHYMANRQIKAMLTQASLAAVKFNPIMARYYMRLVERGKKKQVALNNVKNKLIHLVTAMVRNRQLFSPEYKISA

SEQ ID NO: 314670 - protein, 388 aa, unidentified
MQFAADRLEAPTAIRTDLGAIFISLELSRSSWVITSLSPGGGEKMSKHTVRGGDVAGLLKRFAQLREKALGRTGKVFPLIVIQEAGLDGFWIDRVLQNEGIESHVVDPASVATSRRRRRAKTDGIDGEALVRALLAYKRGEPRVCSMVRLPTPEDEDRRRLCRERKVLTMERVQHVNRIKGLLFSQGVSGYEPLRRDRRERLDALQTGDGRPLPPHLKAQVRRELDRLELLLAQIKAVEAERDVLLAAEQTKAPVAPAMLLGVKGIGPEFAAVLWSEGLSRPFENRRQVAAYAGLAPTPWQSGSVDREQGISQSGNPRLRTTMIQLAWLWLRHQPDSALALWFHDRVKRNGGRLRKTTIVALARKLLVALWKYVTAGVVIEGAVTKTA

SEQ ID NO: 314671 - protein, 341 aa, unidentified
MAEFIRIGVDLAKNYFQIHALSSEGAPALKRKVTRGKMREFFLQIAPCRVGMEACGSAHYWGRELKAMGHDVLLMPPAYTKPYVKRGKNDAVDAEAICEAVSRPGMRFVPIKSADQQATLMLHKTRDLLVKQRTMSVNAVRSHLAEFGIVVAKGIGRVDELLDLAEGDATLPNATVMAVKVLGQQIEALEKGLQDLEKEITKAHARSEMSRSLSEIPGIGKLVASVIAASVPDPSVFKSGRDFAAWLGLTPRQNSSGGKQTLGAITKAGNRYIRKLLVLGATSLLSVVGKRKGGLRDWIVGLLAKKPARLVTVALANKLARIVWAMMKNGECFRTEIFARA

SEQ ID NO: 314672 - protein, 311 aa, unidentified
MENFTTETIGCDLGDKMSDVCVMDAAGRTRRARVASTRKGMTTFFTRAPLHVVIEVGGHSRWVSELLEGLGHRVTIANPRRVKLISASDNKTDEHDAELLARLGRADASLLCPMVHRSSEMQADLAIAKARDTLVATRTKLVNHVRGTVKSFGERFPKCSSSSFARHTRALIPAALETALGPVYETIAKLDEQIRAQDKMIEKTAERHGDVAVLEQVDGVGALTALVYVLTLEDKGRFTSSRMAGAYLGLRPRKQKSGNDDPQLRITKAGDPFVRRLLVLSANYILGPFGKDSDLRRWGLKLAERGGKNAK

SEQ ID NO: 314673 - protein, 350 aa, unidentified
MPLVAEVIDAVIGGDTHRDTHALEMTAPTGATISTIAIANDEGGFADALAWIAEHTPGSRVVVGLEGTRSYGIGLARAVQAAGLAVVEVERPRRPDRRRGKSDPIDAHLAALHVLRLDADQLPTPRADGDREGLRILLGARRELTMVRTMQINRLRALLLTGDEADRRLSRGTLSDNRLNAIRRRRAKSDETVEASIRRGEARRLAIAIREAGHELKQNKKQLGAMVDDLAPRLQEKVGVGPVSAAQAIVSWSHAGRCRNDAAFAALAGASPIPASSGRVIRHRYNRGGDRSLNRALHDITLTRWRICPRTHAYIARRRAEGKSDNEIRRSLKRYIARELYRTLEATSAA

SEQ ID NO: 314674 - protein, 368 aa, unidentified
MNKNIVEAALTASAEELKNEKSAKAKRILLGADVHLRGYQVARKVDNGPIGVVENFRSEAELLLYVAKQRQRAQEVVVVYEAGPLGYTLYRKLTASGVLCYVCAPDSTQQKRKRVKTNKIDARSLTSKLFNYLNGDQNAFQLARVPSEAQEQRRLASRQHDQLVEERKRLGAKGNAMLLSQGLGSWSNWWRAKAWSQLSTVAPPWLLERLQIWVDVLKILDEKICQAKAALARGCSGPRPKGVGALSLMQLQSEVLDWALYPNRRKIACLGGMVPSEWSTGGKETRGSITKVGVPALRRIIIEMVWRIILFQPQYKPVQKWRGVLQGTNPALRKKAVVAIGRQLMVDLWRMQTGRVTAQELNLVMIED

SEQ ID NO: 314675 - protein, 460 aa, unidentified
MDQVPVIGIDLAVTAASELAVASGAAIEAGRKVASTPKGLTEGIRQAAKGRAVAIVVESTAMAWLVAAVAALRSGVEHRLYRVSGRKSAALRAFYRSHTKTDHIDARVLARMPAVDDSLRTFALPTPGELALKRLVVARHKLTTESTKISNRVRSMLHWAAPGVLKAAGGTVSAGLVAVLGRWSDLRSLARARPATIGLQGEWTSERAEAVRAAAAEAVAFYEGFVDFSAVGLELEISLAQLGFLHSQVERLEERIATLHNQLYPTDRLVSIPGIGSVVAGVIRAVVGDLSRFANLASFRAYTGLVPREDSSGEVRRRGRISKAGPSVLRWALYLAADVARQCDPALADLYRRLMVERGRTHTQAVCAVASHLAGRVYAVARADRDYIWRDLQGNEITKERARAIAQSLRVDHATRARLRARAEGGPRTPCARQPAAPQDVTQPSVDKLIEAALELARKQ

SEQ ID NO: 314676 - protein, 313 aa, unidentified
MKEEKTFIGIDVSKEKLDVGVRPQVDFMTFANTEDGISLMTDFVKSKQPELIVLEATGRLEMAALRSLVVARLPAVCVNPRQVRDFAKAMGVLAKTDKIDAHVIARFADSVRPEIRPLKTEETEILDAFNTRRNQLIIMLTAEKNRLTTASKWTKKDIEKSIKGLEKALAKLNREVENLIKKSPHWRHMDKILQSVPSVGPVMSLTILADLPEIGTMNRRQIAALVGVAPLNRDSGKYKGRRAIWGGRARIRSVLYMCVISGICHNPKIKAFYNRLISSGKKHKVAITACMRKLMIILNTMIKNDTCWNESGC

SEQ ID NO: 314677 - protein, 373 aa, unidentified
MPKYSTAFGMDVHLRSTTVCALDADTGEAVTRRFPGNPWGEIAGWMDGFPGPSLAAYESGYLGFAPQRELAGLGVECVVAAVSKIPRSAADSASKNDRNDAARMAKAILAHDISPVWVPSPEVEGIRDLAGAYDGATARLATAKQRLLAFLAKRGFAYGGTTPAGNPRKYWTYDFLRWLDKVRPEDDGGVRTLAALRNEVEAAAEARADLLSEYRAAVDASPIAAEAAALQSIKGCAFALAAAFSAEVGDFTRFRSGRQVTAYFGLAPSQRSSGDSVRLGGVSGAGNALVRKLAVEGSWCYAAARHQPKLMPRDTGVPLEIRMHGRKGSERLLRRREEMLARGMPAAKANAATAAELVRWLWALGTMCREGAE

SEQ ID NO: 314678 - protein, 350 aa, unidentified
MKQNQKVIRQSSGIDISMETFDASIFQLLEDFNTQVVSTKKFKNNQDGFDKFYQWVDKFKNKSITINFTMEATGVYYEGLAYFLNDKDETVHVVLPNKSKKFAESLGLRAKTDKVDAKMLGCMGVERQLRKWSPCSVLFRNLRFFTRERESLKQDRTKAKNQLHALNHSQASEQKTITRLEAKIRFLDVQIEDVEGDIEKLIENDILLSKKVKKVLTIPGVGINTLAPIIAETNGFAAMENIKQLTCYSGYDIRIRESGKWKGKNKISKKGNSHIRAVLFFPACTASKHNKPLKKCYERIKEAKKIPMVANTAVQRKLLGLVFTLWKNDTVYDEDYELKKEKKSYINIGN

SEQ ID NO: 314679 - protein, 440 aa, unidentified
MGQKAFRPQEYDVFAGLDVDKRSISVTFSNHQQGFVRSLHMPYSAEHLLKHVRKHFPDQKIAFVYEAGPTGYGLYDGLAAQGYNCLVAAPSMIPRAPGKRVKTNRLDSRALSESLRGGQLKSIHVPSPIYRELRHLTQLRDTLVSEVAGMKQRIQSLLLFEGIAFPSAPAGSRWSWIVKGQLRKLQCSQSVRFKLDQLLDNVEFSEKQVVKVTKEIRKLCQNDPELAQSIKYMMSVCGIGWIVASQLLARIGDWRELKNVRQLAGFLGVVPTENSTGEKTDRGSITRTGHTRLRSKLIQAAWSAIRQDAELRDFYTSVCRRHPRQAGPRVAIVAVARKLSARIAAVLMEQRPYVVRQKVHSAPLTQEETSPLGTTRRLREPTPDGSTLETEIPGLCALEGRIPSKCVTAGCRATYSSKSLFGWRRMERKRVEEKRGLVCL

SEQ ID NO: 314680 - protein, 502 aa, unidentified
MVQCQKNVKYSLNQSKGKSSQKDQPQKTLKTKRKKTNGKRFTNLDRINPNAAGIDIASTEHWVCVPPEHTEDNVRKFGTFTCDLRAISQWLKTHKVKTVAMESTGIYWIPLFQRLEQDGFEVLLVNARHVKNVPGRTKSDNMDCQWIQKLHTFGLLQGSFRPNDEVCKLRSFLRHRDNLIAMAARHTQHIQKALWQMNILLSNVISDITGATGLKIINAILAGQRDPMLLAKLKNSRIKASLKTIVKALEGDYRDEQLFILQQSLDMYRYTHQQMERCDQQVRNLLDQWDKVTNSKINPLPPSTSCHVKPRDNEPSYDVRKFLYEILGVDLTQIHGLQASSVQTILAEVGTDMAKWFSEKHFVSWLGLCPAPDISGGKILKNKTKKVQSRASKAFRLAARACANSNSAIGAFYRRMRYRIGPSKAITATAHKLAVIFYIMLRDKVDFIELGVDYYEKQHQERMKKNLERKAKSLGLKLIPIDENETPSDLQDQNKATCVSSS

SEQ ID NO: 314681 - protein, 362 aa, unidentified
MAHAIRWVGLDVHAHESTFAIFDQDTGEVITRRVAGRPHVLLAWLRGVDAPMRAVYEAGPTGYGLARRAADERLDVRVCAPGHTERRPGARVKTDKRDAIRLARLLAAGELTLVTVPSVAHEQLRDLVRCREDLRADLMRARHRLGKFLLRREIYYTGRCRPWTHEHRRWLAHLRFADRASQLTFEDYLHAHDVLLARRDRLEHELAEIAERSAWATTIAKLRCLRGIDTLSAVGLCAEVGEFARFVHPDALAAYLGLVPSEHTSADKRRQGAITKAGSTHARRLLIEAAYHYRHHPAVGMTLERRHRGQPAAVIDSAWRAQRRLNARWRLLKSARGKQNGIVAVAVARELAAYCWEIALTD

SEQ ID NO: 314682 - protein, 405 aa, unidentified
MMYNAVGIDVSKGKSTVAVLQPGGTVVRRPFDVKHSASGLKDLVGYISSLDGDTRAVLECTGRYHEPVVRALSDAGIFVSTVNPHLIRNFGNNTIRKVKSDPADSRKIARYTLDNWASLRQYSGMDTTREQLKTLNAQMDFFTKQKIAAQTNLISLLDMTYPGVNDLFDCPTRSDGSQKWVDYAASFWHVDSVTKIGLSAFTERYQAFCKRHGYNFQPAKPKELYDAAKELVAVFPKEKEYKDLILMGIKQLNATAASVEQIRHEMDRLASTLPEYSTVMSMRGVGPTLGPQLIAEIGDITRFAHREALTAFAGVDPGVNQSGQFSARSNRASKCGPPRLRKALFLVMDCLLKTSPADDPVYQFLDKKRSEGKPYNVYMTAGANKFLRIYYGKVKAYLASQAKSE

SEQ ID NO: 314683 - protein, 511 aa, unidentified
MARRARGSSPQPTVNNSAASKNLRSDYSKSGRTAPGPSRSSVSGRAKVSQSLPADLEAPVKKSERIVAHEAPSIRSTRNRAQVLRQPKEPMKTWTESRFYAGLDWAKDHHDVVVVDPQGTIVADFRFAHTLEGWKQFQEKIAPFMPLAVVLETSQGMAVDQLMAAHCLVFALHAKSAQRYRDRKIPSGNKTDRSDAWALAEALRTDGSQWAPLQPGDPLAEQIRLLCRDEMSLIQQRTLLVNQLQQALYEYYPVVLEAFEDWTMESAWDFVIEFPTPQALQKAGRRRWEKFLHAHHLWRQKTAEERLAIFARATEFCGAPTTLEAKSLLALSLAKLLRTLQAQLNQYRQRIQQLSEQHPHHDLFDSLPGAGATLAPRLLGSLGAQPDRFENHQALQCLAGTAPVSYQSGQIHKVHLRYQCDKFLRQTVHLWSDCSRKTCTWAQVYYQKKRAEGKSHACALRCLGQRWLKILWKMWQTKTPYNPELHAANQQKHGSWVLTLMPQKQTACSGE

SEQ ID NO: 314684 - protein, 343 aa, unidentified
MIGIDPHKDTHTAAAVEDATGQLLGELTVPGTQEGHLQLRSWAHELAGEGGELRFALEDCRHVNGRLERFLLGAEEVVLRVGTRMTARARTNARTVGKSDSIDALAVARAALREPDLPLASIDPELRELKLLVDHREDLVSERTAIVSRLRWHLHDIDAGLEPFARTLNREPIRRGLSQRLGRYGSGVQVRICRELLVRIGELTRAVEALRVEIAALIRPLAPGLLAVSGIGDLIAARLLVEIGGAERFSSEAALARHAGCAPIEVSSGRVRRHRLSRLGNRKLNAALHQVVLTQARVHPPARAYLSKKRAEGKSNKEAFRCLKRHLVRTIFRALREPVPSPG

SEQ ID NO: 314685 - protein, 386 aa, unidentified
MQASTAATPTTRDYGTIFVAIELSQKTWLVTLHSPDKDKISRHRLEGGDHAGLLALIDRIRERAAQALGGVPAVVSCYEAGYDGFWLHRLLLAAGITNYVFDPASIAVDQRSRRVKTDRIDGERMLRTLMAYLRGEPRVVRIVQVPAPEQEDARRASRERSRLIKEQTAHTNRIKALLRLLGMAVGNPRRRDWLSWLATQRDWQGQAVPPQMLSELRHQHARLMLVRERIDALAKTPAQADPSPAAAQMAERSELLLRLKCLGPAFATTLTHEVFYKDFRNRREVGSYFGLTPSPWQSGGIDRDQGISKAGNPRARCAAIELAWLWLRHQPDSVLTQEYRRRTLDASKRIKRVAIVALARKLMVALWRYLTTGLVPDGAVLKTVKA

SEQ ID NO: 314686 - protein, 481 aa, unidentified
MADNTRARTSHTQQLTRKQRRELGRRIWSEHPGLEVVHRDAAGIDIGSEQHYVAVGPDRDAEPVRAFGCFTEDLHRLGRWLRECGVRTVVMQSTGVYWIPVYDVLEQHGLDVWLVNAQDTRNLPGRKSDVQESQWLLKLHTYGLLRKSFRPEPNIRALRTCWRERAEYVQQAGYCIQRIQKALTEMNVQLSNVLSDLSGVTGMCILRAIVAGERDGRRLAEFRDARVQASQETIAKSLEGTWRPEQLAILQRQLADWDHVRQQIAACDVDLAAMMKQLPDAEIDPQPPAATPPSKPIRRRQKKGRSSRNEPNFDLNGELKRVTGVDLARIDGVKEMTIQTILTEAGLDMSKWPTENHFVSWIGLAPRNDVSGGKVLKRKTRKVVSRLATALRIAATTLRQSDSYLGEQFRRLRTRLGAPKAITAMGAKLARLVYRMLKYGQEYVDKGSAQYAAKHREQQIRHLKRKAAQHGFTLVSISDPT

SEQ ID NO: 314687 - protein, 347 aa, unidentified
MVTVGGDCHKRTHTLVAVDENGRELGTLTVPAIAIGYLEARRWASQWRERRWALENCRPLSRGLERDLLLAGEAVMQISPKLMAGARWTAREWGKSDPIDALAVARAALREGELPVAQLEGDSREVKLLLDHREDLVGERTRVQNRLRWHLHELDPAFRVPGRSLDRKVVLNQVDKMLAQHSGVAAGIAVELAQWVRQLTVRINQLEQQIGTLTKRLAPSLLELDGCAALGAAKLIGETAGISRFKTSAQYAMHNGSAPIPVWSGNHERHRLNRGGNRQLNAALHRIAITQVRLGGRGRDYVQHRREVGDTKREAIRALRRRISDEVFRRMQQDQMSATKAPAEAAA

SEQ ID NO: 314688 - protein, 410 aa, unidentified
MAERFVGIDVALREHRVAVLDRDGEAVGPSFTIAASPEGVATLLRTLTARAAPAAQTLIGLEASGHLWENLEAALVGAGYRVLVLNPLQTRRYRDVVRRKAKTDDIDAHLVAGLLRSGAAQASYVPDEQIQSLRELARLRARLLADRQDYLRQLIAQLDVVLPEHRTALGDLLSARARGILAQFPTAQHLAQASPRAIRRAAEDAGTRGFALDEAIAVRDAARRSLYRGKAAAARAQVVRTLVSQLERLTSAMDEVDRAATTLLPPSAPGAGPSDAELLQTIPGIGPQTAATLLGELGALTRFTDARALVAYVGFYPVIHESGERAATPHLSPVGPRLARHSLYLAAFNAVRHSGEWRTIYLRKKAQGKTGKQALVVVAVKLLHAVYAMLKHREPYNPSRLLVAPATMRT

SEQ ID NO: 314689 - protein, 353 aa, unidentified
MKRDKYMGMDVHQATTVVVVLDAEGKPVWDTIVATEAAAIIRLLQSLSGPLHVTFEETTQAAWLYEVVRGYVAEVIVCDPRRNKLLDEGSKADKPDARKLAELLRAGMLRSVYHGHEATRKLKEIVRAYETLSADAARTMVRIKAIYRGRGVPTAGRGVYQLNQREAWLAKLSEPGARQRAAWLYQELDQLRPLRKRAKQAMLVESRMHRAFTLLRTIPQLGPVRCALIVATVDTPHRFRTRQQLWSYSGLAVVTHMSAEYEMKEGRVVRSRKPMATRGLNRNCNRRLKEVFIGAATGGSQREPYRTYLKDLQQRGMRAEMARLTLARKIAAIALSIWKKGETFDPKKLNWTT

SEQ ID NO: 314690 - protein, 456 aa, unidentified
MPDYFFGIDASKGYSNFVMLDSLKHYVEDDFQLDDTFDGHQKLYSILSEFCVRHPKANIFSAVESTGGYENNWFDALVRFQTHLPIRTARLNPCGVYNNSKAELNRNITDKISAENVAKYMIEHPEKVQYQQQDPLAPLRKQWGFIKMLKKQKTQMLNQLESNLYTANPEILAYCKDNTPAWVLSLLQRYPTASKLAKAKKSSVALIPYVTPQKAKKLVETAKQSVASATDETTSQIIKAIVQQIRQLSKTIDAQTKAMADKCSIPEVELLKTFIGIGNDSAVGLLLEIGSIERFKRAKHLASFFGLHPVYKKSGDGSWGFHMSKKGRTVPRQILYMVAMVAIQSNPLIREIYEKHTEKGMEKKAALGVCMHKIIRIIYGMLKHNQPFDPEIDKANRKKQNPQDEKKVGLDKSRRYQAYDVKAPISRRQAKKREERKQSQSVNNAKCGIKAPVPVL

SEQ ID NO: 314691 - protein, 320 aa, unidentified
MAKKKSETFIGIDVSKQQLEVAAHQSDYQFRCANKVSAFGTLVAELLSWRPALIVLEASGGLETRVVSALQGAGLPVVVVNPRQVRDFAKALGQLAKTDRLDARVLAHFAAAIKPPLRPLKAKEQQELDALTGRREQLVEILADEKNRRAAAASDSVRDQIKEHIDWLEDRIAELDKQIKALLQTSPRWASKDQILQSVPGIGPVASFSLIADLPELGTLNRQQISKLVGVAPLNRDSGQQRGTRHIYGGRAQLRRVLYMAALTASRHNARLKEFYQRLRANHKPFKVAITACMRKLLAIINVMIRDNTCWKIKEAPVSS

SEQ ID NO: 314692 - protein, 337 aa, unidentified
MIVVGVDVHMQSLTAVAVDEVGRPLSELTVGSAEELLVWSRSLAAERLWALEDCRQLTRALEQRLQAAGERLVRVPPKLMAPSRRSGRIRGKSDPIDALAVARAALREPRLDHPRPGETALRELKLLVDHRDDLVDERRRAQQRLRWHLHELDPQLAVPAGALDRTVWLDRVARRLSRQEQTVLVRIARELVGRCRSLTRTILALDRELQARIEKTAPTLLALPGCGALSAAKLLGEIGPIERFQSDAQLARHAGVAPLEASSGTHRRHRLDRGGNRQLNCALHRIAITQARVHPPARAYLERKQGEGKSRREALRCLKRQLARTVYVTLRKDRLLT

SEQ ID NO: 314693 - protein, 460 aa, unidentified
MSKLSQPNPRLSEARPFASMSRVNPHAAGVDLGAHEIMVCVPGDESTQLVRSFNNYTADLQAIAAWLKEHHIETVAMESTGVYWIPLFETLEAAGFRCSLVSARSLRRIPGRKSDVLDCQWIQTLHSYGLLESSFRPEADLVALRTLLRHRAQLLEHRAPHILHMQKALLQMNVQLSQVLSDVTGQTGQAIIRAIVAGERDPHKLAALRNYRCHKDEDEIAKALTGTWREEHLFVLKQSLEMYDFYTRQIEACDAEIERMYHTIRPNEDGSDDDDPPHQVPEHKRKSHSKNAPKGGAIRQHLKRICGVDVTAIHGLGEVLAQEIVMETGTDMSKFPNEKHFCSWLGLAPKNEISGGKVLRSATLKTRNRAGQAFRKAAASVMRSDCVFGVFYRRMKARIGPAQAAVATAHLIARVYYRMLKDKVEYQPLSVEEYETRYRQQQVRYLQKKAARLGFQLTPA

SEQ ID NO: 314694 - protein, 352 aa, unidentified
MQQFIGCDAHKRYSVFVAVGEDGRCGPEWKVSHTDGAFEAFLEALPPSSDIALEACSSYYWMVAAMERKRHRPHLAHPLEAKRRMGKSHKTDKLDAGGLGILLRNGTLPEVWVPPAELRDQRELLRLRMQLAGQRTRWKNRIHGALTRYNLHVEASDIFGTRGRQEMAQQLGELPPHTRQSVEQQLAVLDFVEGQIEDCERRLAGLLDESEEVRLLRTLPCVGPILSAVLWLEIGAVDRFPDAPHLASYAGLVPRVRASGGHTRLGPVCRDVNHHLKWAFVEAGNLVAVNQRRLGPCHVLRLYQRLRQKKNHQKAVVAVARHLAEAAYWVLKKREAYREPRAPRLAVSSTCG

SEQ ID NO: 314695 - protein, 361 aa, unidentified
MGDGSKDQPQLTAGLDLGDKYSYLCLIDTVSGEIMEEGRLRTTPEALGRRFSSEQPPIRIAIEAGTHSPWVSRVLEECGHEVLVANARKLRLIYSNKRKTDEIDAENLARLARLDPKLLYPLKHRGEDSQAHMALIRSREALVSCRTQLVNHVRGTVKSFGHRLPKCPARTFHKKAPSHIPEALRPALEPILEQIASLTERICEYDRLLETISKEHYPETELLRQVEGVGTLSALTFVLTVEDPYRFEKSRSVGAYLGLVPAQDQSGDRNPQKHISKEGDEMLRRLLVSSAHYILGPFGSDSDLRRHGEKIASRGGNNAKKRAVVAVARKLAVLLHSLWMSGEIYEPLRNAHRSGGRQEAA

SEQ ID NO: 314696 - protein, 408 aa, unidentified
MNAVGIDVSKGRSTVAILRPMGEVVQMPEDVTHDAISLERLAYKILALGDETKVLMEATGRYHEPVAAELHEHGIFVSVVNPLVIHNYSTESSVRKVKNDQKDSIKIAKFCLDRWTELREYTPMDALRQQLKLISRQYDLYMKTRVTLENNLISLTDKVFPGVNEMFKSPERADGHQKWVDFITTFWHCECISRVSEEAFTERYKKWCKRKGYNFSAAKASDIYIDSLGHIVTLPKNDNTKLLIQTAAKEFTSTSELMALVKAQMISLAKQLPEYDTVMAMYGVGEVTGPQLMAEIGDVRNYPRRSSIVAFAGIDPEVDKSGKNQSDGKPTTKRGSPHLRKTLFQIMSTYLKLSPQDEPVYQFIDKKRAEGKPYYVYMTAGANKFLRIYYARVKECMAALEAQESSEG

SEQ ID NO: 314697 - protein, 334 aa, unidentified
MKQVNQVGVDVDSEALVCATKHAGQRMPLATFANSAVGHKKFIRWATKGGYPARVCLEATGIYSLEFALALHHAKNMEVMVVNPRAIKDFTRACMQRAKTDAVDAGGILEYLERMPFTAWQPPAPEILELQAINRRIVQLNTELTREKNRRHASEFAGTSANAIAHDIEVNIRHLERRLERMHESGLRLVRRVPALATKLAHLVSTKGIGEASAMRLLAELLVLPDDLAAPQWVAHAGLDPRPYESGTSVHRPRRITKVGNRHLRAALYMPALVAIQHEPNVKAFYNKLVTAGKKPMQAVVAVMRKLLHAIWGMLKHDEDFDGNKFFKIANKTT

SEQ ID NO: 314698 - protein, 387 aa, unidentified
MQSVTSATAVATTARANNITLFASLELSKSKWVVTINSPGSEKFSKHVVEGGDGAGLLDLLSRSRAKAEQRYGVQIKTIVIQEAGLDGFWIHRLLLANGVESHVVDAASIAVARRHRRAKTDAIDGETLLRTLMAWARGERRVCSMVRAPSPEDEDRRRLTRERGTLLKERIQHTNRIRGLLSGQGVRDYNPLRRNRFERLEALRTGDGRELPAMLKAEIRRELDRIALATTQLAAVERARDALIRTDAEEPNNPAALLLKLKGLGPEFASLLWLESLFRSFGNRRQVAAYAGLAPSPWQSGGVERDQGISKSGNRRLRKTMIELAWFWLRHQPDSALSRWFQARVGAAKGRIRRIAIVALARKLLVALWRYTTQGVVPEGAVFKAA

SEQ ID NO: 314699 - protein, 361 aa, unidentified
MAGTVTWVGLDVHARSTHAAAINPVSGELVRAKFGPGLEEPVAWLGALSGPVKACYEAGPTGYGLYRAAQKAGVEMIVIAPGKTPRGPSDRVKTDQKDAELLARLLLAGSLTAVKVPPPEFEAARDLMRAHDACRRDLMDARHRVSKLLLRYGQVYPEKSTWTVRHRAWLGRQQFDEPATELAFLDALACVDAITARKAALAQRLSELALDERWWPTVARLRCFHGIETLTAFALHLELGGDWQRFQRAPQLAAWLGLTPSLSQSGESSRQGHITKTGSTLARRLLVEAAWHYAREPRVGVALTARQAGQGAHVIQISHRARLRLHRTHRKMRARGKAGNVCVVACARELSCFLWAAAVAD

SEQ ID NO: 314700 - protein, 412 aa, unidentified
MDVFCGIDWAEDHHDIALVDRDGTLLARRRISDDAAGLAQLLGLLAEHGDSAEDPIPVAIETPRGLLTACLRATGRQVYPVNPMAVARYRDRHSIAGRKSDHGDAVVLAGVLRTDAHAHRPLPADTELAQAIAVLARAQQDAVWARTTCHNKLRSHLREYYPAFLAAFADMRGGINRPDARAILAAAPTPAAAAKLTPAQLRGLLRKAGRKRGIDAEAARLREAFTAEQMRQLPLVEQAMGRQAIALLGQLDAACAAADDLEQATIESFNQHPDAEIITSFPGLGPLTGARVLAETGDDRSRFADAKGLKAYAGAAPITRASGKTTAVLHRRIKNQRLAAAGYLWAFSALTASPGARGHYDKRKADGDRHAAAQRNLFGRMLGCLHHCLATGQHYDEHAAFPAAPRQQAAAA

SEQ ID NO: 314701 - protein, 409 aa, unidentified
MRYYLGVDWADQTHAVWVVDERGTKVTMRTVPHTAEGLSEWGRELDEWRAQGIELWAAIERPEGRVVDVLLDHGVVVYPVNPKALDRARDRFRQSEAKSDPFDARVLADFLRTDHPHLQALQPSSDAAQELKLLTEDCQRHIRQQTRLVNQLTTTLKAYYPRALEVAELTTALAREFLQAYPTPETLTALTQRQWQRWARGRRMSAARIGALWTVLQPPQLPVPAHVVRAKARLMQSLVEQLTPVVIAVAQYRTAIDDFFARMPAAQWARTLPIGKHGITAPTLWARLGDAPGRWESFRHLQAQAGAVPVTKRSGKQRVVHFRFACDKSLRHVVDQVAFLSLLSSDWARAYYDQQRARGHAHHQALRALGAKWLKIIFVMWYRQVPYDEQYHLATMRRQQLRQHQTTIA

SEQ ID NO: 314702 - protein, 401 aa, unidentified
MEPHLCVGIDVGRRTHRVGIARPDGSILEEFDISHDQVGFAMLFGRIEKRRQDLSLPVAVAMEGFNGHARPLDRLVQEKGYKLYNVNNLKLARFKEVFPGAAKTDAIDARKILELFVLKDHLPVAKNALQEVVGAPEVNNKLKRLTRRRKGLVLEKARLLNRMQSDLQAVSSELLAATVSADNLWFLRFLTCRKDLRQLARLQRKTMLEIRGVGQKYARVIEAWQKKAHFSSEVEYVGPMIIADAKRILELHRQIHALDQTLEGLAQESKITRRLSSIGGFGKTSVAELAGEIGTRKRFASEGSLALYLGMCPLTRQSGETSKTKQARQVNRRAKAAMMTAVAHHARCVPESKAYYDRRRAQGKRHNQAVRALGRHLVRVIWAMLRDERDYEVREDIHPVT

SEQ ID NO: 314703 - protein, 380 aa, unidentified
MHETTTGFVGLDAHAESTAIGVAELGRAAPRFVGTVGEKFTELTKTLAKLGDSSELLIVYEAGPCGYALARELKRAGYHCEVVAPSKVPRRPGDRVKTDRRDAEKLARCYRAGDLTAVWVPDAAHEALRDLVRARLAGKRDQLRARHRLGKFLLRQGRRAPEGMRAWTGKYLAWVKQQRFEQPAQEATLLDYLHEVEHVAERIVRLERAIDAAMESMPESLQAVIAGLQCLRGVAKVSAVTVVSELGQLSRFEHARQLMGYAGIVSREHSSGERISRGSISKAGNAHLRRIVTEAAWSYRHRPALGNALKARQAGCSEAVKAIAWRAQHRLHERYRALTGRGKNKQKVITAVARELLGFIWAIGCEIERQQERAPLRRAA

SEQ ID NO: 314704 - protein, 368 aa, unidentified
MKQQTSATTETLNKGKTMIDFTGKTIYVGIDVHKKDWQVGQFHGGLVLGNHRISSKSKELINFLKKRYEGATLKCVYESCAWGFNLQRELTAAGIECIVVHAGDVPGSDKEKKNKTDKVDAVRLARHHAAGLLKAIHVPDEELQKERNLVRFRKKLVGDLTRSKNRLKSLLKFQGIDIPANMDNAHWSRNFIRWVEEQAAKDPLLGDTLELMLEEVKLQRQLLLKAERKLRALMSSEKYVANTKLLGSVVGVGPKLSTLFLLEVGDINRFKGFDPLNNLIGFYPGSNSSGDKDIDTGISKRRHKELRTMLVEAAWQAIRQDPAMLDAYEQLTKKMKGNEAIIRIARKLLRRMRAVLISGVAYQKGVVK

SEQ ID NO: 314705 - protein, 409 aa, unidentified
MDVIYSHCCGLDVHKREVVAGVVISGSDGMPSKTIRAFGTMTPDILALADWLATQEVTHVAMESTGVYWKPIWNLLEEQFELFLVNARHVKAVPGRKTDVHDCEWLAELLRHGLLSGSFVPDRPQRELRELTRYRMSLVRERTAAANRLQKTLEGANVKLASVATDILGKSGREILAALVAGETNSVELAQLAQGRLREKIPQLERALTGCIGPHQRFLVAEQLAHIDFLEESIARVSAAIAERMRPDEDAIARLDTIPGVGRAVAELLVAEIGSDLTRFPNAKHLASWAGLCPGNHESAGKRHSGKTRKGSPWLRACIVQAAHAAARTKGTYLAAQYRRLAARRGRAKAAVAVAHSILIIVYHVLTEGTVYCDLGANYFDERDRQAVQRRLVHRLEGLGYTVSLTPAA

SEQ ID NO: 314706 - protein, 495 aa, unidentified
MNNCAAGENFAGGRPAPARSQSQSPHPKRVIGRLLAEPEALAPTSDRKRPQEGHYISAMDGRAKRRKSQQQQQKTMNDSQQWQQQRAFGALDWASEKHSVIVVDQTGKVIEDFEIEHSALGWKKFREKLQAYGSIPFAIETSQGVAVEQLLEAGMLVYPLNPKSAQAYRQRKAPSGVKDDRLDAWSFADALRVDGQDWKALRPEEPLIKELRLLCRDEVSLIEQRTAFVNQLRHALAEYYPAALEAFEDWTSVSAWMFLQRFPTPESLAQAGKRQWQKFLHSRRLWGSDQGPRRMEIFAHATEFAGTPPTTRAKSLLALSLVQMLFSVEKQLALYRQRIEELFARHPDHDLFGSLPGAGPKIAPRLLSEIGDDRERFGGDPQNLQCLAGSAPVTKRSGKQRKYWHVHQRWACDKHLRHTIHLFAEQSLSRCVWAEIYYQHHRQKNQSHANALRRLAHRWLKIIYKMWIDRTPYNAELHHRNQLQHGSWIFQLQKS

SEQ ID NO: 314707 - protein, 317 aa, unidentified
MQSVLNVGVDVAKDTVVVASADHRWPVQQVRNQRTALRAWLKTLPAGSRIGLESTGSYHELLADLAHAHGYTVYLLNPMETRHYAKALGARAKTDRVDATLLARMIAQEHAGLRAYIPPTAQQRQVDRLIRRRAKIVRLKSALKLTMANLKGVTSEVKAVVRKLDALLAKLDATMATAAAQSPLHQQAQQRVETIVGVGPLVGMSLTNTLERVPFRNADAFVAFIGLDPRAKDSGQKSGRRRLSKRGPAEMRRLLFNAAMAAVKSKVWKPLYDSYRNQGWSSTATLVIIARKIARAAWSIHRYQTTFNPDRLIRGLT

SEQ ID NO: 314708 - protein, 294 aa, unidentified
MLSSNVKYIGLDVHKEAIAIAVVNGAGKLVMESIVENKSSTVLDFLHGLRGELHVTLEEGTWAAWLYDVLKPHVREIVVCNPRRNALLKEGSKSDKIDARKLAELLRAGLLRAVYHGENGLQTLRELARSYLTISKDLKRVKNRLKALYHSWGICCAGKQVYAARHGEQWLSKIAQVGVHRRAELFYQQLDGLLVLRNTVRGELLAESQKHQAVKILRQVPSIGPLRAALLLALMQTPHRFRSKRQLWTYSGLAVVTHDSAQHRYVDGQLQRSKKPQQIRGLNQNHNHAMKVQP

SEQ ID NO: 314709 - protein, 367 aa, unidentified
MKKISTVAVKQSKNISHQKLTIGLDLGDRNCWYCVVDEAGQIQLEQRVRTNGKALQEVFGGLPRSRIALEIGTHSPWISRLLSELGHEVIVANARKVRLIGESRKKDDRLDAQTLARLARIDPELLYPVKHRSVQAQADLTLIRARAGLVRARTGLVNAARGLAKSYGERLRGCNVRNMNPEKAESLSPELQAALEPLLNAIESLSERIVEYNERIENLAQQSYPQVALLKQIKGVGTLIALTFLLTLEDPHRFRKSRDVGCYLGLQPARRNSGQSEPQMHISKEGDPYLRTLLVQGAQHILGPFGVDCDLRRWGLKLAERGGRNGKKRAIVATARKLAVLLHHLWVSGDVYEPLHNSSPTTVAAAA

SEQ ID NO: 314710 - protein, 317 aa, unidentified
MNTQINQNEINVGVDTGKAQLDIYIRPLGIYFNVSNDESGIKDAMTEIKKHKVTRVVIEATGRLEQAFIMACAKAKIPFVVANPVNIKRFAGVINQKAKTDKLDAQLIAYYAEMMKPELSKLKPEDMRLMSDLLSRRRQLMDMQTMEKNRLQIMPKEITSSIKPMLTVLKNQLEKIDNKLHKLIECCDEYKIKNDIIQSVPGVGNVVAFNLISEMPELGYITNKEASSLVGVAPFNRESGSYKGKRMIRGGRSQIRTAMYMAMMSAIQCNQTFKATYQRLVAAGKPKKVAIIACIRKLVITLNSMLRDGVYWDPKMS

SEQ ID NO: 314711 - protein, 364 aa, unidentified
MYDSTTTVTVGLDVHARSVRLAAVRADELLEERTLPYDEEAVERALRRWTSVRCCYEAGPTGFGLYRHLIDHGIDCQVVAPGLVPQRPGERIKTDSRDARKLARLLAGGLLEPIHVPSRELEAARDLVRAREDARLDRMRDRHRLSKFCLRHGRALPTNSWTIVRRKWLSEQRFEFAAQQQTFDTYLHTVDLVDARIEQLERAIRETAEQGPWSRLVARLRCLRGIDTLTALALAAEIGDFNRFKTAEEFMAFVGLVPSERSSGEQRRQGSITKVGNSHVRRLLVESAWHARRHPKVGYELARRQRGQDALVIERAWRCQQRLYQRWQRMAGRGKPHQKIVVACARELAGFVWAITTEQPLRST

SEQ ID NO: 314712 - protein, 321 aa, unidentified
MSESYNVGIDVSMDRLDVEIRPGGRGFCVVNDTAGWIELVARLRQCAIVAIGLEPTGGYERGVVRALLAAGFSVRRINPNKLRQFARARGALAKNDRIDARLIAEYVALMPTRAVQRNPVVERLAEIVTMRRQLCEEHVAIENQASHLEDAVLRRMAKRRLARIEADIALLGKRLAEHVAAEPVLARRFDLLCSMPGVGATLAYTLLALLPELGGIGRQQIAALVGLAPYDFDSGKFRGQRHIYGGRMPVRNVLYMAALAAFRFNPVLKAFHRRLVGAGKKPKLAIVAVMRKMIVALNAMLRDGTQWADRHSSGRHTVPAT

SEQ ID NO: 314713 - protein, 364 aa, unidentified
MASIPRRDLIHLGMDVHKDSISIATLRPDDSMDVEKIFHDEASVRRFLHRFPDRRSLSTCYEAGPTGYELHRLIEGMGIRCDVVAPSLIPKAPGDRVKTDRRDARKLARLHRAGELSAIRVPTPIEESVRDLCRARADMVADLDRARRRLGALLLRHGQVWRGGTRWTLKHHAWISSLSFDRPALQATLSHYRAVVEVRTAEVEAIERDLLAYCDLEPFADAVRRLCAYRGVARVGALTLASEVCDWARFPRASAFMGFAGLGVTEYSTGGKTRRGHITKTGSTHLRTQLVEAAWSYQHGPSVGPTLRRRQEACTPDTVARSWAAQRGLCARFRTLAARKNVKSVVAAAVARELGGFLWGEMTA

SEQ ID NO: 314714 - protein, 390 aa, unidentified
MFYAGIDVAMDKHDCVVLDSGGNCVVEVFTFENSSNGFKTLHKVLKSCSKKPENIKVGLEATGHYSDNLLAFLNSIGYSPVLFNPLHTNLFRKGQSLRKTKTDHVDAHTIATMLRTEDLKSYSQPSYHLNELKSLTRYRSTLVSDCSRRKISLVRLCQILFPELKNLVPSLHMSSVYTLLSELPSADKVAKCNLMHLTSLLSSASKGHYGRDKAIEIREQARSSIGIRSVVKELELQQTIELIRILQQQIEAVEEEINSLMDDIDSPITSIPGIANRMAAVIIAETNNFNDFERAEQVLAFAGLDPSVYQSGQLTSTHSKMVKRGSKYLRFAIFNATKYVCHWDPTFRAYLAKKRAEGKPYNVAVSHAAKKLTRVMFHLVKTNKEFISQA

SEQ ID NO: 314715 - protein, 402 aa, unidentified
MYYCGIDIAKYKPEATVIDKTGKALLDSISFSNSAEGCKKLLALFERLSISKDKLLIGMEATGHYWLSVYGYLLENGFEVKVINPIQSEAFRKMYIRQTKNDSKDSFIIAQIMRFGQFSATNLSEETIVAMRQLSRYRLALVDNCGDCKRRIIALLDQVFPEYDSLFSDTFGVTSKEVLAKYPTPEDMLSVSTGKLTNLLKKASHGRFGKQKAEQLQSTAAGSFGVSFAKDAFAFQIRQLIEQLEFLEKQVAELEGQISSLLKQTGSFITTIPGIGDTLGAIILSEIGNIHRFSTPGKLVAFAGLDVRVTQSGEFMGTRQKISKRGSPYLRRAIWLAASRAAFCDPILSEYYQGLRARGKHHLTAIGAVSRKLCNIIFSILSQNCPYQTIPPNDKEPCPSSI

SEQ ID NO: 314716 - protein, 322 aa, unidentified
MQTQNAVVYAGVDVAKATLQLHLQGQQSEFSNTPKGRHQLCAQLQKAPSVHVVCEATGGYERALVKALQQEQIPVSVTNPARVRAAAQAQGQRAKSDPIDARGLTDYGQRYQPEPTPPTSATQDQLVALTQWLKQLIHGRALAKTQAEHHQDPFVRRQHAKLMTHLQSQIEAVEKQIEALLEQDAALQQRVTCLDEIQGVGPRTAWMVLAHMPELGRLNRHEAAALAGLAPWTRDSGTMKGMRCIGGGRPEVRLALYMAALSAARCNPVLRALYKRLRAKGKLAKVALTAVMRRLLTYMNHRIKALLSETATAKAQELKIAA

SEQ ID NO: 314717 - protein, 399 aa, unidentified
MRCVFGIDVSKASMNIAIVVNKILVKEDKLSLNSKGFKSLNQLIKTFNNPEIVFEATGVYSRRLQFFLDHQKLNYVCMNPLKAKKQLDNLRPNKTDRNDARRLAETQFLLNRLFTYKMNPIYHELMDLSRFYQEIVRDCVVNKNRLHRALQLTFPEIESLMYHPKGTFYWKLVNQFSDPRTVLKMNGSSIEKIIIEKAPDNTSAERTANLTDKLQELAKFAYPTVSIKSSLYYQINYLTHQLIVLDNQKALIIEKMVELAKSLPEYDCLLSIPGFGKTTVVSLIGELGDIRRFKSSNALNAYIGIDLRHYESGSYVAADHISKRGNPIARKVLFKAIQNIATVAHYYPNHINDFYQKKKQQSSGRGTKKVAIAAMHRLIRTIYHLVKYNQVYDYGTAKS

SEQ ID NO: 314718 - protein, 412 aa, unidentified
MTATNQFAAHVGLDWADKKHDVCVQFKNGERTFHVIEHTPEALDVWLTELHQKVKGRIAIAVELKKGPVVYALQKYPFITVFPVHALSLARYRQAFSPSGAKDDPQDAELALELMLRYPQKIKAIEPDNADIRLLQQLVEQRRQLVEDKRRFVNRLINSLKQYYPQPLEWFSHRGSLLLCELIIRWPSLQQLKRARRDTIRNFLNAKGGRAMALTEQRVVSIDNAIPLTTDPSVIEANALMATALATQIKVVSEIIKTYDEQIETLFDTLPDAGLFKSLPGMGPCMGPRMLAALGDNRDRFNSAEEIQNYAGIAPVTERSGQKSWVHWRWQCAKFVRQTFVEWTAKTVNSSYWARLYYLGQREKGKSHQSAIRALAFKWIRIIYRCWKTRTQYDEAKYLLALEARRSPLLKP

SEQ ID NO: 314719 - protein, 316 aa, unidentified
MWVGIDVAKRTLAIVLLRPDGKQRRKSCANTVDGHADLLRWLAHQQAATAPIGLEATGGYHEAVALTLHERGHAVSVLNPLAVARYGESQLRRAKTDPADAGVIADFMRTQTPAAWQPPPPEARVLQALVRRLDALLEMRTQELNRRDVALPVVHASIAAVLAQLDDEIARVKRQIATHIDQHPTLRAQRDLIVTIPGIGDTTAAIVLGELLDITRFGSARQIAAFAGLVPRVRLSGTSVRTRGVLSKLGSGRLRKALYFPAIVAIRFHPGLRHFAGRLRAAGKPEMVIIAAVMRKLMHQIFGVLRSGQRFDPAKA

SEQ ID NO: 314720 - protein, 487 aa, unidentified
MTPRLDEIVPTDARGQRRQRKSQRAKKRREGGGRRGQKRSKLEERFNPNAAGIDVGSDCHYVAVPEDRTPTPVQRFGAFTADLHGIADWLESCGITSVALESTGVYWIPLFETLEERGFEVLLVDPYKIKHVPSRKTDVLDCQWIQELHSLGFLTPAFRPADEICGLRSLARQRDRMIRRCGDHVRHMQKALAQMNLKLTEVITSITGKTGLRILRAILAGERDPRKLAAMRDGRCHADEATIALALEGTWRDEHLFELRQAVEFYDFYQAQLAACDRELEAKLQSLEARREDLPALEGKRKGQPSHPLQFGDGGYSELYRVTGVDLTRVEGLDAPSVLTIISEIGVDMTKWRSSKAFANWLGLCPGSKVTGGKRLSSQSRRCANRAARAFRMAAYGLQHSHSYLGAFYRRVKSRLGAPKAITATAHKLARIVYAMLRNQTEYDNKGMEYYETHYRERVLANLKRNARRLGYQLIAVEPEVVASVPA

SEQ ID NO: 314721 - protein, 410 aa, unidentified
MKLLYERCCGLDVHKDTVVACLRLVSDGKVTTEVRTFKTTTAALLQLSAWLAAHNCTHVAMEATGVYWKPVWHILDDGEFELVLANAAHVKNVPGRKTDVNDAMWLAELLAHGLIRSSFVPDTQTQEMRSLLRTRKQLIREQCSHMLRVQKTLEDANIKLDSVLSDLMGQSGRAMIEALIAGETNPAKLASLANRRVRASQEELREALRGRVTKNHRFLLRLHLNQIDALDAAVATVDAQVESILGPFRTAVELVMTVPGIKNLSAQVIVSEIGIDMSRFPSDQHLISWAGICPRSDESAGKRRSNRLRKGAPWLKTTLVQCAWAAKNQKDSYLQAQFYRLKTRRGPKKAIMAVAASILTAIYHMLKDGTMYQDLGRKHFDRRSNDQQKRSLVKRLADLGYAVELKPLAT

SEQ ID NO: 314722 - protein, 356 aa, unidentified
MNKSNKLDFTGQPIYIGLDVHKKSWSVSIFTQHCEHKTFTQPPEVDKLAYYLGRNFPGAQYYSVYEAGFSGFWIHDQLRAKGIDCIVVNPADVPTRDKERTKKRDPVDCRKLARSLRSGEIEGIYVPSRGKLEDRSLIRTRQSMVRKQTRCKNQIKAILFFYGVVIPEEREMGHWSRRFIRWIERIRMERTSGDIALKAHLEELSHLRQLIASLNRAILRLARTEEYRSLVRLLKSVPGISTLTAMILLSELGEVTRFPSLDELSCYVGLIPDTQESGEKEYVGGMTQRRHSQLRWLLIEASWVAARKDPALLMAFQEYCKRMRKTKAIVKIARKLLNRIRYVLKNQAEYVPCVIE

SEQ ID NO: 314723 - protein, 345 aa, unidentified
MQTYLIGLDIAKSVFQVHVEDAAGRIVAQRRLRRAQVERFFTGLPSSLVALEACGSAHYWGRRLRALGHEVRLIPAAYVRPFVRRNKTDARDAAAICAALKHPDMRFVALKSAEQQASRGLERARELLVRQHTQLCNSVRGQLAEHGLVAAQGRRGFAQLAELVAAGDVRIPATLVPVLRLLLEQRAHLAAAIVQLEQRIVAAARSTPAMRRLATIPGVGPIVAHAVVAAVGDGRQFGSARDFAAWAGLTPQEHASAGKRRTKGISRQGDSRLRTLFALGASTVMRTARAPGACATQWQRGILARRPVKVAVLAQAAKTARIAWAVLTSGAVYQPQRQARTIAAA

SEQ ID NO: 314724 - protein, 418 aa, unidentified
MSAEKNARTLRRYVALDIHKHYCVIAGVDREGRVLLNPVRVEHTDLEEWLKKKLLSSDQVVIESTTNAWHVYDLLTPLTERVVVANPIKVKQIAQARVKTDIRDTLILARLLAANLVPSVWVPPVHVRQMRQLLSQRRQLVETHTQILNRMHSVAHRHHLKHERGKRFNEKTIGWQKDERLSKMEQFQLRLEMENKVYLEKQIERMSEVVRKLCHQKPWADDMTYLMQLPGFGVITAMTVLAAIGEIGRFESPKHLASYSGLTPGLEQSGTKSHGKGITKEGRRELRWALVEAAQMAVKSDPLLKMKFQAMQKRMHRNQAIVAIARHLLEVVWFVLTRRQPYRHFSHERIAYKYLTWAWRMDEASRDGLTRQQFARYYLMKLGIGHDLTRIALDPKHPRKIASEAELLALRPELTQIE

SEQ ID NO: 314725 - protein, 358 aa, unidentified
MDRELYIGVDVSKKTLDLAYYDGETIDWKNAHIKVSNDDAGFKKIDSWVAKVGKDFDTFLFCMEYTGLYNQNFRLWLESKEYIYGMVEPRKMHHFEPDLDDDQRSLDRIKTDELDSFRIAIYCEQNHKKILRNPSKLPSPVYFKLKRLLVERKQNTKQSTLYKQQLHDICAYDTDLSVERKKLLLTNMQENQKAIDKEIDSYMNEDASISKNYDLLTSIPGIGRIIALETIVLTENFTAISNPRKYACYIGIAPFKKESGTSVRKRTAVSKKGFSEAKSDLSIAALSAITYNPAIRGYWIRKKKEKCGGIILNAIKFKLVLRMFAVIKRGTPYVETDAYKNREYSKSELKLFPDQNYH

SEQ ID NO: 314726 - protein, 399 aa, unidentified
MAAPSLWAGLDAGKLDHHCVAIDASGRRLLSRRVRNDEAALVALIEDVIALADGGSVQWAIDLNAGGAALAIALLLVRDQDLLYIPGRIVHHAAAAYRGDGKTDAKDAAIIADQARMRTDLPEFRHRDETTVELRTLCARRADVSADRNRALNRLRAQLLEYFPALERAFDYSHRKAALILLTGYQTPEALRRIGRTRLENWLRDRHAYNPGAIVSRAMEAANAQHIVVNGQHLAAVMVARIAQQILDIDAELADLGDMIEERFSRHHQASVIRSMPGFGPLLGAELVAATNGALDSFPSADRLAAVAGLAPVPKDSGRITGNLKRPRRYDRRLLRVFYLAATNSIKTCPESRAYYDRKRAEGKHHRQAVLSLARRRVNVLWAMHRDNTAYKSTTKTAA

SEQ ID NO: 314727 - protein, 355 aa, unidentified
MSDEKYIGLDVHQATISVAVRDSQGNIIMESILETKASTILDFFAGLRGRLSVTFEEGTSAAWLYDLLKPRVAEVLVCNPRKNAALKQGNKNDKMDARKLSERLRLKDLQSVYHGENGVRMLRELARSYLTIVKDLTRVMSRVKALYRSWAIPCAGRDVYYTRHRKEWLDKIQEPGVRGRAERLYQQLDMLQHLRQQARRELLAESRKHAITAKLREIPSLGPIRCALAVALIQTPHRFRSKRQLWTYSGLGLETRDSGEYHIVQGQPRKRKKQAFVRGLNKDYNHDLKGLFKGAAIRASVQPGPFQEFYRRSLAKGIKPTMVRLTLARKIAAITLTLWKKGEDFDIHKLNTQAA

SEQ ID NO: 314728 - protein, 420 aa, unidentified
MAKTVEIVYPVCCGMDVHKSFLVACVAVTDEHSHTEHHIRRFSTFTGDLRRLCDWLTSYNCRDVCMESSGKYWIPVFNVLEKTCNVCLTHPKYVKAIKGKKTDKKDAKWISELFKCDLVRSSFIPPPDIRQLRDLCRYYVKLTGFVSGEKNRAQNCLTMCNFKLDDVFTDVFGKSATRVLDALLEYGNGAFELDGLISAKCKSSPEKIRAALDGELDPMQAEKLSVIRRHMDCIRDLQVSLEKLIYELAGKYQPQIDLLMTVPGISTQLTAIRILAEIGADMSVFETAKQLASWAGLTPQNQESAGKKKTTRIGRAGAYLKPLLVQIALNCGKSLKCPELKNKYLELKKRRGGKKAVIAIARKLLTAIWHILSKNEVYSAKLYRKADKPPAARELTMTQAITFLRSKGFLILDEESGEVL

SEQ ID NO: 314729 - protein, 317 aa, unidentified
MVDNSIICAGIDIGKQKLDVAVCGVKAALQADNTSAGHEKLINWLRRHKVERVGVEATGGYEQAIVRALRREGLVVVVFQPIQVRAYAKFRLKLAKNDKIDAGLIAACVASIDDIRAAPDPRFEAFAAAQTLIDQLTDDIVLYKTRRETAREEHSRAFWEREIAGRKAQARNALKTLCAEMRAHADLAAKLDLITSVEGIAEKTAIAILIRMPEIGTLSREQVTALAGLAPYDDDSGRRAGTRHIQGGRTRLRTSLYAAALPAAFFWNPQLITFYKRLRANGKTHKMALVACARKLLIFINSVVARATPWQPKAAAT

SEQ ID NO: 314730 - protein, 388 aa, unidentified
MLQSNDLSRSFTTLNQDNTLIVVIEMSLSSWLVAGMVPGVERQPLKKLEPDEGQLLKLMNRWRHEALQAGHAIERVVVAYEAGRDGFWLARWLRERGVEAYVMHSSSIAVSREHRRAKTDRLDTELLMRAFLGWLRGERRHCSMAAIPTIEEEDAKRPNREHEKLVGDRTRIVNRMKSTLSRFGIRGFKLTLRKADEKLGELRTAEGTLLPENTRAELRRDMTRLRVVREQLKEIEQQRLRKLEAAAPAKKGPHAMVGLIARVIGIGIETADMLVNEILSRHLRDSKAVARYAGLTGSPDESGKRRREKGLARAGNARVRRGMIQLAWRFLRFQKDSVLAQWFRARAADGRSGTRKTMIVALARKLLIALWRMATTGEIPEGVILRVA

SEQ ID NO: 314731 - protein, 299 aa, unidentified
MRFYTKEHKFFCGIDLHAKTMYVCILDQQGGIQLQRNIRTEPEIFLRTISKYREDIVVAVECIFTWYWLADLCARENITFVLGHALYMKAIHGGKAKNDRIDAHKIAILLRGGMLPMAYVYPREMRATRDLLRRRTYLVRKRAELLAHVQNTNYQYNLAEIGKKIAYKANREGVAERFPEVAVQKSIQLDLNLLDYYDQLLTKLEHELSLTAKVHDADSYFRIRSIPGIGRILGLVILYEIQDINRFPSVQDFVSYCRLVKSQKESAGKRYGTSGKKIGNAHLKWAFSEAAVLFLRRNP

SEQ ID NO: 314732 - protein, 386 aa, unidentified
MATPAARRIEQDSFPGPTLYLAFALGKNTWKLGFTIGVAQPPRERMIPAGEVERLQQEIARAKQRFGLPEEACVMSCYEAGRDGFWLHRSLVAHGIQNHVIDSASIEVKRRQRRAKTDRLDVRKLLTMLLRHSAGEKKVWSVVRVPSVEEADRRQLHRALTTAKQDRTRMMNRIQGLLAGHGVQLVLQGDVEAQLDQTHQWDGAPLPSALRSRLKRAWQQVGFLTAHMQTLEAERRALLRHRTDPIIAQVRQLFTLRGIGINSAWLYIMAFFAWRAFQTAKQVGALAGLTPTPYQSGQSRRELGIAKAGNRHIRAMAIEIAWAWRRFQPDSARSQWYERRFGAGSARLRKLGIVALARKLLIALWRFVKTGVLPEGAVLTTAPPRP

SEQ ID NO: 314733 - protein, 369 aa, unidentified
MSKDTIFFVGLDVHKDSITAARVGLNPDEPVVDVGTIGTQQYAIDRLCKKLSGCGRPRFVYEAGPCGFWLQRHLNDKGYECAVAAPSLIPRKPGERIKTDRRDARNLTLALRAGTLSFVHVPTPDQEQFRDVVRAWQQSKRDVTAARQRLKSFLLRHDIRYTGKASWSAAHRRWLSETVLPTPAQQIVFQELVDSINERERRRDRLEQQLDTLAPEWSGFALANALLAFRGVQKTVAYTVVAETHDLARFSHPRQFMAWLGLVPGEHSSGPTRRQGPITRCGNRYARTMLTEAAWAYRYTPKVSRIIEARAQNIDPAIRDIAWKAQLRLHHVYTKLMRRGKHKNLAITAVARELAAFIWDAARNIERPN

SEQ ID NO: 314734 - protein, 413 aa, unidentified
MEGLSPLYRRVAGIDVHKMLHVVTLIIEEPDGTIKQQSREFGGFKRDCCALTTWLLESNVELVVMESTGIYWKSLYAHLERAGIQAWVVNAHFVKHVPGRKTDMNDSQWLAVLARFGLVRGSFIPPQDLRELRLVSRYRRKLTAMRASEINRLHKILDDGGIKLGGVVSDINGLSARAMVTGLIEGRSITALLDMARGRLKLRRDDLQAALDGELSARHRLVLEHIHEHIEILEHSLAELDAYILAAMAPYQWAHRLLQTIPGIDQIASALILIEIGDDMTRFGSADRLAAWAALCPGNNESAGKRKSARIGKGSSVIRYIMCECANSAWKTKSSLAAKYRSLMVRKTHKTAIIALAHKMIRLIFLLLTRKVAYHDPQIDYEAISAKKNAPRWIKQLKVIGQWPNNASTSATT

SEQ ID NO: 314735 - protein, 341 aa, unidentified
MNYCGIDLGKKSSYFHIVDGERRTVTAGKFANHVDAIRKVFANREKVKIVVEASGKAFWMADRLTELGHEVVVVDPGRTKAIGAARIKHDKLDARILAELCQAGLLAAVDVPSQKQRLARLPFTSRDTLVRARAQTMNSVQSILDGEGVELPRVWAGSFSEVVRSVTPRMPAPMVPIVERLLRGVEELSKLIDECDQEIEVVAESDPDIKLLRTVPGVGPLTAAGFVHIIRDPSRFKSSRLVAAYLGLVPSLYASGQTFIKGGITKHGNAHLRWLLHIAAGALLRTIRDTALKRWALNLSARIGRKKAKSAIARKLATVLWAVWRRRAPFEARLPLPQPAE

SEQ ID NO: 314736 - protein, 331 aa, unidentified
MDNDRNILWKNNIPTSKEAVEKAVRDIAIDPREIQSAIEPVSGWGWYGDLLEETGMKVHLVEVYKSKLIAESKLKNDKVDSKILAEMMRSDFLPTAYLAPKAVREMREFMRARAFLVRLRTRIRNRIHMMLGKHGIICPWTDLFGKSGLIWLKEQKLDAASAEELKSLLILFRELSLHIQDRDRICLGKVTESNGAKILMSLPGIGVVTALTMLAEIGDYRRFASPEKLASFAGLVSSSYSSGERYRFGRITRRGSVWLRTALVESTGKVSKKWGYLYDFYSKLRERKGNKIARVALARKILMLSWHLVVNNQTFNPNPKGRMDSVKTGSS

SEQ ID NO: 314737 - protein, 386 aa, unidentified
MVFVGIDVAKDKHELYAVDSDGVVLCDHLTFANSAVGFASLLERVSAWGKIKVGIEATGHYSSNLLSFLKAHDFEVVVFNPLSVSRLRSANSLRRTKTDKNDSRYIARLLMTGNANPYQSQSYDISVLKSLTRARFRLFQEIQPLKNRFRRLLHILFPELQGFFSNLYGNTSLNLLSALPSAKDIAECNILKLTKILSVSSHGKLKRSRAEQLKSLAKSSIAAYNYGDAFELKQTVQRILFLSSQMSEIEKEIDSVMAELNSPITSIPGIGNLLGATILSEIGDIKNFNNPDKLLAFAGCEPSTYQSGKYTDSNTPMVKHGSRYLRRALYCAADMAYVNSISFRSYIDRKRAQGKHYYVAMSHGMKKLVRIIFAVLSRNIPFSEPA

SEQ ID NO: 314738 - protein, 402 aa, unidentified
MRFFVGIDWGSQAHAVCVIDQTGRIHWQGCVPHTAEGLTEVLRRLQRYRRRGHLRVALERPSGLLVDTLVDAGLEVVPIHPNALKASRPRYSAAGGKSDPGDAFILADVLRTDGHRFRPLRPPSDDTRALRALVRGRDDLMAQRVALANQLRALLERFWPGAAAIFADVDSPIALAFLTRYPTPHSAARLGEARLAQFLGQQGYSGRRPVAELLARLRRAPVSQVGATEAEASGEVVGALVAVLTPLVTHLQQLSARLEAAVPQHPDGPLVQSLPRSGAVNAAQILAELGDDRARFATDEQFAAEAGLAPVTHASGQHHAVVFRWACNKRLRRAVTTFADNSRHGSRWAALVYQRARARGCRHQHAIRILARAWARILWRCWQDRTPYDIRRHRAAQMLGVA

SEQ ID NO: 314739 - protein, 338 aa, unidentified
MDHFVGIDLHSNNSYLAVIDTDNNRIFKKKARNNLKEILKYLSPFKEHIKGIVVESTYNWYWLVDGLMENGYQLHLANPSAIKQYEGLKHSDDITDAFHLANLLRLDILPEGYIYPKDERPVRDLLRKRMFLVRQRTALILSFQNLVLRNLGEKISANTIKKLKEEDLEELFEDEHLILSAKASISTIHFLRSRIIHLEKVIHKAAKIKKEYKLLKTAPGIWNTLALTIMLETGPIERFEKVGNYASYCRCVQSNRLSNSKSKGKGNRRNGNKYLSWAYVEAANHALWNYEYVKRYHQRKTAKTNNVVAIKAIAHKLARACYYIIRDQKEFDPLKAFA

SEQ ID NO: 314740 - protein, 410 aa, unidentified
MERVIERCCGLDVHKKTVVACVRVPGRTSAREQQVRTFGTTTAELLALRDWLGGYGVTHVAMESTGVYWKPIFYVLEDAFTCVLANAAQIAQVPGRKTDVKDCAWIAQLLEHGLVRGSFVPPAPIRELRDLTRYRAALIGEHTRETNRLQKVLEDAGIKLASVASDVLGVSGRAMLDALTQGTHDPDVLADLARGALRRKLAALRQALTGRFRPHHAFLVSQVLAHLDYLDEVIEALSTHLDEVMAPFAEEVSRLDTIPGVNKRTAEILIAEIGVDMSVFPTAGHLASWAGLCPGNNESAGKHRSGKIRKGNRWLRGALIQAALAGGTRATKGAFAARYRRVMRHRGHKKAVVAVAHAMLVAAYHLLARHTTYHEPGADYYERRHAERVRQRAVQLLERQGYRVTLEPAA

SEQ ID NO: 314741 - protein, 347 aa, unidentified
MSAYRFYVGLDWATEAHRVVVQDAERQGVAERTVPHEGGALEAFAAWLSELAAGVPRDVAVALESPRGAVVDILLANGFHVFALNPKQLDRFRDRYTVAGAKDDRRDATVLATALATDQPAFRRLAPEHPLVIELRELSRLEDELQQELQRLTNRLREQLHRYFPQLLQLVPAANEPWLWALLDRAPTPSAAQHLSRAALRTLLTRHRIRRVDADAVRTLLQHPALPVAPGTVQAAQRHLAVLLPRLRLAHQQRAECATLIEDVLERLGEQQEHRDVPILRSLPGVGRVVAATMLAEASRLLAARDYHGLRTHTGVAPVTKQSGKHCVVIRRSACNRRLRDAVHYWG

SEQ ID NO: 314742 - protein, 352 aa, unidentified
MPMLEGQVDAVIGVDTHRDRHAAALLDPNGGVRATLEVPSDRAGHARLLQLAAAQAPGRRVWALEGTGCYGAGLTRFLVDQGEWVVEIDRPKRPRGRHGAKSDTLDAIRAGREALARDHLATPRQRGHREALRVLHTTRAGIVAAGADARRQLKALIVTAPEPLRDSLRGRPWRQQVRACAGLVAAPRDPVEHRATVRALVMTAERVLAARREAKELELELRQLITVVAPALLAQPGIGPISAAQVLISWSHPGRFRSEAAFAMLAGAAPVEASSGQVVRHRLNRGGDRQLNRALHTIVMLRQVHHGPTRADTSRRIAQGKSQREIRRCLKRTVARQLYRLLERTATNQASS

SEQ ID NO: 314743 - protein, 387 aa, unidentified
MKKDSIAKLQTKLSKGKKNQVQARRAAKQRLTVGLDLGDRSSRYCILDEAGEKVSEDKLPTSKPGLNAVFGKMAASRIALEVGTHSPWVSRHLAALGHEVIVANPRKVKLITQSVKKNDRMDAEQLARLARVDPKLLSPIQHRGPEAQADLAVIRARAALVDVRTELINTARGLAKPMGERLKKCDADYVSEALADGLSEATQNAVRPLLKSVEEINKQIDAYDRKIQEIGKRYPETMLLKQVHGVGTLIALTYILTLEDAQRFTRSRDVGPYLGLTRKLRDSGDSEPELGISKAGDGLLRRLLVQGAHCILREGSPDSDLKAWGTAKLQQQGERKKGGKKRKKKAVVAVARKLAVLLHRLWVTGEVYDPHYQRKAVEAAQGKAKAA

SEQ ID NO: 314744 - protein, 347 aa, unidentified
MQNNTKYFIGIDVSKAFFDAALMAVINHQKQAIESAHFENTELGLKAFQKWLKIYKVSFDENTVLVIENTGIYHRLLWAFCNRINLQIHIGNAAHIKWSFGIARGKNDKIDAIRLCKYACKESDELKMSKPLNPKLMQLKDLQTSRVRLLSQKNANQSYLKELKNINDKATQKVLEQAYKTAIEGLEKSIKSVEKLIKKLISDQDSLQKSHDLLLSIPGIGNITAIYLIVCTNNFAGNISGKQLASYAGVAPFGNSSGTSIKKPEKVHKMANKELKKILHMGAMSVIHCNPEMKHYYSRKMSEGKHALSIINAVKNKLVLRAVAVIKSQTPYVDNFVKSDQILKNAA

SEQ ID NO: 314745 - protein, 445 aa, unidentified
MARKTKKQRLRIVHPRCAGIDIGSREHWVAVDPEQDDTPVRRFTTFSDDLYRLADWLQSLQVEVVAMEATGVYWIPLYETLDARGFQVYLVNSRATRQVSGRKSDVLDCQWIWQLMSHGLLTGAFRPGDAVCSMRAFVRQRAGKVQEQSRCIAHMQKALTQMNVQLDNVVGDLMGKTGAAILRRIVAGERDPHQLAKLRDGRVRADEQTVARSLHGNWREEHLFALAQALAHYDFLTQQIVACDQAISQALTALPTLSAEPAPEPHKPFRKAHRTAAQQKQLHQALHAVMGVDLCAIPTIGIDTALVLASEIGPDLSRFPTQGHFCSWLGLAPPTHISGGKPLPGRKPKTFNRASQALRQAASNARRSDSFIGACHRARLARMDSAKAIKATAHQLARLIYSMLTNGQAYVEQGVAAFEARSKDRQLRSLQRKAHKLGLALVEAA

SEQ ID NO: 314746 - protein, 464 aa, unidentified
MRTDKRLWRNRKAKKELARRLQSENPGLEVVHAHAAGIDVGNGAHYAAVRPDRDLQPVRRFECFTADLYRLADWLQNCGVKTVALQSTGVYWIPLYDILEERGFEVYLVNARHTKNLPGRKSDVQESQWLLKLHTYGLLNNSFQPSSKIRILRTYWRQRLQHVTGAATCVQRMQKALTQMNIQLANVISDLSGVTGQLIVRAIVAGERDPQKLTELSHPRIQASRGEIAKSLEGNWRQELIFVLQQEIEMYDTYQRRVAECDQELQKHLRAFADTVAPVQQELPPKKKKKQNKNNPHFRLADELQRITGVDLTRIDGVDVMVAQTLVSEVGLDMSRWKTEAHFASWLGLYPDNRISGDKVLSRGTRHVLNRAANALRLGASTLLRSQTYLGAQYRRLRSKLGAPKAITAMAHRLARLVYRMLKYGQQYVDKGAEYYERRNRQQQIEFLKKKAARLGLQLTPVYP

SEQ ID NO: 314747 - protein, 355 aa, unidentified
MDSVKYIGMDVHKEAISIAVLNSSGKLVMECTIETKAATILQFVQGLRGSLHVTFEEGTWAAWLYDLLKPHVTKLVVCDPRRNALLKEGSKSDRIDARKLAELLRSNLLRSVYHGEHGLRTLKELARSYLTISKDLERVMSRLKAIYRSWGIPCTGKQVYAPRYRAAWLGKITEAGVRRRAEFYYQQFDALRSLRQEVRRDLLVEANKHSATKLLREIPFIGPIRAALILAILQTPHRFRTKRQLWTYSGFGIETHSSAEHRYVEGELQRSKKPTSIRGLDRNHNHDLKNLFKSAATVAAAKPGPFQEFYAALVAKGIKPEMARLTLARKIAAITLTVWKKGVRFDAKYLKPQTA

SEQ ID NO: 314748 - protein, 352 aa, unidentified
MKGMALTIVEIPTVTGGVDTHADVHVAAALNHIGGLLGVESFPTTPAGYGRLLAWLQSFGTVALVGVEGTGSYGAGLTRHLTAAGVRVVEVDRSDRQERYRSGKSDPLDAESAARAALSGKAKGAPRGRDGTVEAIRALMVVKRSARGERTRSINQARALVVTGPDDLRARFEGHRTDDLVADLAGLRPRPGDVVGYATRVALRELGRRAEYLGAQIDHLDSLLLPLIELQAPSLLDLYGTGPHIAAILIIAAGDHPDRLRSEAAWAHLCGACPIPAGSGKTTGRYRLNPGGDRQANHALWRIIFTRLSSHQPTQIYVERRTKEGKSKPEIIRCLKRYVAREVYHHLLATAT

SEQ ID NO: 314749 - protein, 340 aa, unidentified
MDDTPLIVMSTAQPAVQALAGPEFFVGIDLAKETFQAAAESIEPAGRFNVSLAYNADGMAALLERLKPLNVALIVMEATGGLERKLAAELAAAGHKVAVINPRQARDFAKALNRLAKTDKVDADILAKLAKILRPHARTLPDAQQLRLKDLIARRRQLIHMRTAELNRSQQAQLKEIKKSIDKVIQMLDREITAVEKQIAELIDSNSDWKNKADILDSAPGVASASAHALLAEIPEIGTLSKRQITALAGLAPHAFESGQFKGQRRIWGGRAAVRCVLYMNTLSAISGNPVIKQFYQRLLEQGKKKMVAITACMRKLLTILNAMVRDGVKWNQKIVAIGG

SEQ ID NO: 314750 - protein, 407 aa, unidentified
MRPIYERCCGLDVHKRTVVACRITPEGTQTRTFGTMTDELVRLRDWLLAAGVSHVAMESSGVYWKPVYNLLEDQGMELLVVNARHVKAVPGRKTDVKDAEWLAELLQHGLLKASFIPDRESRERRELVRYRRSLVEQRAHLIQRMQKLLEGANIKLGDVASDVMGVSGRAMLQALAEGVDDPAAVAGLAKNALRHKIPELERALTGTVRQHQRFLLRSQFHLLESLETEIAALDEEVAQRMRPFQVALERLDEIPGMGLRAAQQVLVETGPDMSRFPTVAHFVSWARMCPGNNESAGKRRNTSIGGGNRWLRTSLLEAAWSVSHSRKPSFFTARYRRLAARRGKKRAAVAIAHSLLIAIYHVLKDGVVFQDLGPAHFEQRNRDAIVRRSLRRLEGLGYKVTVEPMTA

SEQ ID NO: 314751 - protein, 339 aa, unidentified
MKYTPVGVDIAKHLIQVHCIDEHTGEVIDKQLRRQDFLMFFCNREPCLIGMEACGGSQHWARELTKQGHKVRLLQARFVKAFVMGNKNDVMDARAIWMAVQQPGKEIAVKTEEQQSVLVLHRSRRQLVKFRTMQINSLHGTLLEFGETIHKGRAAMEREFPEALERMKERLPPYLITVLENQYNRLNELDSLIEDIEKQLTSVAKQNETCKRLLDIPGVGPLIATAAVATMGEASAFKSGREFAAYVGLVPKQTGSGGKIRLLGISKRGDTYLRALFIHGARAAALLTKEPGPWITELKKRRPASVAIVAMANKLARTVWAIAAHGSKYDKNHVSIRPY

SEQ ID NO: 314752 - protein, 387 aa, unidentified
MQKLNDFSRSRIALEPDGTLIAVIEMSLSSWLVAGIVPGVERQPLKKLAVDESALLKLLHRWREEAEKAGRRIGRIAVAFEAGRDGFWLARWLKARSIEAYVIHAASVAVSREHRRAKTDRLDTELLKRAFLGWLRGERDHCKMVAIPSIKNEDAKRPNRERENLVSEQSRIINRMKAALIRLGIRGFNPKLKRAAGRLEDLRTPEGEPIPPNTLAELRRDMERRRLVRDQIRQIEEARLQRLDHAPYDGPHAMVRLLARVIGVGIETADMLVYEVLSRNMRDRRAVARYAGLTGSPDESGRKRREKGLARSGNGRVRRGMIQLAWRFLLHQKDSALVQWFRARTENARGTRKPMIVALARKLLIALWRLARQGVVPDGVVLRPATQ

SEQ ID NO: 314753 - protein, 330 aa, unidentified
MSLFIGIDISAKSFDLVVREQNRSNKSKCFEQSFGGHQKCLNMLKKLKPTLIVMEATGVYYLDLAVHLCNAGLPVAVINPASFKRFAELMLKQSKTDSIDAALLADFAQRMEPRLWVAPSEQCLALKDLGRQIQRLTADKAKAKNRLHAFQSKKATLAILVKDMIKSIESYEKRITLLTDAALEIIHQDESLSRQFNSMMSAKGIGQTSAIAILAEFSILPKEMKAKQVSRYAGLDVKLSQSGTSVNGASRISKAGDAYLRAALFMPAMSAVRHDENAEAFKSALVSRGKKKIQAIIAVMRKYLTGLWSVYLSGETFDSSKLFSPAHKKA

SEQ ID NO: 314754 - protein, 531 aa, unidentified
MSTVEKADILRMVETMSSRKWQALSILGIPKSNYYRWRQGRTNVGNRKRPWNRITPDEENKVLAAAMESPELSSRQLAVWITDNADFAVSESTVYRILCREGLVKRQETQLKAAKEYHTKTTRPHQLWATDASYFRVAGWGYYYLVTVMDDYTRFILAWKLQKDMSANSLIEVVKADCRGVMFAIETGGHYWRNIAYFLDEQGIPFRFINQYTLKRRREGKDLNHKKNDYRDSEVAAQLLCTGEFTESTIPQGVYAELRTVHNAYCRLVKERTRITNLVKGLLDGLLPEFTQVFKDPCGLTSLSVLSACSIPGVIAGMMEDEFVAAIEAKHQGRLMRKKLRELHYKAKASIGIAAGARSVSSEISFLVEKHELIRRHICIIERTLVSLVDQAEEGKYLLSIRGLNYIAVAGLLAELGCFKAYRSAKQMIKMAGSNPTESESAGKRGSHTPMSKQGRPVLRYCAWTSVISMLRFNSDFRAWAKQRRERPAHANPLNGREVVGAALNRLFRLAFAMVKNQTYYLSPQLVQVTG

SEQ ID NO: 314755 - protein, 409 aa, unidentified
MRLFVGLDVSSFDIKACILNGEGKKLDSFSVNNDLPGATALKERVLQCIANQEIETFKIGLESTSVYSFHPSMFLHYDEDLQRFGAKVFLMNPKQIANFKKSYSDMDKTDEIDAFVIADYLRFGRNQMSIVKESQYVALQQLTRSRYQLVRMLTKEKQHFLQHLSYKCNTFSQEVDSSIFGNAMMELFLEKFSLEELADMPLEELAEFLQTKGKNRFGDPKCVASTIQRAVRSSYRLDKVVEDSIDVLLGTSIAVIRTYQQQIKEIEKSIKRIMAGLTQTLESIPGIGPVFAAGIIAVIGQIERFDDETKVAKYAGLYWRTHQSGRFTAENTSLSRNGNHYLRYYLVEAANSVRRHVSDYQEYYVKKYNEVPKHQHKRALVLTARKLVRLVDALLRSHQLFTPERCVKV

SEQ ID NO: 314756 - protein, 425 aa, unidentified
MHKSQYSKQLEKRKRIGERTLVIGMDIGSDFNAACFMDKEGNVLGRYPTIYNSRKGFDYFQAMIMKTRRKYKLDDILIGMEPTGHYWRKIAFFAKEQGYEVRFVRTTAVKHQRELDESSSAKSDIKDAYTIGNIVREGKYIDTVIEESVFRQLRTLAHARERILRYIVGSTHGLQAVLNDYFPELRHLFWSMKAKGLWTLLEAYPFPEDVRHAGPAAITALLSKGTGKKRHIQEQAACVYQAAVESVGLKAITKADRTRLTMYLEEIKRSDDRRKLLEREMKELLKEIPLAEYVLSLPGMGRVGCAVFFGELGNPEHFQNPRQIIKFAGYDPKENESGLRVGRKIISKKGRWLLRKCLFFMVLRLVHRSSFFKAYYEQKKEGFNRPLEKTEALCAVVLKLIRVLFALMRDRRMFTEELPRCEKAA

SEQ ID NO: 314757 - protein, 356 aa, unidentified
MARYTVTAWKGKHLFVGIDMHRGFWHVTVLNEDGLKLFANRISSDCGAISQLLSRYGEAEQISAVYEAGYFGFWLHDFLQGMGVDARVTPPSLVPSQAGNRIKTDPKDSLKLASLLKSGDLTSVYVPSPEERAHRQVSRRRRQFIQDRVRVQQRIKAELRFTGLEIPRESNGRWSHVYVDNLRALRFPDPYQQASFENLLDHYDQTSELVSRQTDLLKKLARSEQYQDRVEILESIPGIGWLSAMEILLELQDISRFQRADAIAAYVGLTPGQYSSGDKVRVGRITRQGKPMVRALLIQASWRLIQKDPVMQEKYDRIKVRAGGKRAIVAVARTLAKRMRRILLDAKPYQLDLRVA

SEQ ID NO: 314758 - protein, 379 aa, unidentified
MRKTTRWVGLDVHAESIAVAVAETDGPIRSLGIIPNRFESLRKLIKKLGPPSELTACYEAGPTGYVVYWQLTQLDVHCEVVAPTLVPTKPGDRVKTDRRDAEKLARCYRSGDLTSVWVPDEDHEALRDLVRAREAAKKDQLRARHRLSKFLLRRGIRPPEKMKSWTETHLKWVKGLRFEQLAHEATWIDYVGEIDHALDRIARLEKAIDEAVEGAPEKMRAVIAALQALRGVGKMTAVTVVTEVGELSRFDHPNRLMGYSGTVPREHSSGDSIQRGPITKTGNAHLRRVIVEAAWAYQHRPSLYAELRRRQEGLDEQTKAIAMKAQHRLNSRYRKLLARGKSSSLAVMAIARELLGFIWAIGIHVERGHQAARTQKRAA

SEQ ID NO: 314759 - protein, 313 aa, unidentified
MAQMVPNVGIDVSKERLDVAVLPAGPQFNVSNDTAGWRELCRRLKPLEVRAIGIEPSGGYERGVIGALLEAGLSVRSVNAWKLRQFAKAAGLLAKNDRLDAQVIALFVATLPCREVRRDPMREHLAELVGARRQMVDLRQVLENHLEQMSDRGLGQMRQRQIRQLNADIVRLDRRIAEAVAAVPAFAARYNLLCSMRGVGPVLAATLLAWLPELGSITRRQVGALVGVVPYDFDSGKMKGLRCIFGGRANVRHVLFMAAQAGTIHNPVLHAFKQHLLAKGKEAKVAVVAIMRKLLTILNAMVRDGQPWRAVEA

SEQ ID NO: 314760 - protein, 348 aa, unidentified
MKNKSFVGIDISKKVIDVSIFREDTNIKMFPHEVFNNTRKGFGDMCSWLKKSRVVLSQALFGMEFTGCYSLDLEKFLTSKNYSFCMLSTRIVKHHPMGTIDKSDKNDSAKIADFLYRYDGTECAKPYKLPSKAMQQLKQLVYERKFLVEQRTNFMNRMQMFETKENSAMYESYIKKLNHDIEKIDQEECELMSKEEDVLDTFQNLLTIPGIGFVNATNIIAITRNFTAFDTARQYARYVGVAPCSHTSGTSVKWRARPSAHCNGQVKADLSMAALRAVEYDVEMQIFYNRKLGGRKDSDTKRKALNAVKFKLIRRMFAIGKQKRKWEVLNTSDDRKNLHIEKSKASEL

SEQ ID NO: 314761 - protein, 369 aa, unidentified
MSTNGITFVGMDAHKKAINVAMLLPGRHEPVEWQLANEPAAIRRLAKKLQREAPGEVRWCYEAGPCGYVLQRQLEADGVVCEVVAPSLIPVKPGERIKTDRRDALKLARSLRSDDLTAVHPPTSADEAVRDLCRCREDARKDLMRARHRLDTFLLRRACLYTLTRRRWGQPYRAWLTSLKFEHAADQVTFEDYVRTIEQAEERLRRLDEHLTAVAAQDPYRQPVGWLRCFRGIDTITAIAVVAELHDFRRFLTARALMAYLGLVPSEHSSGQRPRRGAITKAGNIHVRRLLIEAAWHYRHRPHVGVGMRQRRKDQPDRIIALADRAQDRLCRRFRALIAHGKIPNKAVVAVAREWVGFIWAALYPATQA

SEQ ID NO: 314762 - protein, 422 aa, unidentified
MSPEKPVPSTISGQAPSATLRAGPTRFIGLDVHKHYLIAIGVDAGLNQVLGPRRVQLRHLEKWMRKTLTLQDAVVLEMTTNAFQLYDDLLPHVHSVTLVHPPHVKLITRAQVMTDKIAALILARLHAVGLLPPVWVPPLEVRDHRALVAHRAKMVRLSTQAKNRLHAVLHRHHLLPPEGGLFTPDAREWWLTLDVTPIQHARIQSDFDTLAFAQSQISRLEETLTAVAAQDKRVLLLVQLPGIGLITAMTLLAAIGDISRFPDAKHLVGYSGLGSRVHDSGLTRRTGGMTKAGRRDIRAAMVEAAHTASRTHPHWKAELARLEPRLGHNKAIVAIARKLLVAVWHVLAKGCADRFAEPEQVARKFLSFAEILGKANRPEGQTAVQYVRYHLDRLGLGADLTAIRRSSRRIKLPPSRLTPAGD

SEQ ID NO: 314763 - protein, 316 aa, unidentified
MYLGIDVSKLTIDCCLIADGQNHQKKFQNNKGGFEQLINWLQSHKVSDKLHCVCEATGTYYEALAEYLYSRYTITVENPRKIKGYAIAELQRSKTDTQDAKLIAQYCQDRKHKLKAWQPPAKEQKQLQEIARYLDYLKQQRAIEKTKHHEAPDYIKTHIQTTIDNLNSQIKTVKKQLLQFYKSNTNYNTQRKRLKTITGIGEQAAAVILAVYQRHNFKTSKQFTAYLGLDPKDHQSGTSVKGKSRISKIGNADIRKSFYMPALVAYRCNAFPDFVGRLKAKGKPLKLILVAIMRKLAVIAFTLLQSGQDFQPERYK

SEQ ID NO: 314764 - protein, 374 aa, unidentified
MKHYSTLYVGMDVHRNSFTLAHFALDMKQPTGIVQTDNDYRRIVAYAHRLREKYGQETRIVCGYEAGCLGYTLYHQLTKAKIECIILAPTTLPSPRGGKRVKTDGRDAANIAQCLAYGTYSPVHVPSAEDEQVKEFIRMRNDHCQMLKKLKQQILSFCLRHGYQYSGTRSNWTQAHMKWLDALQPEGLLGDTLEEYLTSFRYHQNKLERLDRRIEEISREERYREPVGRLCCLLGVKPLTALSVVSEVSDMHRFSTAEKFASYLGLVPCEHSSGNSVRRGGITKAGNVHVRALLTEAAQSYTRGKVGYKSSALKKRQSGQSETVIAYADRANERLRRRYYQMTLQNGKRGNVAKTAIARELACFMWGLLTDHVA

SEQ ID NO: 314765 - protein, 423 aa, unidentified
MRFIGLDVHRDFCEVAIAEAGVVRLAGRVQTEPAALTLFAQSLGGDDEVALEATGNALEIARIIEPHVGRVVLANPKAVKGITRAGAKTDKIDARTLAQLLAGGFLPAVWLPDEQTRVLRRRISARAQLVRQRTRAKNQVHATLVRNLKGKPPVSDLFGARGRRWLAAQELPADEQETVAACLRQIVFLDGEIALLERALAEQVLASAEMRRLLTLPGVNFVTAAALLAAIGEIGRFPSARQLVSYLGLDPRVSQSGSEPARHGRISKQGPGETRHVLVEAAWHASRTPGPLRAFHQRIAARRGGNIATVAVARKLAVIAWHMLSRGEDYAFARPSLTREKIRKLELATGAERQKGKRIGVWVTKEQHRLDKELAAQAELAYRRLVQDWQPAAKGTGAAPGRASCGPSSGQAARQETAPPPAL

SEQ ID NO: 314766 - protein, 409 aa, unidentified
MERQIERGCGLDVHRDTVAACVRVPGAQGAREQHVRTFGTTAAELLLLRDWLGAHGVTHVAMESTGVYWKPVFYVLEDACTCLLVNAAHIKQVPGRKTDVLDCIWIAQLLEHGLLRGSFVPPVEIRELRDLTRHRKVLIQERQRAANRLHKLLQDAGIKLASVATDILGVSGRAMLEALVQGTTDPDVLADLARGKLRKKLAALRQALTGRFRPHHAFLVGQLLAHVDYLDEAITTVSGEVEAHLAPFARHLTQLDTVPGIARRTAEVILAEIGVDMTRFPSDRHLASWAGLCPGNHESAGKHKTGKTRKGNPWLRMALIEAALAAIRTKDSALAARYRRVMRHRGHKKAVVAVAHAILRAIYHILTDLTPYRELGPNYYDRRHAHRITRRAVELLERQGYRVVLEPAA

SEQ ID NO: 314767 - protein, 468 aa, unidentified
MTVKQEGEVGVGKDRKSRKGKKKRKIAKLDSLKQLNLNAGGLDIGAAEIYAAVPEGRDEVSVRQFETFTVDLNSLADWLEACGVDTVAMESTSVYWIPIYEILEKRGFDLYLVNARQVKNVTGRKTDVLDCQWLQQLHTYGLLRGSFRPRQEICELRTLLRHRGNLIRWRAAHIQHMQKALNLMNLHLTNVISDITGVTGMKIVRAIVVGERDPKVLAQYRDPNCKNSEEVIAKSLEGNYSSEHLFVLQQALELYDIYTDKIRTCDVEVEKLYSTFEPQVDLVEEPLKQSKKNRRKNKNVPEYDLRTYLYQMTGVDLTAIDGLDVLTVQTIISEVGTDMSKWKSVKHFTSWLGLAPENDISGGKVLRRGTKKVKSRANLAFRQGAMGASRGQSVLGAFYRRIRARHGPGVANVATAHKIARIFYTMLKERQEYISPDTADYKAKQKERAIKHLKRKATRLGLQVVPAA

SEQ ID NO: 314768 - protein, 416 aa, unidentified
MKLFVGIDVSSEKLDVCFLTDDDQLSTLSEISVSNDIEGASLTREMILEFNENYLFDQIIIGMESTSMYSFHPSMFFHEDEELKKLNTLVTIENPFRIKQFRRMFDEDKTDRNDALRIADFLRIQRFTTSPIKEEKYMALQRLTRTRYQLIKQLTRTKQHFLENLTYKCNTLVREMKDESTSLFSATVISLMTEDFTLDELAELPLEAFSDLIQEKGRGRFKQPEKIAKAIQRAIRSSYRLGTVAQESIDIVLGVLVCEMRALEKNIKELDKAIEQLVIVIPEYQCLTSIPGIGKVYAAGLIAEIGQIERFEDQTKLAKYAGLSWKVKQSGNYQSQNTPLTKQGNRYFRYYLVEAANSVKNYLPEYKAFYQSKYKEVPKHQHKRALVLTARKFTRLVDTLLRNHQLYTPPRSVIDK

SEQ ID NO: 314769 - protein, 356 aa, unidentified
MSTATRVGVDLAKNLIQVHAVDSEGKVVTNRALKREKFLLWCADLPAGCLIAMEACSGAYHWCRKLRERGFDTRMIPAQFVAPYRIQGRSGKNDANDAAAICEAASRPHMNFVPPKTLTQQGMLCVHRLREGYKEERIACINRIRGLLAEFGVVLPQSAQVLKRHLSDVIEDANNDIAGMARLALQRAQEHWREIEAQIQWCDARILAHQKEDEQVQRAAELKGIGVITASAVVATVGDFRQFKNGAQFGAWLGLTPKQNSSGGKASLGSITKRGDNYLRTLLIQGAKAAVLTGKHNDDPISLWARRLHERSGWQKAVVALANKNARILWAVMTRDKRYDAHHISTPPTLITPATT

SEQ ID NO: 314770 - protein, 346 aa, unidentified
MLYAGLDLSRKRVDVCLLDEHGTRLETTAAPPDADGLRGLAARLAAHGQPIRAAIESMNGARFVRDELEQLGWDVSLADAQKVKGLAPLAAKTDRIDAYVLAELARRDLVPAIWLPTPGVRAERERARFRLHLVRHRAALKARIHASLIAHGLSCPVSDLFGLRGRELLDRLALPEPWAATTAASLRVIEHLDDEIAACEAELRRLGAAHPYVPLLMSAPGIGWVLAYTIASEIGEIERFASPKKLAGYTGLCPRVYQSGASDRRGPLAKNGPEHLRWALVEAAVHAARHPCYAAHYQQTKKRLGRQRGAKVARVEVARKLSEAIWYMLTRSQPFAPAGPALPLVA

SEQ ID NO: 314771 - protein, 358 aa, unidentified
MHKYGRKIGKSKFEGVSDQDVVYIGLDVHKNSVHSAVRINGQVVTTVMPAEIESITATLEPLRPACRKIVYEAGPTGFGLARVLERMRWPVEVIAPGKTPKPANEGSKTDRLDCRYLAECSEKSMLKRIAIPTEQEEADRQVVRTRNQLIKKQRRSKQQILSLLLLYGLKAPSGLQYWTQESIAALRDLCLCRELRFSLDILLDELDYLKGLIRRIEEEIRQLAQAKRYARKEAHLRTHPGVGPTVAMKYLTEVFQPRRFAHPGQVARYIGLAPRVSGSGDRHWEGPLLKAGQGDLRALLVQAAWQWVRRDRRAAAIYRRLVRNTGCKQIAIVGMARRMAVNLWCMLVRDQDYHPLAA

SEQ ID NO: 314772 - protein, 313 aa, unidentified
MTFKRNGCYAGLDVGKDWLDLAIHDVDGTRQFSNSPVGVKNLIIHLSRLDPALIVVEATGGYEQRVVQAMFSAGIPVHVANPTRIRSYARAKGVLAKTDTIDAVMITEYGYMLSPEPQNAKTEEEIRLRSMIIRREQLVEIRAAESNRLHTAHLCMKSSVEDHLRWLSVQIEELEVQIQALIHALPAVQASVNLLEGIPGVGPITAATVQAEMPELGQVNRQQIAALAGLAPYNRDSGKKRGRRRIFGGRKSVRRVLYMACISGIRHNPVIRKMYEQKIAEGKPFKVAITACMRKLLVIMNAMVREGTAWSYA

SEQ ID NO: 314773 - protein, 398 aa, unidentified
MLYVGIDVAKHKHDLAVIDTEGTIFVRHLQIENNREGFTKLQMTLANLQKTTGEDIQIALEDTGHYCFNILRFLRTQGYPTYSYNPYLIKEFAKNQSLRKIKTDKKDAITIARKLRTDLDKQSFSANPSMIELKYLTRHTARLKEDCTRKKVSYTRILDILFPELAPSLGSSSAKHQSYVYAILKEYPSAKKLGNAHLTKLTNLISAHSKGRFGKEQAVKLKALAQASIGQESPALEFELLQTIDTIQYLTTMRDEAEKEVARLMNEIDSPLLTIPGIGFKLGSVILAEIRDIKNFRSPNQLLAYAGAEPSVSTSGMNQTETGRMVKRGSSQLRWALHESARLMSIWSPSMRVYFQKKLAEGKHYNVAISHVVRKLVRIIYQLLKDNKPYEEQKMIVN

SEQ ID NO: 314774 - protein, 416 aa, unidentified
MSKNMLCGCDVSLENNTVWLMLDDGSQPAKLFNADNNQLGAETLVERIYNIAKEHCVSDILIGTEATSMYDWHLLEYLSESKLALEFNLKLYRFNAKWIKNFKKSLAPRGKTDPIDSFAIAERLRMGRLPKEYIPDIKYQPLRKLTRFRFHLMQQIAREKNFFLASLFLKAGAYSRISPFGSTFSATSLAVINDFFSVDELAAMPIEELTEFILEKGKSHFSKPAEIVDNLKRAARESYRLKPELAPAVNLILASTYNNIRCYKDQVKLVDSAIAENLKAFKHTLESITGIGPVYAAGIIAEIGDVHRFPNDSSLAQFTGLTWPKHQSGKFQAEETRMSHTGNQYLRYYLVEAANSVKRCDATYKAFYEKKYAEATKHHHKRALVLTARKLVRLVWTLLTKQVLYQPGYSSTSLTV

SEQ ID NO: 314775 - protein, 409 aa, unidentified
MKKSEYIYIDMDVHKETHTAVLMDSKEERKGAIKIKNNITGFKRLFAYVETFRQNLIPIYGLEDVTHFGRDLAIYLLENDCIVKEVNFALSYMERMSHATVKKNDTWDSQCICSVLIRRHEILPDAKSQDYYWTMRYLVNKRDSLAKATTKQVQQLHNQLPTGYPSYKEIFSEIESPTSLAFFEKYPSPSHLKNVTVDELAAFLRSASRNTSSTKKAEKILEVVKRDSVKERDYQSARDKAIQSTIRTIRNNREEMKQIEMIEADMLKELDYQLETMPGIKTVTASILVAQIGDIARYKSADKLASFAGVSPIYQGSAGKGKNYQNKSMGNRELYSILYLLAMQQVQVNAKGEARNPEMRKYYEYKISQGKTKIQSLICIMRRLVRILYAMMKYKTAYEMPKIKEEKVS

SEQ ID NO: 314776 - protein, 363 aa, unidentified
MSKQGAVLATKKSARRVLVGATTVGVDLGDQWSHYCILDEDGEITEEGRFRTSESGVAKRFEDMDHARVAMEAGTHSIWISEQLKEYGHEVIVANVTELHAISRNDSKSDRTDAEKLARYARLDPRILRPITHRTVEQQQALTMIRARDVLVRLRTAVVNAARGLAKPCGYRLPASSTRSFPARCAGLLSEGLAAALEPLFAQIAHMNAQIKLYDRAILKLATVTYPETQALTQVHGVGPLTAVTYVLTLGSKERFERSRDVGCYLGLRPKRSQSGDRDPQLRITKAGNEYLRRLLTECANFILGRFGKDSSLRRWGLHLAERGGRNARKKAIVAVARKLAVLLHRLWVTDQPYVPLHEAQAA

SEQ ID NO: 314777 - protein, 394 aa, unidentified
MIYAGVDIAKMDHVIGAVDERGAEMCPPMPFKNTEAGLERAVAWLEGLAGSPSDVVVGMEATGHYWMACYSFLVARGYSVAVINPMQVKAVRKLKGLDKVKNDRVDAGLIAEALRIGQYDETRLATDEMASLRSLSRYLQSLRGMVAELKTQCICLMDAHFPEYAGIFSDMFGAGSRAVLSKSPLPFELARRRADSLARDIAEASRRGGKSSGYAAKIKAAAKSSIGVRLGQEAASFQVKSLIRQIEFADSECAGVEARLRSLLDEVEPLVLTIPGVSYVTGAQIVSEIGDVSRFRNAPALVSYAGLNSSVSQSGQFDSGGGPITKHGSPYLRRALWLAANRARQYDPGLRAFYDRKRAEGKPHRVAVTAVARKLCHIVFAVMRDQVPYDPGRE

SEQ ID NO: 314778 - protein, 408 aa, unidentified
MELVHPVCCGLDVHKANVTACLRRVMEGGIIKLDNRIFDTNMRGLISLLDWLKENGCGVAAMESTGVYWKPVYHVLSPVLKVLVANPAEVKQRRGKKTDKTDAQWLAELLAHDLIQPSFVPPVEIVALRDMVRTRTALVNNRTQAKNRVLGVLEDTNIKISSVVSDTFGKSGRAMLDALISGQRDPKVLAQMAKGLLKKKIPELETALEGSFTEHHAFLIKISLSVVDLLDKQICELDKHIESMVAPLRKELDAVISIPGVGETAARGIISEIGVDMGRFVSATRIAAWACMCPGNNESAGKRKKGRTRKGNRYLRRLLVECAWAARTTDSFLGRTFRRLQARIGGKKAAMAVGHKILVIIFHLINEGVLYDEGRYNRLSPKVEEKQKKRALETLHRLGYDVKISIAA

SEQ ID NO: 314779 - protein, 342 aa, unidentified
MEQIRIVGLDIAKSVFQVHGIDGEGEVAVRRCLKRLRVLPFFASLEPCRIGIEACATAHFWARELGALGHDVKLMPPAYVKPYVKRQKNDAADAEAICEAVTRPTMRFVPVKKVEQQGVMVLHRTREMLMGQRVRLSNAIRAHMAEFGLVAPIGRNGLQNLIESIDNETDERVPAEARLCLKMLATQLQLVNVQVLENDRQIRVSARSTEIGRRLMEIPGIGPVIASALVATVPDPQAFRCGRNLSAWIGLVPRQNSSGGKERLGGITKQGNRYLRKMLVVGAMAVIRYAQRNGTRRPWLVQLMARRTTKIAAVALANKTVRMVWAIMVSGERYREPVALTE

SEQ ID NO: 314780 - protein, 338 aa, unidentified
MAIVMGLDQHRAQLTADWLDTASGEVSRARVAPADRAGVRRFLERFGGCELEVALEATTGWRFVVEELRRVGATVHLAEPAETAARRGNKKRAKNDRADARHLRELMMVGRLPESWIPPDHILDLRARVRLRHSLVAQRGEWQQRIQAVLYHHGFPQRRNLMTEQGRQWLAAQALPVTAREQIAVAVAMVEALDLQLAPIDKQLRAYARRQPGCRALMGQFGVGEMTAVTILAELGDARRFSSSRDAVRYAGLDITVHQSDRRRAPGHLSRQGPPALRWALFEAALCASRTGSPDRDYYRQAAERLGGTGAGLTVARKLLKRSYHALRELGEEALAPA

SEQ ID NO: 314781 - protein, 411 aa, unidentified
MDVVHARCCGLDVHKKSVVACALITQWDGSVERHMRTFGTVTADLLKLADWLSELQVTQVAMESTGVYWRPVFNVLEDDERTIVLVNPQHMRAVPGKKTDVKDAEWIADLLRHGLLRASFIPPAPIRAIRELTRYRKTLVQERADETNRLHKTLEGANLKLAGVATDVLGLSGRAMLAALLQGERDPDVLADLAQGRLRAKLPQLREALQGRVQPQHLVLIEHILAHIDFLTQTISEVQAAIERCLPSYEEALTLLQTIPGVKPIAAAAILAEIGIDMSRFPSAGHLASWAGLCPSNKESAGKRMKAPMNHGNVWLRAIMGEVAWASIRTRATYFHAQFGRIARRRGAKKAAVAVAHSLLIVIYHVLRDGNPYKELGADYFNNLDTERVQRHHVRRLEQLGYKVSLTPTAA

SEQ ID NO: 314782 - protein, 345 aa, unidentified
MKIIGCDFHPSFQQIAICDLETGEFQERKLSHSDGQAERFYRELGEPALIGIEATGNSQWFLDLVQRLGHEIRVGDAAKIRASYVRKQSTDKRDAGHILKLLLEKRFPQLWTPSAAVRDQRQLLRHRDKLVEIRTKVKNSLQHLALNRGMQKKSRLWTRQGMEQFQQLAMPGWAATRREDLLQLLKELNGQIEPLDQAVQQAACQHPQAQLLMTQPGVGPVTALAFVLTIGDVARFAGSKQLTSYLGLVPSEHSSGSKRHLGAITKQGNCFLRKLLVEAAQTVVRKDEGFRKEYQHRCRRRPKGVAKVAAARKLAVRLYWMLRSNVSYPEIAHIESNPRVPLGDV

SEQ ID NO: 314783 - protein, 312 aa, unidentified
MSIVTPQVGVDVAKDELVVSINQGKARAVANTQSAIASLIRSLPQTAEVHLEASGGYERLVRQMLEEAGIKVLVHNALKAKRMAQAKGRKAKTDAVDAQGLSQWGALLPEGSVRCLERQKLADLSRAIHTLKLTAAEYKKRMDMPELDAEAVQLFKDIRTEMLKRVRAAEKALQERLAKSSFNERYKLLQSVPGIGKVTAAILICEFPEDVAERTSAQICSYAGVAPMDDSSGKRNGQAHIGHGNSRLKGALYMPAVGALRSFEWARGLYAKLRAKGKAHQTAIVAVMRRLLVRAHAVVKRGSSWQEEPPKA

SEQ ID NO: 314784 - protein, 354 aa, unidentified
MPLKTISLEAVATIGIDIGKNTFRLIGLDKMGAIVLRQKLSRSQVDSRLANMPACLIGMEACVGAHHLSRQLKALGHDARLMPAQYVRPYSKGQKNDFRDAEAIAEAVLRPTMKFVAIKTVEQLDLQGLHRVREPLVCQRTSVINQIRAFLLERGIAVRQGLRALRTAMPNVLAMTDKLSPRMIHMIEDLCTDWRYLDARIATVSNEIETLSEQDDGAKRLMTVPGIGPIISTATVAAIGSGDVFSKGRDFGAWLGLVPRQMSTGGRTVLGPISKRGNRYLRMLFVQAARAVLLRPQSWEKHGLKSWIEAAARRLNRFKLAIALANKIARIAWGVLHGGRNFEVRSMRTAPQAG

SEQ ID NO: 314785 - protein, 402 aa, unidentified
MTNEQLKVIAGIDTHADTHHVAIITETGAHVADKEFLAVSSGYRNIVQFITQFGAVLAVGVEGTGSYGAELARVLTKEGIEVLEVMRPNRQGRRLKGKSDPLDAYQAAESALAGRGTATPKARNGAVESLRVLRAERATAMRARIAVMNQVQSILVSAPEPLRARYRGLTTAATMAALEKTRPAGTMSEPSNATATVLKRLALRYRALHQELALIDAELDAIITIQAPMIRDLHGVGTDVASQLLVTVGDNPERIGTEAKFAALVGVAPVPASSGKTIRHRLSRGGDRQANKAIHHVALVRMRNDTRTRTYVAKRRQEGKSTKEIMRCLKRYIAREIYDQLLHPQPGPDTGALRSLRKTKKITLQAAADNLHVWPSALSRLERGLSRDDMFHQHYENWLNEH

SEQ ID NO: 314786 - protein, 520 aa, unidentified
MHQTKYRGIITEAGSLTFPPWEPAEPLLAKPLRQSVSPFGGDLCFGWLGSPRLYLYKPLGCVSAFWKWMPAGKDKNMQDQKVLKMPENTPYLSVGLDVGADFTWMSIMLPNGTLIGKPFKIVHSAPQSRELAVTKIKEAQEAYSLESRCFLESTGIYHIPLLCFLRDKGFDCSVINPIITKNSTNMNVRKLHNDKFDSKKAAKVGLDASLKTSVIPDDEVIDLRNLVRDYYYFKDLQSAVVLKLTAELKVSFPAYRKVFSKVTTQTSLKLLDAYPLAQDFIAAPKETVVEMIRSTARFGEKYALAKYDALYAAAEDAAVFGRALQSNAIRIRLYIKLYREYQGHLDSMLEELHKAVERLEGTPVRDRISLLQTLPGVGFLSAVVLVAEMGSFDLFSSPKKLYAYFGMDPGVNDSGKFHGDRVHMSKRGSGLARRILHMAAINNLKVDKTANAPVNPVIYDYYIRKCAGKKKIVAVGAVMHKICNTIFAMLRDNKPFELITPEEHCKRYAAEHSGTMNAAA

SEQ ID NO: 314787 - protein, 340 aa, unidentified
MSEITTVGIDLAKNVLSVHGADAHGKTVLRKTLSRAKLIELMAQLPACRVGIEACSGAHELARTLRALGHDARIMAPKFIVPYRKNQKNDGNDAEAICEAVGRPNMRFVPIKSAEQQAVLVVHRVRSELVQSRAGLINQVRSLLTEFGIVMPQGRFSFRHNVGMALDDARLPTLAREILHEVNARIRVLDEDILTYDRRIEAMVRDSVLMRRIVEVCGVGPITASAIVASVGDAKLFKNGRQFAAWLGLVPRQYSTGGKAILGRITKRGDVYLRTLLIHGARSALITLSRRTDRLSRWAAALTERRGFKRACVALAAKNARIVWALLAKSEDFRLDRAAA

SEQ ID NO: 314788 - protein, 347 aa, unidentified
MNYIGVDCHISTLEFAVVNERGTITQKAKVNTGVKEFMAFIKDIPKPRKIFIEEGELAGWLLETSLNFGEQLIITDPKINKWIGKAGQKDDAIDAEKLAQLARGKYIKEIYHPVSHRRKFKDLVFAYHDTVKSQTRVKNKIKAKFRGNGIKCSGDTVYIDKYRDKWRAKLSKNKITHLIVEELWIQLDQLFASKKKLKRNMRIQSKKYPEIKTFMKIPGIGLIHAATISAIIETPHRFANKKKVWMYAGIGLMERSSGGKIYSRKLTRDYNRPLKNAIKKSAEAAIIAKDNQFRRQYLKLTIEKAIPSHKAKLTVSRSMLAAMYGMWKKGEEYDPEIAKKKSKRIKK

SEQ ID NO: 314789 - protein, 360 aa, unidentified
MKEYTGKFAGTTIGLDLGDKYGQYYTLDESGENIDAGRVPMRVSALEKRFGPMERSRIVMESGTHSGWVSRLLESLGHEVIVANARKLRLISENENKDDAVDAELLARLGRVDPKLLYPIQHRGAQVQADLALLRAREALVKVRGQLINHMRGAVKSLGGRLPQCSTGSFHRRAEVEIPAELEVALKPLLEIIEQISGQIRAYEGEVERLCREVYPETELLRQVGGVGALTSLCYVLTLEDPHRFAQSRSVGGFLGLRPGKDKSGQQDPELRITKTGNPQLRRLLVQSAQQILGPFGADCELRQWGLKLASRGRKNAKKRAVVAVARKLAVLLHRLWVNGEVYEPFYQARQQRVKAAVSA

SEQ ID NO: 314790 - protein, 357 aa, unidentified
MTQQRQAVDVVGGVDTHKDTHTAAVLDTAGRQLDSARFPATAAGYGQLLDWMCGFGTVVKVGVEGTGSYGAGLARHLTGAGITVVEIDRPDRKARRWQGKSDPVDADAAARAALAGRRTGTPKDRDGQVEALRALRIARRGAVSHRADVVKQMKALIVTAPESVRADLAPLTTARLIGVCADTEVPDGRAENPAAAVRLALRSLARRFQHLSSEITDLDKVIGSLVAAIAPKLLAVNGVGADSAGQLLVSAGDNPDRLRSEAAFAMLCGVAPLPASSGRTHRYRLNRGGDRQANAALYRVVLCRLRWDPATQAYMERRTAEGKTKKEIIRCLKRYVAREIYTILTTPAPAKDLPLAA

SEQ ID NO: 314791 - protein, 344 aa, unidentified
MHAITIGLDIAKSVFQVHGEDAQGRIVLQKRLRRSQVVPVFAKLPPALVGIEACGSAHHWARQLQALGHEVRLIPAAYVKPFVQRNKTDARDAAGICAALGRADMRFVPVKSVGQQASRGLERSRELLVKQHTQLMNCTRSLLAELGIVAAQGRQGFAALAALVVEGDERIPAVLRLALSHLLRQIEQLRRSIAALEEEIMAVAKADPVMRRLATIPGVGGLTAYAIVAAVGDGRRFASARDFAAWCGLTPRQHSSAGKRRDKGISRQGDIRLRKLFALGASTVMRNARAQPARASEWQRGILARRPVKVAVLAQAAKTARIAWAVLTSGESYRAPGAAVAAAA

SEQ ID NO: 314792 - protein, 342 aa, unidentified
MNITTLGIDLAKNTFSIVDMNQHGKVVCRKTISRNKLLPFIAQCPPCLIGMEACSGAHYWAREFEQMGHRVGIIAAKFVEPYRKGGKNDNNDAEAICEAVMRPNIWFVPVKSPDQQAVLCIHRARQGLIKDRTALLNQLRGLLAEFGIVIPKGRYPAQATIPDVLSNMNNGLPMLARNIITDLWERIQKSNKQILSYDRDLAKLVREDSVAKRLMTIPGVGEQVASGVVASVPDPRLFKNSRQFCAWLGLVPRQYSTGGKTRLGRITKHGDKYLRMCLVHGARAVVAALKEKQDHVSCWVRELVERRGYLRAVVALAARNARLIWTLMIKEENYKAIPVMEA

SEQ ID NO: 314793 - protein, 428 aa, unidentified
MSEKNHTRFEEFRQLQKEIRGSEDYLIVGIDVAKERHNAFFGTATGKTLFRRLVFGNDREGFERLILQAEAMRVQHGLKKVVFGLEPTANYHKPLGEYLITGGHRVVLVSAKSVKRNRELLDGRWDKHDTKDSANVADLISQGKCLYYEYPELMLRELRSLLSLKRRLKRQEHGFRVRIRNHLIAQYFPEFDRYFGRSESEGLAIVRWCLDPSVIAGLAYEEFVRLVAPGRRALRQHERLRAIRQRASASVGCEVGEAVRFEAKVMVEGLRQIREALGETDEKITDLCVQFPEYEYLLTIPGFGPDISSKVLGALGDPFRFERGTQVLKMAGLDLVADRSGKRSDSVVPVISKNGKTDLRYALYQAAMIASSRDREFIIWFTNRLRGRQREKGIKTRMRVKLSAKLLVIAWTIMKKKERFNPDCLRIE

SEQ ID NO: 314794 - protein, 365 aa, unidentified
MPSVSHLGPTHLGLDVHKDTISVAILTPDRDGPEVERIPHDEPSVRRLVGRLGDPRWLRACYEAGPTGYDLARLLESMRVRCQVIAPSLIPKAPGDKVKTDRRDCRRLARLHRAGELVAIRVPTVQEEAVRDLCRARADMVEDRTRARHRLSKFLLRHGRPWRGGNAWTLTHERWLLSQRFDQPALRATYGHYRATLDARDAALAAIEADLAGWYDRAPFADAVHRLAAYRGVTRLGALTLASEVCDWRRFPRAAAFCGFCGLVPSEYSSGTSTWRGHITKTGNAHLRAQLVESAWAYQHRPAAGVELRQRQQGLDPQVVARAWAAQLRLCGRFRRLAARKDSTNVVVTAIARELAGFLWAEMAA

SEQ ID NO: 314795 - protein, 455 aa, unidentified
MPKRTTGDRPELNPVNVGAAAIDIGSKIHMAAVDPICTDTPVRAFGTFTQDLHDLADWFKACGVTSVAMESTGVYWIPAYEILEQRGFEVILVNARYAKNVPGRKTDVSDAAWLRQLHSYGLLRGSFRPDAEIATLRAYLRQRERLVEYAAAHIQHMQKALMEMNLQLHHVVSDITGATGMRIIRAIVAGERNPDVLATYRDVRCHSSIETIRAALVGNDRDEHVFALTQSLELYDTYQAKMLDCDRKLESLITALTDKGAKPVGKLPRPRVKTKQVNTPSFDVRAALYGVLGVDLTEIHGLGPSLALKLIGECGTDLRAWPTAKHFTSWLCLAPGNKISGGKVLSSRTRRSSSRAAALLRLAATTIGRSDTALGAFYRRLSSRAGKAKAVTATARKIAVLFYNTVRHGISYRDPGADHYEEQYRSRVLANLKRRAKSLGFVLQAVPCGPEVAVS

SEQ ID NO: 314796 - protein, 370 aa, unidentified
MRKSIMYVGMDQHKESIEIATADEGRDGEVRRYGRIDGELESLDRVVRKLEASGKELRFVYEAGPCGYHLYRYLTAKGLACKVVAPSLIPKKSSDRVKTDRRDAVNLARLERAGELTAVYVPQVEDEAMRDLSRAREDAKRAETRSRQQLLALLLRHGLKYSGKTAWSQPHLRWLARIKLPQPAQQIAFQEYVDAITEAAARVERLTTQIRMLLPQWRMAPVVEALQALRGVSLVTAVITIAEVGDLTRFTNPRQLMAYLGLVPSEHSSGPHRLLGAITKAGNSHLRRVLVESAWAYRLPARVTPIIRRRQEQLPKPVCAIAWRAQLRLCARYRRLTLKGKTKQVVVTAIARELVAFMWAIAVEVKVTNS

SEQ ID NO: 314797 - protein, 310 aa, unidentified
MAAVVVGIDVSKLHLDVHVRPSAEAFRLGRDEAGLDELVGRLQPLEPALIALEATGGFETIVAASLSMAGLPVVIVNPVQVRAFARALGKRAKTDPIDAAVIAHFAEATNPAVKPLPDEETRLLADLLARRRQIVHMMVAERQRARVLSSPRLKQSIARLLKALERELQVLDSDIDDSVRRSPVWREKENLLTSVPDVGPVIARTLLAEMPELGSIGRKEAASLAGLAPFTRTSGQWRGKSFIGGGRAPVRTVLYLGAMSAVRFNPVLQDFYRRLRDAGKAPNVALVAVARKLITILNAILRDQKAWRST

SEQ ID NO: 314798 - protein, 382 aa, unidentified
MIAVEARGHPLVASRSLSGLLIPNENGDAPMSYDYHIGVDYHKAYTYLLVQDRGGQVLRSGKVKNDPGSLAGFLTPYLENSHAVMEASRNWTVMYDWLDELCDDVVLAPPLKVKAIADAKIKTDKIDATILAHLLRADLIPESYVPREAARALRQALRERIFFVRLRTMVKNRVVTIFDRYPEQTRALREMTDLFGKIGRGQLELLSVSTIDREHIDRAIAFIDDINQRIHASEKTIRRFSADNADVKRLKTIPGVGEFFARLIAAEIDDVTRFRSAKKLAAYAGLVPSTYASGGKCWNGRLIKTGNKWLRWAFVEAAVPAMRAEPALKFDYEHLKVTKGTNRAKVVIARKLLTIAYQVLRDQRDYECRDALERRSNLSRLS

SEQ ID NO: 314799 - protein, 345 aa, unidentified
MQNMYYIGLDVHKRTISYCVKDGSGAIHAQGTIPATRFDLDRWMKALPQPWSAAMEATMFTGWIYDHLKPHAAALKVAHPLMLRAIAAAKKKNDRIDASKICDCLRCDFLPECYLASTAIRERRRTLRYRNLLVRQMVQMKIKISSLLMEAGVSYNKQRLHKAGYFRELLASNSEIDAGLGSLLRLCRETVVRLGKTESALVRSLERDSLLVERVERLMTIPAVGPITALTWALEVGEVQRFSSIKKAVSYCGLCGAEKSSGNTSQRTPLSKQRNKHLQTTLIEAAKMAPRNSPELAMLYDQEKQKGNANRATLAVARKLVAYLVAVDRRQKEFLTVERENRTAA

SEQ ID NO: 314800 - protein, 345 aa, unidentified
MKYYSGLDVSVKETSVCIIDETGKIYREIKVISHPDDLTAALKDTAWPIERIGLEAGPLSQWLFEGLATAGLPVVCIETRHTKAFLKAQVNKTDRNDARGIAQMIHVNLYKTVHVKTLTSQKRRALLKARKLLQEKAIAIENDIRGLLRNFGLKVGAIGTIGFFDRIRELVDDSAELLEIMEPLLSVRQKLRETFTLLHSKLLAIVREDRACQRLMTIPGVGPVTSLAFISTIDVPARFSKSRAVGSALGLTPVLNQSGESHRIGRVSLCGDGMMRALLYEAAQVMLSRVKKWSWLKAWAMNIAKRRGRQKAIVALARRMAVIMHRMWKDGTEFHWTKDSMLAAI

SEQ ID NO: 314801 - protein, 416 aa, unidentified
MNERGTVAAGIDTHKDTHALCVIDLVGRVVATGAYAADGEGRDRIAAAIGDPRDCVVVGVEGTGSYGAGISRRLAELGYDVVEAVGPKREKRMAGRDKNDPADAERAARDALAGKASGAPKAGGGWAGALRFRMVARDAAVSGPARAANSAHALIVTAPAPIRGELGGMKTPALMKALSRRRRARDVVESSLWESLRSLSLSWIGAKKAAAAHEEAMREILLANAPALLDIHCCGTISAARLAVTAGDNPERVSGESAFASLCGASPVEASSGKVKRHRLNRGGDRQANRALHTIARQRMKRDSRTKLYVDKRTKEGKSRREIERILVRYIAREAYGALMRPMDAACEPYRASARAAKSERLRAGAAQAQASRALGVASARISEMERGRLVDAPLLQRYRSWLESLSAGERRESPE

SEQ ID NO: 314802 - protein, 370 aa, unidentified
MRHSSTLYVGLDVHKESIAVAYAPEERGAEVVFLGTIGTRQCDIDKLIRTLTSKATQLVFVYEAGPCGYWLYRYLTRKHLTCWVVAPSCVPKKAGDRVKTDRRDATQLARLMRSGDLTPVYVPAVEDEAIRDLTRAREDAIRDLKAAKSRLKAFRLRQDIRYEGRATWGPAHLRWLAEVVCPTPAQQIVFQEYVRAVSEHQERLQRLEAELRDQVEVWHLAPVVQALQAMRGVQFTVAVTLMAELGDLSRFENPRQLMSSLGLTPSEYSSGERRRQGGITKAGNTFARRALIEGAWAYRYPAKVSRHLQLRLEQLPQAIQHISWKAQVRLCKRFRHLTARGKHANQVVVAIAREMAAFIWAIAREVPMTL

SEQ ID NO: 314803 - protein, 420 aa, unidentified
MEEITEDAEIVARVAALDVGKAELVACVRVPHEDKPGRRLQEVRTFATTTPALLELRDWLVCEGVTLCVMEATSTYWKPPFYLLEDAVECWVASARDVKNVPGRPKTDKLDAIWLAKLAERGMLRPSFVPPPWQRQLRDLCRYRRTLIQERTREKQRTEKLLEDTQIKLSAVISDIFGKSGRDMLEALIGGQRNPAVLAELARGSMRGKKSVLQEALTGQFRDHHGWLLRMMCDRIDALTAQIDALTARIDEAIAPFAHQVAQLDQIPGVGKTGAQEIIAEVGIDMTRFPTAAHLVSWAKFAPRARQSAGRAKPGTTGKGNPWIGGTLGEAVIGAARTKTFLGSRYHRLARRRGKRRALVAVGNSLLVIAYHLLSDPGARFTDLGPDWHDRLAPLRRKRQLIAELERLSGKKVTLQEAAA

SEQ ID NO: 314804 - protein, 449 aa, unidentified
MIRGVRSLQCKRTLKLEPRRTIMYYKQNDKIAQLTEQTLIIGIDIAKNKHVARAQDFRGIQFGKALYFDNSWEGFESLMCWKDELCVQHGKINIIIGMEPTGHYWLPLAHWLREKQIKVVVVNPAHVKKSKELDDNSPTKNDVKDARVISRLIQDGRYSEPNLPEGIYAELREGMNLYEQLMKDFQTIKGRVHQWIDRYFPEYTTVFSKWEGKASLEVLKMGLFPDEIAETEDITILNAIRKAVKRGVGLKKVRQLQEVAGHSVGIQEGKILARFKLKTLMEQYMLIQEKIEEAWAMIEQFLDTIPGVNEMDDIEGIGKVTIAAFYAEVGDLENYTHPEQITKLSGLNLKLATSGKWKGRTIITKRGRPKLRALLFKVILPLVNHNRAFKALHEYFTTRKENPLKKKQSLIALCCKLIRVLFAIGKKQVAFSPEKMLQDIPHFRLKDAV

SEQ ID NO: 314805 - protein, 442 aa, unidentified
MTPSLVVLDSLAAFVDVGSEQMHVSVGGGPPAVFGAVTGELERLRDWLKERQVRSVAMEATGVYWLPLYGVLESAGLKVIMVNGKQTRNLPGRKTDMKDCQWGATLHAHGLLRGGFVPPAQIRRLQDYLRLRADHISSAAVCVQHQQKALERMNIKLHDVISRLTGASGQRVIEAILAGERDPVRLLALCDQQIRDKKAQRVKESLRGTWAEEHLFALRQAVENWQHYQKQIAACDERIEAVLREINGPDQPGQQDPPLKTKPSGTKAPQIEDLHRLLIRLCGGKDLTVLPAHTSYSVLQLISEVGTDLKQWPSEKHFTAWLGVAPGAHQSGKRAGSVRRKRNRAGRMFCVMARGLARSKNIALGGFYRRMSARRGGLVANVALARKLAVLFWRVMVKGLGYVEAGLKRYEETVLETKRRALCRLAKQLGQVVLPSLAEIQN

SEQ ID NO: 314806 - protein, 424 aa, unidentified
MNCNQNFKISQVTEGTLVLGIDVGSNTHYARAFDWSGLELSKVFKFKNSFEGFQSFVLWVNDLCCKYNKSKVIAGLEPTGHYWFSLGELLKENNITIAIVNPYHVKQSKELDDNLQTKNDSKDPKIIAKLVIDGRYSFPYIPEGIYGELRVADKLKNDITQQIISIKNKIHRWLSIYFPEYEKIYSSIDSKSGFLLLKETPLPKDIVELGSEGIVERWKQTKLRAVGLDKAKKLEEAAKKSIGCKNITSSARFEIKLLIEDYEYKQNQLNSITEELNKLCEKIPMIKEIAEIKGIGIATAISFVAEVGDIRRFKSAKQVQKYAGLALKENSSGKHKGLTRISKRGRKKLRTILFRATIPLIGFNKEFSSIYNYYIERKDNPLKKKQALTAICCKMIRIFFTILSKGIKYDETKMLHDIKRPVAA

SEQ ID NO: 314807 - protein, 410 aa, unidentified
MLFIGDDWAEAHHGIEIVDEDGLRLAKRRLPEGIDGLAGLHALIADHLAEDAEPAEVLIGIESDRGPWVQALIAAGYTVYAVNPLQVARYRERHGTAGAKSDPGDAHTLAELVRLDRAHHRPVAGDSELAEHVKVLARTHQSMIWSRQRQTNTLRSMLREFYPGALQAFEELAGRDALAVLAIAPSPETGRRLSLNKIIATLRRAGRQRNLQTTAARIQAALRAPQLEAHPGVVGAYTASVKALVAVITELVAQTEVLRSEVEAGFGRHPDAEIYLSQPGLGPVLGARVLAEFGDDPHRYADPKARKNYSGMAPITRASGTKRVVLARYARNRRLADALYQQAFTALTVSPGARAHYDRQRARGATHHQALRALANRLVGILHGCLRHHTSYDEHTAWPSHDQISIQTAA

SEQ ID NO: 314808 - protein, 386 aa, unidentified
MSRPSNILLPAINYDHTLVLAIELSNKSWVLAAQVPGLPRTKAQRTIEPNKNALLAAIDGYRARAAAVGYTVDRVITTYEAGWSGFWLARWLVAQGVEVHVVQPSSVPVDRRLRRAKSDGIDAELLLRTLLAWLRGEPRVCSMVPIPDEADEDARRCVRERTELLSDRVGLTNRIGAVLATLGVNDYNPLLQSRRRRLAELRTGLDEPIPPNALAKIERLLARLELVLAQIAELERERDEVAAADAPDRAGKMIQQLASLRGIGVQSATVLVREAFVRHFPNGKALGSYAGLTSTPYSSGGIDREQGIGKAGNRRLRTVMVELAWLWQRYQPGAAQVAWFRDRVGSTGRRIRKVMVVALARKLLIALWRFVIDGVMPEGAVMKPSI

SEQ ID NO: 314809 - protein, 225 aa, unidentified
MNHTLCVGIDVAKLSNHVYALNFNRNKLLSVNIPNTQDGANLIETHILKLLDKHHLSKVIVILESTGVYSGHLATYLSASKFLSVFDIRVYLINPKISKNYRKSFADMDKTDPKDAYILAEIVDISQFESNDALAKYAGITWRKNQSGKFTADETYMTKTGNKYLRYFLIQAANMARIHMPEYHDFYQKKYDEVTTHQHKRALALTARKLIRLIYGLLSTNRLYK

SEQ ID NO: 314810 - protein, 380 aa, unidentified
MSTATTRSGPATSTLHLAFDLGNRLWKLAFATSIAHAPRLRTMPARELAQLDAEIAAAKARFGLAPDAAVVSCYEAGRDGFWLHRALTARSITSHVVDSASINENRRARRAKSDRLDATALVRLLLRHHAGERGVWSVVHVPSVDEEDRRHLHRELFTLTRERTRQVNRIKGLLALHGIVLPRLRGLPAAPPVLRDWNDAPLPPALAARVAREWTRLRATQRQLVALRTARRQLLASPEAATDPLLQKVHQLLALRGIGEVSAWLYTTEFFGWRAFRNRRQVAGLAGLTPTTRSSGDLEREQGISKAGNVLIRSLAIELAWSWVRRQPTSALSRWYRARFAAGGSRQRRIGIVAVARKLLIALWRYLETGVLPEGAVLKA

SEQ ID NO: 314811 - protein, 423 aa, unidentified
MTKRSSNPTDAVLVAIDMSKHRQEVLIERPEGGPRRRMTVMATKADYDRLATDLSDIGRPIIVGFEATGNYHRTLAHRLLSAGFELRLISSVALARTREALHNGWDKNDSKDAQVILHMLRIGATQRYVDPLAAGINDLQEMSKTHEAISKAKTQTWHRILTHYLPLYFPEIERFAGNSRSDWFLALLERFPTPTSMTVLGQETFSREAWDLVGRKVSKARLINDIYETACASVALPVDEDSVSIAMFRMVIAQARNLIRQRDEIERTAHAMLAENRDYQLLRMIPGIGPINALTILAEAGDLRRFSHHRQFLKFCGLDLATRQSGTFRGRTMLSKYGNARLRRTFWMAAQVAARQRNNSFRDKLGRYTAGHADDADRRRKAMTALTAKMARVAHAVVKTGTEYRPFVERSDARWKDPSLQVP

SEQ ID NO: 314812 - protein, 452 aa, unidentified
MAKVAKRKQTSKGLRLEVVNPNAAGIDISPKEMQVCVPSDRDGECNRTFGVYTEDLHYIAEWLKACCIDTVAMESTGIYWLPVFRILKESGFEVILVNASDVKNFSGRKTDSSDAEWLMMLHSYGLLKPCFQPENIARTMRNLVRHRDNLIRSASREVLHLQKAMEQMNLKLDNVFSDILGKSGQSVIKAILNGERDPKVLADLADPRCRTSKEEIEKSLQATWDEEHLFEMRQSDSLYQFYQQLIAECDAKINGIAMQYSATVDAPKTELLRSEKYNAKKNRIGFDVEKVAFELWGVNVMRIPGMSRGSLLRLVGELGADFTTKFVDVNHFVSWANLVPNNKISGGALLSSKVPKKKNPVGMIFRQAANTLKAAKNPLGDYFRHMRAKGGHLQAMVATGKKLASIFYCMVQRKLEYNEKVYCNHRKQELQNKVAYLHKRLQRMESELANCG

SEQ ID NO: 314813 - protein, 421 aa, unidentified
MKNVTDSGQKVKGQKRMELERATWILGIDVGKESLSCALLLKDETFRCRFDVEASLSGFQMMLEKVKTETKGDGAVVFALEPTGHYWMVLGQFFEDHNQSYVLVHPLVVARSREVKQLNRGKTDALDARLIAELACRGAVTRTQIPENDWATIRFYAREYMDREKEIAREKNRMMSYLETTLPGFLEIFPRPLGMNSRACLRVLTNFREVLQGDIVQFESQVRKHITGKRLLTSRVKRLFEMLQRGDALGLRAGRKTLFWRIINGLDRLELYEKQQDMASNALISLYEQCEFKPYLDSVWGTSPLTNCLVLGFMGDPTSYNSPASLIKMAGCDPVPNESGKFKGKAAISHRGRNLLRKAGDRISFLLEKRNTVFQNFMHHLTVRPKNKLTKRQARIACINKYFRIIWVLCNHRVLFNPALA

SEQ ID NO: 314814 - protein, 349 aa, unidentified
MRFYTNQHRHYCGIDLHTKTMYVCILDRDGQVLVHKNLPSNPESFLEVVAPYRDDLVVAVECIFTWYWLADLCAAEGIAFILGHALYMKAIHGGKAKNDKIDAHKIAMLLRSGMLPQAYVYPAGMRATRDLLRRRLHLVRKRGQLLAHIQMTNQQYNLPAFAKRIAYPSNREDVADHFEDRVVRKSVAVDLALLDRYDTLLTDLESYLVRQAKQHDPQAFQLLRSIPGVGKVLALTILYEIHDVHRFDRVQQFASYARLVKCAKESAGKKHGTSGAKMGNVHLKWAFSEAAVLFVRHTDPGKKLLAKLEKRVGKGKALSILAHKLGRAAYYILLRGKAFEIERFVATAN

SEQ ID NO: 314815 - protein, 339 aa, unidentified
MYYSGIDQHKRDSYITTYGPDGPVVNQARVPNTPLHLQRYFAQLPGPHAAVVESTGSWYWLADTLQSLNVSLVLAHATRLKAISAAKVKTDKLDADTLAVLLRADLIPPAHMIAPERRGLRDLMRTRLRLIERRRSAQNSIARLLEKFNVGAVEALDAAYQLQASCHHAQSELLAQHVRSLEAALYPVLIPNADVQRLLWIPGIGKVNAFTIYTEIDGIARFPSAKQFFSSCRLVPGADHSGGRTRHRSGSKAGNRYVKIAFSHAAVRAMQYYPEIRAFYRAKVRRKPIRIARTLVALELARIVYHVLRTQADFNGCFKGTPLKRRKQPQWPRLASPAA

SEQ ID NO: 314816 - protein, 373 aa, unidentified
MSQSCYGEDRTRQIATAWVTHTVSSKDRLVLFRWINPNSCLGVKPESNARMGDSTMTLKISIAVGIDVCKQFLDVFHSRTRVHARFDNDPEGIASLLDWLTAQGPADAIALEATGGYEALCWQALEAYGLAVTRLNPKRVRDYARAAGVLAKTDRLDAEVLARYALAVPVRITAPKAAPLRELEAWLLRRAQLIEMRVAETNRRLLAPKAVQRRIDVHRRALQREIEDIDARLANALHGNAVWREKLARLDGLKGVGPNTRVWLIAALPELGNLGRREMAALVGVAPFACDSGRHRGGRHIRGGRAHVRTALYLATLSAVRHDPRLKAFYQGLLARGKPKKVALVASMRKLLTILNAIFRSGQPYRAPVAVGV

SEQ ID NO: 314817 - protein, 320 aa, unidentified
MQSPSIALNISADVGKDEMATACAEGSFATRKTHNQRAALLALLKELPAGSRIGMESTGSYHESLAELAHKLGFVAYVLNPKDTRHYAKAMGLRGKTDRVDAELIARLIAHEHAKLHPWIPPTAEQRQIDRLLKRRAKVSRIRAALTQSFKGVKGFAADVNALRERLDKLLARIDAKVKTLIEASTERKQDYARLRTIGGVGAVVGSSVLNTLERVPFKSADAFVAFTGLDPRPDESGHHHGRRRLSKRGPSELRRLLYLAAMAAAKTKIWKPLYQHYRARGLSTTAALVVLARRIARTAWSIYTHKTAFDPQRLTKALT

SEQ ID NO: 314818 - protein, 350 aa, unidentified
METIYIGVDFHARQQTICYLTTDSGELLFHHLKHEDKALVRAFYAQFRGHVIVGLEASGYSPWFERLLEELGCEVWLGHATEIRRRARWRHKNDRRDAELILDLMVHNEFPRLYLPPLQSREVLRMLRYRQKLIKMRTIGKNSLQALALQSGLAKGPHLFTKTGLQELRSATMSPAMQWQREQWLQLLEPLNERLLETMRWLQQQSQADQRISRLRTHPGVGLLTALCLVHSLEPVRRFANTRKVTAYAGLDPVERSSAERQRFLGISKGGSRVLRFLLVEAAHTALRKDADLKRFYQRLAQRHGRPKAKVAVSRKLLIRTYIMLRDEIDYAEFQRRAVAARPVLPAHGL

SEQ ID NO: 314819 - protein, 317 aa, unidentified
MQTFLNVGVDVAKDAVVVACAAQSFPVHSVVNQHEALLTWLKSLPAGSRIGLESTGGYHELLADLAHRQGYTVFLLNPMDTRHYAKAMGNRAKTDRVDAELIARLIAQEHARLRPYTTPTANQRRMDHLIRRRAKIVRIKSTLKLTMANLGGFAPELKAVLCKLDALVAKIDVAMTTIAARSPQHGEAQQRLQTIVGVGPLVGMALTNALERVPFRNADAFVAFTGFDPRANDSGYKTGRRRLSKRGPGELRRLLFNAAMSAVKTKVWKPIYEYYRGKGWSTTATLVIIARKIARAAWSIHHYRSTFNPQRLTKCLT

SEQ ID NO: 314820 - protein, 364 aa, unidentified
MKDSTFWVGMDVHADSVTVSVFSTKGSEPVERFEVVPDDRGLARLVKRLKARGARVRCVYEAGPCGYELQRYLSRRGVVCEVAAPSLVPRRPGERVKTDRRDADKLGRLYRAGELSLVAVPDPKLEALRDLLRAREDAREDLLRRRHRLSKFLLRHGHRYRDGQNWTQRHWSWIRSIHFQDVHAHAVLEEYVIAVDEQLEQVKRFDRLIEEASQKPEHATKVDRFKTLRGVGTTTAMTLLSETGDLRRYLKASQFMSATGLVPSEHSSGSQRRQGAITRTGNAHLRRVLVEAAWHYRHGPSPSLAIRKRRDGQPELVRTIARRADSRLHGKFRRLTARGKRSTEAAVAVARELAGFVWAIGQIS

SEQ ID NO: 314821 - protein, 397 aa, unidentified
MRRLRYDRVESSVELHAKGAAMKKNSAGSIRFVGLDVHAETIALAVAEPQGEVRSLGTIPNRPEPVKRLVKKLNAEGPWKACYEAGPTGYALYWQLEKLGIECEVIAPTLVPTKAGDRVKTDRRDAERLARSFRAGDLTAVWVPDAAHEALRDLVRAREAAKRDELRARHRLGKFLLRHGRRPPEKIRPWTQRYLEWIKREVKFEQSAQQWTLEDYLNEVEHCSLRIARLEESIDMAVESAPAAMREVVEALQALRGIAKVSAVTIVAEVGQLSRFSTARQLMGYSGTVSSEYSSGKKTLRGGITKTGNAHLRRIVVEAAWSQRFKPILSRALRIRQENLDPEVHEIAIKALHRLHNRYMRLLANGKCSQQVVTAVGREMLGFIWAIGIAVERKNAA

SEQ ID NO: 314822 - protein, 380 aa, unidentified
MKKDNRKTNEEGRQSATKIGKGLPEITIGIDVGDEHSHFCWLDADGEIVKRGRVASTQAGLEKEFGKIRPARVALETGTHCHWMCEVLSGLGHAVVVADARELKSISGSHRKNDPRDAEQLARLARADVRLLHPVSLRKRKTQQDRSVLKARDALVAARTQLICAIRGMVKADGSRLAGCSTEAFPEQVGASIPAGMRRALAPLMETLEVLNEKIRYYDQLVAHIAQEEYPETSLLTQVPGVGPVTALYYRLTIEDAERFAHSRDVGAYFGLVPKQQDSGESTPQLRISKAGDEGARRLLVGCAHYVLGPFGPDSDMRRWGLKLAARGGKNAKKRAIVAVARKLAVLLHRLLAGGEVYEPLRNSQAAEAAASRVAAAVAA

SEQ ID NO: 314823 - protein, 360 aa, unidentified
MQVLGNEISQEQKLTIGVDLGDRWSFYCVLDEAGKIILEQKLATTPEATKQTFGKIPRSLIALETGTHSPWLSRLLTELGHEVIVAHAQKVELITKSNRKDDRHDARTLARLARIDPELLGPVRQRSAKAQIHLTVIRARAELVSARTALVNAARGLVKSYGERLPKCGTYQVNEKLAEGVSAELRDVLAPLLREVESLNERIKEYDERMEKIAKELYPEVFLLKQVKGVGTQIALTYVLTIEDPYRFQKSREVGCFLGLRPGRRNSGQSEPQKKISKEGDRYLRTMMVQGAHYVLGPFGADSDLRRWGLKLAERGGKNAKKRAVVAVARKLAVLLHRLWVSGEVYEPLRNSQKTMRAVA

SEQ ID NO: 314824 - protein, 340 aa, unidentified
MTATTDHYVGIDLHKRQAQVAVLDDEGEVVEEVRVANADLDEIAQKYTGSSAALEAGSNYFTIYDRLDEELDVTLANPAQADWLEDQKQKNDRKDAKNLARFLRLGEVPESYVPPEEFRRYRALARGRKKLVDKRSDFKNEVNSLLDQNGVTYDGSLWTDEGREFLHELTLDDASELLLEQWLEAIDEFTVKVKRMQRRIEEVAAEIDELDTLMSAPGIAAFSGLMIHGEIGEVERFDRAAEVVSYAGLDPVIRESGDSRREGQISKEGNGYLRWILVQCANTAVHNAKDLYLSQFYWRLRNKRNKPHKVAIVATARKLLVALFNMLRKNEPYDPPEVSA

SEQ ID NO: 314825 - protein, 344 aa, unidentified
MNEVSVIGLDLAKHVFQVHGITANGEVAIRKTLRRSQLLSFFANCPPCLMGMEACGGAHYWLREIRRLGHEVKMMAPAFVKPYLKANKNDRNDAEAICEAIQRPSMRFVAEKSPEQQSVLHLHHSRRLLVKQRVAVSNHLRGLLSEYGIVLAQGERVLLRQLPSLLEDGDNGLPMLTRHTVATLRTQYLQLVEQIHDLEVYLQAWHKQAEQSQRLASIPGVGLQTATALAATVGDGQSFRNGRQLAAYLGLVPRQHSSGGKPRLLGISKRGDSYLRGLLIHGARAVIRHIRRRLALGQPGGNPWVEQLLLRCHPNEGAVALANKMARIAWVLLSRNECYHATAK

SEQ ID NO: 314826 - protein, 483 aa, unidentified
MKNKQPEKSNEAPRRATEGHWHEMNRKQRREMMRKIQSDDLRLEVVHPDAAGIDIGNESHYVAVPPTRDSESVRRFGCTTAELKEMADWLKQCGIRTVAMQSTGVYWIAVYDILEEVGLEVYLANARETKNLPGRKSDVQESQWLMKLHTYGLLRNSFRPSQEIRTLRTYWRQRNDLVRAAGRHIQRIQKAMTQMNIQLANVLSDVSGMTGQAIIKAILGGERDPQKLAEFRDARVKSSKEEIARSLEGHWQEDLLFVLRQEQNGYEFCQKQMAECDQRIEQYLQQREDRSAGASLPEEKRKERLRKKKKGNTPQFDLRTELFHMAGADLTQIDGVDVMTAMTILSEVGWDMSKWKTEHHFVSWLRLCPDNKISGDKIIGKGRLPTTNRATSALRMAASTLRVSNTYLGAQFRRLRTKLGAPIAIKAMAAKLARLVYRVLRYGMPFVDKGAEFYEAQHRTQQIKYLKWRAAKMGLQIIEAPAA

SEQ ID NO: 314827 - protein, 351 aa, unidentified
MIIIGVDYHPSVQQIAYVDTETGETCERRLNHSDGEAEHFYRALERRQVRVRVGIEATGHARWFERLLAELKFELWIGNAAEIKAARVRKQKTDRQDALLLLKLLVEDRFPRLWVPSPENRDLRQLIWHRHRLVQMRTRAMNQIQATAMNEGVRRKKALWSKSGRQQLESLLLAPWATRRRQDLLELVDRLNGTIAELTTAIEQEANKRPEVLQLMTHPGVGPITALAFVLVIGSPDRFACGKQIGSYLGLTPCEDSSANRQRLGHITKQGSSLLRFLLVEAAQAAVRRDPDWRRRFVHLAMRRDRRIAKVAMARRLAISLYWMWRKGYDYQQSLKFGSHAGEPGYRHGVK

SEQ ID NO: 314828 - protein, 401 aa, unidentified
MKTVLSVDVAKNKSMIMLMNSDGEILIDTKEIKHNLEDFEKAKEEIKEINPENLTVFMESTGTYHLPVERYFKENGFNTLVINSLTTKNNYDTIRKTKTDKKDCYRLAKLFFVNEVEYHELSKKDLYANLKAMTRQYFYLLQQNVSCKNRYKRLLNICFPELEKIFKSTRIYDDTALNFIKEFPHAEIVKEKQIDALYNNLYKTNGRNLNFYKRLSETIKIASANSYPGVDKEHKDVKNLSDMAKIVQNNNNVINELRDKMIETAKKSPYYEIINSFYEIGEILTAEILGKLGDITRFDSPKQLIAFCRLDPTIKQSGKSINVKGAISKRGNKYARYILFNCSQMVVKLGASNYPEHPVYIYYQNKKAEGKHYYESLTACSTKILRMLYSMCKNNKQFLEN

SEQ ID NO: 314829 - protein, 361 aa, unidentified
MQGSMSLVGLDVHASQTHAAVLDSASGELSGVRLRMAPGEVVEFLATLPRPVRAVYEAGPTGFGLARAAIERGIDVRVVAAGKVPRASGDRVKTDRRDAERLARLLAAGELRFAFVPSVADEQFRDVIRAIEDCRGDLMRGRHRLSKFLLRRDVRWPGPGSTWTQRHLSWLRGLRFEDLCSRATFIDYLSAVEMLLARRAALLAALEQAIPDSRHAPTIAALRCFRGIDTLSAAGLCAEVGDWQRFTKPKQLSGFLGIVPCEHTSDTKRRQGSITKAGSTHARRLLVEAAHHYRHRPAVGDALARRQHRQDPRVIDAWRAQRRLHARWQLLAGRRRKPAGVVAIACARELAAFCWEAARID

SEQ ID NO: 314830 - protein, 402 aa, unidentified
MNCVGIDVSKGKSTIAVMRPFGEVVVSPFEVCHTVNELSELARQLKSLDGETRVVMESTGNYHAPVAWLLHDAGFYVSVVNAMLVHDYGNNSLRRAKTDKKDAVKLANYGLDHWLTLPRYVPEEDTRLMLKTCYRQYQQYSKVQTMLKNNLISLLDTAFPDANRLFTSPPRADGSEKWVDFVATFWHCECVCGLSKKAFTAKYQKWCRKHGYNFSQDKALDIYASACGRFGVMPKTNTAKLLVEQAISQLQTTSAALAALKQEMQSLAASLPEYPVVMEMFGVGPTLGPQLIAEIGDVRRFHSKKALVAFAGIDAPPYQSGQIDVRSRSISKRGSASLRRTLFLVMGVLLQCAPMDEPVYQFMDKKRSEGKPYRVYMMASANKFLRIYYASVKAYLDSLEHD

SEQ ID NO: 314831 - protein, 339 aa, unidentified
MNVTTIGIDLAKNSFSVHGADERGKTVFRKTLSRAKLMPFLAQQPACLIGMEACSGAHHWARQLTELGHRVGIMAPKFVIPYRKGGKNDGNDAEAICEAVARPRMRFVPIKSAEQQAVLCLHRIRQARIKERTATLNQLRGLLSEFGLVMPQGRYPALHHIPGILEDAENGLPMLARRLLHDLYLRLQSIHSEILAYDRELEHLAKASPPAQQLMSTPGVGAITATAILASVGDAHQFKNGRQFAAWLGLTPRQYTTGGNIRLGRITKKGDAYLRTLLIHGTRAVLAALGDKQDRLSVWLRALIARRGYKRATVALAAKNARILWALMVHGESYQRKAA

SEQ ID NO: 314832 - protein, 401 aa, unidentified
MTATRNRRSSSRRRAPTSVGKPRGVLHPRVQLVGPEHFGIVCFDCAKARSKFLLADFYGRVLIPPTTVAHTRPDLEAAVAQIKQAFATHQLKDGLVAIERTGRYHRVVQRAFAAAGFETRILHPFVTKQYRQPVDPGNKTDDTDLNAIHRATVTGCALLEATLDEAWTTLQLVIRHRRDLVRKGAALNCQIRDHLEAALPGFAACFDKLWESPIPWHLLRHFPTAEQLRAAGMTALCQSLRQAGIRFQQRTVQTVIDWAQQAAPGDIAAREHHRIALALYEDRARKSLEIQALEREIAGRLVHTPYVLLLSFPGINVVSAADFAGEMGPIEHDANPKCITGRAGLRPSRYQSDQIDKANGPLVRNCNRSLRAAILGIADNLVVCNHHFRALAAQRKGDRSI

SEQ ID NO: 314833 - protein, 347 aa, unidentified
MSISMIGLDTAKTVFQIHGVDETGRAEIRRKLRRNDLIAFFEKQAACTVVMEACGAAHHWARMLTGLGHSVKLIAPEAVKPFVKKGKKNDAADAAAICEAASRPDVKFVPAKSVEQQGILALHAARSLLVKQQTMLANAMRGLATEFGITVPKGIHKLDELMAVVDADEIMPQQAKQAITGLHDYWNNLSEGIETFEAEIVAHARHDETARRLATIPGIGPITASLIAATVGDITLFKTARQFAAWLGLVPRQSSTGGKTRLGRITKTGNREIRKLLVLGATSMVYRANGWNSAVGAWLRSVLERRPVRLVTVALANKMARIAWAVMTRKEVYRPKGGVAAVAQATA

SEQ ID NO: 314834 - protein, 319 aa, unidentified
MSASDGPFVGIDVSKKFLDVAVRRGSTWRVERTAAGIERLVCDLGALKPKLVLMEATGGFEKPVANALAAAQVPVAIVNAKRVRDFAKASGKAAKTDQLDAGVLAHFAETFQPQPYSAPTQAEEKLEALVVRRESLVQMEVEEKQRLEGPGRSAGCQESIERHLKWLSGERKVIEDEIGKLLNSDDFVDKAARLRSVPGIGPVVTATLMAFLPELGRASRKELAAVVGVAPMNDDSGNSDKPRHIRGGRSLVRRVLYMAAVVGLRHNPVIKATYAALKARGKPSKVALVACMRKLLCILNAMMRTGETWRPPAPEAESA

SEQ ID NO: 314835 - protein, 332 aa, unidentified
MSALVCGLDVHKESTYATILDQDGEIVTQKRMPNEEVPDFLKPHPVKRVAMEASTSIAPLYRKLVEEGYQVTVSHPRKTRYIAEARIKSDRVDSKALAELLRLNSLPESYMPPPHIAVLREKVRRRAFLVRQRTKLKVKIRDVLTYEGVKPPKEYGLYTLKGRKWLEGLGMESVCCYLRVMETLREEIHRLSLELRHIAAGDEDVRLLMTVPGVGYYIALLVKAEVGDIDRFHSGDHLASYAGIVPSTHSSGKVTRHGRITREGSAWLRWAMVEAVLVHLRYDTPVTRLYHRVAERRGCKTARVAAARKLLTVCWSVLRNRRPYYNPVHAQA

SEQ ID NO: 314836 - protein, 381 aa, unidentified
MRQVCGLDVHKDSVFACIVNEKGVVFQEKFGVLTPELEQLAAALQEHDVDEVCMESTSVYWMPVWRVLERYVMDLKLVNPYFIKQLPGKKSDVKDAEWIATCLLKDLIRGSYVPADIIQQLRQYDRRISDLNAECVRKLGKLDAALQRCNIRISNYVATTDGKSYKDVVRLISEGIRDPAELLKVIHGRITNRVGKNVIIASLTGVISDTDIDVIRQLCEEVDLAQRHKDACQSKMDVICQQFFPEQLKNLQTIPGVKGRSATAILAEVGSDVSSFQDAAHLVSWCGLKPRNEESAGKIKARSITHGNRYLRKTLIECSWAASKTQGCYLNKFSYYHTVVRRKNKMKVQVAIARKILTAVWYVLHDNVAYRDYTPDIVPAA

SEQ ID NO: 314837 - protein, 347 aa, unidentified
MMIIGCDLHVRFEQIAMLDTETGEVVEKKLEHENGEAQRFYEGLKEPALVGVETTGYALWFAQMLGELGHELVVGDAAKIRKMEARKQKHDRRDAEHLLNLLIRGDFPKVWLPSAEERDVRVLLEHRHQLVELRTRAKNGLQAMALSYGLRRRGRLWSESGQAELQNLPLREGMARRRGDLLRLVAQLNEWIKELDPRIAQEVARREDAQRLMTHPGVGPLTALGTVLVLGPVERFPDAKHVTSYVGLIPEEDSSGGRQRFGRLAKQGNRLLRFLLVEAAQTASRFDPGLRRVYRRLAFRKGAASAKVAVARKLAIRLYIMLRDRIDYAEFCRRGSHAGMLVSKPLV

SEQ ID NO: 314838 - protein, 309 aa, unidentified
MDATYVGIDVSKDRLDVHMVPSGEAFAVARDGEGLGALVAHLAASPCATVAVEATGGFETVVAASLGAAGLPVVVVNPRQVRAFAAALGLRAKTDPIDATVIARFAAATKPEIRALPDEETQRLADLVARRRQIIDMIVAERQRQKRATKRTAKSIVRLLAALQKELSNIDQDIDDSVRGSPAWREKEDLLRSVPGIGDVTARTLIAELPELGRLDRREIAALAGLAPWTRQSGQWRGKSFIGGGRASVRSCLFMAAMVASRHNPALKAFHQRLLAAGKPKMVAIVAVARKLLTILNAILRDQTPWQLA

SEQ ID NO: 314839 - protein, 403 aa, unidentified
MQTATTIGLDIAKSVFQVHGVDATGNVIVRRRLKRRYVLSFFQKLPPCLIGTEACASSHHWSRELQALGHTVRLMPPAYVRPYVKRQKNDAADAEAICEAVTRANMRFVATKTSEQQSCLMLHRTRHLFIRQQTAVINAIRAHLAEFGIVAPVGRNGIEQLLDVVAHAGDNQLPEIARACVLALGAQLRTLKAQILNFDRQIMAWHRSSEASKRLDDIPGVGPALATALDNQLPEIARACVLALGAQLRTPKAQILNFDRQIMAWHRSSEASKRLDDIPGVGPALATALVASVADPKAFRSGRDFSAWIGLVPKQHSSGGKDKLGSISKQGDRYLRSLFTTGALAVLRYAKIHGTKHRPWLTALLARRPTKVAAIALANKLARTAWAMMARGDRYKEPVALAA

SEQ ID NO: 314840 - protein, 405 aa, unidentified
MLFVGDDWAQDHHDVELMDATGRRLSKARLPEGVAGIERLHAMIGAELGEDSKAEVVIGIETDRGPWVQALIAAGYTVYAVNPLQASRYRERLAVSGAKSDAADAHMLADMVRTDSHQFRPISGDTADAEAVKVVTRAHKTLIWERTRTTQRLRHALLDYFPAALEALDDLDAPDTLELLAKAPDPVSAAKLTATQISAALKRARRRGIPDKVTKIQAVLRAKHLGQPAVVTAAYAVSVRALIAMLATLNEQVKFLHEQVEDFFCRHPNAEIIRSQPGLGPMLSARVFAEFGDDPHRYASAKARKNYAGTSPITRASGKKKVVTARHVRNDRLIDALIAQAFSALRVSPGARAYYEKQRARGIEFNAALRQLANRLVGILHGCLKTGTSYDEATAWSQQAHALAA

SEQ ID NO: 314841 - protein, 430 aa, unidentified
MKSNTQNAKIEAITEKTLVLGIDVGSETHYARAFDYRGIEYSKKPFKFSNTEAGFVTFKEWILDLKERHEKDKVVPGMEPTGHYWFNLGKFLQDNEMKPVLVNPHHVKKSKELDDNNPTKNDRKDPKVIAGLVREGRYMIPYLPDGVYADLRTASNIRFQLQAELTRIQNRISRWFNIYFPEYKTVYGKPDAKSGILILKAAPLPEDILTLGIDGVNQIWRDAKLRAVGKARAKTLIEAAEHSVGSKEGAVSARMEIRMLLEDYESRNIRLQEVMTLIEGLVKQIPMAEKLLEIKGVGIRTVSGFLAEVGDISRFNNPKELQKLAGLALVENSSGKHKGETTISRRGRKRLRYLLFEVAMSLVAKNPEFRELHNYYTTRRLNPLKKMQSLMAIAAKLIRVFYAMLTKGVDYDPKKMVSDIKRPAVYLQAA

SEQ ID NO: 314842 - protein, 339 aa, unidentified
MTGTMTWAAMDVHARSTYAASLDVLSGELQRRRFDIGAVEPVVQWLVGLPGPVRACYEAGPTGFGLFRAAVAAGIDCQVIAPSKTPRPSGERNKSDRRDTDLLLRQLMAGALTPVAVPSASFEAARDLARAREQVRADLMRCRHRLSKLLLRHGRVYDRSAWTVAHRQWLTAQSFEQVNTELALIDNLAACDGLAARKQALDERLSRVARDPEFWPLVSRLRAFRGLDTLSALILVLEVADFERFARAVQLGSWLGLVPSRQQSGESDVHGSITKTGSKYARRILVEAAWHYTRPPRIGRTLAERQQRLPDHILQIAWRAQHHLHRVTSGCASARSRAP

SEQ ID NO: 314843 - protein, 413 aa, unidentified
MDILYERCGGIDVHKKIIVVSFRCGRKETTRSFGSTSEEIRKMVKWLEEEKCEIVAMESTGSYWKPLFNIFEVSNIEVMVVNARHCKNVPGRKTDTNDAQWIAELLQHGLLKKSFIPSREQRDLRDLSRYRISLVEERAREINRLQKMLEGGNIKLASVVSNINGKSSRNLLKRALASDELLTEEEILENIQPNMYHKSELILKALDGFLTPIQKQLILRILAHIDDMTKRIEEMDSLIKSFMSDYEEAIQRIDAIPGIARRSAETILIEIGLDMSYFPSGKSLARWSGLAPGNDETAKKQRNGKTTKGNKTLKTTLVQCAKVARKKSGSFLKAQYQRLAPRRGSNRATIAVAHSMIIAIYNMMKNNEPYKDLGENYYNNFNREQKINRYLKKLKQLGWEPEMATMSCFATGL

SEQ ID NO: 314844 - protein, 408 aa, unidentified
MLFAGIDWSNHALDYELRTAEGQVLASGQVQNSAAGLSELFVKLEAHAAPGDIGIAFEATNVAWVLALSDRGYLLYSVNPAMVVNFRKTLAIAGDKSDRIDRSLLARMLVVLHTQLKPLRPDAPEIVALRMACEDRVRLVEERTAKLNELHAILKAFYPAFEGLFGDLSSRIALEFLHEFPTQAQMRALTPRRLANWLRRHHYPNMNRLEAMQALLTAPLLQVGEHLQKAKQVHIQYLASSLLGLCTEIDQRERHINDMFDGLAEAEMYRSLPGAGKILAPALLACFGRDPERFESVESARALLGTAPVTRQSGRTCVVTFRRACWKFGRRTLQLLASTSCAACEWAQAFYLKQRASGRKHHQALRALAHKWVKIILAMRRTGRPYDQAVFLNSRTRFAVKAAAAVRP

SEQ ID NO: 314845 - protein, 389 aa, unidentified
MSQAFDASRSLTALEQHNTIITVIEMGQSKWLVAAVVPGIKRQPLKKLDADEASLLKLLHRWRKEADQTGHPIKRLVVAYEAGRDGFWLARWLRMHDVEAYVIHPTSIAVSREHRRAKTDRLDTELLLRALLGWLRGEKRHCSMVAIPTAEEEDAKRPNRERDSLVTEQTRIVNQIKAILIRFGIRSFRPKLRKAEQLLRDLRTAEGSPLPDNTRAEMYRHLVRLRMVREQIRAVETERLQKLKAEHGRKKGPHAMVRLIARVVGIGVETADMLVNEVFSRRFRDRRAVARYAGLTGSPDESGKRRREKGLARAGNARVRTGMIQLAWRFLRFQEDSALAQWFQTRAADGRGSTRKTMIVALARKLLIALWRLVTTGELSDRIVLRPES

SEQ ID NO: 314846 - protein, 330 aa, unidentified
MNKTTFILGVDVSKNTLDLHCHEAVQHVQIPNTTEGFRQMHQWCRLHRIDLTDTLVVLEYTGGYEYRFLQHLQAKAIAFVRIPGLAIKRSLGIVRGKTDRVDAARIARYGRLNDDQLRPQHLNATIVRLKELLSFRKRVVRDFAADKATLSERRHMKGANAKDPICRWLAQRIKSGKALLEKIEAEIKALIQGDDELSWNFRLLTSIKGIGPVNAWLTIAYTENFEAFTDPRKYAVYVGVVPFEHTSGTSIKGRKRVSDLANKELKADLDRAATAAMVHDPELRKYAQAKITEGKPFRLVCNNVKFKLILRMFAVVKRGSVYVDNYQQAA

SEQ ID NO: 314847 - protein, 367 aa, unidentified
MALQFIGVDLHTNKFTCCYREEGSGKKETTTYELTDYGLADFYQTLTSETYVLVEATITTFAFVRLIEPLVKEVIVANTYELKQISLARKNTDKIDADILCRVIKMQVLSGEQTISPVTVPPEEIQDLRSLFTTYRLWKKQTTQIKNRIHSLIKEKLYGFTQEEIFTRKNREKICSLERNTAMSFQTAELFAQLEYIEERLGALEDKIKECAEPYMREIEILTSLKGISVFMAIAVIADIINVNRFKNSKSFTSYLRSAPKVSNSNTSVSIRGTNKKGRKLSATLITQSLNHFLDSSEKLNKWYMRLKEYKKAGLVRTALRRRVFAEIYQMLKKGEYHYGREAQRHEFKMKQYRRFLEKRKILSKTA

SEQ ID NO: 314848 - protein, 367 aa, unidentified
MKNHSSFDQSVSSSDLSACTTLAVDLAKQVFQVAGEDILGQVFYEQRIKSREAFYDFLRQLPPHVVVLMETGPGAQAWARQLQDQGNPVRILPAGLVATHRSGPKNDRNDALAILRANRDEKICAVPVKSVTALAMQALHRARQGYVRRRTALSNQMRGLLLEHGVALAQGDVAISQKIPRVLEDATQPVPGLLRELIDELLAEWRHLGERISVLTGRLEVAANTDMTAKRLMTVRGIGPITATALVAKETKPERFPNARKFAAYFGMVPDQHSSGETVRLGGMTKRGDAYLRSLMIQGAHAVLQQLRPDSQQPDDRRLLHWMSRLGRKEAAIRLANRNLRIVWVLLQNDQTYRRHAGDGQPATMGH

SEQ ID NO: 314849 - protein, 345 aa, unidentified
MKKVMAGIDLHSNNLVIGIMDMDGKRVASQKLSCKLKEVVGFLSPFKKRLEQVAVESTYNWYWLVDGLRALRYPVVLANPAGMEQYSGIKHADDTNDAFFLAELLRLKILPTGHIYDEQLRPVRDLLRRRLTLVHHRSALMLSFKSLYTRTTGQEMALSRLKELEIKEAQDLYDHPANQLIAGMQIKHVEQLSQSIEKLEKAVLDCARELPYYPKLTTLPGVGRILGMTITMEVGDIKRFAEAGHFASYCRTVEAKRTSNSKKKGENNSKCGNKYLAWAFVEAANFARRYDEPCRRWYERKAAKRSNVIAIKALACKLAKAAWHLMALGTDYDSKRMFGQAASTK

SEQ ID NO: 314850 - protein, 351 aa, unidentified
MSHKTAATVAHTIGIDAGKNTLHLIGLDDKGAIVLREKVVRDRITARLANVPRCLIGIEAGMATHYVARELSALGHDVKQVPPAYAKPFRQGHKNDFRDAYAIAEAVQRPSTRCVPVKTDDQLDLQAPHRVRSRLVGQRTAVINQLRGFLLEHGIAVRQGLRFLRQQLPDILAKRSDVLSPRMIRIMEDLSGDWRRLDERIQHVTDEIEVLAHGSESCRQLMTVPGVGPIIASAMVAAIGNGTAFAKGRDFAAWLGLVPRQISTGDRTILGRITKRGNRYLRTLFMQGARVILLRPANWAKHSFGPWLTAAANRLHHNVLATALANKLARIAWTVLMQARSYEARVEPRTA

SEQ ID NO: 314851 - protein, 608 aa, unidentified
MLPHLVSTPPLTASADAPSVRIGVGIDTSRYGHYAVFLRDDQQPAAAELPFAESAHGYAQLRHRLQQLVGRHGAVHFAVRVDVAGQYADNLLHFLHGLSTRRADPGAPGLANTTWAISCGDPQRNKDYRAALFGSQKSDPVEARAAARYALSERPASVQPMPTPLRALRQVAGRLQAVVRQRTRLINQCHHLLALAFPELALLVHDLAAGWVLELCSRYPTAPLLATASPADLGNIPYLPHQHIPALLEVARTSIGSLTEETMAELVRDQVRQLRDVRARQKRLENLLVSAYRQLPTANHLDTIPGIGPVTAAVLTAFILDIDRFDTPGKLVKYFGVLPIEASSGVDRDGRPRPIQRYIMSRRGNDLVRRYLWMAALSAVQCNPAVRSLYRRVIAKHPDHKAIAIGHAMRKLIHLGFAVWKTGKPFDPQHYPWEQPADQQSAVGRQQSAGGDQQRLVDRAVPEKDQAAGLRNPARPVRQEVTATRTDNLAATGCIGEQAFIDFAHLKKQLPLARVLDHLGLSSRLRGTGAQQRCTCPIHRGDARGRTFSVNLDDNVFQCFDATCGKKGDVLDLWAALHHQSLRQAALDLVQTFHLEPAPQKGTVKRNG

SEQ ID NO: 314852 - protein, 356 aa, unidentified
MAIGAHTRPFVIGVDTHARNHSFAVLTAATGEQIAAKQFPTTSAGLKRAVAWVSRLIGADLTALWVIEGAATYGARLARVVTDAGYEVAEAARMDARTHHRIGKSDPLDAYRIGASVLPLEDDRLRHPRADAGLRPALRVLTSARENMSSERTASVNALAALLRTADLGLDARKPLTNGQITEVASWRTRVEDLELAAARAEAHRLAKRVRALDIELADNRSQLEELLRQSKAAPLLDVIGVGPVTVAVAYSAWSHRGRLRDEAAFAALAGVSPIPASSGNTTRHRLNRGGDRRLNRALHMATVTRMVHDPETRAYVDRRRAEGRTTKEIRRCLKRYLARRIYRTLEALHAAPTTA

SEQ ID NO: 314853 - protein, 454 aa, unidentified
MGKPRVVPDEDHEVVYERVAAVDVAKASGVVCLRAPDPARPGRFASRIWDEVPAMRAAIEAVGRELLAHRVQMVTLESTSDYWRIWYYVLEDIGLAVQLVSAWQAKNLKGRPKTDRLDAMWLARLTQQGMLRPSFVPPAAIRRVRDFTRARQDLVAERTRCLQRVEKLLEDAMIKVTSVAKDGLKAKSVVAMVQALIAGERDPRALADLAKGPLRGKRDALAEALDGMFDSHHGVIAKSLLDQVAFLDQRITLMEDQATAALAAVPESWGVDPSGEAGPAAGTSPGSPVLAAAHRLAEIPGISVWLAIVIIAEIGLNMAMFPTPAHLVSWLGLCRSAAQSGTRHGKGKPKKGNSYARAAAGQAAIGAARTATFLGARYSRIARRRGKPIAQTAVARSIMIIVWHLLNDPAARYRDLGPDWHARHINRDKKIRTHIQGLQALGVTVAITADEQAA

SEQ ID NO: 314854 - protein, 334 aa, unidentified
MVAGTLGSFDKDGSKKMTQSTTLTAGIDTSKDKLDVAIHGQAGRLTVENNPSGWELLADHLRRASVVRVGIEATGGYERKVMRYLQREGFTVVLLQPLQVKAFAVMRLQRAKSDGIDAGLIAACTFLFDPPNKLPPDPRFDALTDQLTFIEQIEEDIARFKTRLEHVADKRLLRMVSADIKRLQTRRAAELKRLMASLRAHADLANRFDLVLSIPGIAERTALALVLRMPELGQLSREEAASLVGLAPFVHQSGKLKGETHIGGGRARLRRSLYAAAQAASFFWNPALKALYARLIARGKSHKSAIVACARKLLIFANTVVQRGTPWIAAGAAA

SEQ ID NO: 314855 - protein, 403 aa, unidentified
MNSVGIDISKGRSTIAVMRPFGEVVISPFEVRHTGSELSKLARQLKSLDGETRVVMEATGNYHASVAKLLHDAGLYVSVVNAKLVHDYGNNELRRVKTDRKDAVKLANYGLDRWLTLPRYIPEEDTRLLLKNCYRQYRQYSKVQTVLKSNLISLLDTVFPNVNRLFSSPIRGDGSEKWVDFVAEFWHCRCVSEKSQKAFTNKYQRWCRKHGYNFREAKAHTIHAETCGHIDVIPKSETTKLLVEQAVAQLRATSAALAALKHEIQSLASQLREYPVVMDMFGIGPTLGPQLIAEIGDVRRFYSKKALVAYAGLDAPPNDSGDVTGRHKSMSKIGASSLRRTLFLVMSVYLQTAPLDEPVYQFMDRKRAEGKPYRVYMMASANKFLRIYYATVKAYLESLEHTA

SEQ ID NO: 314856 - protein, 442 aa, unidentified
MCGSSVNGFLSIYERSLTMKVTYQTCCGVDVHKSFLVATIVKTTGGIEPSYQKKRFSTFNNSILEFKQWLLDNDCHDVCMESTGKYWVPVFNLLEDEINVVIANPKWVKAVKGNKDDTKDSKWIGDLFRLGLVKGSYIPCKIVRILREYTRYRYKLVSCRSSEKNRYQNALTVCNIALDSVVSDIFGKSSTSIIDYLLEQSGTSINHEEIASKILKRLKSKENAVIESVEGYQMTDSQKYRMRLVRAHMDYITAEINDVDKMIETLISSNIDFENAVQLLCTIPGVKRDSAITIISEIGTDMTHFSNSKRLCCWAGLTPGCNETGGKKKSVRITRAGVYLKPALVQCAHAAVKSDKSPYYKKKYESLVKRRGKKRAIIAIARMILTAIYQMLSTGEQWNPSDLYKIDIPAPLVEKQKAKAIKQAKNLLQREGILPPDEPLAS

SEQ ID NO: 314857 - protein, 385 aa, unidentified
MNKETAVGSINGMASVLYMAFELSSKKWKLGFSIGLGQKVRIRTVDACDLAAVRVEVDKAKERFGLPKETRVVSCYEAGRDGFWVHHFLESEGIENHVMDSASIETNRRRRRVKGDKLDANSLVRLLIRYDYGEKRVCSMVRVPAEEEEDRRHLHRGLSALNKERNRTINRIRGLLATQGIQIKGELNLSGERLEGLRMWNGDPLGQGFKERIRMEWEHLSFIKSQIKELTKERQEVIKQETATAEHPDVEMMRQLQELKAIGIVGAWVLVREFFGWREFKNGRQVGSLAGLVPTHYQSGDTTVEQGISKAGVVPVRQIAIELAWSWLRYQPGSKLSLWYNERFANSGKKARKIGIVAVARKLLVELWRYLKTGALPEGAELKTI

SEQ ID NO: 314858 - protein, 367 aa, unidentified
MKKISTAAAKPSKKISQQKLTVGLDLGDRNSWYCVVDEAGQIQLEQRVRTNAKALREVFGGMPHSRIALETGTHSPWISRLLSELGQEVIVANARKVRLIGESRKKDDRLDAQTLARLARIDPELLCPVKHRSAKAQADLTVIRARAGLVRARTALVNTARGLAKSYGERLRGCNVRNMNPEKAEGLSPELQAALEPLLAAIESLSERIREYHERIEELAQERYPQTALLKQVKGVGTLIALTYLLTLEDAHRFRKSRDVGCYLGLQPGRRNSGKSEPQMHISKEGDPYLRTLLVQGAQHILGPFGIDCDLRRWGLKLAERGGKSGKSRAIIATARKLAVLLHHLWVSGEAYEPLHNSKQSPLAVAA

SEQ ID NO: 314859 - protein, 412 aa, unidentified
MEGETVIAGVDTHKDVHVLCLLDGLGRKIWSGSFGADPEGYDRLAEAIGDPGSCMVVGVEGTASYGAGLTRRLVELGYNVVEVLRPKRDKVRPGEGKSDPLDAERAARKAASGRGCSVPKSQDGWVEAVRQLYVARRLAVATSTSCVACAKSMLTTAPSALRERFRGRERPKDLMPLLARGRKAGDALEESVLASLRSVAAVWKEARSQVESCDARIRALLEANAPALLGVEGCGTTTAAALVVAAGDNPGRLKGEAAFSMMCGASPIPASSGKTDRHRLNRGGNRQANWALYEIAIKRMAYDERTKRYMARRTSEGKSRREAIRCLKRYIAREVYRVLMDPNPDGAAPEGPELAKMRKAMRVTQKKAAAELGLSAATLGHLERGKRRSTKLERRYYELLCELERTLPQTAS

SEQ ID NO: 314860 - protein, 374 aa, unidentified
MGLGGDRNHGGADMAQAKTWAAFDVHVSGVVAATLDRDSGELRVRRLPGRSEDVAAFAAALAGPVRATYEAGPTGFVLARKLAAAGIECVVCAPGLIPRGPSDRVKTDRRDAQRLVRLLAAGELHAVAVPSVEAEALRDLVRAREDLRGDLMRARHRLAKLLLRHEVRFDGPQANWTQAHLGWLAGVAFEQPASQRALEDYRGAVSALMIRREQLEAEIARALPDSPWAQTARRLMCLRGIDTLTAAGLCAEIGDFHRFRHPAQVMSYLGVVPSEHSSGERRRRGPITKSGSRHARRLLIEAAWHYRRPPRVAGNLARRQANAEPEILALSWKTQRRLHHVWQRMEQRHKRRTIIAVAAARELAGFCWAVATSD

SEQ ID NO: 314861 - protein, 400 aa, unidentified
MLSIGIDVSKGKSTVCGMKPGGEIVYTPFEIQHTRKGMSELVSLLRSSGEEVRAVLESTGSYHCPVVAALLENGIFVSVVNSLRMKRFCSQSIRRVKTDQIDAMQIALYGLAYWQELQPTRLPENTYRELQLLARQYYQMTSLLIKAKVDFNALCDQVLPGMQELMNDHAGRHKLSDFVLRYRHTTHILEMGETRFRKDYCKWAEKKGYRNRERMAALIFATAQNGIPVLPNAPSTQIVITEAIRVLHTVEASRDAILTQMQALAKTLPEYSLVREMPCIGDTLAPRLIAEIGDVRRFHSKRALITYAGIDAPPYQSGKFCANNRHISKRGNRYLRKTGYEVMQSYVMHKPANDPIFTFIEKKRSEGKCGKLAMVAGLNKFLRIYYGKVTELYRSLSAIE

SEQ ID NO: 314862 - protein, 321 aa, unidentified
MQKISFLAIDISKHNITAYDGKKSFNFPNERFLPQFNTFLSKNFNKNFLVIIYEPTGPYSAFLEEFCALEKIKVVPLNPRKVPRLLEVLGHRAKTDGLDAKALYEYRKLISHKDIKTLELNENLQKLASLLSEYHFLKKQRVNFLNYLETLKFNPWRDEKSEKTIENMIFEINKRLKEIEEKIKKLIKKKADTKNKVEAIKNIKGIGFLTAVKLFLFFERKKIRNRKEAVALVGLDPIIYESGKRKIGCRISKQGDSYLRNLLYMAAMCAIRINERIKKFFVRLVHRGKPRKLALVACMRKLLIIALAYYKNCSQNLAITS

SEQ ID NO: 314863 - protein, 392 aa, unidentified
MYIVGIDIGKNHHEASIVSPEGKQIGPSLRFATTHKGADSLMSFIFKNIGNSPCVFGMEATGHYWYPIYSFLKAKGYTIYVINPIQSDSLRKMYIRQTKNDSIDSFLIAEVIRFGQFGTTSMADENILAMRQLCRYRDSVISSRTEIKLRIGTIMEQIFPEYEKQFSSLWVSTSMGILEKYLTPENIENAPIDELFEIIKDKSHNRLTKAKAISIKEAAADTFGIKIAQDAFSFQLKQLIDRMNFLDKQIEALDIEIMKYYEQFDCYLHTIPGIGMIGAATILAEIGDISRFKNSSALVAFAGIDPTVRQSCEFNSTHNHMSKRGSPYLRHTIFLAATTCSFHNSPLNAYYKKKRDQGKHHLTATGAVARKLTTVIYAVLRDSKPYEPKKFC

SEQ ID NO: 314864 - protein, 386 aa, unidentified
MEKAHDLSRSSTVLEQNSTLIAVIEMSLSSWLVAGIVPGLARHPLKKLDADPEALLLLLHRWREEAAKYGHAIARMAIAFEAGRDGFWLARWLRARGVEAFVIHSTSVAVPREHRRAKTDRLDTEYLKRAFLGWLRGEPNHCQMAGIPSLDEEDARRPNRERENLVNQQTSIVNRMKACLIRLGVRNFKPTLRHASERLEMVRTPEGAPLPLNTLAEMRRDMARLRLVREQIREIEAARSQRLQVSESRAHAMVKLLTGIIGVGIETADMLVHEILSRQLRDRRAVARYAGLTGAPDESGKRRREKGLARAGNARVRRGMIQLAWRFLLFQKDSALAQWFRARTAEARGGTRKTLIVALARKLLIAFWRLTMTGEVPAGIKLRPGV

SEQ ID NO: 314865 - protein, 347 aa, unidentified
MCQAAILDDEGELLDETRFMNTPEGIEEFAQSLTTTRGEVKAVLESTGNLWIQVHDRLEEHGIPVALSSPTNSRLVSESRVKTDRTDARALARLHRAGVLSTSFVPSEEDRSRRELLRHRLRLVKNRTQVRNRIHALLDKQGLRVPYKTGFSGKAVAWMMGQSLGFMDDAILRSDLALLGVLDEQIGYVEEKLASLAVDDARVRLLMTMTGVDYFAAMLILAEMVTVDRFSCDKSFSAWMGLAPRVRQSGEKTWIGGVGGPGNRRMRWLMVQCAHSSCRHDPRLRRLFERHSRRKGGKSAVAAVAHEMARIMYFMLKRNEPYRGVNRGLWERKLKSMEKRALNGLRN

SEQ ID NO: 314866 - protein, 322 aa, unidentified
MNEYKETFGVDISKDVFDVHGCKTGHNQYKNDESGFNKFLKELPSDCLVAMEATGYYHYRLAQFLYKNEVVVSAVNPLIIKRFIQMKLAKVKTDKSDAKMICEFALINKVPLYTALTDVQSECLQLFRVLDNFIKHRTATKNKMHGEEVLGIPSKFTYRSLRRNKKHYDIEIKAIEAKILSLVKEDQQQQLTLLTSVPGIGQKTALFLIIVSDGFSKFETASQLCSYVGITPTTRESGSSVRGRARISKVGNKKLRNLLFLCSFNACKHNKACRELYERIVNKGKSKKLALIAVANKLLKQCFAIAKSGRPYDESYVSVLPR

SEQ ID NO: 314867 - protein, 488 aa, unidentified
MKLRKEQPQQKQKKTAPSAHGTESAGWHQMNRKQRREMARKIQADDLSLQVVHPHAAGIDIGNESHYVAVPSTRDEQPVRRFGCTTAELKAMAAWLKQCGIRTVALQSTGVYWIPVYDILEAAGLEVYLVNARETKNLPGRKTDVQESQWLMKLHTYGLLRNSFRPSQEIRSMRSYWRQRQDLVRSAVRHIQRMQKALTQMNIQLANVLSDISGKSGQAIIHAILEGERDPYELAALCNYNVKASEEEIARSLEGNWQADLLFLLQQEQAGYEFCQKQMAACDAQLQHYLAQREDRSAGASLPEEKRKRREHRNKKNHPQFDVREQLFRTAGTDLTQIDGIDVLTAMTVISEAGWDMSKWPSEDHFVSWLRLSPDNRVSGDRVIGKGRLPTNNRLNVVLRMAASTLRQSDSYLGAQFRRLKRRLDAPVATKAMAAKLARLIYRMLRYGMRFVDQGAEVYEAAHHQREIYYLKQKAASLGFQIIEATAS

SEQ ID NO: 314868 - protein, 357 aa, unidentified
MTWVGMDVHARSIDAAAVDVLTGELRRVRFGGDGGPVVDWLSGLPQPVHACYEAGPTGFHLYRAAEAAGVRVDVIAPSKTPRASGDRVKTDRKDAELLVRLLMSGGLTTVSVPPSALEAARDLTRAREQVRRDLLRCRHRVSKLLLRQGRVWGGPGGTWTRAHRRWLAAQRFEHPASELAFLDTLAAVDGLVARKSALDECLSRLALDPLWWPTVARLRCFRGIDTLSALALHLEVHDWQRFRRPTQLASWLGLTPSLAQSGQSSAYGPITKTGSGYARRILVEAAKHGGRPPLIGATLQSRQTGQPDHVLQIAWRAQQRLHRQTSRMRERGKPANVVTVAAARELSCFLWAAAVAP

SEQ ID NO: 314869 - protein, 476 aa, unidentified
MSDSNVRYIGLDVHKRVVEACILDAAGTIVQRERFALNRRTLELFATKFLKPADHVAFEATTNCWAVADALRSYVAKLVVSNPMATKAIAQAKVKTDKVDAHVLAQLLRCDFLPEVWPPDEATRRLRELTGRRSALVGQRTAMRNRIHSVLAMRLIEAPLDLFAPKNLEWLKTVEIDAQGRMLIDSDLRQLEFLEKEIATLDQELALRGHASDAVKLLMTLPGVDVATAEAMLAAWGDVTRFPDADHAAAYLGLVPSTKQSADKCYHGPITKRGNCHARWMLIQAAQHLDKHPGPLGHFFRKLMKKKTRNVAVVAGARKLAWIGWMMLKRNEPYRYAIPKSTESKLAKLRVKATGERRKGGAGKGVKAVAKLPGGSRTIKSIAQVCAREGLPEPRGLSAGEQRTVQAADCTTYVAEIAAAQVVPRPKGGGRPRGKYAVANKPTTDAAIATRSGGDDAAAGGTGSSSLLHGAHHGSD

SEQ ID NO: 314870 - protein, 355 aa, unidentified
MRYLGIDVHSKACVWCLLNAQGEIVEQGSTETTIPALQALVARLGKDDELLAGQEVGAMAYLVHDALKEAGVRLLSFNAAHLRMIAASRKKTDRRDAYWIARALQTGMTPHEVYIPVGEVRELRGLLHRREVIQRDYVRWRHRAKSQLRASGLLVSPGLRNLRGAIAEQIASCTEDVDGLLLEGIGLCERNMELLSEELAHVDALLRRRTEHIEAIQRLLTIPGVGDIVATTLYACIGDVTRFPNAKSLAAYVGLVPSVRQSADTNVLGRITKQGSPQLRKLLVQAAHAVSSRCQTDAARPIQSTYERIRGTRGRRKVALVALARHLLRLAFYILRDGTCYDAERLGAERTAVAA

SEQ ID NO: 314871 - protein, 405 aa, unidentified
MAAPEEVDVWVGLDVGKEEHFADVLDDDGEPLFARSVTNDEADIEALLDRAAGHGTPGLVIDQPGSIAQLAIAVAGRRGVPVAYVPGLVMRRAADLYPGEAKTDRRDAFVIADTARMRRRQVHWLDTTSDELLVQLRVLNGFDVDLAADLTRLTNRLRDALTSISPALERAVGSRVAHAGVRDLLAKFPTPTALRAAGRARITRTIEARSPRRAPKLTDAVTAALDAQTVTMPAEATIGRVIAELVEELDRTHHRRDVLASEIEEVFLAHPFGELLVSLPGIGPRTGARILAEIGDGSRFANGSKLASYAGLAPVTRQSGKSLNGESQSRRGNHRLKNAMFLAAFASLRSPDSKVFYDRKRAEGKKHNAALICLARRRCDVILAMLRNGEHYRPLVPQDDLESAA

SEQ ID NO: 314872 - protein, 410 aa, unidentified
MEALYQRCAGLDVHKKTVVAAVRLTEGNKVVTEVKTFATTTAGLLALSDWLSKNGCTHVAMEATGVYWKPVWHVLSDGEFELILANAAHVKNVPGRKTDVGDAAWLAELLAHGLIRASFVPDGQTQELRVLLRTRKQLVREQTRHTQRIHKTLEDANIKIESELSDLLGKSGRAMLNAIIAGETDPIRLAALAHPGVKSPQAKLQEALRGRVTAHHRFLLKLHLGQIDQLDGAIATIDSEIEAHLAPFRTAVELVSTIPGVGALSAQVIISEIGTDMSRFPSAGHLLSWAGLCPRNDESAGKRRSNRLRKGAPWLKTMLIQCAWAAKRKKDSYLQAQFLRLRSRRGPQKAICAVAASILTAAYHMLKDGTLYQDLGAEHFIRRSKTTQTQRLVKRLEHLGYTVDLKPLAA

SEQ ID NO: 314873 - protein, 407 aa, unidentified
MKYKEFNRLKGSMLMQNVLAIDIAKGKSMVTLINSCGEVLIEPYEINHSIKDFSNLLNRIKQLKLDNISVIMESTGIYHRPVERFFLENNFKVYTINALYSKMYKRNLRKTKTDKLDCLSLSELYFTNNFKQYIRPDNIYLNMNALARQYFALDQLCTNLKNRYKNLVYLCFPEYELLFKQEAIYSDIALSFIANYPHAEIIANTRIDHLQHYFKNNNYKRWKQKPTLIKEAAKNSYPSVSKGDEIVSDLSQLAKLIRNYQNEINSIKLKLINYGKQTKYFTAINSIFGIGEFTASIMIAELNDINRFNNIKELTAYCGLDPSIKQSGKSINIHGPISKSGNKYMRKLLFVSCLNIIRLSSKCHVKNDIEIYYRKKRNEGKHHYAAMVACTTKLLRQILALCKQLDK

SEQ ID NO: 314874 - protein, 458 aa, unidentified
MSRNKSTDRVRRTIAVVHPNAAAIDIGATMHMAAVNADRTPEPVRSFGTFTTDLHRLVDWFAECGVDTVVMESTSVYWIPIFELLDARGFAVFLVNARDAKHVPGRKTDVSDAQWLQRLHSFGLLRASFRPKGQIAELRAYLRQRERLLEYGASHTQHMQKALTEMNVQLHHVVTDITGVTGLRIIRAILGGERNPAVLARMRDRRCHATVETIEKALAGNYRAEHLFALEQALALYDTYQQKASACDARIEAVLKELSARRGRKAGPLPSPRQNRSRQQNSLLFDVRAALFALLGKDLTQINGLGPYLALKLIAECGDDLSAWPSAKHFTSWLCLAPSNKISGGKVLSSRTRRSGSRAAALLRLAAVTVGRTDTALGAFYRRLSARIGKAKAVTATARKIAVLFYNAVRHGMNYVDPGASSYEIRYRARVIDNLHRRAKAFGFMLQPMAPTPGIAVS

SEQ ID NO: 314875 - protein, 424 aa, unidentified
MCAPARTGRGREVAVFAATTPGVEQLAAWLKDRDVTSVALESTGVYWIVPHEMLEAHSFDVVLVDSRWLGRVPGRKKTDRRDCEWIQRLHSCGLLRGAYRPVEQVCMLRTLVRDRGTLIAERADWVRRMQKTLDQMNVRVHRAVANVDGATGMAILRAIVAGERDPHQLATLRDPRCRKSEAQIAEQLTGHWRDDHLFSLRQALKMYDALSDTIAAYEREILRYLETMTSVDRRDDQAPPPTSPTKAQAIKSRGQDPLRHALYRMSGVDLTTIDAVGVETVSVVLSEYGPNLSQFPTEKQFVSHVGLAPHAPRSGGKVVKKKKKPGSASARVGAALRMAATSLRHSQTALGAYYRQVARRAGADVAVFATARKLAQHIYRVLRWGQPYVDEGAAAYDKRYQLARAKRLAATAKDLGYKLIPVEA

SEQ ID NO: 314876 - protein, 393 aa, unidentified
MQKNNTKKNVREHAPEVTTQKLLALMEAHKKGEPIAARLTIGLDLGDRASCWCVLDENGEVIGRGVVSTDRQSMEREFKRFPLSRVALEVGTHSPWVSRTLKQLGHEVIVANARRVKLISESSRKNDRLDAEFLARLARADQKLLAPVRHRSEAAQADLTLVRVRAQLVELRTQAVNAARGLVKSFGQRLPKRDAASWKQEHAEHLAPEIRPHIESLLRVAETLTGEIESCDEEMKKISRERYAQETERVQQVPGVGPVTALSYVLTLEDPHRFKRSRDVGCYLGLRPRSSQSGETNPEMRISKEGDTYLRKLLVQCAQVILSPRSPVSDLKIWGARIAAKGKKKAKRRAVVAVARKLAILLHRLWVTGERYYAMRGERPAASHRQLKAIEAS

SEQ ID NO: 314877 - protein, 344 aa, unidentified
MEHFAGLDVSVNETSVCIVDDTGRIVREVKVKSEPGALLQVLKNATYRFKRIGLEAGPLSQWLYSALAEAGLPVICVETRHMRAVLKAQINKTDRNDARGIAQMMRAGLYRSVHVKTLRSQKLRTLLTHRKLLQSKAIAIENDLRGTLRNFGLKVGIVGKLKFEARIKELVENHPDLAMLVEPLLVVRRVLREQTAVLHRRVLAIVRDDEVCRRLMTVPSVGPVVALTYRATVDVPARFRNSKAVGAVLGLTPCKDQSGERDHTGAISKCGDEMMRVMLYEAAQSMLVRSKKWSWLKAWAMQVARRRGMKKAIVALARRLAVIMHRIWVDGTEFRWTRQEAAAV

SEQ ID NO: 314878 - protein, 387 aa, unidentified
MQTVADRPEAPNAIRNDLGAIFISLELSRSTWLITSLSPDGGEKMSKHSLPAGDIYALLARFSEFKQKAFARTGKSFPIIVIQEAGLDGFWIHRVLQNEGIESHVVDPASIATSRRRRRAKTDRIDGEALLRTLLAYKRGEPRVCAMVKAPTPEEEDRRRLCRERKILIAERVKHVNRIKGLLFCQGVSGYKPLGRDRRQRLDELRTGDGGLLPKHLKAQIGRELARLEQLLEQIMAVEAERDALFAAAPAPGPPAMLLNIKGIGPEFAAILWSEGLFRHFDNRRQVASYAGLAPTPWQSGSVDREQGVSKAGNPRLRTTLIQLAWLWLRNQPQSALALWFEERVRRNGGRLKKTTIVALARKLLVALWKYVTAGVVIEGAVMKAAR

SEQ ID NO: 314879 - protein, 366 aa, unidentified
MSKSSTVMSNRVEIFKDDKLTIGLDLGDRFSHYCVLNGAGEIIREHRLPTTPKGIDEVFSKIPTGRVALETGTHSPWVSRQLARWGHEVIVAHARNVRLIGGSSRKDDRLDARTLARLARIDPGLLGPVRHRSAKAQIHLTVIRARAGLVSARTALVNAARGLTKSYGERLQKCGTQQMNRESAKGLSQELRDALDPLLAEIESLNARIAEYDRRIEQIAKEVYPQVALLKQVKGVGTLIALTYVLTLDDPHRFRRSRDAGCFVGLRPGRRNSGMSQPQLHISKEGDRYLRTMLVQGAHYILGPFGEDSDLRRWGLRLAERGGKNAKKRAVVAVARKLAVLLHKLWVSGEVYEPLRNNHKVVGRVA

SEQ ID NO: 314880 - protein, 338 aa, unidentified
MYIGIDVHRKRSQVAALNDRGDEVLNRNVPNDPAALVPLLGRFPTGTPVVFEAAYGWGWLVELLEATGFDVHMAHAGRCKAIASARLKNDRVDAQTLAHLLRTQLLAEAWIAPKEIRDLRALLRHRTALVRMRTTLKNRIHTVLADCGIQHANRLWSRSGQQYLASLSLPARAREIIDDCLDLIDAVSFPIARLETTIRTQAKPDPRAQALQTLPGIGPLIALTLLAEIGTIARFPTARKLCAWAGLTPTVRNSDRKVRHGGISKQGSVWVRAVVGEAAQKARLHPFFSRSYATIARRRGRNIATVAIARKLLARCFHLLKDLEANEQCHAGEGLRAG

SEQ ID NO: 314881 - protein, 305 aa, unidentified
MTAISKFLSKVPEGSVLCAENTGTYGDLLVFLCNQHGVSISLVPGYTVKHSLGLIKGKTDPIDAARLREYGERFFDKLTFKEYQSENVSELRQLHSLRSQLVKSRKMLRTGEHAREQMPMQSIRVKQILKSALEILDTQIRAVDEEMIKIIKSDEQLVENYELSVSVVGVGPVIATEMIIKTGNFKTIDSSRKAASYAGVCPFPNASGNMVGKSKTSPFADKELKTLLYMGAKAAVKHNKEYRLYYQKKQQEGKPHYLIMNNVMNKLLRTIYSVVNSKTPYSRDYICLDPRESNKNHNGSEKIVT

SEQ ID NO: 314882 - protein, 303 aa, unidentified
MNINTLQNINVGVDTGKSQLDIYIRPLDIYFSVSNDKAGIDKAIKNIKKYSPQRVVIEATGRLEMPFIMACADAKLPYVIANPLHIKKFAGAIGRKAKNDRLDAALIAHFAEAIKPKLTQLKPEKIRLMSDLVARRNQLLAMQTMEKNRLQIMPKALASSITPVLTAFKKQVQKIEEKIIKLIEQCPEYTAKNAILQSMPGIGKIAAASIISNVPELGYITNKQAASLIGVAPITKESGKYKGKRIIQGGRHQVRTVLFMAMMSAMQCNPVFKATYQRLLDAGKPRKPHEHSRHSRLPRTLLR

SEQ ID NO: 314883 - protein, 399 aa, unidentified
MLDDGSQPTKLFNADNNQLGAEALVERIYSIAKEHCVSDILIGTEATSMYDWHLLEYLAESKLALEFNLKLYRFNAKWIKNFKKSLAPRGKTDPIDSFAIAERLRMGRLPKEYIPDTKYQPLRKLTRFRFHLMQQIAREKNFFLANLFLKASAYSQIKPFGSTFSATSLSVINDFFSVDELAAMPVEELTEFILEKGKSHFSKPAEIVDNLKRVARESYRLKPELAPTVNLILASTFNNIRCYKDQVKLVDAAIAENLKAFKHTLESISGIGPVYAAGILAEIGDVHRFLNDSSLAQFTGLTWPKHQSGRFQAEETRMSHAGNQYLRYYLVEAANSVKRCDATYKAFYEKKYAEATKHHHKRALVLTARKLVRLVWTLLTRQTLYQPGYCSFEDLSKIG

SEQ ID NO: 314884 - protein, 385 aa, unidentified
MSIDHPAIGPVGENKITLFASLELSKSSWLLTTNSPGVEKMSKHAVTAGDGGALLDLLARLKAKGERRIGTVIRVVVIQEAGLDGFWVHRLLEAAGIESHVVDPASIAVDRRHRRAKTDSIDGETLLRTLMAWTRGERRVCSMVRPPSPEEEDLRRLTRERGILVKERTQHTNRIKGLLSGQGIYEYEPLAKNCLGRLDALKTGDGRRLPPRLKAEILRELDRIQVVTKQITVVERERDALVKTRTEATPENPAAMLASLKGIGAELSSLIWLEALFRHFTNRRQVASYAGLAPSPWQSGRTARDQGISKAGNRRLRHAMIELAWFWLRHQPGSALSRWYQARVGNGRGRIRRIAIVALARKLLVALWRYVTQGIVPEGAVFKTA

SEQ ID NO: 314885 - protein, 341 aa, unidentified
MKQEMHVLGIDIAKRVFHAVGMDDRGNVVYRKRLSRHDLMPFLAKLPPVRIGTEACGGAHYWARRFREHGHEVKLMAPQFVKPYVKSNKNDSRDAEAIAEAVTRPTMRFVPIKDVDQQDIQALHRVRERLIGERTALVNEVHGLMHEYGIVMPKGVAKFRQAVVGKLESEKDKLTPLSQEMFWKLVEEFAALEAQLAYYQEKLEALAQTHPECQRLMTIPGIGPLTATALVAAVSDASAFKNGRQFAAWLGLVPRQYSTGGKERLLGISKRGDSYLRKLLIHGARATIRWVGRKTDRRSQWIRQLVERRGTNRTAVAVANKNARIVWALLTSHQAYELAKG

SEQ ID NO: 314886 - protein, 341 aa, unidentified
MRQLYAGCDLHGNSNFFGIVDEEGKRVFKKKLPNDVGLIRNTLEPFREELVGIAVESTYNWYWMVDGLMDEGYRMHLANPSAIKQYSGLKHVDDKHDAFWLADMLRLEILPEGYIYPKEERPVRDLLRKRGHLVRLRTSLVISLQNIITRNLGRNVKVNDVKRLRQDRITPLLEGNEDLALAGLVSKEAIDHLTHQIYKVEQWVQKRVGLKEEYQHLLTLHGVGKILSLTIMLETGPIRRFPTVGDYASYCRKVPTEWTSNGKRKKGSGNGRNGNKYLAWAYSEASDFARRFYPESRAYYNRKMQKTNAVVAHSALAHKLTRAAYYVMRDQVPFQAEKLFG

SEQ ID NO: 314887 - protein, 402 aa, unidentified
MRFFVGIDWATQAHAVCVIDETAHIQWHGSVAHTAAGLTELLGRLRRFRHRGALRVALERPSGLLVDTLVDAGLEVVPIHPNALKASRPRYSAAGGKSDPGDAFILADLLRTDGHRFRPLRAPSDDTRALRALVRGRDDLVAQRVALANQLRALLERFWPGAAAIFADVDSPIALAFLARYPTPHSAGRLGEKRLAQFLGQHAYCGRRPVAELLGRLRRAPTSQVGEAEAEASGELVRALVSVLSPLGVHIQQLAAAIDTALAQHPDGPLVQSLPRSGAVNAAQILAELGDDRARFPTDERFAAEGGLAPVTQASGKHRAVVFRWACNKRLRRALTTFADNSRHASRWAALVYQRARARGCRHPHAIRILARAWARILWRCWQDRTPYDVRRHRAAQALAAA

SEQ ID NO: 314888 - protein, 418 aa, unidentified
MTKKLDTTFIQVVHPVCCGLDVHKKKISACLITIDEHGQEQYDIKEFGTFTNDLLEMKKWLTDNGCLVIAMESTGVYWRPIHNVLEGSLEVILVNARHIKNVPGRKTDISDSKWLAGLLRHGLLRGSFIPPKEIRQWRELTRLRRTYTESLADYKRRIHKLFETANIKIDSVVSDLFGVTGRNLISLLCDESELSLASIRKNAKGGLKAKSRELHRSIQGFFEEHHRFQLIGMMEIISNFEKKITEITERLDNLTSGHQDLLDRLDEIPGIDKKSAQSIVSEIGVTLDEFICMAALASWAGLCPGNNESAGKRKGGRTSVRSHPFKTILVEVAWAAIKKKGSYYRAKYFKLKARRGPKKAIVAIAHRISKAVYNIIKNGDTYKDLGEDYLTSQTRQRTIKNIKQRAKQLGYELVPCMD

SEQ ID NO: 314889 - protein, 370 aa, unidentified
MSVRRILAKTIDTDLEYEAIGIDLAKNCVSAALLTTDGEVVCIDRLDYSELEKSAQALSPTTFAMEPCTEMNYLVQKLEAWGHRCLVIGGKNVQNYVENHFSGQKTDLNDAQALAFLAQDTQLRTIKAKDVEQQKYASLTTLREQYIKQYRQTIVSLKGICQAWGLNISKGISGKARLKDLIENHAAFPEELKESLVDMVTHAQTAQKALNKITKTLEELAKSDKVCQLIQTIPGLGSICSCRLRATIGDIKRFKNPKDFPAYYGLVPRSIATGHNERKGKITHRGDRTMRSLMVQAAGSLVNMATKGKLKSKQLTKWILKKQKEKMPWGKLVCAVAAKLLRIVRAVLISNKPYNSKIAGVAKCSLPKGS

SEQ ID NO: 314890 - protein, 391 aa, unidentified
MALYFVGIDISKYKHDCCIISATSQQIVSRFSFRNDRDGFDLLADSLHSIADPQDIRIGFESTAHYALNLELFLENAHHSFMEVNPALIAQYKKSTTLRRTKTDSVDCELIAKWLMTVEYKPHPIGFYHSYSLKSLTRLRDRLVRQRSLYLVKLTNVLDHTFPEFKPFFGNRFGKTALYLLEHFGSAPKMARMNSISYDNLRRISRGKFSPQRFFELKELAANTVGISNSIFDVELNCLLDLLRNISDNIAELERQIFELIEEIHPHFMSIPGIGPISAAVIYAEYGDISNFSSPAQMLAFAGLEPSVNDSGTESHGGRMVKRGSSQLRYALLNCCFPLIQYDMTFAQYYAKKRREGKPHRVALTHVAKKLVRVIFALERGEMDYDPKAIH

SEQ ID NO: 314891 - protein, 345 aa, unidentified
MMVVLGTDAHKRNHTVVAVDEAGVEIGSVTATATPEGHLKLVKWAASWEQRRWAIEDCRALSRRLEGDLLQLGELVVRVPPKMMAGVRRSARTRGKSDPIDALAVARAALREPDLPVAQLDGPSRELRLLVDYRESLVKDRTAAQNRLRWRLHELAPGYDPPAGSLNRYKTLDNIDELLTAHTSMVAELGRREVARIRELTREANQLERDIARRVEELVPTLLEIPGCGGLTAAKLVGEAADITRFKSRDAYAMWAGVAPIPVWSANNQRFRLNRGGNRQTNAAIHRIAITQIRIHPDAQTFIARRLETGSTKREALRLLKRKLSNVVYRTLLTDSQQPALEAAA

SEQ ID NO: 314892 - protein, 351 aa, unidentified
MNILAMDLGKSKTVVCFYDSETGKHKYDKVKTTPQQIHDLLAEHKPGRVVFEICSAAGWVYDIVVSLGIEVQVANTNHQAWRWKNVKNKNDRSDALKLAQLSAMEQLPVVHIPKHPVRQKRALIQYRQCLVRQRTRIKNSIRAILDKEGQRMPEGRSGWSMASIKGLTEMSLPLEKCGIDNLWRGQLRVELDMLEKVESCIAEVEKKLDALGKEDKGVQLLRTTCGVGPRLAEAVVAFIDEPGRFETGKQVGSYAGLTPRQYQSGDMDHQGKISGAGNKVLRSLLVEVSWLGLRHNKWMSDTYHRILRGSESRKKIAITAVARKLLVRCWAMLRDGQPWRDTEVVKDEQAA

SEQ ID NO: 314893 - protein, 354 aa, unidentified
MTIVAHSRPFVVGVDTHARNHVYAIITAGTGELIATRDFPATGAGINRSIAWVARHTGADLGTLWVIEGTGSYGALLAGAAGAAGYDVAEAARMDARHGVGKSDPLDAHRIAAAVLPLDEQHLRRPRLNEGVRAALRVLVTARDSMTTERTRAVNALTALLRVNDLGLDARKPLTGAQIADVTRWRARDEPLAASIARSEAVRLAQRVTGLDAEIKTNTTRITELVKISDAAPLLQETGFGPVTAAICLTVWSHPGRVRSEAAFASLAGVSPIPASSGNTVRHRLNRGGDRTLNKALHMVALSRMTFDPATVDYVRKRQAEGRTTKEIRRCVKRYLARRIYRTLNAPNPGPCHA

SEQ ID NO: 314894 - protein, 269 aa, unidentified
MTYVGIDVSKATFVVAYSSAKGSRTNFFKNTIKGIHEFIQTISVAEHHCVLEATGNYSSLLVYLLSEAGIAVSLENPLKIKNFARVMLSITKTDEIDARLIAMYGEKMQPAPYKLRSDTILVLKQKRTVIRQLKKQLVATGNLKGSMEALPFFDPKCKKTIERTIIFLEKQIKELEEELASLAQSEYKKQMDLLTSVKGIGVTLAAALIMATGGFTYFDNAKQLTRYLGLSPTYQQSGTSVNVKGHINRNGDSSLRSQLYVAAFCIFTM

SEQ ID NO: 314895 - protein, 359 aa, unidentified
MHKVGSHVGRSQSANQKDIPMTKKERPLILAHLGLDLAKDKFDAAVLTHSGALHHQSFERTAGGLAALRRWLKTLGVQVAAVVMEATDLYFELPAQKLHAAGFCVHVVNPAQAKRFAQALLTRGKNDRLDAEVLARLAQVAPSFELVVWSPPPPERRELLALTRTRSALVAQRAALRQQAGAAACASARGILRGAVGDLSARLCTLEAKIAAHVRAYPELQRQCDLLVSIPGVGTATAALLLAELTHLPSDAGRRALAAYAGLNPAQNQSGQFAGQTRLSKTGNARLRAGLYLPALTARRRIAAFGALADRLVARGLKPLQAIAAIMRKLLLLAATLLRTGQRYNPAHLLASAPNVLAP

SEQ ID NO: 314896 - protein, 351 aa, unidentified
MKYIGCDFHPSFQQVAMLDTETGELVERRLAHETGEVRVFYESLSKPVVVGVEASGNTYWFERLLAELGHELWMGDATAIRQQDGRKQKHDRRDAKLILKLMVENRFPRIWIPTVTERDLRQLLIHRRHLVRMRARTKNQLQHIALNQGMQRRYKLWTRAGMEMLRKLELEPWARQRRDALLEMLEQFDARIEPLEEAVKQAAQAHPRAKRLQTHPGVGPVISLATVLTMGDVRRFPNSRSWVSYLGLNPSEDSSGSKRRLGGISKQGNPFLRYLLVEGAASAAKGDPALGRMYARLKARKHHGVAKIAVARKLAVRLYWMERTHKRYPEVVRMQGSPSRLVAERDGRQFE

SEQ ID NO: 314897 - protein, 344 aa, unidentified
MDTIGLDLHKRESQLCELTEAGEIVERRIVTSRERFTAVLGGRPAARILVEASTESEWVARHLESLGHEVVVADPNFAPMYATRRRGVKTDRRDARTLAEACRLGAYRPVHRASAPQRHVRAQLAVRDALIRTRTRYVSVVKALARRDGLRLPPGTPAHTEAKLAALPLPAPLAEEVAPLRAVLDPLNREITTADERLAAVAAADPVVARLRTAPGIGPVTAVAFVATLDVVTRFASAHHVAAYLGLTPREYSSGEQQHRGRISKTGSPRMRALLVEAAWRVLRSDDPAATPLRAWAERIALRRGKSVAAVALARRLAGILYALWRANAVYRTPAPHPDAAAEA

SEQ ID NO: 314898 - protein, 411 aa, unidentified
METILNCCAGLDVPKESVEACVRRQQANRALQKQTRPWGTMTRDLQDMADWMAAQGVTHVAMESTGVYWKPIYNLLESRFTVLLVNARHLKQVPGRKTDLRDCEGIAQLLQHGLLKGSFIPPCPQRELRDLTRHRTQLIEEKGRTLNRLHKVLEDAHIKLAAVASDIVGASGRAMLQALVEGEQDPLKLADLAQRKLRGKIPELGKALAGYVTEHHRFMLRLLWKQLMQQEELLVELESRIREQTRPYQEEMERRDAVPGVDQRVTEVLRAEVGTDLTPFPDDANLTSWAGVCPGNDVSAGKRRRRSITPGNHWLKRALVQAAWAASHTKNTYLAAHYRRLAGRRGKKRALVAVAHSILVIYYHMIKNGTPYSDLGGDFFDRLQAQSLTRYYVRRLEALGHKVTLETAVAP

SEQ ID NO: 314899 - protein, 413 aa, unidentified
MSKILNVGIDISLNKASCCFLSNEGKFLGKVFEIDNNISGFEVLRQKILQLCETENFDYVRLGLEATSNYGFHISNYFSDISVEGVEFHIYQINAKYISKFKNSFPEKEKTDIQDAKVIAEYLRFGRLPVEANPKSPYLPLQRLVRYRYHLVKSIEREKKIYLANLFLKFPGWVQTKPIKSTGKTTFDIISQLTTDEIVQMPLEQLVEKIIKSSKNRFPDPNAIAEEIKKSANESYRIRPELSKSITFILASIYRTITALKDNLNQLDKAIKEESKGFINPLFSIPGINYVYATGIFASIGDIKRFASHNQLARIAGLVWKKKQSGKYESEKSVLAYECDKYLRYYLIEAANSLRVHNEEYQIYYLKKYKESSFNKHKRALVLTSRKLVRLVFALLSKNQLYDQYRVSQCSNL

SEQ ID NO: 314900 - protein, 354 aa, unidentified
MYGLKHQKEKRSMDHFAGLDVSVKDTSVCIVDDTGRIVREVKVASEPEALLAVLGNPAYHFKRIGLEAGPLSQWLFSGLAEADMPVICVETRHMRAVLKAQINKTDRNDARGIAQMMRVGLYRPVHVKTLRSQKLRMLLTHRKLLQSKAIALDNDLRGTLRNFGLKVGMVGTVRFEGRIRELVENLPDLAVLVEPLLVVRRVLREQIAILHRRLLAIVRDDEVCRRLMTVPGVGPVVALTYRATVDVPARFKTSKAVGAAFGLTPSKHQSGESERTGSISRCGDEMMRMMLYEAAQVMLVRSAKWSWLKAWAMKIARQRGMKKAIVALARRLAVIMHRIWVDGTEFQWTRDVAA

SEQ ID NO: 314901 - protein, 348 aa, unidentified
MERMLERCAGLDVHKKTVTAGVRVPGTHGDRTQHVRTFDTTTAGLLVLRDWLAAHAVTDVAMESTGVYWRPVYYVLEDAFACILANAAQIAQVPGRKTDVKDCVWIAQLLEHGLIRASFVPPAPIRELRDLTRYRKVLIQERTRHANRLHKVLEDAGIKLTSVASRLLGVSGRAMLDALVAGTTDPEVLADLARGRLRQKLPALRQALVGRFRSHHAFLVSQLLAHVDDLDEAIQTVGGHIDEVMVPFTDELARLDTIRGINKRTAEVIIAEIGVDMTVFPTATHLASWAGLCPGNNESAGKHRSGKTRPANRWLRAALIEAALAASTRAAPGAFAARYRRIMPHRGH

SEQ ID NO: 314902 - protein, 359 aa, unidentified
MKIVGCDFHPRWQQIAVFDAETGEISEHKLVNGDGETERFYRALDSPALVGIEACGNSQWFIELLERLGHQVWIGDAAEIRASYVRRQKTDRRDAGHILRLLMENRFPKLWVPTAEQRDLRQLLIHRHKLVEIRTRVKNGLQHLAMNRGLQKQRSLWSVRGRADLEKLFLPGWAGRRREDLLALLAGLDAQIGELDAAVERAAEEHAQARLLMTQPGVGPITALAFVLTIGEVNRFRHSGQVASYLGLIPREHSSGGRQRLGAISKQGNRFLRQLLVEAAQSATRYDDGFRRQYAARCHSKPKGVAKVAAARKLAVRLYWMLRQNASYPEIAHIESSSRVALAGSRQADELIERSRIRQ

SEQ ID NO: 314903 - protein, 317 aa, unidentified
MSKRTTICAGIDTGKRKLDVALESGRERLEVDNNAAGHRALTDWLRRRRVKRVGIEASGGYELPVVIELRRRGFVVIVFQPAQVRAYAKFHLQRAKNDKIDAGLIAICTASVKTIHPPPDPRLAPFAEHLTMLDQISDDIARCKNRRESCRDPRTRQFWDEEIARCKKLHKTELKSLVSAIRQYRDLAERLDLISSVDGIGLITAVAILVRMPEIGRISREQAAALAGVAPYDDDSGDSIGVRHIDGGRKRLRGALYCAALPASQRWNPQLIALYQRLRATGKEHKRALIACARKLLIFANTVVARGTPWTAQPNAA

SEQ ID NO: 314904 - protein, 345 aa, unidentified
MGFEPGPSKEGSWMMAQNDLVVVGIDIAKHKVDACIRSLSLQGTFPSGAEGRRKLIAWLRKHKVGKAVMEASGGYERDWAKALHEAGIGIRIVDPKRVRSFARSAGQLAKNDVIDAVMIAWFAETFGEAKGQAYDAAREKLSKVMNARQGLLDLQINLQNRGEHAGPEPVQRMQARLLKKIALEITRLEAAIAAMIKATPHFAERAEIIESVPGLGGITSAGLIAAMPELGQVSNKVAAALLGTAPYDDDSGRRRGDRHIKGGRRKVRNLFYMACLGAATRHNPMLKAFYRRLIAKGKEPKVALVACMRKLIVILNTMIARRQKWDANLYVSDDERTALGLRPSV

SEQ ID NO: 314905 - protein, 320 aa, unidentified
MSGFIGIDVAQSNFVVAREGIAGSRKYVNTDRGHRDLIKDLSREGSLVDLIVLESTGGYERRLVAALGAAALPVVVVNPRQVRDFAKSTGQLAKTDQIDAHILADFAAKIQPAIRPLPGEEQEELRELLTRREQLMQMLMVEKSRLLQAEGQSRHTLRKQIKNHIKFLDREIALLDSDLDDTLKQSEIWRERDDLLQSVPGIGKQTSRTLLGFIPELGTVSGSEIAKLVGVAPFNRDSGKFRGARRIGGGRARVRAVLYMATLVATRFNPRVRERYQRLLGAGKPKKVALVACMRKLLVVLNQMLKTKTRWQAETVPATA

SEQ ID NO: 314906 - protein, 411 aa, unidentified
MDIVYARCAGLDVHKTTVVACVRKPGPQPDVRHAETQTFATTLRGLRALVAWLVAHGVTHVAMESTGVYWRPVFAVLEGTVEVRLVNARHVKMPPGRKTDVGDAEWLAQLLECGLVEGSFIPPAAVRDLRDLTRLRKALIRERSHHVNRIAKTLELANIKLGSVVTDIMGKTGRAILQALSTGLDDPAQLAARAQGSLRKKQAALREAIEGRLTPHYAFLLEQHLALIDTLDAHIATLDTRIEVAMTPFAEAAALVQTMPGVAERTTQAILAETGVDMDRFPTAAHFASWARLCPGTHESAGKRRPTPTGKGATWLRATLQEAAWAAVRTKKSYYRALYHRMKARGGPKKAIVAVQHAMLVALWHMLKHRVPHQDLGADYFDRRNTARIRRHHVRRLEQLGYQVLLVEPAA

SEQ ID NO: 314907 - protein, 369 aa, unidentified
MNTTTFVGLDVHARSIKAVALDAMTGEVRSATFGYDAAEVAGWVSSVDPSAKCVYESGVTGFDLQKRLASMGIDCVVGAVSKTIKPPADRKRKNDRNDAEFLARMLSVGNVVEVWVPDDGCEAARDLSRALDDAREDLKRRKQRLSKFLLRHGYVFSETTPTSRRKGSWTAAHWAWIKSISFPEKADDDVLAYYVDAVRQAMEDKARLERLVEAEASKPRWKRRIDSIRCLKGIDVTSAADLVFEAGEFSRFKSARSFAAWLGLTPSEHSSGESVRQGGITKAGNKHLRRVLVESAWHYLGCSPRSKDLAKGQVPDPAARRHAAKGVRRLVERRRAMLERGVHKNKANVATARELACWCWAVGRMIENG

SEQ ID NO: 314908 - protein, 376 aa, unidentified
MKKKRDREGMVTAALDLGDSESLATILSPDGDVVDSFSMSMSDDGYSSFASKVPKDARIAFEATSMAYPVSRRLTALGYSDITVAHSKELAWIVKSKKKNDRIDSLKIARLHMAHMLPESHLLSREEQVKRDLLIQRVTLGKEIGKMKLKLIAYLKREDVYLSLPESSDSFSRERRQAIRSMRFGGDGDDDDGRDLVVGTMMDRLEFLERQCAPLEEKVRTIVRDSEDIRRLMSIKEVDFYLASLASSYVGDVNRFPDDDHLASFLGIVPESWDSANVKRRGHMSKEGPSTARWAFSVMTDTVMRYNPRLKTYYLSVKKRKNSGSLAHVATMRKLVRMIDHMLRYKENWRWEDEASTAKKLANLDREAEAKTTGGD

SEQ ID NO: 314909 - protein, 387 aa, unidentified
MVGAADAEPRTEKRTYGTTNSDLEKLRHWLIEEGCTHVAIESTGSYWKPIFNILEHSVTVILANPEDVKARKGHKTDPKDSWWLAHLLRHAMIRPSFIPPRAIRELRDLTRRRKQLLHHGTSERNRVQKILEDANIKLGSVLSDVFGASGQLMLNALLDGKATPEEIAQFAKGRAKQKIPELLAALDGHRMSEHHRQLIRYSIEHLVFLENQVTKIDHQIRRKILEAGFQGAFELLQTIPGVKEDAAAGILAEVGVDMRVFPSDAHLSSWAGVCPGNRRSAGKDKGGGTNKGNRWLRGMLTECAWAAAGKKDCYLKGKFWRLAADGKKKAIVAVAHNLLRLFYHNLSKGCLYQEKGQPILAERQRQKLIRSHIRALGRLGISAGFVR

SEQ ID NO: 314910 - protein, 442 aa, unidentified
MDEHADVVELEQSLEQVARVAAIDVAKASAMVCTRMPAESGRGRRVQKTWPVKATMNAILELADHLVCQQVELVVMEATGSFWKPFFFVLEARGLRVWLVNARDVKNVPGRPKTDKLDAIWLAKLAERGMLRASFVPPKPVRELRDLARMRKTLTQEQTRYRQRVQDVLEDACIKVSDKKEGVSNLFGVCGRAMLAALVAGERNPRTLAELARGQMRAKIPKLVEALSGRFEEHHGYQISILLDLHDRLAEQIAELTVRIERMIAAIDPTAPPDPGHPGRMPLLDRLSEIPGVGPEAAQAILAEIGVDMTRFPTAGHLASWAKLTPRTIQSGAKHSHGPSGKGNGWLKGPLGNAAVGAGRTQTFLGARYRRIAKHGAKKTAVVAVARNILEIAWTLISDPEARYRDLGPDWHDRHINHARKTRQHVRQLEDLGYTVTLAPAA

SEQ ID NO: 314911 - protein, 388 aa, unidentified
MIYVGIDVAKDKHDCFIVSSEGEIIKDVFTISNSIEGFNSLLLAIPDVPKDKIRVGLEATGHYSINLMNFITENQLPLVVLNPLQTNLFRKAHTLRKSKTDKIDAKLISHMLHSGNFKLHSNVSYHLQELKSLTRHKSRIKENLSKYKISLIRVLDIMFPELADLVYSLNQKSTYALLRTFPSKDAIASAHLTKLTNVLRNNSNGRYGRERAMLIKKTAAASIGSDSRALSFELSQILLFIDMYANEISKIDAQIKVIMDDMQSPILSVPGISYGLGSVILAEIGDITRFESPSKLLAFAGLEPSTYQSGSYTASGMKMVKRGSSYLRWALLEAARLISIKDPTFRSYCLKKKSEGKHHYIAISHVAKKLVRVLHHLLTHQIDFVPQM

SEQ ID NO: 314912 - protein, 407 aa, unidentified
MLFFLGNDWAEEHHDVELQDESGRVLARAKLPEGIVGITRLHAMIGEHLGDEDEAEVIVGIETERGPWVQALVAAGYRVYPVNPLQVARFRERLGVSGAKSDTADAHVLADMVRTFGEQLRPIAGDSPQAEAVKVVTRAHKTLIWERTRHMLRLRHALREFFPAALVAFDDLTAVDALQLLAAAPDPSSAAALTVDTIEAALKRAGRRNRAAKVQAIVEALRAEYLGQPKVVATAYAATVRAQVAILTVLNEEISVLEEQVEADFSKHPDAKVYLSQPGLGAVLGARVLAEFGDDNKRYIDAKARRNYAGTSPITRQSGKKKVVSARHVHNDRLIDALGLQAFAALRNSPGARAYYDQLRARGASHRAALRQLGNRLVGILHGCLKTGTLYDEAKAWPTNQDQQAAA

SEQ ID NO: 314913 - protein, 431 aa, unidentified
MDDIARFESFCKLRSQIRGSDNQLIVGIDIAKDKHHAFFGTAKGQSLWRRLIFTNDLIGYQRLMEQVETLMSQHNLENVVFGLEPTSNYHKPLTHWLTEKGYLVVLVAGKAVKDNRELLDGRWDKNDTKDSANVADLISQGKCLFYENPEADMLVLRNLLAIRRQLKKETHRLRMRIRNGLLAKYFPEMDRHWRSCMAENLAIVRWYLDPRKIAATDFDVFVQHVTTTDRGARQISRLRKIHEAAGRSIGLPVDDAAEYEAQMLVERFKAVAKELEHVMDQIHTVCRGLPSYKLLLTIPGFGPYIAPLVLSALANPMRFKSRKQVIRLAGLDLNASRSGKRSQEKVPVISKRGDAELRYGLYQAALIASYHNDAFRRIYNRMLEGRQGERGIQTKARVKIAAKMLVIAWTMLKKNEPFNPGYLLAESVHPR

SEQ ID NO: 314914 - protein, 356 aa, unidentified
MDKVIREGAVRVGVDLAKRVIQVHAVDAGGRVVGGRALARDKFIQWCVMLPAGCIVAMEASSSAHHWARKLIALGLDARIISAQLVSPYRSQGATGKNDANDAAAICEAASRPTMRFVPVKSIDQQSMLCVHRLREGIKEDRTACINRIRGLLGEFGLVFPQGASELQGVLSDVLEDAGNELGTLARLTLQRAQSQWHELDAHLAWCDERIAAHAKDNAAVKVAATLMGIGPVTASAVVATVGDFKQFRSGAQFGAWIGLTPRQHSSGGKSKLGGITKRGDAYLRTLLIQGAKSAVMTAHRRQDNISQWAVALRERSGWQKAVVALANKNARILWAVMTKGEAFDANHLSVKPAGA

SEQ ID NO: 314915 - protein, 317 aa, unidentified
MHITTLGIDVAKNVFQLHGVDARGRAVVSRRVKRSQLMDTVASLPPCVIGMEACGSAHHWGRVFEQCGHTVKLMPAKYVKPDVKTNKNDGRDAEAICEAVGRPTMRFVSIKTVEQADLQAVHRTRLLFVKHRTAVINQIRGLLAEYGLVIGQSPEKVRPALVRFLDAAASGLTACARETFSELYAQLTELDSRIERVMHRVECLFRAHPVCQKLAAVPGIGPLTATALVATVGRPQAFHNGRHLAAWLGLVPRQYSSGGKERLGGISKRGSRYVRTLLIHGARAVVQRAERRTDTQGRWLCALKHRKGTNVAVTCPL

SEQ ID NO: 314916 - protein, 349 aa, unidentified
MSDTKPGFARFVGVDIAYLDFTAATLLADAKPKLEAKPFSQTREGFTQFIERLLETGIAASSQLVVMEATGSYWIAPAIALHEAGFIVSVVNPAQAHYFAKAQLKRAKTDALDAQTLAQLAQALELPHWTPPPQSYHELRQRLTQRDNLVKLRNQVENQLHALSVNPVIIASVQAQLQELSTTLSSQLKAMDKEIKEVLEADTSWNKSIALLQTIPGLGILTACWLVVATLNFTVCDSPEALVRYVGLAPIERSSGSSIRTHPQIGHSGHSRLRTLLYLGTLTSVRFNPAIKAFWQRLRIEKNKPMKVARCACARKMVHIAFAVVKSGKAFEADYQPKPKAKEVQAVAV

SEQ ID NO: 314917 - protein, 423 aa, unidentified
MSHDAKDVPFQQQFKLFAGFDWASDHHDVVAVDHDGQIVLELTIEDTAEGWAALRDKLAKRVGQDLSVVAVSVETCNGPAVERLLEMGCAVYPLNPKAAQRYRERKSPMGAKCDRLDAWSFGDALRTDGHGWRRLQPEDPLTQELRILCRDEVQLIQQRTAFVCQLKQALHEYYPAALEAFDNWTVPSSWAFVEKFPTPQVLVKAGKRRWEKFLHTHRLARPERYAQRLEIFARADRFCGTQAVTNAKSRLAVALVAQLRVLEKQLQDYRKAIESLFDRHPDNDIFGSLPGAASKLAPRLLSEFGQNRDRFAKAESIQCYAGTAPVAKQSGKSRVVRLRRGCNKFLRTAVHLWADESRHQCAWAEAYYQAKRRQGQSHACALRCLGQRWLNILWKMWQTGTTYDEAMHMRNQVKHGSWVIQLR

SEQ ID NO: 314918 - protein, 431 aa, unidentified
MLKINPLSTLYVGIDVSSKSNYVCALDFYKNKYINSSFANNQPGAEELALKILECLKEHPDITTIVAALESTSVYSIHIANYLSSCEELMRFKPYVFVLNPKCTANYKKSYIGLGKSDPIDAFVIADYARAGNIESEPWRGSQFLALKRLTRHRLHLVECMTREKTYLVSNLYLKFSELQMLEGDDQPFCDIYGATSSSVLMEYLSPEEILVSSDEDLIAFLAEKSRNRIKDISKTADLLKKAARDSYRLDKALYEPLNVSIASSFNCIETFKREIKVIDNSIEKEIKGLNPNAFIILQSIDGIGPVFAGGIIAEIGDITAFHSSDALAKYAGLTWKSNQSGDFDGEDTPMIKAGNRYLRYYLGEAANSMRKHNVEYGTYYRKKYNEVPKHQHKRALALTSRKFVRLVYGLLARNQLYSGVSLDTSIKDSN

SEQ ID NO: 314919 - protein, 341 aa, unidentified
MNKAKYYIGIDISSEYFTVSILTTKSMKTDSLENFENSINGFGKLLKEFQSQKIKASDCIACMEATGVYGEQLAYFLISEGFSVVIENPLKVKRAFDLSPKKTDKIDSKRIAEYALRFVDELKAWTPKSQIIEEIRVFLTQREQFSVQRISNINAKKALGKKFYSSEKAIQMYKEMIKKCEENIKNIDKEILSLIEKEPEYRQTIANITSIPGIGNMLAFNLLAVTNGFKEHMNSKELASYAGIVPLPFESGKSIRKKNTSSGIGPGKIRKLLFMASMTSRMHNKEMKEYFLRKVAEGKNKRLVLNNIGNKLLKIIIALARNRKSYIENFISINPVFLKNS

SEQ ID NO: 314920 - protein, 314 aa, unidentified
MKPSPVHQLVHVGADVAQNHIDLHGEIAGLPARIANTKIDLARLLKMLRPAGPVQIVCEATGGCERLLVAACHQAGVAISVLNPRQVRDFARAKGQLAKTDAIDACVLCEYGRTFAPAPNQPLEPGLQRLAAYSTRRRQLIALRTAEKNRTHRCDPLLAASHRAIMRALDGQIARIDAALARTVASCARLRAKVAALTKVKGVGSTSATALLAALPELGTLSKNQAASLAGLAPFNRDSGLFRGQRHIHGGRSHVRQALYMATLVATRYNPVIKAFYERLRLAGKPPKLALTAAMRKLLIHLNSLLNSLPLQTA

SEQ ID NO: 314921 - protein, 420 aa, unidentified
MKAKKKKKLDLIGDDTLVVGVDIGKKNHYCRFINVRGYEIGKGFNFSNNRDGMEKIISKIEEAKKQNNLAKAVIGLEPSGHYWRPAAHYLSRSGYSLALVNPYHIKKTKEIEDNCQTKTDPKDSLLIAKLVRDGDFFDPNLANGIYAELRRMYRLRLKVKKSLVREKTKLKVLLDEYFPEYEELFCDTLGVTSEYILRNYFLPKLLAKENILSLAGKIKMISRGKIGAPKVLKLIEYAKDSIGITTGIDAAVLEKTYILEETRNLKLKLAYINKKLKYYLSKIEYSKYLLSIPGVGIVTAAGFLGEVGDISKYASAKEIIKLSGLNLVEISSGLKKGKKKISKRGNSILRCILYQCAIVAISKNSQIKKYFSYQTEKKNKMKMVVAVQCKLARIMFALLKYKKYYDPEEVLKSMVAEAVA

SEQ ID NO: 314922 - protein, 408 aa, unidentified
MQKRENLLYVGIDLHKETHTAVMVNCWNEKLEVVVIENKPSDFKKLAEKVNRKSNHLGLEPIYGLENAYGYGRSLAVWLIENGYIVKDINPALAYDQRKSAPMLRKNDEYDAYCVATVLINQLHTLPDAKPKDNEWTLVQLVNRRDLLVKDGIRFKNGLHEQISMAYPSYSKFFSEIDGKCAMYFWKIYPSPVHLQEKTAEELTIEFKEISPIIRKDKAVMILDCIQHDGNTFREYQESRDFITTSLVRDLEHQKEELAGLDQEIEKILLSFDYKLTSMPGIGTSIASKLIAEIGDIRRFPSADKLARFAGVAPVKFSSAGKGKEQSSRQGNRQLHGLFYFLAVTMVSKPKNGIPNHPLFYDYYMRKIGEGKTESQALVCIMRRLVNIVYGMMKNKTEYREPIREEEQ

SEQ ID NO: 314923 - protein, 332 aa, unidentified
MFLGIDIAKDTFDAALITDEKDQNKQNKPRHRQFANTAAGHRQLLCWLADHGGEKVHACLEATGTYGEALALFLFEAGHQVSVINPARISAFAKSQLSRTKTDKADAQLIARFCQSQSPALWTPPPAEARQLQALVRRLAALEEMCQMEQNRLDGLGVPEGPVQDSLVEHIAYLQAQIQKTERAIGEHINAHPCLKSRRDLLVSIPGVGETTAATLLAELPDVSQFSGARAVAAFAGLVPRIRQSGSSVRSRPRLSKIGSPRLRGALYWPAITALRFNPLLRAMKERLTQRGKSKMAIIGAAMRKLLCLAYGVLKSGKPFDPNFAMKTAPAP

SEQ ID NO: 314924 - protein, 432 aa, unidentified
MNRKAAAIDVGSEKMHVALAEQSSVKVFECFTDALHQLRDHLKSQQVTTVAMEATGVYWLPVYDILEAAGLEVFVVNGAHVKNVPGRKTDIQDCQWLAQLHAQGLLQSGFVPPTDIRKLRQYVRLRQDHIASAAQHILHMQKALDLMNIKIHDVLSQTIGVSCLRMIRAIVAGQRSPEVLLSLCDADVLRRKTTPLLRALQGTWDEEHLFSLKQALEAWDFYQSQIAACDVEIQKVLESLAGQKPEPPSGELPTIKKRRANSPAVPKMEQLLHRLTGVDLTALPCITAYSQMMIVSEVGTDMSRWPTQQHFSSWLGLAPGSRQSGKRRRRQKRFRGTAGKIFCVIARTLGRSKYLALSGFYRRVKAKRGAQVANIACARKIAILFYNALKYGIRYVEHGLQAYETHYREQSIKRLKKAAAHFGYQLTTQPNA

SEQ ID NO: 314925 - protein, 380 aa, unidentified
MVDQEVIYIGLDVHKATIAVAVAPAGRSSEVRFHGTLSHRPGALVEFARRLLTKHPGARLSFCYEAGSCGYGLARELVDASHECLVVAPSLIPSRPGDHIKTDKRDATTLAKMHRAGELTSVWMPDARHEAVRDLVRARETAMYWRNKARQALSSFLLRHGYRYGGRKAWTVAYWRWLATIELEHPAKQITMQEYILAIQEADARHDRLVKQIEAVVPSWSAAPLVNALQAMRGIALITAATIVAEIGDLSRFATPRHLMAYLGLVPAEHSSGTKIRRRGITKAGNTRARRLLVESAWTYCRAPRVSQEIQRRQEGVELEIVKIAWKAQLRLHDRYRRLAATGKPKNVVITAVARELVGFIWAVSRRVELPGEQPVAQAA

SEQ ID NO: 314926 - protein, 455 aa, unidentified
MAKQMTHKPATIETVNVGAAAVDIGSREHMAAVNPDVADAPVRAFGTFTHDLHDLANWFKSHGVTSVAMESTGVYWIPAYEILEQHGFEVILVNARYAKNVPGRKTDVSDASWLRQLHSYGLLRGSFRPSAKIATLRAYLRQRERLVEYAAAHIQHMQKALMEMNLQLHHVVSDITGVTGMKIIRAIVAGERDLDVLASHRDVRCRASTETIKAALNGNDRAEHIFALTQSLELYDFYQSKMLECDRHLEATLTTLGADTEHDASQLPSARTKTKQVSAPSFDVRAALFGVLGVDLTQIHGMGPSLSLKLVGECGTDLRAWPSAKHFTSWLCLAPGNKISGGKVLSSRTRRSSSRAAALLRLAAVTIGRSDTALGAFYRRLAARAGKAKAVTATARKIAVLFYNTLRHGMTYKDPGASHYEERYRNRVLGNLKRRAKSFGYDLQELPSEADKAVS

SEQ ID NO: 314927 - protein, 355 aa, unidentified
MKCATKYVGLDVHQSATVASVRQEDGRVIARGILPTEEHAFLEFFRGMRGSVHVTFEEGTQAQWLHDLLVPRVDHLIVCGRRKENRLSNKGDQVDADELSELLRRGGLRPVYHGSPHHATLRELTRTYQNVVDDATRVMQRLKALFRARAIKAPGKRVYSPAYRQEWLAKLPNPGVRFRAETLYAELDVLRQTRPKVKDAMIAEARHDPAWSLLHTIPFFGPVRVSLLLATLRTPWRFRTKRNLWSYCGLAIVTHSSSDYTFADGRPARRRRGPMTRGLNRHHNRTLKSVFKGAATAATGRPGPLQDFYLALLGRGMREELARVTLARKLAALTLHIWKTGEPFDPTKLTLQALE

SEQ ID NO: 314928 - protein, 377 aa, unidentified
MGLSGAGLGPTPGNMNSVYHTELSSHEETRCQFNGGRCTIKLGIDVHQDFYVVVMQEGGANPKPPQRFHRQAFLYWASKLRAQGREVHAVYEACGFGFGLQRKLTALGIHCYVVCPQKLDELAKRVKTDGLDAKALCLRLDRFVEGNRAALALVRVPTLQEEQQRALHRQREQLVKVRKVLEAQGRGLMVNHGIEPVKNWWKRINFGALDLPGWMRELLHNSQPILVALQEKIQTLTLQLEAAAQSSQPRGLGKMTSVMIDREIGDWRRFNNRRQIASYTGLCPGEYSSGNTRLQSCVTKHGNPRLRAALVELAWRLVRFQPNYRAVRKWKERLSKGTLTTGAARKKAIVALARQLAVDLWRIRTGRLSPEALGLEI

SEQ ID NO: 314929 - protein, 326 aa, unidentified
MKLLYRCCAGLDIHRDSVSVCVRRRVRGSSETTIEEAVFGTFTQELERLRTWLKQHRVRQVAMESTGVYWMPVWNVLEGGRSPFTLTLVNPATVRALQGQKTDRIDARRIAEYLQYGLLRGSFIPPKPIRQLRELTRMRVHIQQDRNRVISRIARLLETVNIKLASVATNIVGKSGLAMLRLLASGVRDAEQLADCALRKLRSKMPELILALDGRPDAHSRWMLSELLSKLDWLTEELARVDQRMDNVAAPHTDPLERLATIPGVDRTTALVLLAEFGTDMTQFPTPGHLASWAGLCPGNTESAGKRFSGRTRKGDGMNVISEDRR

SEQ ID NO: 314930 - protein, 381 aa, unidentified
MPGVTPCLHPGQVRRWVSFDQHKFSIVAAVLPPDGGGPEVWRIETTERAIRRFIDKHGPEGLSVCYEAGPGGFALWRLLTSMGVACDVVAPSVIPVRKGDRVKTDRRDAKKLVTLYRAGMLRFVHPPTAELEGLRDLLRARDDVRCARMAARNRVLKQLLRHGRIFREGKTAWTKPHRAWLARQRLDDPLAQEALEQLLIHLDGIERQLATLDARLEEIAGGEWWAGQVEILTRFRGISTLTALGLIAEIGDFSRFAHPRELASWLGITPSEYSSGDQQHRGHITLSGNRHARRLLIEAAWHHRHPPRRPKTGPAPDERAWQAQVRLYHRYRHLTEHGKRTTVANVAVARELVGFLWAAMTNQPLRTTDTVNRDQPEEVAA

SEQ ID NO: 314931 - protein, 396 aa, unidentified
MYIVGIDIAKRSHEVIVMDQLGNVIRKAFNFANTTAGLEKLLGTLSEISPDPNDFTVAMESTAHYWLALYSALKRRGYTVQVLNPLQSNALRGLYIRQVKNDQRDCFIIAEVIRFGRYTQGKPPTEDLFAMRELCRARVFLVNMIADTKKKVIALLDQVFPEYETIFTNVCGLTSSELLSHCATPEEILAIETDKLVEILEATSRKRFRRPKAEQIKEVAQNSFGVLIAADTFSLLIKQHVEHIRFIEGQIAGIETKIAEIFSRFDSCITTIPGIGPVLGATIFSEIGAISRFPSATKLVAFAGIDPTVQQSGEFTGTNNHMSKRGSPYLRRALWQAAVIAVRCDPALKAFHKKKLAEGKPYMNSIGHITRKLTNIIFAIMRDNQPYVPRTAPGMM

SEQ ID NO: 314932 - protein, 360 aa, unidentified
MTGTMTWAAMDVHARSTYAASLDVVTGELCRQRFDTGAVEPVVGWLAGLPGPVRACYEAGPTGFGLYRAALAAGVDCQVIAPSKTPRPSGDRNKSDRRDTDLLLRQLMAGALTPVAVPSAMSEAARDLARAREQVRLDLMRCRHRLSKLLLRHGRVWDRSAWTKVHRQWLAAQRFEHPNTELAFIDNLAACDGLTSRREALDERLSWVAADPEFWPIVRRLRAFRGLDTLSALIVLLEVSDFTRFPRAVQLGSWLGLVPSRQQSGESDVHGSITKTGSKYARRILVEAAWHYARPPGLGRALHERQEGLPDHILQISSRAQQRLYRIHKRMRERKKPGNVIVVACARELACFLWAAATAP

SEQ ID NO: 314933 - protein, 274 aa, unidentified
MSEQQWVGIDVCQQYLDVYVRPLGNLFQVTNNEVGISKLVQTLKNIEPKLIVLEATGGMEIDAVIKLTEAKLSVAVINPRQARDFAKATGTLAKTDAIDAQLLAHFADAIRPQVRPISDESSRQLEDLVTRRRQISDMITAEKNRRRGKTNSIQADIDEHIEWLEKRLKEIESQIKSAIAINEDWQQKMKLLTSVPGVGEVVAVTLISSLPELGTISHKSISYLVGVAPLNRDSGKFRGKRKIWGGRATIRCVLYRTHLRSLSVTISILKTLSH

SEQ ID NO: 314934 - protein, 350 aa, unidentified
MTNRQPIPTDALLVAIDIAKVRNEVLIEAPNHKRRRRLSVLNTRAEHDRLIETLRAYGKPVICTFEATGNYHRPIAWRLIEAGFDVRLVSSMALARTREALHNGWDKNDPRDAQVILHMLRIGATQRYHDPLRAGINDVQELSKTHEAIAKAKTEIQHRILTHYLPLYFPEIERFRGNSRSDWFFAFLDAFPTPASIMALSKEAFIEAAWDVVGRKVSKERLLADIYETARTSIGLPLPIDAPAIRMFRMVIAEARSLIRQRNEVEDMADAMLRDSADYKALRKVPGIGPVIALTILAEGGDLRRFRHHRQFLKFCGLDLSTQQSGQHRRQTRLSKFSIEQNGNLTKTLS

SEQ ID NO: 314935 - protein, 387 aa, unidentified
MQKPHDDSKMCLAAFEQDRTLVVVVEMSLSSWLVAGLIPGVSREPLKKINPDPERLLQLLYRWRDEAVAAGRKISRIAVAYETGRDGFWLARWLRNRGIDAHVIHATSVAISREHRRAKTDRIDTAMLRRGFLGWLRGEPGHCSMAVVPSVAEEDAKRPHRERDTLIHERTSIVNRMKSILIQFGVRNFNPVLRKASEKLDAVRTPEGIPLPANAVAALHRLMDRLRVIKEQVKAIEQTRLQRMQRNPADRMNAMVFLLVRIIGMGVETAEQLVREMLFRNFHDRKAVARYAGLTGSPDESGSKRREKGLSRSGNGRVRNILIQLSWRMLQFQPDSGLVIWYKKRTESARGSRKPMIVALARKLIISLWRYVNTGVVPEGFELRSAA

SEQ ID NO: 314936 - protein, 398 aa, unidentified
MEFQLRVGVDVGCRKHRVGIADPDGSILEEFDISHSEAGFQEFFRRVEQRKSELGFPVAVAMEGYNGYARPLDRLVQEKGYRLFNVNNLKLARFKEVFPGAAKTDPIDARKILELFHLREQLPMAKDVLQEVLPAPEVNEKLKRISRRRRQLVTEKLRVLNRLQADLQAVSPELLAATHDADNLWFLRFLSFRDDLRQLARLRRATIRQIPSVGAKYAQIIEEWQTKATFSDEVEYVGPMIVEDARRILELHRQIATLDETLATLSEQSEVAQRLATIPGFGKTSIAELAGEIGTLSRFPGEASLALYVGMSPLTVQSGQSLRARAPRQVNTRCRAAMMTAVARHIGCVPESRAYYERKRAQGKSHNQAVRALGRHMVRVIWAMLRDGRDYEPRGDAA

SEQ ID NO: 314937 - protein, 340 aa, unidentified
MQIAVLGVDLGKNSCSIVGLDDGGAVVLRRRMRREGVIKLAAKLKPCVVAMEACCGAHHLGRVLRALGHEVRLMSPEYVRPYVKSQKNDDRDAEAIAEAATRPTMRFVALKSEEQLDMQTLHRARDRLVGERTALINQLRAVLLERGITVAQGRRQLERHLAGLDAQGGLSQRMRVLIEDMRAQWGELDRRVAELDKELAEWARNEEAARRLMTIPGIGVLNATALIAAIGQAESFVRGRDLAAWLGLVPRQVTTGGKPRLVGISKRGNKYLRKLLIHGARAALPTLLTSSTPLGAWLRGLVARMHKNAAVVALANKLARMAWAVLRHGETFRFAVSATA

SEQ ID NO: 314938 - protein, 312 aa, unidentified
MEKLSYGGIDVSKDRLDVVVLPEGWFFSVSNDTAGWTELVARLRLLAVCAIGLEPSGGYERGIIRALLVARLSVRRINPNKLRQFARARGVLAKNDRLDARLMAEYVAIMPTRAVQRDDAVDRLAEVVTMRRQLCDEHVTVENQTAHLEDAMLRRLSKRRLVRLEADIRLLDKRLAEMVATNAAFARLYELLTSMPGVGPVLAFTLIALLPELGKMGRKQIAALVGLAPYDFDSGKLRGHRSIYGGRMPIRNVLYMAALSASRYNPALKTFSNRLAHANKKSKVIIVAVMRKMITTLNAMLRDNAAWQPQSN

SEQ ID NO: 314939 - protein, 349 aa, unidentified
MEHVAIDLGRPNSVMCQLNAEGHKSFRRFALNRSTLDRFFASRPPCRVLIESSTESEWVALHLESLGHEMVVADPNYAPMYGERNRRVKTDRRDADVLFEANRLGIYREAHRRSQEQREVTALLKVRDNLVRTRTRSINLVRALIRREGIRVRSGHAASFVDRVEELELPLELRAEVRPVLGLLGPVNEQLVAVDKQVVALKGRDERVRQLQTTPAIGAVTSAAFLALIDDVGRFPRAHALESYLGLVPSEWSSSEKRLQGRITKAGDTRVRWLLVEAAWTIMRSRKLECHPLRSWAEGVAARRGRKVAAVALARRLAGILYAMLRDGTDYDPTRLQQGSHRRTRSAAA

SEQ ID NO: 314940 - protein, 325 aa, unidentified
MDDTGKIVREVKVASEPEALLAVLKNPAYQFKRIGLEAGPLSQWLYSALAEAGLPVICVETRHMRAVLKAQINKTDRNDARGMAQMMRVGLYRPVHVKTLRSQKLRMLLTHRQLLLSKAIALENDLRGTLRNFGLKVGMVGKVKFEARIRELVETLPDLAVLVEPMLIVRRVLREQIVILHRRLLAVVRDDEVCQRLMTTPGVGPVVSLTYRATVDIPARFRKSKSVGAVFGLTCAKYQSGEVDWDGRISRCGDEMMRTMLYEAAQAMLRSKKWSWLKAWAMQIARRRGIKKAIVALARRLAVILHRIWVDGTEFRWTREQAVAA

SEQ ID NO: 314941 - protein, 449 aa, unidentified
MAGEVQEILDEDHERLVERVCAVDVAKASGMVCTRVPRPSGGRSSRVWQVSATSRAVSDLAAQLVDAGVEKVTVESTSDYWRIWFYLLEAAGLDVQLVNARDVKNVPGRPKTDKLDAVWLAKLTERGMLRPSFVPPPQIRRLRDYTRLRVDLTRERTRHYQRLEKLLEDALIKVSSIASRMDLASVRDMVEALIAGERDPRRLAGLARGRLKSRHSELVEALSGRFDDHHGELARMLLDAIDALNGQIDTLTTRIDELLATLPDDRPDGPVDGPGPAGPGGPGVGMSVVERLDEIPGIDVRGAQIILAEIGTDMTRFPTAGHLASWAKLTPRTVQSGATLRGGKTGKGNPYLKGVLGEAATAAAKTQTFLGERYRRIVKRRGKLKAMVAVARSILVIIWHLLADPGARFHDLGVDYHATRTDTDRKIRNHLRQLQALGYTVTLNPIPAA

SEQ ID NO: 314942 - protein, 404 aa, unidentified
MPELWAGTDAGKAEHHCTAIDTDGKTVLSRRVPNNEAELLELLSDVLELADGNPVTWAVDLNAGGAALWIALLVNHSQKLLYIPGRTVHHASAAYRGNGKTDAKDAFVIADTARMRRDLQPLDQAGEIAVDLKILTARRMDLSADRTRAINRLRAQMLEYFPALERAFDYSVSKSALVLLTGYRTPAALRRIGRARLAAWLKSHGVRTAPTAKSTAEAAVTAAEAQFTAVPGEKTAARMVHTLAREVMSLDQEIAELEALIEGRFREHPHAEVITSMPGIGDMLGAEFIAATGGDMAAFGSPDRLAGVAGLAPVPRDSGKVSGNLRRPRRYSRRLLRMFYLSAQVAAVHCPVSKAFYRRKRDEGKSHKQAVLALARRRLNVLWALIRDSRTFDAVAPKNAAPAQ

SEQ ID NO: 314943 - protein, 319 aa, unidentified
MTQDQLVVAGIDVAKDKIDACIRTVTERKTCPATAAGRRSLIVWLRKHRVGKAVMEASGGYERIWAKALRQAGLEVRIVDPKRVRHFAESAGRLAKNDKIDAEMICWFAETFSEAPSQVDNPAQEEIKALVKGRQSLIDVRARLEMQKEHDAPALLRKARARLLRKLADEIAAIETVIAAMIKAMPDFARRAEIIQSVPGFAEGTAMALLGGLPELGQVSDEVAAALMGVAPYDDDSGKRRGERCIKGGRRWVRNALYMPCVGAATLNNPVFKAFYERLTAKGKPPKVAIVACMRKLIIILNTMIARDKTWDPKKYRIA

SEQ ID NO: 314944 - protein, 440 aa, unidentified
MATTKQALLNDTSVTLMLYMALELSGAKWKVAVADGKRAASQHALVAGDVGGLLLLIDKAKKRCGVQGKVRVMSCYEAGRDGFWLQRWLLEQGIDNVVVDSSSIEVNRRKRRTKNDALDAAKLYEMLVRYVAGEKRVWRVVRVPSVQQEDERRLHRELERLKRERNAHVNRIRSLAVLHNVRLQRVGGKDWSERLEQLKGQLPAGMVAEIERQSARAKLVGEQIAQLEKSRQEQLQTMIEQQQDGPLLALLKLRAIGVQTAWVLVRELFSWRRFSNRRELAGCVGLNPSPYDSGASQREQGISKAGNRRVRALLVEIAWYWLRYQPHSALSAWFNRRFGGAGKRMRRVGIVALARRLLIALWRYVEQGVIPEGAQLKSHSHLELSATPTNSTGVIDSVCSMHQGSRRPYPSRVSTSLTVLRDGALWCKGLATTRSTAHEA

SEQ ID NO: 314945 - protein, 343 aa, unidentified
MKYIGLDLHKKSIFATVLGGDGKILSRTKIGSNSRDIIYYLKSQGTKDELSVAMEASYNWQYFYRAVEEAADNIVLAHPLKTRIIGEAKIKTDKIDSEVLAHMLKADMLPAAYVPQRSTMQSKMLLRCRMSLVRIRTQIKNKIHAVIDKNKDSYTGLENLSDIFGKMGRQILRDTKINPIDYHILSGYLDLIEAINDKIKDLESRIDKRSLNDKEINLLKTIPGIGTFSAFLIKTEIDDIARFLSKEKLCCYAGLVPSTHGSADKLYHGRIVKQGNKFLRWALTEAAQVSIRYSEYFRYYYNKVRSKKNANSATIAVARRMLEVIYAMLKQDRAYIEKPVDIK

SEQ ID NO: 314946 - protein, 348 aa, unidentified
MAMLADTVELVIGVDTHKETHTAAVVAAATGVVIAQATVTATPAGYQQLLRLADRHDGRRVWAIEGTGGYGAGLTRFLQSHAEQVVELDRPKRAARRHGAKSDPLDATRAAREALGRDQLAQPRAAGRRAALSVRLAARRSAVQATGDAQRQLHALVVAAPDVLRGRLRGLTTAHLVSTCARLRQRSDGDVQTAATVASLRALARRIQLLEVEIAEHTRAITALVRAWRPDLLSRCGVGPIVAATVLCAWSHPGRCRSDAAFAMLAGAAPIPASSGQTIRVRLNRSGDRQLNQALYTVALTRLRTDPATRAYAQRRRAQGKTNREIKRCLVRYVARQLYRLLEATPAL

SEQ ID NO: 314947 - protein, 357 aa, unidentified
MEQRNKISFKGQNIYIGLDVHLKSWSVTILSETSVLKKYSQDASPEALHKTLTMSYPDAEYYSVYEAGFCGFWIHDRLTELGIHNIVVNPADVPTMSSEKLRKTDAVDSKKLAVCLRAKQLRGIYTPDAEALEIRSLIRLKNSITKDTTRQKNRIKSQLRYLGIDIPKEYLEPNSNWSKRFIAWLKDVQMKTTSGRQTLDLQIRQLEDLRRQKLEITRALRKLSHSEKFEDTLRLLMTVPGIGQTTGLALLAEIIDITRFKNSEELAAYVGMIPMCHSSGEHEGVGDITLRKHAILRSNIIEAAWVAIRKDESMQLCYLNNCKKMVPSKAIVKVARKLVNRIYFVLKRRQPYVNAVA

SEQ ID NO: 314948 - protein, 401 aa, unidentified
MVSDFRKGRYNLMKIYVGIDIAKLNHFAAAISSDGEIILEPFKFTNDADGFQLLISKLESFDKNSIIIGLESTAHYGDNLVRYLVAEFYQVCVLNPIKTCQMRKNNIRKTKTDKVDTYVIAKTLMMQDDLRFVSFYDLDMMDLKALGRFRQKTIKQRTRLKIQLTTYVDQVFPGIQYFFKSGLHQNAVYALLKEAPSPKEIASMHMTHLANLLKVNSHGHFTKEQAKELRVLAQKSVGANDSSISIQITQTIQQIELLDSQLEKIEAEMTDIMKFNDCVIMTIPGIGYINSGMILGEIGDIHRFSNPNKLLAFAGLDPSVYQSGNFQAKTTRMSKRGSRVLRYALVNAAWNVVRNNATFKAYYDAKRAEGRSHYNALGHCAGKLVRVIWKMLTDKVEFNLE

SEQ ID NO: 314949 - protein, 348 aa, unidentified
MGEVSTIGLDIAKNLFQIHGVDADGTVVIRKRIGRARVLEFFADLPPCRVGMEACATAHQWARELRRLGHDARLMPPTYVKAYVKRGKNDAADAAAICEAVTRPSMRFVPIKDVEQQSVLMLHRVRDLLIRQRTQLINALRAHLAELGLVAAKGREGLHQLVAVVTECGNEQLPSNARFACQAIVTQLHAVQIEISGLDKRITQTHRANADSKRLDTIPGFGVILSTAVAATMADPKAFRTGRDFAAWIGLVPRQNSTGGKERLGSISKQGDRYLRRLLVVGATSVINCARAQPHKYPWVIELLGRRPTKVVAVALANKMARIAWAVLAKGQPYRAPTRSSNATVLAA

SEQ ID NO: 314950 - protein, 382 aa, unidentified
MTQMALRMNDTTFASALYMALELSKSKWKVGFSYGHKRRTVNVEGGDVARLKAAIGEAKAKFKLPETVVIHCCYEAGRDGFWLHRLLTSWGIDNLVVDPASIEVNRRARRTKTDRVDLEMLLSKLRQHHGGERVWKVVRVPDQQAEGGRHLHREAERLKKERSAQVNRIKGLLFAQGIRLEQLNLKGWPAQVAGFRTFDGQPLAEDLRGELQRAGARLALLASQLKELEKEQDRRVRAVGESGGPLAMVRQLRQLKGIGRVAAWVFVMEFFGWRQFRNGKQVGALAGLTGTPYASGDTHREQGISKAGNRRVRSLAVEISWLWLRYQPDSALSRWFRERFGGTGKRHRRVGIVALARKLLVALWRYLETGLLPEGAVLKAAI

SEQ ID NO: 314951 - protein, 318 aa, unidentified
MASRTNAGIDVCKDWLDACWTAQARRFTHDAEGIKQLAASLRESQVDLVVMEASGGYEVAAAAALQAEGFAVAVLNPRQTRDFAKSMGVLAKTDRVDARVLRDFANVIAVHPQRERYLRALPDAQRAHLAALVMRRRQLVEMRVAEANRLGLAHPSARKSVAAILKALDKQLTRVDADIDGCMREQFKQTLACLDTVKGLGPVTKSTLLALLPELGRLNGRAISALVGVAPMARESGAWRGKRQTCGGRHQVRTVVYMATLSAVKYNPVLQRFHQRLISAGKPAKVALVACMRKLLVILNAMVRDRVAWNPAIANQPA

SEQ ID NO: 314952 - protein, 460 aa, unidentified
MKRNERKKAQRVRSHLKQVNLFAAGIDIGSRSHFVAVPDELDEQPVREFAGFTGDLNRLADWLVEIGIQTVAMESTGVYWIPVYEILESRGLEVLLVDARHVKNVPGRKTDVLDCQWIQQLHTYGLLRGAFRPPEEMVALRSYLRQREGLIASASDSIRHMQKALRQMNLLLDNVVSDITGMTGLRIIRAILAGERDTKQLAKLRDKRCRNNEQTIADSLEGHYREEHLFALQQAVERYDFYQQQVEACEGVIERHVREIEGDNDNDQDVPPASKPKGHSKNGFDFDVRSQLYRLTGVDLTEINGMSESYVLTIVSETGIDMNAWPSEKHFASWLGLSPGNKITGGKRLSGKTKPSPNRAAAAFRLAAFSLANSKTALGAFYRRLRNRLGAPKAITATAHKLARLFYRLLKNRTPFIDPGQDYYEQQYQERATRNLKKRAAALGYKLIPESTDGLQESMC

SEQ ID NO: 314953 - protein, 354 aa, unidentified
MNIKYIGMDVHKETISIAVMNGDGKLVMESIIETKANTILQCIQGLHGDLHVTFEEGTWAAWLYDLLKQHVTELIVCDPRKNALMKEGNKSDKIDARKLADLLRGGYLRSVYHGENGLRTLKELARSYLTISKDLTRVMNRVKALYRSWGILCDGQQVYAPRHRSEWLNKIGEAGVRRRAEFFYQQLDALRALRQAVRRDLLAESRKQSATKLLRQIPSIGPIRAALLIALIQTPHRFRTKRQLWTYSGLAIETRDSAQYRYVAGQLQRSKKPQQLRGLNQNHNHDMKAIFKSAATMASSREGAFQAFYQGLLMKGMEPAMARLTLARKIAAITLILWKKGAHFDAEQLKPQAA

SEQ ID NO: 314954 - protein, 350 aa, unidentified
MNVNHYIGFDVHKKSVSYCVKGADGRIFEEGKLRATHQVLRQWAQERREAWSGAMEATLFSGWIYDALKPFAAELEMGHPAMMKAIGASKKKNDKLDARKIADLVRCNLLPACYVAPPEIRELRQMLRYRNLVVAQAVRMKNKMSGLLMEAGAEYNKQRLHGKEYFTELLDTVAEVPESVKDLLRLSRGALEMFETTQRQLLVRLQKDPLLAKRVILLKSIRGVGEVTALTWALEVSDPQRFSSVARAVSYCGLTSALISSADKQQRAPISKQRNAHLQTVLIEAAKLAPRRNPQLAALHERELKRGNRNRATLAVARKLVAYLLAVDKSGQPFQVLSPSAEETEVEKAA

SEQ ID NO: 314955 - protein, 394 aa, unidentified
MKLIGIDIGKNKHFFCIMDQQTGEIISQPVSFSNDKEGFDFLVQKIKSYPKDSILIGMEDTGHYHFALLKYLLDLQYTVALINPKTTDFNRKMQGGITKNDKLDTINICDVLDTPERKKQYRITKVNSFDLYEQKQLTRHHHNLKEEENVYKNRLQKCIDIVFPEFNKLFNSKYGIVYMNILKMFGSAENIANTDIRTIRKCFEIEGRGNRISLTPERLKECARSSIGISSSAEVIQIKHLTAQIELIEEQLTEIDKKIEEFSIQNNSPILSIPGISHFSGTSILAELGDISNYSKPSQIIKFAGVAPLHYESSQFNAQHTSITKKGSKYLRKTLYQIILPVIRHNPVFTKYYQLKISQGKGHRCAQGHCVRKLIRIIYHLLKTNQQFDPQLLR

SEQ ID NO: 314956 - protein, 357 aa, unidentified
MEKRTTVGIDLAKEVFAVCVMDGAGQVIERQRLRRAAFERWLLSLQGACVVAMEACSSAHHWGRLLAARGHTVRLIAPAFVTPFRKSGKNDDHDAEAIAIAACQATMRFVPLKTVEAQAILSWHRARQGWIEERNALVNRLRGLLAEFGIVIARSANRLRKALPALTDTTTPLPAALRPLVIEAIEQLRALDARLARCDAEVAAHARSDPAAQRLRQMLGVGPLTSSAVPAAVADARVFRNGRQFSAWLGITPKQHSSGGKTRLGRSTRHGDAYLRTLLVQGARSTLQTALRTEPAKASHLQRWIVALYQRKGYHKTLVAIANKHARIAWALLARGENYDPNAWQHSARIQRNAAIA

SEQ ID NO: 314957 - protein, 343 aa, unidentified
MQAVTTIGLDIAKSVFQIHGVDAAGNVIVRRQLKRRYVLPFFQKLPPCLVGIEACASSHHWSRELQALGHTVRLMPPAYVKPYVKRQKNDAADAEAICEAVTRANMRFVATKTPEQQSCLMLHRTRHLFIRQQTSVINAIRAHLAELGIVAPVGRNGVEELLGVVADPSDKRVPEIARACLAALGAQLRVLKAQILEFDRMINAWHRSNETSKRLDEIPGVGPALATALVASVADPKAFQSGRNFSAWIGLVPKQHSSGGKDKLGSISKQGDRYLRSLFTAGALAVIRYAKIHGTKHRPWLTALLARRPTKVAAIALANKIARMAWAMMAKGERYKEPVALAA

SEQ ID NO: 314958 - protein, 408 aa, unidentified
MLLVGDDWAEDHHDVGLQNEAGRRLARARLPEGVAGVARLHELIGEHLAGDADPGQVAVGIETDRGGWVQALIAAGYTVYAINPRQVARYRERHGTSGAKSDAGDAHTLADMVRTDRHQLRAVAGDSEQAQAVKVVARAHQTLIWERHRHMLRLRTALREFFPAALAAFGDLTAPDALELLARAPDPVSAARLSRPQIFAALKRARRRQAEDKAAAIQGALRTVHLARPPAVAAAYAATVRSLVAMITAFNAQIAAMEEQVTACFGQARDAEIYLSQPGLGQVLAARAFGEFGDDPYRYATARNRKNYAATSPITRASGKKKTVLARFIHNDRLVDALHQQAFCALTASPGARAYYDRLRRRGQGHHAALRKLSNRPVGILHGCLKTGTLYDEHTAGAHHSQDQQTAA

SEQ ID NO: 314959 - protein, 348 aa, unidentified
MALSIVESRAITGGAGTHADVHVAAALDPIGGLLGVREFPASPAGYAGLLEWLGGFGTVCLVGIEGTGSYGAGLARHVTTAGVRVVEVDRSDRQDRRRQGKSDPLDAVSAARAAQSGRARGAPKGRDGSVEAVRALMVARRSAAGERTQTINQARALIVTGPDDLRARFARHTVAALVAELASLRPRPGSTVGYATRIALRELGRRAQFPGAQLERLDELIIPLVTAHAPGLLALYGIGPHTAALLLIAAGDHPERLRSEAAWAHLCAAAPIPASSGKTIRHRLNPGGDRQASHALWRIVFTRMGSHPATRAYAGRRTGEGKSKAEIIRCLKRYVAREVYPHLRPAAG

SEQ ID NO: 314960 - protein, 423 aa, unidentified
MKNNAARKLRQVPAGYLVVGVDPHKKKHAAVFMTQDFMVHSKLKFDNSREGFEKVLERVRTEMLKTGCRGVIFAIETGAHHWRNLAYFLDEKGIPLRLINQFTLKRRREGKDLNHRKNDYRDSEVAAQLLCTGEFNAARLSQGVYAELRAAYGSYRRLVKERTRIVNLIKSLLDGLFPEFTQVFKNPCGQTAASVLCTCAVPQAIAGMTESEFVGAIKAACQGRVMKGKLWALHHVALTSIGIGAGAQSVSSEIAFLIEKLRLIEQQLRQIKEALTRLVHETMEGKYLLSIIGLSYVSVAGIIAELGSFSSYQNAKQLIKMAGSNPTESESGAKRHSHTPISKQGRPVLRHCAWTAVIPMLRFNPDFRDWAKKLRERPAGANPLSGREVMVAAVNKLLRLAFALVKNQTLYQIPESQPVEITI

SEQ ID NO: 314961 - protein, 428 aa, unidentified
MNFNTQNAKIASITEKTLIVGIDVGSDTHFARAFDWRNYEYTKKPLEFSNTEAGFQMFKAWVEDIAEKQGKTAVIPGMEPTGHYWFALGKFLQDSGMKPVHVNPHHVKKSKELDDNNPNKNDRKDPKTIAALVNEGRFSYPYIPTGIYAEIRSLSNLRFQTQEELTRIKNRIARWFAIYFPEYKDVYGDLMAVSGRMILKEAPLPEDIRMLGVNGVNQIWRNAKLRGAGMKRAKTLVSAAEHSVGSKEAPETARIELKNLLNDMDVYATRLEEILQNIEGKLKTIPYVDKLMEIKGIGLVTVSGFIAEVGDIRRFDNPKQLQKLAGYAIVANDSGKHNGESRISYRGRKRLRYVLYEAAISLVGKNAEFKEIHEYYRTRKENPLKKMQSVVAVACKVLRVFYAILTKGVDYDPLKLISDIKRPQLQAA

SEQ ID NO: 314962 - protein, 341 aa, unidentified
MKIRSIGIDLGKTTFHLFALGERGKILLKKKLSRKQLLALTANLPASLIGLEACSGSHFLARALREQGHDARLIPAQFLKPFVKSNKNDFLDAEAIAEAVDRENMRFVPIKTDDQLDLQALHRVRERLVSRRTSVINQVRAFLLERGVTFRKGPATLRRQMPEILENADEQLSTRIRGLLAMLWQEWKELERQIESLNSDIEGTCRDDAACQRLQQIPGVGPLIASAVVAAIGNGAAFRKGRDFSAWLGLIPKQYSTGGKAKLLGISKRGNPYLRKMFIHGGRAAVLRLRREGTLIGKWMDGLEARAPRNVLIVAMANKLARITWAVLSSGEPYRPATLAA

SEQ ID NO: 314963 - protein, 336 aa, unidentified
MSKLVTVGIDLAKSVFQIHGVDESGRVLVRRQLRRSQLLAFFEKQPRCLIGMEACGGAHDWGRRLQGLGHDVRLMPPSYVKPYVKRGKTDAADAAAICEAVTRPSMRFVAVKSEACSSVLVLHRTRDLLVRQRTQIGNAIRAHMTEFGVIAAKGAQNVDRLRTQLHQLPEAARLPVNLLFEQLVDTDTRIERLTDEIEATHAQSETSQRLATIPGVGKLSATIIAATTPDVGNFDCARDYAAWLGLTPKPHSTGGKQRIGRISKMGNRYIRRLLYLGAMSQIMVRSRCGPRQDWLSDLLARKKTKVAAIALAHRMARTIFAVLRDGSRYQPQATTA

SEQ ID NO: 314964 - protein, 340 aa, unidentified
MNIVFLGIDLAKNVFQLCGLNQAGKPVYSKRTGRKELLQMVANIPACLIGIEASTGAFYWQREFAKLGHNVKVISPQYVKPFVRGQKNDGNDAQAIAVALMQPTMQFVPPKNLEQQDIQALHRARQRIVNHRTATVCQIRGLLLDRGITIGAAVSRVRRAVPLILEDAENGLSVRMRRTIAELYDLFNDLSRRINFFDKEIEAVFRQSEACQRIAKVKGIGPKTATAVVAAIGKGTEFKNGRHFAAWLGLVPRQHSSGNKQVLMNMTKKGDKHLRTLFIHGARAVVRVATNNNDGSLHQWVNQLKERRGFNKTTVAVANKNARIIWSMLRNDTEYQAVGS

SEQ ID NO: 314965 - protein, 379 aa, unidentified
MREEISAQATLAKEDTLLIGMDLSAKSWRICSGTLTGRRERQKSLRAEDVPHVFRDEVSRAKQKLELPESAPVVVVYEAGRDGFWPYRLLSEWGFEVIVVDPSSLEVPQRSKRRKTDRLDARELLGKLRHRTQGERPWREVRVPSAEEEDERQLTRERDRLIKERTQLKCRARSVAAKHGLRLEPYPGFSESLDSLRTPWGAPLGPDAMRDLQHTDERLQLVERQICELEQEQVERLKAPRSRISETARRLTQVKSVALQTAWGLSTECFGWRDFANTREVGGASGLVPVPFNSGSRERDQGISKNGPRRVRQLAIELAWRWQYHQREDRLTLWYHERFAGGGRRQRKVGIVGLARKILVALWKFLEFGELHEGMELNA

SEQ ID NO: 314966 - protein, 408 aa, unidentified
MKVLHARCAGLDVHKEKVFAGVRIADGGKVTEHVQSFSTTTKGLLELSDYLASFGVTHVVMEATGVYWRPVWHVLVGNFELTLANAAHVKNVPGRKSDVKDCIWLANLLAHGLVRGSFVPPQPIEELRQLMRMRKQFVREIAQHSLRIQKGLEDMNIKLGNVVTDVLGTTGRSILYKLAAGVTDPEVLANEARGTLKKKREELVEALRGRVTEHHRFLLKLHLETIEMLEGQVSQIDERVGGALDPFREGIELLTSIPGVGEQTATVLVSEIGTDMSRFATSAQLISWAGLCPRSDESAGKHRSRRIRRASPWLRTCLVQAAWGAARSKNTYLQAQYFRIKARRGSKKAAIAVAASILTAAWHMLRDGVFYKDLGPDYFLRHDREKTAKKLAKRIENLGFQVTLTQAA

SEQ ID NO: 314967 - protein, 473 aa, unidentified
MIPLSRLPSDHLRKEALMARRSKAKGTRRRTKLHIIYTRAAGIDVGSTFHVVAVPPELSAEPVQTFQSFTGDLYRLAHWLVDIGVTTVAMESTGIYWIPVFDILEAHGLEVLLVNAQHVKTVPGRKTDVNDAQWSQQLHTYGLLRGSFHPAQDWSALRVYLRHRERLVEYAAAHIQHMQKALMQMNLQLHHVLSDITGTTGMKIMRAIVAGQHDPAVLATYRDARCKASAETIRAALTGHYRREHVFALRQALELYDSYQARIEACDQEIQSTLESLQHDEISMDTLPAARHKKRQSHEPQFDVREALFRVLGVDLSQIDGFSAYTALKLVGECGMDMSRWPTEKHFTSWLTLAPGNKISGGKVLNTKTRRSANRAAAIFRLSAMNVGQTHTAFGAFYRRLASRSGKAKAVTATARKLAVLFYNTLRYGMAYEDPGAAYYEDRYRQRVLTGLHRRAKQFGYKLTEVSALEGVS

SEQ ID NO: 314968 - protein, 339 aa, unidentified
MEHWIGIDVSSATLDFALLDGKGTHLESAQVDNDRKAVMKLMGQWRKHHGVEPSKSLICLEPTGHYTLMLLNLVVEQEWPTWLAHPLDIQQAMGIKRVKNDKVDALRIAQYARTFREKARLFTAQNLKLDKLKHLLTRRQHLVRVRAMYKKHLSDLNRYMDADIKKVFDPMDRRLIAASDRAVLRIEQLIMAQLRGDEQSSAQYDLLRSIPGVGPQLAAYLIALTDGFHRFTDPRELACHAGVAPFERTSGSSVRGRTQVSHKANKTLKTLLHMSALVSVREPGELRDYYQRKRAEGKKPILVVNAVRNKLVHRVCAVIRRGQAYKPLLETAKTHLEMT

SEQ ID NO: 314969 - protein, 349 aa, unidentified
MMIIGIDYHPSFQEIAFMDQQTGECGERQLNHSDGEAEKFYRELKQRGVSVRVGMEATGHARWFERLLAELGFELWIGDPAEIKTKRVRKKKTDREDARLMLKLLLENRFPRIWVPSPENRDLRQLLWHRHRLVQMRTRIMNQLQAVAMNEGYRWKKRLFSEKGRALLEKLSLAPWASRRRKELLELLDQLDPKIAELTAAVEQEAKKRPEVVQLMTHPGVGPITGLAYVLVIGTPGRFPCGKQIGSYTGLIPCEDSSAGKQRLGHISKQGNTLLRFLLVEASQAAARCNPDWRRRYAHLMMRREKRIAKVAMARKLAVRLYWMWRNNWQYSQLVEFGSNAGKLVHVHL

SEQ ID NO: 314970 - protein, 421 aa, unidentified
MSRSQRIVGFDCGEDTHSAVLLDTAGEFCRKSEVTNERGQIQELLAELMLVIGPDAELVVVVESKRSHGRIVSDVAVELGCDLRQVNTVALNHYRDLEGQPRKDDDWDAYLAARMVFLKMGGCRRAIVTTEEERTLSRLTRTHSRLVEDRKRHVARLRAVLLELVPEMLHTSWKGPKPGSKAMQYMLERWPGFEGLEKAQLRSIVKILRQCRYGSRAADVAKLIRKAARGISVAEEERRAITFELDLLVQQIRFCNGSVDRLYTKIADRVERDPVGEKLVEMHGFGPIITGVLISELVPVARTSTEPKCATYAGVTPLSRKSGKSLDNDRLTQGVNQRVLHALYTSSVVAIKNSAIDRAYYEKKLRDYSGHPKPHVAAFIALSRQRHKLVYKLITTEARYDKETLIASHLARLEQDRIAAA

SEQ ID NO: 314971 - protein, 389 aa, unidentified
MKIYVGIDIAKLNHFAAAISSDGEIILEPFKFTNDADGFQLLVSKLESFDKNSLIIGLESTAHYGDNLVRYLVTELYQVCVLNPIKTCQMRKNNVRKTKTDKVDTYVIAKTLMIQDNLRFVSFFDLDMMDLKALGRFRQKTIKQRTRLKIQLTTYVDQVFPEIQYFFKSGLHQHAVYALLKEAPSPKEIASMHMTHLANLLKVNSHGHFTKEQAKELRVLAQKSVGANDSAISIQITQTIQQIELLDSQLEKIEAEMTDIMKFNDSVIMTIPGIGYINGGMILGEIGDIHRFSNPNKLLAFAGLDPSVYQSGNFQAKTTRMSKRGSRVLRYALVNAAWNVVRNNATFKAYYDAKRAEGRSHYNALGHCSGKLVRVIWKMLTDNVEFNLK

SEQ ID NO: 314972 - protein, 396 aa, unidentified
MKKVYEKVVCGGMDVHYKFSVVAFRDANGKIVCRERLEHPDRKALVEQLSHWPRGIPIAMEGSFGWQWIAELMLQQGLNPQLANSLKVDKMREARGWAKTNKKDADLVSLLPLEKTDWWRVWMAPPEVQDRREWVRYRADLVQTQTRTKNRIHAVFHRHGIFHEFSDLFGVQGRKFLEALCQDGGGHLSGGALRAFRGHVKMLTDIGRELVEVMKELHTHLLRTPLTCHLRKHIPGFGAILPHVVVAETGDMARFGYNHRRFAAYCLLAPRSWDSGKETDEPAVGRKLGHRGNRTLKWAFLEAARGAVRKGGHWRELWDRHTQGGKKDKNRGYLKVARQLCKLVVREWHKAVLGPEESSPVRQEQAARRAKHRRRGRGQSSTRSGTGALNHPMVEV

SEQ ID NO: 314973 - protein, 408 aa, unidentified
MEHTTIAVDLAKSVFQVAVSHRPGRVDEERRLSRDRFLECFAQRAPATILLEACGSAHYWARQLQPFGHVVRLLPPHDVRPYVRRNKTDRTDAKGLLEASRNADIHPVPVKTIEHQAIASLHRLRSTWLATRTARLNTIRGLLREFGIFIPVGAHPVVARVRTLLLESTTVPVLLHTTLAAACEEIDVLEADMRAVERQLGALAAQMAEVTLLQTVPGVGLITATALIALVADIRRFPSGRHFASFLGLTPKEDSSALRRRLGAISKQGDVYLRMLLTHGARSFLWHAKAARQPTALPHWALSVEQRRRHNVATVAVANKLAPNRRGRLDSTAAVRDGPPTTVIGSIVDRLIGRIASSSRDHDAPAAARRMPRFSACALRPPTGPVPVSRHSRPLPHSQNRLSESVRP

SEQ ID NO: 314974 - protein, 315 aa, unidentified
MTSVATIGLDIAKSVFQVHGVDTAGQVVVRQRLARRRVLVFFEKLAPCLVGIEACSGSHYWARELIARGHEVRLMPAQYVKPYVKRGKNDAADAEAICEAVMRPTMRFVPVKTPEQQSVMMLHRVRLMLDRQRTQLSNAIRAHLSEFGIVAPIGRRGLDQLLAIIADEEDTRAPADARLCLRMLAAQLAVVKEQILENDRRVRASARATELGRRLMEVPGVGPLLASALTATISDPAAFKTGRDLAAWIGLVPKQNSSGGKERLGSISKAGNRYLRQMLVVGSMAVIRYAERHGTRRPWLIQLDTSKNVAVLAAN

SEQ ID NO: 314975 - protein, 342 aa, unidentified
MNHYAGIDVSLECSSVCVVDASGKILREARVASEPEALIAWFRQSGFEFERIGLEAGPLSQWLFAGMKAAGLAVELLETRHVRKAFEAMPVKSDRNDARGIAQLMRLGWFRPVHCKSISAQETRSLLTARKLVQSKLLDVENSLRGILRGFGLKVGKTTGQTFAGRIEELVHGHPHLQMIAKALLAVRAVLRTEFAAFEKQTRRMVRSDMQARLLTSVPAVGPIVALTYASAIDDPTRFKSSKQAGAHFGLTPKKHQSGETDYTGRISKIGDASVRTALYEAANVMLTKPLKGCSQLKSWAMRIKKRAGMSKAKVALARRLAVIMHRMLADGTPFNAAAAAA

SEQ ID NO: 314976 - protein, 416 aa, unidentified
MNAVGIDVSSRKSTVAVLRPLGEVVCLPFDVTHDIAGLASLAEKLKAIDGETRVVMEHTGRYYEAVAKALHEAGFFVCAVNPLLIKEYGANSLRRVKTDKADAVKIARYALDNWADLRDFTPMDAIRYDLKTLNRQFQLASKQRTASANNLIALLEQSFPGIRKCFDSPVRSDGTQKWVDFAHSFWHVDCVRKQPFAAFCERYRKWCKRHAYLFKLSNAEEVYALAKRAVVLTPKSKVVKVLVQEAANQLSSISRSVEVYRAEMDRLAAMLPEYPVVMAMYGVGKSYGPQLMAEIGDVRRFERKQALVAFAGIDPMPNQSGDKNVRSNKSSKRGSPYLRKTLFNVIRTYLQCAPQDEPVFQFLNRKRAEGKPFYVYMLAAANKFLRRYYAKLRDYFASLDTLQPVAPIPTILKAAL

SEQ ID NO: 314977 - protein, 325 aa, unidentified
MEKIIIGIDVSKLTLDICIQENGVNRFDNIPNTEKAIKVFFKQFDIKQEILIGMENTGRFNAILYSVLVHFSFTVYVINPLHLKRSMGLVRGKNDKIDSERIAQFLLKNYMDLQLWKPNSKVIEKIKLLNAERKHRVKIRAGLLAQTQDDQFLKPTMDKAVLRLNTKLIDILTKQINEIEDRIYQLICEDEQLYDHYKRIQSIPGVGKVLAFNMLIKTDGFTTINTPRQMACYAGVAPFDFQSGTSIKRRPKVSTMADKELKKLLHLAAMSAIRLENDLAIYYHRKVEQGKNKMAVLNAVRNKIIHRIYALIKNQTIYKNNLVLS

SEQ ID NO: 314978 - protein, 416 aa, unidentified
MKIVRPICCGMDVHKNIIVATIGITNKKTRITEYIQETFSTLNPDLLNLKQWLINHKCFDACMESTGKYWIPVFNILEDEINIYLAHPKYVKAIKGKKTDKKDSKWICDLFKHDLIKFSFIPPKEIRALREISRYRYKLVGMRSSERNRYQNCMTVSNIGIGSVFSDPFGKSAQAIMKEVLESDIIEDEKILKCVHGSCKNKDKILDSIKHCNIETDQRFKMNESMTHMEELQVHIDNCEIEMMKRAAPMFDQFMHITQLPGISTLSAILIISEIGVDMKQFESDKQLTCWAGLAPANNESANKKKSVRISKAGQYLKPLLVQCALGAIKDKEGYFGIKYSRIKKRRGHKKAIIAIARMMLVSIYHMILTGETFNPSDYESFRNPKPPIKQQVLTEESAIEFLKKSGFDVSKLTKP

SEQ ID NO: 314979 - protein, 329 aa, unidentified
MTTNPPQIVFNHIVAFEVSKEKLVVHTLPDDEQWTIDNKPQAVRRLIKAEIKRNRKKQLGQMLVICEATGGYERHVLDGALEMGLSVHRAHGTRVRHFGHYRGLLAKTDPIDAHLIAQYGLKTENIRLYSPPPPDTAALRALHARRTEIQQMLIAETSRLDHAQHKSVLKSLKAHIASLKAALAAIEADIAQLVEGSEMLRKKVALMQTVIGIGPISAMVVLAYLPDIGQLTKGQAARLAGLAPINNDSGKKRGTRHVEAGRTAIRRALYMAASVAMRANPILKAFSDRLRSKGYPFKYVVTAVMRKLIVILNAVLRDGQSWKGAQMAA

SEQ ID NO: 314980 - protein, 339 aa, unidentified
MLIIGCDYHPSMQQIAWVDRETGECGERRLRHRAEAEEFYRELKGKQVRVGIEATGHSRWFERMLAELKVELWIGDPAEIRAKRVRKQRNDRFDAQHILKLMVEGTFPRIWAPTPENRDLRQLVWHRHRLVGMRTRVMNQLQAVAMNEGIRRKKGLWSEKGRQQLESLSLMPWTTRRRQELLQLLEQLDPNIDELSQAIEHEATSIPEVKLLMTHPGVGPITALAFVLVLGTPERFGCGKQVASYLGLIPCEESSSERWRLGHITKQGNKLLRFLLGQSAQSAARCEEQWHRQYAHISMRRNKLIAKVALARKLAVRLYWMWRNGWDYQQLKKFGSYVG

SEQ ID NO: 314981 - protein, 429 aa, unidentified
MENTAARKRKQVPEGYLVIGVDPHKKRHAAVAITQDFTTQAKFKFDNTREGLEMMLDRARVEMLKSGCRGVMFAIETGGHYWRNIAYYLDERGIPFRFINQYTLKRRREGKDINHRKNDYRDSEVAAQLLCTGEFVESVIPQGVYAELRTSNNAYQRLVKERTRITNLVKGLLDALFPEFTQVFKDPGGLTALSVLSTCPIPRVIAGMTEDEFVATIEARHKGRRLMRKKLKALHYSAKTSIGIDAGARSLSYEIAFLVDKLELIRRQIRIMEGTLVRLVDETEEGKYLLSIRGLNYIAVAGLLAELSSFKLYRSAKQMIKMAGSNPTESESAGKKRSRTPMSKQGRPLLRYCAWTSVIPMLRFNPDFRAWAKQRRERPVHANPLSGREVVGAALNRLLRLAFALVKNQTFYQIPKPTAVLERELVAAI

SEQ ID NO: 314982 - protein, 450 aa, unidentified
MREPQEIEDEEHEQTWERVAAIDVAKASGMVCTRVAHPSRPGRRLTKVWEVPATTGAISELAGQLAGLGIQKVTVESTSDYWRPFVYLLQAGGLSVQLVNAREVKNVPGRPKTDRLDAVWLAKLTERGMLRPSFVPPAEIRRLRDYTRLRADLTQERARHDQRLEKLLEDALIKVSSVASKLDGLSVRDMLEALIAGERDPAVLAGLARGKLKAKHGALAEALAGRFDDHHAELARMLGDQIDALGGQIGTLTTRIEELLAAIPAAHGVDADGTTGPGAGSGPDAVVLPAVARLDEVSGIGPGTAQVIIAEIGLDMGVFPTPGQLVSWAKLSPRTLQSGATRRAGKTGKGNPYLKGVLGEAAAAAAKTDTFLGERYRRLVRRRGKLKALVAIARSILVIVWHLLADPTARYHDLGAGYYASRIDKDKKARNHIRQLQALGFAVTLTPAAA

SEQ ID NO: 314983 - protein, 468 aa, unidentified
MSPYSITPGTLIVALDIGKNVHWFGCYRYEGRLVELIPPQKVRSDTVGFAQFTATVDPRLAAGRFPAALFGNEHTGVYHEPWAWLIEEHYQPQRQPGATCPVSYRWLNPLLTKKRQEETSVRQHTSDRTAVAAVAACLADGLGHPAHLLTDRAAQLRELVRSYEQVSDQLRFLGRQLLPQVDRLWPGAIADVKQFRKAHPDLEPPTPIVETHALARDRLAALLLHCPDPYQALALGAAGLIRLFHDHDYRAGPKTAEVILTTLRHSPLPPKAVAAIYATRLQADYRRYVALAAASQDLEAQITALVPQSAARFVDSVPGIGALLAARYLAPIGEARYFTTASQVSALAGYDLITAESGDTKHLGHITKRGSPALRDVLYQIGFHTTSQCPVIGETYLAARTRGLCEKAAVIHAAHKANRLCFTLLREQRLYEPATAEEETRFRQHWQRFQQQLAKQRQRQQANQRLAT

SEQ ID NO: 314984 - protein, 393 aa, unidentified
MHSVGIDIGKRQHVAAICRDGQRTADKAILRFSSDRAGLTALERWLTRQGPVDRVVMESSGHYWMALAAALHQQAIPVAVVNPVSAKNFGKRRLQRVKSDPADARTLAALGMADQPATREPLAGAEAREAARFAMSLVSEQSRIDNRIIRLIDLGFPELEQAYDDPTCTSALAILRLAPTAAAVARKRVATIADANRGPGQRAVGTKKAEQIAALAKETIAPPELAEQIGFEMELLIAQHDLLERQIEAAEARVASLLDGELARRLQTIPGVGPAICATLIAEIGDIHRFSDFDKLVAYVGVHPAEKSSGQKGGPETSWQMAKTGNAYLRAALYRMSIVGITHNPTIKAHYLRKRAQGKSKMNAVGHCMKKSLAIVWGIWHGDHDFQPEPPIA

SEQ ID NO: 314985 - protein, 434 aa, unidentified
MRQVYKRCAGLDVHKKTVVACRVRIDEQGNWEQEVRTFSTMTHELLQLVDWLLAWEVTHVTLESTGEYWKPVYNLLEGNVVVLLVNAQHVKHVPGRKTDVQDAEWLAELLVHGLLKASFIPPKPQRDLRDLTRYRVTLVEERARVVNRVQKVLENANIKLASVATDVLGVSGRRMLEALVAGQTDAATMAELAKGRLRNKLPLLEQALTGVVDAQHRFLIAQHLVHIDFLDEQIATVSDQIVQQIEGMPTLPTLPPPTDASADEAPPPLTWQDAADILDTAPGVDQKAAYQVLAEMGINMSQFPTANHLAAWGGLAPGNRQSGGKRFSTRLADGNRQLRKVMVQCAWAAVRTKDSYLGSLYHRLAARRGKKRAIIAVAHSMLVSFYHMLSNRQPYQDLGADYFNQRSKGVRVDWLLKQLTKLGYSAQIEPITAA

SEQ ID NO: 314986 - protein, 353 aa, unidentified
MKCDKYMGMDVHQAMTVVVVLDGEGKVILETMVPTEAAAIIRLVQSLSAPLHVTFEETTQAEWLWNVIRPFVTEVIVCDPRRNKLLSEGSKADKVDARKLADLLRTGMLRSVYHGHEATRKLKELVRAYEALSIDTQRTMARIKAIYRGRGIHTPGRGVYQAKQREQWLALLTEPGIRQRAAWLYQQLDQLRPLRRTAKETMLAESRTHRAVGLLKTIPQLGPIRAAFIVATVDTPHRFRTKRQFWSYVGLAVVTHMSSEYEMIAGRVVRRRKPVATRGLNHNCNHRLKKVFISAASAGNRYEPYRPYLAALTQNGMRAEMARLTLARKIAAVALIVWKKGEAFDPKKLNLTT

SEQ ID NO: 314987 - protein, 356 aa, unidentified
MPKIKQPDFSGQTIFCGIDVHKKSWRVNVRSEEFELEDYSQDPSEELLLKHLQKRYPGAIFKMAYEAGFSGFGIQRSLKSSGVSCMVVNPADVPLTDKDKKRKSDRIDARKISRHLSNNMLRPIYVPSIKMEHARTLVRQRIRLVSDQTRCKNRIWGFLMFSGLKLEMDKPNEYWSHRFIESLKALPGLTPLLRQALDTALEEYLLIRKLVGNMTKQLRELSTQKSFAPLQKLIQGIPGIGLLNSMVIITELQDMKRFKTLDKLCSYAGIVPDTASSADRTMVKGITHRSNSYLRTAIVESSWVIIRKDPAMLHLYKKYCRKMVANKAIIKISRHLLSRIRYVWTNRVEYEIGLVG

SEQ ID NO: 314988 - protein, 471 aa, unidentified
MSRAKPTTHSLAEGEIRPTEGLPVVNPHAAGADIGAQQIYLCIPGPDQTQIVRSFGTYTADLHAIAHWLVENGIQTIAMESTGVYWIPLFEVLEAHGLHCCLINGNLARRLPARHKSDVLDCQWIQTLHSLGLLTASFRPDADLIALRSLLRHRAQLIEHRSPHVLHMQKALIHMNIRLDQAVSDPTGDTGLRIIRAIVAGERAPHKLAALRHPQCKKSEAEIARALTGTRREEHLFVLKQSLELYDFYTTQIAACDAEIERTYSAIRPDWPDPNPDEHEPLPPNKRGSNSKNLPKDSPIRVRQHLRRITGIDLTAVDGLSLDLAQKIISEMGTDMSRFPTEKHFCSWLKLAPNNQITGGKIIRSSTGKSHNRARQAFLQAAASVARSNCAFGAFYRRLKARVGPAQAQVATAHKIARVVYHLLKYKVEYRQMSAQEYEQQFREREIRHLHRKAARLGFSLAPITAAVSVS

SEQ ID NO: 314989 - protein, 315 aa, unidentified
METNIAQNVGVDICKATLDVYLHPAGIARQFANTAKGIAALIGWLSGHEIARVVFEPTGPYHHGFERRLGDHGLPLAKVNPRQARRFAEVIGAHAKTDAVDAAMLARMGALLEPPSRPIASEALDAMKELHVARHALVKDRTAARNRDHVCRSRLLKRHAAQRLAQIDRQIAAIDAELKARLSRAPDLAARFGVLVSIPGIGDITAIAMLIDMPELGTLDNKQVASLAGLAPIARDSGQHRGKRHIRGGRAQLRQALYTPALVATRFNPDMKAKYNALVAAGKPPKVAITAVMRKLVILANTLLRAGRNWTPKPA

SEQ ID NO: 314990 - protein, 384 aa, unidentified
MTTMTLPQSTASTTTPMTLLLAFELGERTWKLGFTIGLGQRPRIRQVPAGAADRVLEEIARAKRRFKLPDETPVISCYEAGRDGFWLHRYLLAHDVVNHVVDSSSIEVNRRARRAKTDKLDLAGLLNLLARYRLGDPRVWRVVRVPSVADEDARQLHRSWETLQQDRTRLRCRLQGLLTTQGVRLRIGEDFLSQLAAARVWDGTPVPAGLQARLTRVWAQLELLNEQLAALETARAALTVDAATATGHYVQQLPTLRGIGPVGAWVLATEIFGWRQIRNARQLGGLVGLVPAPFQSGETDHDQGITRAGNKHVRRLMVQLAWSWRRYQPTSALTRWYEEKFGRGSRRLRRIGIVALARKLLIALWRYVEHGVIPEGAIVKGPVA

SEQ ID NO: 314991 - protein, 351 aa, unidentified
MMIIGVDYHPSFQTIAFLMEETGECGEQELKHSDGQAEKFYRDLKQRGISVRVGMEATGYSRWFERLLAELGFELWIGDPAEIKAKRVKKLKNDREDARLLRRLMLENNFPRIWVPDPENRDLRQLLWHRHRLVQMRTRIMNQLQALAMNEGYRWKKKLFSEQGRAQLEKLSLAPWASRRRQELLELLDRMNPTIEELTAAVEREVRKRPEALRLMTHPGVGPLTALAFVLIIGTWERFPRGKQIGNYVGMIPSENSSAGKQRLGHISKQGNSLLRFLLVEAAQAAARCNPDWRRRYFHLAMRRHKSIAKVAMGRRLAVRLYWMWRNGCEYSPSLEFGSYAGQLGTGHGVK

SEQ ID NO: 314992 - protein, 438 aa, unidentified
MHPNRLQVGIDFSQKRADFCLLFPDGQPLLSHQAFANSHPGYQKARQMLLDTLHQYAFDGLDVSGEATSYYWLPFFWHLAHDAELTARDLSLFLLNPRQVHWFKKSLPPDDKADSTDPFYIAERTRTRRPSAPWQPQDDWLPLRFYTRLRFHLVQNLTREKNYYLIHLFLLHSTYQGIRPFSNPFGVTSQHVLGDLSQSDSPSLAELAKLPLEELAEQLDQWSSGTLEDPLETARKLQQVAAERFPLDEPLLTPVLRILDHTQEHITFLKQQIQQVEQWIEAEVQAHHPQALFLDTVPGVGLVLAAGIVAEIGDLERFFQTPKWDKKRKRYHSRTLREVEDAVAKLAGLWWPKVASGDFVAEDRHLAKTGNRYLRYYLIQAANGMHHHIPAYARFFNRKFREVNRHKYKRALVLTARKSIGLFVGLLHRKEAYRSEEG

SEQ ID NO: 314993 - protein, 367 aa, unidentified
MKKVSTAAAKASKKISQQKLTVGLDLGDRNSWYCVLDEAGQIRLEQRVRTSAKALQEVFCTMPRSRVALEIGTHSPWISRLLGELGHEVIVANARKVRLIGESRQKDDRLDAQTLARLARMDPELLSPVKHRSAQAQADLMMIRARAGLVRARTGLVNTARGLAKSYGERLRGCNVRNMNPEKAEDLSPKLQRALEPLLSAIEELSEQIGEYNDRIEALAQASYPQVKLLKQIKGVGTLIALTFLLTLEDPHRFRQSRDVGCYLGLQPGRRNSGQSEPQLHISKEGDPYLRTLLVQGAQHILGPFGVDCDLRRWGLKLAERGGRNGKKRAIIATARKLAVLLHHLWVSGEVYEPLHNGCPVRVGVAA

SEQ ID NO: 314994 - protein, 341 aa, unidentified
MNEITRIAIDTSKAVFTLHGVDASGRPILRRNLRRRELLALFEKLPPVEVVLEACGGSHHWARALAAFGHRVRLIPPQYVKPFVKRGKNDDNDAEAMNVAASQPSIGSVPVKSAEQQAAAMLLSVRELLVRQRTQLVNALRGHAAEFGVVAPLGANGVAALQAEIATADEAAVPGAAKQAIALLGGEVDRVEARLAVIDARLMQQHKADPLSRRLATQPGIGPIGALNFALRVDPAQFKSARHFAAWLGVVPREHSTAGKQRLGGISRAGDERLRQLLVLGATAVIRHAKPGRPGASPWLLNLLSRKPRKLAAVALANKMARILWAMMTSGEAYRPHPVAA

SEQ ID NO: 314995 - protein, 410 aa, unidentified
MPVQHAVQVSPLTVVVAIDVGKNEFAMSVTDASRNRLLKPLLGCPMTASSVRDVVAKITGLLPVGAAVKIGIEAAGHYHLSLLAPLVWPCGWELLELNPGHVSEQRKVLGKRTIKTDAIDLEAMTELLLAGRGLPVGHREAVLVELAAWAGHRSRRVQIRTATKNQLLGQLDRTFPGLTRALPDVLATKVGRLVAAEFADPTRLAALGVNRFIRFGATRGLQIRKPLAGKLIAAARDTLPMPDAAVARQVLAADLVLLADLDTQIEAAATELARLLPLSPFRTLSTVPGWGPVRAGNYAAAVGDPGRWPGPKQLYRAAGLNPIQYESAGKRRDFTISREGSVELRRALIDLGLGLWLNDPAAKQRAAGLRARGKKGGVIACAMAHRANRIAFALVRDQTNYDPKEWITHD

SEQ ID NO: 314996 - protein, 410 aa, unidentified
MEAIVERCAGLDVHQATVVACLNIGTVGTKPTKQIRTFGTTLPELEELRDWLTANGCTLVAMESTGIYWVPVHAVLEDHFEIVVGNAQHIKNVPGRKTDVKDCDWISDLARHGLIAKSFVPPRPIRELRDLTRYRSKLVQAATAERNRLLKLLESANIKLSSVASDVFGVSGWAMLQALVEGKQTPAEMAQLAQRRMRRKLAELERALHGRLEEHHRFLLGVQMRRIEAMEADIAEVDKRLRQKLVPYSREMHLLRQIPGVDWVTAAIIIAEIGADMSAFANSAHLASWASMCPGSYESAGKRRGGKTRKGNVHLKTALVLAARAAGKTKGTYLGDKYRRFRTRIGAARAGVAIGHKILVVAYRMLSDGTDYKDLGAGYLDQLNTHRTAGNLVRRLRQMGYDVQLTSKAA

SEQ ID NO: 314997 - protein, 341 aa, unidentified
MHQATIIGIDLAKRTFQAHGTTSDGKVAFRKKLSRSQLLAFLTQQPRCVVAMEACATAHEWGRAARELGHEVRLIPPAYVKPFVKRQKNDAADAEAIAEAASRPTMRFVAVKSEAQQARAMVFRTRDLLIRQRTQLINALRGHLAEHGIVAPQGPANLKLLADAISDMKISLVPIVRDLGLLYLEQIKGLGEKIAALDRTLRRESKSATTACLQTMPGVGPITAVAIEAFAPAMTTFKRGRDFAAWVGLVPIQHSTGGKQRLGRTSKMGQRDIRRLLITGAMTIVRWASRKGAREGSWLARMMASKPRMLVAMALANKMARAVWAMLTKQENYRDPAAALA

SEQ ID NO: 314998 - protein, 323 aa, unidentified
MKPILGIDVSKLKLDLALRRPDGRWRTKVVDNTPEGFAALAAWLTKQEVSTVHACMEATGTYWEACAECLAEGGHTVSVVNPAQIKAFGGARLARTKTDRVDARLIAEFCATHGPQPWQAPTPAIRELRALVARRQALDAMRTQEKNRLAVAREAVREGITAHLEYLDEAIAEVERAIREKIDRDPTLKAQRDLLDSIPGLGEKTIPTLLAYYGGVARFTRAKEAAAFAGLDPRQHESGSSVRGKPRLSKIGHSALRRALYMPAMVAITKTGWGRAFRDRLRAAGKAPMVIIGAMMRKLVHVAFRVLKSGKPFDAALHGVVKG

SEQ ID NO: 314999 - protein, 345 aa, unidentified
MEHFVGLDVSVKETSVCIVDETGKIMREVKVASEPDALLEVLANPAYCLKRIGLEAGPLSQWLFSALAEGGLPMICVETRHMRAALNAQINKTDRNDARGIAQMMRVGLYRPVHVKTQRSQKLRMLLTHRKLLQSKAIAIENDLRATLRNFGLKVGMVGAVKFEARIKELVENLPDLAVLVEPLLIVRRTLREQFGILHRRLLAVVRDDEVSRRLMTVPGVGPVVALTYRATIDVPARFRNSKAVGAVFGLTPAKYQSGELDRTGAISRCGDEMMRVMLYEAAQTMLLVTTKWSWLKAWAMQIARRRGMKKAIVALARRLAVIMHRIWVDGTEFRWTREQATAAA

SEQ ID NO: 315000 - protein, 394 aa, unidentified
MNEQKESAALGRIIGLDLHPDVFSAAALSGRDAATAKPVQQWDRLATAQLETWAKSLLPGDLVVLEASGNSFESCERLKRCGVATIVLESQRAGQIRKTYCANDRSDAVKLARIYLSGLAHPVWQPDAATRERREVLHAYRKAVTTATRTRNRLKSFLSDHGIRLKPGVRLVQASGQKSVRECRAWSALQRVLIEQMLEELQLADARRGQLSAVMAQEVAADPKLLPLVRLLGVRHIIAFAIAAVVGDIARFANPKKLVAYLGLAPTVDQSGNGPRGQQGLVTFGRGDLRALLTQSAQNALNQRSSPLHTWGWKLCLRKAHKNVAIAAIARKLTVSIWYMLRGLFTPLQQIDASLRVKLAKIATAIGVKTIRHLGYKSKVAFIEEKSQWLLNTA

SEQ ID NO: 315001 - protein, 334 aa, unidentified
MQNVTTVGIDLAKNVFSLHAVDGRGMVVLRKTVSRARLVSVVAQLPACVIGLEACSGAHEWARRFAQHGHTVKLMAPKFVAPYRKSGKNDGNDAEAICEAVSRPSMRFVPIKSVEQQAMLTLHRVRLGFVEERTATINRIRGLLAEFGVVLAQRAVEVRRGAAGALGQLPGPAARALNDLLTHVRLLDERIGEYGRDLEHHARTDERAKRIRALSGVGPIGASAIVASVADAHEFNNGRQFAAWLGLTPKQYSTGGKTRLGRITAHGDPYLRTLLIMGARSMLQTALGRTDRLARWALGVRARRGYHRACVAIAAKHARIIWAMFAKNEPLRLA

SEQ ID NO: 315002 - protein, 376 aa, unidentified
MKTQNTNPLVSTSVVPTVPPATVPVVPGGFTLGLDLGDRRHFVCALDAAGTVIQEGFLTNSRPALLQLMEQFPKATVALEAGTHSPWISRFLTEQGATVLVANPRKLHAISRHERKCDQRDAQMLARLARADAALLHPLEHGSAQAQHDLLGLKLRDALVRSRVSLINAVRFTLKSLGHTVRNPSSESFHKTVVKEIPAACQPVVQPVLGVLENLTAQIKSLEKQLVQRSRTEYPVTQRLQQIAGVGPLTALCFVLKIGDPKRFNRARDVGAYLGLCPRRDQSGGTDKQLRITKCGDGLLRRLLVNAAHYVLGPFGPACALREHGERLAGSGSLREKKRAVVAVARKLAVLLLSLWKHGQDYERRSSTMPPVLAPA

SEQ ID NO: 315003 - protein, 300 aa, unidentified
MRFYTQQHPFYCGIDLHARTMYLCILDQAGETLLHRNMTATPEALLKAIAPYRDQIVLAAECMFTWYWLADLCAEQGIPFVLGHALYMKAIHGGKAKNDKIDAHKIAVLLRGGMLPQVYVYPAEMRATRDLLRRRMHLARKRGELLAHVQHTNSQYNLPAIGKKIAYKTNRDGVAERFADPAVQKSIEVDLALITYYDELLRDLELTIVKTAKHHDANTLYLLQTVPGIGKILSLVLLYEIHQIDRFPRVQDFASYCRLVKCAKESAGKRSGTSGTKIGNAHLKWAFSDPSLTVPRYMSF

SEQ ID NO: 315004 - protein, 333 aa, unidentified
MEYIAFDAHKHYTLASVAHADGRLLREERIEHERGALQAFLARCEPGSPVALETVGNWYWIVDAIEAAGCQPKLVHARKAKLMMGQINKTDTLDARGLNLLQRTGTLPTVWIPPGELRDQRELPRTRMVLVRQRTRHKNRIHATLAKYALRCDEVSDLFGVRGRALLRRHLEALPPHTAFATGLLLEQVEHLDRQVRALEERMRRVFQPTPLIRWLMTLPGVGFILAVVIALELGDVRRFPDAERFAAYAGTTPRVHASAGKTRHGPLRPDVNRYLKTFSGSCQAIFLERCRSCCRAIVARWYDSSYGIWRSHRTKMIFSHFAPNARSAWRWE

SEQ ID NO: 315005 - protein, 426 aa, unidentified
MTAREKVGEPEFVAFVGIDWADQKHVWCLQPANSTKREGGELEHKPEVVEAWVSELCQRFGHGAIAVAVEQVKGALVYMLGKYECLHLYPVPSTMSASMRQALYPSGARDDPRDADLLLDLLLQHRDKLRRLTPDNEATRRVQNLVEERRKLVEEKTAQLNRLTGYLKVYFPQMLEWFAKLDTKLACEFLERWPSLEELQAAAPAEVRKFFRQHRGRHPELTEWRLQGIGQAMSAIRDGAVIEAKRMVVQVIARVLRTLLEGIAALDAKITEAAEAHPDFFIFQSFPGAGAALAPRLLAALGSQRDRYASAEEVQKYSGIAPVTERSGKKKWVHFRWACPKFLRQFHEWAGHSIAQSVWARAYYQQQRQRGKDHHAAVRSLAFKWIRIMFRCWQDGAAYDENRYLATLAKRGSLLIPVPAAAATSL

SEQ ID NO: 315006 - protein, 342 aa, unidentified
MQVTTIGLDIAKNVFQVHGIDAAEKVVVRKQLRRRQVLEFFKALPACLVGMEACATAHYWARELTRLGHRVRLMPAKDVKAYVKRNKNDAADAEAICEAARRPTVRFVQIKSTEQQGRLMLHRARDLLMRQRTQVINAMRAHLAELGIVAAQGRDGIKELLKIIASEADARLPVDAHTSLVVLAAELQAMQTLIGSIEKRIMVQHRLSEASKRLKSIPGIGLIGATAIAATVPDPKVFGSGRDFAAWIGLVPREDSTGGKQKLGPISKRGDRYLRRILVVGACAVLRYARHKPEKYPWLTKLLERKPFKVVAVALANKMARIAWALLAKGDTYRVPALAAAT

SEQ ID NO: 315007 - protein, 321 aa, unidentified
MATGELSNVQIKRGKVLEHFANHRPCLIGIEACGGAHHWARELRVLGHEVRLLHAQAVRPFVSGNKTDATDARAIWLAVQQPGTKFVGMKSLAQQATLTLHRQRELLVKMRTMQLNALRGLLYEFGAVFAKGKKALLGEVESALDALRNKLPQMVADSLREQVARIKALSEDIAAIEQRLSLQLRDDLDMRRIAEIPGVGLLTATAAIATMGQASAFRSAREFCAWLGLVPRQWGSGGKVRLQGISKRGDSYLRTLLVHGARAVLTRAKEPGPWLEALRARRPANVVVVAQAAKTARTIWAVTARQQEDQRGYQGVRPQSA

SEQ ID NO: 315008 - protein, 391 aa, unidentified
MVCVGIDVAKDKHDCCILDSDGTIRADCITIPNNMDGFKQLLQTIRDCTKKSDKIKVGLEATGHYSYNILGFLLDNDLAVYVMNPLHTNLYRKSLSLRKTKTDRVDARTIATMLLSDVDLKSYTDTAYHNEELKSLTRYRFDKVRERAKLKQSVSRLVTILFPELEKLVPSLHIASVYALLSEYPGAKQISEIHLTKLTNFLVTASKGRYGKDKAIQIRDAARTSIGSVMPAKSLELKHTIKLIRELTSEIDEIEVSIQQIMDELNPPILSIPGVGIQSAAMILAEIGDFSNFESPDKVLAYAGCSPSTYQSGKLTNCYAHMEKRGSRYLRYALYNATKYVCHWNPVFAEYLAKKRAEGKHYNVALSHATKKLVRLIYALQKSGKAYLTAA

SEQ ID NO: 315009 - protein, 465 aa, unidentified
MRKDTKQKPPKSKQKSQGRQAKLPKHLEHINKMAAGIDVGSKSHFVAVPEGCDEICVREFKSFTADLHELANWLEKCGIETVAMESTGVYWIPLYELLELRGFEVKLVDARHVKNVSGRKTDVLDCQWLQQLHTYGLLSGAFRPNEQVCALRAYLRQRSMLIQEAASHIQHMQKALSQMNVQLHNVISDITGDTGMKIIRAIVGGERDAKLLAKYRNSGCKNPVEIIEKSLEGHYRDEHIFSLKQALALYDFYQAKIKECDIEIEKQLSTFENCLRNEKAEPNVGKRKTRSKCKNTLSFDVTSHLIRISGVDLTAIPGIEASSALKVVSEIGLDLTRWKSSKQFASWLGLCPGNKVSGGKRLGGKSKRTASYAASTLRMAASTLHRSQTALGAFFRRLKNRLGAPKATTAAAHKLAVIIFEMIKNGIEYNETGQDYYEQQYRQRLIKNLSLRAKNLGFELIEAAC

SEQ ID NO: 315010 - protein, 416 aa, unidentified
MNAAGIDVSSRKSTVAVLRPFGEVVRLPFDVAHNTEGLASLAEQLKSLDGETRVVLEHTGRYYEPVAKALHEAGLYVSAVNPLLIKEYGANSLRRVKTDKADAVKIARYALDNWTDLRDYTPMDTIRYDLKTLNRQFQLASKQRTACSNNLIALLEQSFPGIRKCFDSPVRSDGTQKWVDFAHTFWHVDCVRKQSFNAFSERYRKWCKRHGYFFKQSNAEEVYALAKNAVVLVPKSEVTKVLVQEAANQLTSISRSVETYRTEMERLASMLPEYPVVMEMYGVGKSFGPQLMAEIGDVRRFERKQALVAFAGIDPMPNQSGDKNVRSNKASKRGSPYLRKTLFNVMGIYLKCAPLDEPVFQFLDRKRSEGKPFYVYMTAASNKFLRRYYAKVRDYLATLENLPPVDMDSTGLQGNN

SEQ ID NO: 315011 - protein, 401 aa, unidentified
MSKKQEVIIGVDPHKMSVTIEVVNTHERLLGTGRFDTTNAGYAAMQRYVKQWPERLWAVEGANGAGRPLAQRLVAAGERVVDVPAKLAARVRLFDTGHNRKTDALDAHSIAVVAVRTPGLRVVVEDGELEALRMLTDRRDELAHQRVQTVNRLQRLLSELLPGQRKRDLSATQAKAMLTSVRPRDIAGKTRRRMAAEEIADLVALDAKLKKIKAELKAAVLERGSGLMDIYGIGPAGAARVLADVGDVARFADRNRFASWTGTAPLDASWGEQTRHRLSRAGNRRMNHVLHVAAIVQIRHDTEGRAYYRRKLATGKTPMEALRCLKRRLSDVVYRQLVADSNAAITSVDADPGGHCGATLQSSAADSYPLIDTSDQSLPGPAGRTLRQDRDPVKNLVPNTR

SEQ ID NO: 315012 - protein, 410 aa, unidentified
MYKICCGIDVHKTFVVACIASTNDKGITSYESHRFSTYTSGLKTLLQWLIDRNCKDVCMESTGKYWIPVYNILEKGCSIVLAHPKYVKAIRGKKTDKKDAKWIADLFKHDLVAGSFMPPSDIRQLRDLMRYRFKLTCFKSSEKNRLQNCLTVSNIQLGNVVSDTFGKSAQAILDKILENPEDTSFDLEPLVFKSLKKKLPELRDAIDGYITPEQAGKLKVIKAHYENLESRKAELEELILALAAPYQQELAILQTAPGISSNFTAIGIISEIGTNMEAFPSAKHLCSWAGLTPTNNESAGKKKSVRVSKAGCYIKPLLVQCANAVVKSTKHPEMRNRYLRLKKRRGHKKAIIAIARMLLTALYHMLKNGENYNAELYRKSDLPPVDREITVEQAILIARNQGYKIKSATA

SEQ ID NO: 315013 - protein, 321 aa, unidentified
METFVGLDVSLGETSVCILDKDGTRIFEGKVASEPAPIARLIRKRAPGVVRVGLESGPTSVWLTHALTAEGLPVVCLDARHAHAVLSAQINKSDRGDARGLAEMIRVGWFKAVQVKSLNAHERKALLIARHQLVDMRVRIDNQLRGILKTFGLVIGKCGRGQIGQRAQELSKGQPGIDGVVASMVAVRDSLLEQIIVCDRAIRRLAKKDDTARRLMTVPGVGPVVALAYISVIDDSKRFTHARDVGAYLGLTPKRYQSGEVDLAGRISKCGDGFARTCLYEAAGVLLTRVERWSPLKAWAVRLMKRIGEFQSLLRPLTADG

SEQ ID NO: 315014 - protein, 347 aa, unidentified
MVIVGIDPHSRSHTAAAIDEHGRLLDGLEVAAGERGLQRLAAWIAALPKPRLVAVENARGYGLALVRRLLAQDEELVDVPATLTCDGRRHSGQRGKHDRGDALVVARIALRDEPHLPRLDATVLDDDLKLLADAREQLIVEAGRWRNRAHALLRVAAPGYQTTTGALASPGAVRRARAVARRAIGHDPIRGRLAVAALDRLSALEADALALQREIEQLLKLRGCPHLLAIRGVGPIVAAKLLGETRNIARFRSAAAFAAHAGTAPVPASSGRVQRHRLNRGGNRQLNRALYTIAMVQARWDPAARTYLDRKTTEGKTATEARRCLKRHLSNVVYRALLADRLTPRLT

SEQ ID NO: 315015 - protein, 313 aa, unidentified
MYYIGVDVSKKALSVFDGEHDLEFKNTAGLKAFKRYLKKQYTSFDKLGIIFEATGIYSECLQAFCARYQIKAFILNPKQSHNFARSLGRRSKTDTIDARTIYAYQTLIKKEKLQVPVANPEAKRLAGYLTSYQFAQKQRVSLSNHLESIQDKALLRLLKQELKRAQRLEDQLLSEIKAYIQDHPKLQEDFQRLLTISGIGEKLAVTLLALFVHYQGTNRAQVTALVGLDPIEKTSGTSVKGKPKISKNGNRHIRKMLYMPTLCAIKNNQKITIFYQRLIAHHKPKKVAVIACMRKLLLFAHAIYRNQTEYVAI

SEQ ID NO: 315016 - protein, 349 aa, unidentified
MIIIGVDFHPEFQQIALVDTDTGEMREQRLTHREEAERFYRTLAVAGQRVRVGMEASGYGRWFERFLAQLQLELWIGDAAAIQRKRVRKQKTDRQDAQLILKLMLKDDFPRIWVPSWENRDLRQLLWHRHRMVQARSRIMNQLQAVALNEGLRCKKRLWRSKRPQLESFQLAPWASRRRHDLLELLDRLTPTIAELSQAVEQEVEKCPEAQRLATHPGVGPLTALAFVLIIGKAERFQCGKQVASYLGLVPLEDSSGNQRRLGHITKQGSSMLRFLLVEAAQATVRSLPEWRRRYFHLMMRRGRKIAKVAMARRLAVHLYWMMRQGWDYQEWVEFGSHAGQPGNRHGVQ

SEQ ID NO: 315017 - protein, 341 aa, unidentified
MTEVHVVGLDIAKSVFQLHGLDEAGTIVLQKRLTRARLLPFIEKLSPCLVGIEACATSHYWAREIAKFGHEVRLMPAQYVKPYVKRQKNDMADAEAIAEAVTRPTMRFVAPKPPQEQSAMMLHKVRLMLNRQLVMLTNAIRAHMAEFGIAAPVGRIGVDRLLKVIEDGTDERLPAAARQCLQMLVAQFSLVKQQILENDRQVLGLARSTELGRRLMEVPGIGPLVASALIACVPDPSVFRCGRNMAAWMGLVPRQNSSGGKERLGSITKAGNRYLRQMLFTGAMAVIRRAMQSTRRTWLVRLLERRKPKVAAIALANKNARIAWAMMMRGDRYREPMAIAA

SEQ ID NO: 315018 - protein, 428 aa, unidentified
MSGKETMKPELEFVAFVGIDWADQKHVWCLQAAGSTQRELGELEHKAETVEAWVGELCRRFGAGPIAVAVEQVKGALVCMLRKYECLHLFPVPSTMSAAMRKALYPSGAKDDPRDADLLLDLLVQHRDRLRHLQPDNEETRRVQNLVEERRKLVEEKTAQINRLIGYLKIYFPQMLQWFERLDRKLVCDFLERWPSLEELKKVRPAELRKFFRQRQGRHHELTEDRIRGIVEATPAIQDRAVIEAKQAVVQVIAQLLRSLLEGIANLDRKIEEAAGAHPDFFIFESLPGAGAALAPRLLAALGSQRDRYDSADELQKHSGIAPVTETSGKKKWVHFRWACAKFLRQSFHEWAGHTIGHSVWARAYYQQQRERGNDHHAAVRALAFKWIRIVFRCWKDRVAYDENKYLAALARRGSPLNLVLPAATATV

SEQ ID NO: 315019 - protein, 356 aa, unidentified
MKSTTKLDFTGQIIYTGLDVHKKNWSVSIHTKDFEHKTFSQPPDPQVLVSYLKRTFPDATYQCVYEAGYCGFWIHDALCKEGIECIVINPADVPTTNKERKQKRDKVDCRKLARSLKNGDLISIYVPSRANLEDRMLMRTRVKLIENRTRCKNRIKAVLSYYGINIPEEMDTGKWSKRFIQWLRSIDFEQETGRLALDTFLSELAGLEKILKTITDKIKLMSKTDRYADRVRNLKTIPGIGLVIAMTILTEIEDINRFKKIDQLCSFIGLVPNVYASSDTEHIGAMTKRGNNWLKTMIIESAWIAVKKDPSLLLYYQQLTKRMKSSKAIVRVARKLVNRMRYVLKNNQPYIQAISV

SEQ ID NO: 315020 - protein, 342 aa, unidentified
MTHYAGIDVSLEQASVCVVDANGKIVAEGKVASEPAALLAWFRSLGVELARIGLEAGPLSQWLYAGMTAGGLAVELLETRHVHAAFQAMPVKSDRNDARGIAQLMRLGWFRPVHCKSLAAQETRALLTARKLVQSKLHDVEMSVRGILRGFGLKVGKTTACGFAGRVRELVAGHPTLEVVAAALLAVRATMVRELSGLEKRVRTIARSDARARLLMSTPGVGAIVALTYVAAVDDPTRFKSSKGVGAHFGLTPRKYQSGETDITGGISKIGDASVRAALYEAAHVILTRPIKGCTSLKSWAMRLARRAGMKSAKVALARKLAVILHRMWVDGTTFNAAAAAA

SEQ ID NO: 315021 - protein, 314 aa, unidentified
MPQTEFVGIDVSKDYLDVHVLPIETSLQVPNDESGFDELLEFLKPLKVNRVILEATGKLEAAVAAVLYQAGLPVAIVNPRQARDFAKSTGQLAKTDRIDARILAEFGRSVPIELRPIKDEQAQAFEDLLARRRQLVQMIAAEKNRLSRARGRSLTDIRAHIAWMEKRLPRIDDDLQAAIKSSPLWRERDALFQSVPGAGSGLSLSLLINLPEIGSISNRALSKLVGVAPLNNDSGRRRGRSSIWGGRANVRCALYMSALSGIRYNPVLKAYYQKLRTAGKKPKVALVACMRKLLTILNAIARSGVPWQAATIAR

SEQ ID NO: 315022 - protein, 360 aa, unidentified
MREKNQGQKVAVRRKEVFVGIDVHKESWQVTVRMDAEEVFHGRIPSQFPALRKILDRYKGSRIKVAYEAGPCGFGLYDQLREDGVEVLVVAPSLIPVESGNRVKTDKRDSRKLARLLEGNLLKQVHVLSEEERMHRELLRTRHQIVGHRSDVARQIKSKLLFHGISSESAEKQQWTLKYVQWLRGLSLGSQYLKESLEVLIDLYEYLSRQLMRVNRRVAELSRSDKYREKVKLLRTVPGVGLLTGMEVLVELQDMRRFRSSEEIASYLGLTPSEYSSGEKSRQGRITRSGNWRLRSALVESSWILIARDHWMRMRYMRLKARKGAKRAIVAIARRLIIRLRSILLSNVPYRGGNPLVREA

SEQ ID NO: 315023 - protein, 410 aa, unidentified
METVFERVGALDVHKAQVTACVRVPGAAGQRVAQLAEFATTVAGLLALADWLRSYGVTHVAMEATGVYWLPVWHILEEDFELTLCNARHVKNVPGRKTDVSDAQWLCQLMEAGLLRGSFVPPKPQRRLRALTRYRKTQIAERQREANRLHKALEDTGIKLDCVATDILGASGRAMLDALVSGTTDPAVLAELAKGKLRVKIPALREALQGRFEPHHALIVGAILAHLDFLDEQIAQLSAAIEEQLGPTGLAGRELASTITGVAARTAEVMVAEIGTDMSVFPSAGHLASWAGRCPGNDRSAGKRRSGRTRKGSKFLGIALEEAALAAIRAKNTYLAAQYQRLKPRIGHGRALGAIKHSILVAYWHMFKTGETYRDLGGDYFQRRDPVRATKRLVAKLQQLGHSVTLQPVA

SEQ ID NO: 315024 - protein, 387 aa, unidentified
MGVPGASVARISATRIAKFMEWPAPPSRRGSLVGDSNGGTDMKIAVLGIDLGKNVCSVVGLDASGAVVLRRRVRRDTLIDLVAKLPVCIVGMEACCGAHHLARLFTALGHNVRLMSPEYVRPYVKAQKNDDRDAEGIAEAATRPTMRFVEMKTEAQLDMQTLHRSRDRLVGERTALINQLRAILMERGIVAPQGKRKLEQFLVTMMDEHDGAELSARMRMLVADIRAEWRDLDRRIEAFDAEFVRWAKENEDARRLVTIPGVGVTIATALIAAIGKAETFEHGRDLAAWLGLVPRQSTTGGKPRLMGISKRGNKYLRKLLIHGARAALPHVADKDTALGRWAKNLLSRVHQNVAVVALANKLARICWAVLRSGQRFAPQGIGGLASA

SEQ ID NO: 315025 - protein, 422 aa, unidentified
MSYCPVAGIDVSKRFSDMCILSPDNKIFAQEKIYHDETSINRANALLQKAERLFFSKPVIVMESTSHYHLILFQFFSEHGYDVIVVNPLQSNSMKDFSIRKRKTDRVDAFKLAMMYRTKTLRPSQIPQTATRALRQLCRHRAELLNDVSSYKNRLTALLDQTFPGYDKVFSDVGGVTSCAVLARFPTPTILLVEEESELVEVIAAASKSGYGFAKKKAGLLISAAQKAQTLGIHSCADETLIVCTIQMLRTLSESVLQIETAIDNLLAQIKEMRNNVSLLQSIPGIGSHSAALLLGEIGDISLFKKPKQLAAYFGLDPTERQSGSFRGTKNKLSKRGSSYARAALHMGVVNSICKRGKDSAANPVLLSYYEKKCKNKPAKVAQAASMHKLVFIVFAVLRDQKPFELKTPEQHAVEQGFVKAA

SEQ ID NO: 315026 - protein, 325 aa, unidentified
MFVGLDLHKRYSEFAIMDIFGKVLRQGRIENTLEEMTTFSESIPAHSSIAIESSSTWYWAHRLLSGRHKVILSNPVKNKAIASAKVKTDKIDSLMLATLLRGGFVAESYVPSRETMELRELVRYRANLVRQRTRMKNQVHAHLLMNNISIEAGPFTKGFVEEVRKIDDARVQGYLRLIDGLNREIREASVAIRQKAGSNEEANLLMTIPGISFYSALLIVSEIGEISRFEDSSSLVAYAGLAPSTHSSGEKTYHGPIMKSGSRYLRWIAGQCTRVHMRAEPDGTVAIFYARLARKKGDQKAIVAAAAKLLKIVYWVLRERRAYHS

SEQ ID NO: 315027 - protein, 367 aa, unidentified
MTTTPATVTVIGGVDTHKHTHYAAAVDDQGRLLGHQEFPANDAGYQSLLVWLRAHGDLEAIGVESTGSFGATLTRALTNAGECVTEVNRPNRIARRMDGKSDRLDAEQIARAVLGHVSTAIPKTKSGVVEVIRTLRVTRTSAVKARTQAFNTLFGVMIGAPSPLRDELVVLTKRTLVNRCLGLRPETSDLITLAKDPDRLLLAGVKISLRDLARRWKTLDEEVKTLNRQIELLVRSAAPELLELHGVGVEIAGQFLVTTGDNTGRIRNEAAFAKLCGVAPQPASSGRTSGRHRLSRGGDRAANSALYIVTIVRMRHHQPTRDYVERRTAEGLSKREIIRCLKRYIAREVYANLPRPESARPELSEAA

SEQ ID NO: 315028 - protein, 343 aa, unidentified
MQAITTIGLDIAKSVFQVHGVDAAGQVTIRRQLKRRYVLAFFQKLSPCLVGIEACASSHHWSRELKALGHTVRLMPPAYVKPYVKRQKNDATDAEAICEAVTRANMRFVETKTPEQQSGMVLHRARHLFIRQQTAVINAIRAHLAEFGIVAPVGRNGVEELLNVVTDPSDKRVPEIAGACLAALGAQLHRLKEQILEFDRMIRAWHRSNKMSLRLDDCPGVGPVLATALVGSVADPKTFRSGRNFSAWIGLVPKQHSSGGKDRLGGISKQGDRYLRGLFVAGALAVIRYAKIHGTKHRPWLTALLARRPAKIAAIALANKIARMVWAMMARSERYKEPVALAA

SEQ ID NO: 315029 - protein, 449 aa, unidentified
MKKRVSLEVVNPNAAGIDVGSKSHFVAVGQTKNDVKEFGVFNEDLQEICAWLTEHQIETVAMESTGTYWQSLFTVLQEAGFRVILCNGKFTKNIKGKKTDVQDCQWIQKLHTIGLLSGSFLPDQATEQLRTYCRHRSNLIDNAADTTRKMQKYLRLLNLRLDVVVKDITGLTGLKIINAICAGETCPQKLASFRNGNCKKSEEEIAKALHTNGRQDYLFALKHEYFIYQTLQKSIEECDVQIKSMLDEQINSDENKKQLYIDKKVHKRVNKNTPKNIDLNLMAYQYFDGVDLFAIEGVSHATVLSIISEVGLEGFFKFPTGKLMTAWARLVPNNKISGGKVLSHKVPKGSTRLKIALRNAAQAIGQLNGTPLSGFFKRIHCRKGPVAAITATARKLLVIIYSMVTKKQPYRNEHNYEFLDQKRKRKVQEMKKLIHKFNVATEELGLQFQ

SEQ ID NO: 315030 - protein, 388 aa, unidentified
MFFLGIDIGKNTHVASLLDEKAKVIFKAYSFANTLDAAEALLVKLEPYKDSLEIGMEATGHYWLSLYSFLTEHNFIVHVINPIQTDGWRKGIEIRKRKTDVIDSVLIADLIRYGDFLETSLADEDILSLRNLTRFRAYLVNSVSDLKRKAIAVLDQIFPEYASVFSNVFGQTSKELLKSLSLPSDYENLSATKIEEVLSNITHKKKASETISTLSDKASRSFGISFCKDSFAFQLKLIIEQICFIEEQIASVELEIEQLMSKLGTNIKTIPGVGNVIGAVILGEIGDIERFDNPSKLVAYAGLDASISQSGEYEASSGKLSKRGSPYLRKALYMAAQRAEFCDPVFQAYYEKKRNEGKHHLVATNAVARKLCHTIYAILKKDIPYEIQ

SEQ ID NO: 315031 - protein, 473 aa, unidentified
MERSDVPVVAEQPFETPIKQSSRARDWEETVEQPNAAGVDIGAREIFVAVPHDPEGEPVRKFATFAEDLRRLGDWLQRCGVTTVAMESTGVFWIPLYEILEQRGLNPCVVNARHLKNVPGRRTDWHECQWIQFLHSVGLLRAAFRPEDQVCAVRALVRHRQQLVEMVGQHVQHMHKAMTQMNLQLQHVISDITGTTGLAIVDAILAGQRDAKELAALGDPRIKVGAEVIEKSLCGNWRDEHLFTLEQSRKFHRFYQEQIAAWEANIERLLQQFDARVDPQQKPLPVDSKRNRSAAKRRKKLGRTENQFDLRTEAYKLFGVDVTQIPGLETNVVPLFSEIGRDLERWPSASHFVSWLSLCPDNDISGGRILWRGVRKANNRAGQIFRLAAQSLHRSPTPMGEYLRRLKAKLGPAGAITATARKIATLFYTLVTRQVEFDSALWQATDVKRQQRIQARLTRQARRLGYQPVPLAA

SEQ ID NO: 315032 - protein, 447 aa, unidentified
MIKYHVGVDVGKDRHHVSVLDLSQGNYCKAFSFTNDHDGFSELIAVLEKLSPEKSDFLIGVEACSYALNLTYFLLAMGFRLVEVNPFRAGQFRKAQGKKAKTDKIDARTIAAILTLGDHKPLSIPEPILDNLRELTRFRVDLVDERATMIIHLQEALSVLFPEYGKVFRQLDSTGSLALLMAYPGPEHVIAAGEETVGKTLSLASPRRMSRGMARRIIEAAKHTVVVVQKQPALGIKISILAKRISGLQSTIRDLDRQITALYNGLPCKPCGFPVGRAPSLATIVSEVGDIRRYPTLKKFLSHLGWCPQSFQTGNYRMEHPKMSHAGNKYVRRVIWMLSILAVQRVARYREYFQRRVIEGKTKMHIVVAVGRKLLSALYAMQKMAQSMIRIGRRIAVSPRQGLDKTYSNLSAKLCDMACSYRGPEQTDNNLLSCWLWRSGKTRNFLE

SEQ ID NO: 315033 - protein, 330 aa, unidentified
MNCRLRAFSGRPDLVPDGALGLNGERFAVGNDERGISALLKRLEPADMVIIEATGGLEVPVASALATAGIALAVVNPRHVRDFARATGQLAKTDALDAQVLMRFGAAVKPQVRALPDAQAQALEALVNRRRQLVEMLTAEKNRRANSPKVIHKSISEHIHWLEKRLAGFDDELAALVRATPIWRERDELLRSVPGVGPVLATTLLAHLPELGALNRKQIAALAGLAPFNRDRGSLRGSRCIWGGRAQVRRVLYMAVVSGVRSNPVIKNFYAQLRARGKYPKSALTACMRKLLVILNAMLHNNTHWHATALTSSTSALYPLGGTVSEHGCC

SEQ ID NO: 315034 - protein, 381 aa, unidentified
MTNVSATISNKQSIYAALELSKNSWLLAIQVPGRDNPSLHPIKGGDAEGLMAKLDAARQRVAKDAGQTPAVTLCYEAGYDGFWLARFLEQRGITCQVMEPASLQVNRRARRVKTDRIDVESILHTLIAWCRGERHVCSMVVVPSVEEEDLRRCHRERDRLIRERTAHINRIKGLLFGQGIRGINVKSRTKTLKPAELVTGDGRPLPERLGREISREIERLAQVQAQIVEIERERDHPATSCEATERKRHDLLRLKGLGPALSSTLTREVYYRQFSNRRQLASYIGIAPSAYDSGEGHRSQGISKAGNRLARVAMVEAAWLWLRHQPDSALSQWFHDRTQGQKGRTRRIMIVALARKLAIALWRYLETGLIPEGASLKSRGR

SEQ ID NO: 315035 - protein, 380 aa, unidentified
MKNLRYVGLDVHAETISVAVAEQGRNGEVRSLGSIPNRPESVRKLLKKLGSVDQLQACYEAGPTGYVLYWQLAEMGVKCEVIAPTLIPVKAGDRVKTDRMDAKKLARCYRAGELTAVWVPDAAHEALRDLVRARLAAIRDQLRMRNRLSKFLLRHGRRPPSKMSAWTTGYMNWVKKGVHFDQPAQEATLADYLHEVEHVQDRIGRLEKAIDDSIATMPEKMRAVVDALQSLRGIAKISAVTIVAELGEISRFDTPKQLMGYSGAVSSEHSSGERTRRGGITKTGNAHLRRIAVESAWAYRHRPCIGASLKARQKTASQEVRDIAWKAQHRLHQRYIKLMARGKVKQKVVTAVARELLGFIWAIAIETEKKHNSSQKKQAA

SEQ ID NO: 315036 - protein, 338 aa, unidentified
MYQYIGVDVSNQTLQVFDGLRDLTFPNEPKLKEFNLFVREWKKKIKQREASGTELVIIFEPTGPYSSHLREYCSKKELKAHIMNPMQSSYFAKASGNRSKTDPIDARMLYSYHIMLNNKECLVPVLSEHVKRLSSYLKSYQLLIKTETAFQNHYQSTVREGSASKPLRKILEAGIQQIQQEKDQVLKELISYIKADLVLAESYRNLCSIPGVGPLSSINLLILFLKFPTANRNQLTSLAGLDPTVKTSGTSLNKKPRISKRGNSLLRKTLYCAAISGVQCNPDLTKQYELLQERKKPKKVALVAIMRQILLTAHALYMEKRKYEVREDKGFKNPIQNT

SEQ ID NO: 315037 - protein, 438 aa, unidentified
MSNKVIFNLDELFISVGIDVGADFSWMSIALPNQQFVGKPYKILHNSIDSLTTAVSKIKEAEELYSLESRIFLESTGIYHYPLFCYLRDKGFNCSVINPIITKNSTNINIRKVHNDRFDSKKAALVGLKPDLKVSLMPSDLALNCRNLCREYYDLMDNRSAYVNKLQGELCMAFPQYLGIFSKVTINTSLTLLETYTSPSAFLKADKQEIIDIIKSTARFGLTYAQNKYNAIIQAATDANQFGYIIDSNIKRIRLYISFIRKYDEEINSILESLHELVDANEDSDFVKQIHLIETFKGAGFLSAVSIMGEIGDFSAFSKPKQLFAYFGLDPAVKQSGKFEGTKVQMSKRGSAIARRVIHTLTLQSISISRNREAKNPVLREYYLKKCDSKPKLVAMGAVSHKVCNMIFAILRDNKPFKIIAPQEHIKQYNSAKCDIAA

SEQ ID NO: 315038 - protein, 381 aa, unidentified
MQASTVDTPTTGHNGTIFVAIELSQKTWLVTLHSPDRDRMSRHKLEGGAHVGLLELIEKVRSRAAEKLGSVPRVVSCYEAGYDGFWLHRLLEAAGILNFVFDPASIAVEQRSRRTKTDRIDGELLLRTLMAYLRGEPRVVRIVRVPSVTQEDARRASRERDRLVKEQTAHTNRIKALLRLRGMAAGNPRRRDWLSWLARQRDWQGQPLPPQLLAEVTREHARLMLMRDQLAALEEAQAQALAVPAQTAERQDLLQRLKALGPAFTATLTNEVFYKDFRNRREVAAYCGLTPSPWQSGGIDREQGISKAGNPRARLKAIELAWLWLRHQADSGLSRWFHTRTENAGKRARRIAIVALARKLIVALWRYLTTGLVPAGATMKA

SEQ ID NO: 315039 - protein, 420 aa, unidentified
MKAYNVDDFAALIGIDWADKKHDICEHPKNTKQYHYTIIKHKPEALHKWAMELKLRYPDQKIAVVCELKKGPLIYALAKYDHLVLFTVNPSAVANYRKAFTPSGAKNDPTDAFIQVEMIKLHIDKLSVIVPESTSMRALAQLVEYRRNVVQDGVDLSNKITATLKNYYPQALEWFKEKDTLIFCDFISKWPSLTTVKKARKQTLLDFFNRHNSHYETVNNARLLSIKEAVPLTEDEGVIAPNQLLVEVLIAQFKVLLMGIEQLDKAIKQLYKKQQDKAIFDSLPGAGPQLAPRLLVAFGHNRERYTDASQMQKYAGIAPVIESSGKKTWTHWRYSCPTFLRQTFVEWAGFSIRYSFWAKAYYEQQKSKGKPHNSIIRSLAFKWIRIIFRCWKTKTPYNESKYLEALKRRGSPLLKFAINS

SEQ ID NO: 315040 - protein, 418 aa, unidentified
MGKRKNRVCGADVHKDIIVATILNSDDTEFQEKFGTTTIELGRFRDWLIAHNCEQVAFEATGVYWFPVYDALSPTIDTIVANPWMIKGIPRNKSDTLDSKWIAGNCLDGKIKRSRVLPKDCRDLRTLTRARSAYTKTRTQLRNRIHKYLALCGITLSSYISDIFGKSGRHILDGLIESKDIDTILDSIPSGKVKKKRELINASLGKGLDGVSRMLVKDTLELLDHLEEKVNDTSLEILGRLQERAKDLAIVMSVPGIGFVSASIILAEIGDYHDFQTSEQLVKWCGLAPGLNESAGKKSPCGITKQGSKSLRTILVEIAQVVAKMSKNKLSRFFHRLRTRKNYNVAITALARKLISIIFHLLINQELYQENNYTPAKTKPIKKDLLCLSKEEQLKDGVAAIVDAFYHLKKKSSLEGGG

SEQ ID NO: 315041 - protein, 418 aa, unidentified
MAKLKIVYPVCCGMDVHRDFVIACIAATDNQGVTMYETKRFSTYSGGLRDLAAWLSLHKCKDVCMESTGKYWFPVHNVLEHDFHVVVTHPKFVKAIKGKKTDKKDAMWIADLFKHDLVRGSFIPPEPIRQLRDLCRYWQKLAWLTTGEKNRAQNCLTVSNYKLDSVFSNVFGKSASAVISYMLEHPGEQFDVAPFIHHRCKASLTDIQAAVDGLFSTWQAEKLKIIRMHMSDLSLLKDALEKLIMRLAKPYMHCVELLLSVPGISAPMTAIRIIAEIGADMNQFESSKHLCSWAGLTPQNNESAGKKKTTRIGKAGQYIKPLLLQCAIAACNPRSKRYPEVLSKYQQLKKRRGYKKARIAIARRLLTAIYQMLRKDEPYTPYLAPVKDAIPENRFLSPEQALALLRRKGYVIQDTLAS

SEQ ID NO: 315042 - protein, 365 aa, unidentified
MKKISTVATKQSRNFFHPKLTIGLDLGDRSSWYCVLDEQGEVVLEQKLGTTPKAMKEVFGGMPRSRIALETGMHSPWVSRLLGELGHEVIVAHARNVRLIGESRKKDDRLDAQTLARLARIDPQLLSPVKHRSAKAQGDLTVIRARAGLVRARTALVNTARGLAKSYGERLRGCNVRNMNREKAEVLSPELQTALEPLLAGIESLSERIREYNEAIEQLAQESYPQVARLKQVKGVGTLIALTFLLTLEDAHRFRKSRDVGCYLGLQPGRRNSGQSEPQMHISKEGDPYLRTLLVQGAHHILGPFGVDSDLRRWGLKLAERGGKSGKKRAIIAVARKLAVLLHRLWVSGEVYEPLRNQTAMPAAA

SEQ ID NO: 315043 - protein, 385 aa, unidentified
MTNQLQETTLIPRDYDIFGGLDVDKKSMAITFTDHGTMRKSLRLPYSATQLLNYTRKHFAGQRVAFVYEAGPTGFGLHDELTAASHPCLVVSPSMVPTVQRKRVKTNRLDSNKLSDGLRGGQLRGIHVPAAGYRELRHLVQLRDTQVAQLRASKCRIKSLLLYEGISFPAANGKWSAPVLRQLEALPCNATVRFKLDQLIDAMQFHFLAAAKVQKQIRHFCQNDPELRQSISFLTSLPGVGSITATHALARLGDWRQIKDVRQIAGFLGLVSSEHSTGDKENRGEITRIGDSRLRNKLIQCAWTAIRKDPELRAFYRRIYERQPKKVAARKAIVAVARKLTTRMYAVLKERRPFVMRRDSSIAPLTAEETVGPRERLDAAQNEQP

SEQ ID NO: 315044 - protein, 457 aa, unidentified
MAVEGSTGTVDCCRKSTRVRLLTYPCPPRDGRNQTCRVRKVSVTELLHPRCAGIDISKRDAKVCVRIAGSGRRRAAETVTTWSSMTNQVLALRDHLTQERVTCVVLEATSDYWKPFYYLLEDASFEVMLVNPRHVKNLPGRKTDVSDAAWLAQLGAHGLVRASFVPPEPIRHLRDLTRTRSAITRERAREVQRLEKRLEDSGIKLSSVASEIMGVSGRAMLEALIDGQRDPAQLAELAKRRLRSKIPALTEALTGRFTAQHAFLARMHLDLIDKHTEAIDNLTSRIEVVIEPFRGFRELICTIPGISTGVADVVTAETGADMSRFPTPGHLASWAGTCPGSNESAGRVKSTKTRPGNPYLKAALGTAALSASQSKGTYLAARYRRIASRRAPIKAVVAIEHTMLTTIWQMAQTGALYDDPGGDFYTRRHPEKAKRRAIEQLRAMGYHVTLEPLQEPA

SEQ ID NO: 315045 - protein, 335 aa, unidentified
MSEFKTFIGIDVSKKTFDAALLRSSPELTTVHQCFDQNIQGYRAFTQWLKTNDVIMSDDVLICLEHTGIYINGIVNFLLSVTASIWVEMALKIKKRIGLQRGTDDKIASVNIALYAYRYQDEVRLWQPMDSTLQQLKNLVAQRDRIVQCITQLGVPVNELEETGNKQQAAELRKLQSKAVKGLRDSLTAIEKTIDVSIEQDEIIRHKINQASSVKGVGKQTAIALLVYTRGFSVFESGKQLACYCGVVPFNKQSGTSVRYKPGVSPFANKKLKKLLHLCALAALRFDPGLKAYYERKIAEGKNKMSIINAIRNKLVLRIFAVIRDNRNYVDNYAY

SEQ ID NO: 315046 - protein, 322 aa, unidentified
MTPSQDVYTNFIGFDFSKETITVHNQNSGAAQDIENSSSGLRTFVRSLSPTCLAICEPTGGYEALLLTVLAEAGVPTHRADARKVKAFIRSLGIYGKTDAIDARALAAYAQERHKRLSLWAAPEPVRLELQALVARRQELIALQTAEKNRAKAPLANHKAGRYVKASCTRMLKMIALEINKTQRAIEAIMLADDDLRERQAVLMQLKGIGPVVATTLLATMPELGHLTRRQVASLAGLAPHPRQSGKTQQYRRVCGGRREVKRILFMAAMVAALHHPDLKAFYDRLIKNGKKPLVALTAVMRKLIVIINAKIRDHIEQKQMS

SEQ ID NO: 315047 - protein, 346 aa, unidentified
MAEVGLVLGVDTHKDIHVAALLDDMGRRVACAQFPASDRGNSQMLAWAQRHGVLERAGLEGTGAYGYRLARLLVEAGIEVREVNRPDRSRRRMAGKSDPMDAEAAGRAVIAGTAGATPKDREGPVGALRPLMIARRSAVKARTQAVNQIHSLLVCCEDRIRYRLQVRRGRELARGCARLRPHDGTDLALRSLGRRWLHLDEEVGELEEEIAVIVKRVAPGLLARPGVGVLSAAQLLVTAGDNPNRLPNEAAFAALCGASPVEASSGKTRRRRLNRGGDRKANAALWMIAHVRMMRDERTRDFAALRTGRGNSRKEILRILMRYIARELYPIILESLGTDAGAEAVA

SEQ ID NO: 315048 - protein, 335 aa, unidentified
MKVFYLGVDASKKKLDLCLRSNGKDILYDVIPNDLSSIKSWLTRTFEKFFLSEDSLVVCAEHTGQYTYPLVCATKSIGVYLCLEDAAKIKYCHGIPRGKNDKIDACRIAMYAERYNDCLQPYTASELIIQKLKNLSTERSMLVADRAKYQSQLKDQVDYMEHSIYIAKCNRVEGIINTFTDYIAQIDLEIKELINQAPVIAHQMDLLMSVDGVGERIALKMIMETDAFTSFTDPRKFCCHAGVVPFVYVSGSSQRSKNRVSNRADKSIKHLLHMAALSVSQVKNSPLKKYYDRKVEEGKNKMSVLNAVRAKLVTIMFAVIRTDAFFSRNYQNSLA

SEQ ID NO: 315049 - protein, 285 aa, unidentified
MQVITIGFDLAKNVFQVHGVDANDKVMFNKQLRRSQVLPFFAKFAPCLIGMEACASAHYWARELKKLGHDVRLMPAKDVKAYVKRNKNDAVDAAACCEAVRRPTVRTVPVKTPEQQAQLMQHRVRDLLVRQRTQTINALRSHLAELGIVAAQGYDGLKALLSIIADENDARIPEDARASLSALVAQIASCQAEIGAIEKRLLAQHRKNDDSKRLATIPSIGVLGASAIIATVPDASIFKTGRDFAAWIGIVSREDSTGGKQRLGPISKQATDTCGASWSSGRSPS

SEQ ID NO: 315050 - protein, 405 aa, unidentified
MNAVGIDVSKGKSTVTIRRPGDVVLMPPCDIPHTQSAINALIEQIKSLDGETKACMEHTGRYYEPVANWLSDAGIFVSAVNPILIRDFGDDSLRTPKTDKADSKKIARYALDRWAKLKQYGSMDKTRNQLKTMNRQFGFYMDQKTAMKNNLISLLDQTYPGANDFFDSPARSDGSQKWVDFVYTYWHVDCVRSKSLQAFTEHYQKWCKRNGYNFSASKAEKIYQSSSDLIAVFPKDDSTKTLIRQAVTVLNTTSQTVEALRIKMDQTAATLPEYPVVMAMNGVGPSLGPQLMAEIGDITRFTHREALTAFAGVDPGKNDSGKHNQKSVRTSKKGSPSLRKTLFQIMDGLIKRSPVDDPVYAFMDKKRSEGKPYYVYMTAGANKFLRIYYGRVREYLASLEESKES

SEQ ID NO: 315051 - protein, 338 aa, unidentified
MFIIGIDPHKGSHTAAVLDDHETLVGELRVDADRRQRDRLLAFAAPYAPRTWAIEAAGGLGALLAQQLVEVGETVLDVPPALSARARLLDAGQTDKTDPHDARSAAVVALRHASLQQVRPVDHTAVLRLLADRRHDLIGLRTRTVCRLHALVCLLIPGGISQRVSADRAAKVLRNIRPTEAVALERKHMALELLADLRRLDQQLAAIGERIITAVDASGTTVTDVYGVGPIMAATILGHTGHISRFATAGHYARYNATAPIAASSGPKVRHRLNPRGNRHLNHALHIAAVTQIGHDTPGRVFFEKKLAEGKTRKEARRALKRRISDAVYRQLLADARR

SEQ ID NO: 315052 - protein, 409 aa, unidentified
MDVVISRCAGLDVHQATVVATVRVASPTGGRDVVTATFGTMTPDLIALREWLQAYGVTHVALESTGVYWKPVYYVLEDGFTLLLINMQELKRVPGRKTDVKDSEWLAQLLECGLLRASFVPPPPIRELRDLTRYRVQQVRDRAQEVNRLCKVLEDAGVKLSTVATNVIGVSGRAMLQALVEGTTDPAVLADLARGKLRKKLPDLRRALTGRFRPHHAFLLEQVLAKIDFLDEALDRLMAEIEARLGPFASMLAAVDTIPGINRVGALSLLAETGGDMTRFATAAHLCSWGAMCPGQNESAGKRHSGKTRKGNRYLRAALIQAALAASRAKGTALQAQYLRIRRHRGHKKAVVAVGHQILEIAYYLMRDGGSYHELGPSYFDQRNKERTIRRHLKQLEALGVHVTIQEAA

SEQ ID NO: 315053 - protein, 337 aa, unidentified
MYYVGLDAHKQYTTIAVLDSRSGNMKLHKRVANTAEAFAAALAGLDGPLHGIVESGRSTWALHDRVCHLFTSLRVCDALELKHLRRPRGATTDPHVARDLAEILASGRAPDPLWVPDADTRINRTLTRGTIRLSQAMNRTINSIRAFCANAGQECPFTSLHGPGAKAWLAEVELPAEIRAMVDLYLANLTQLEALHKQAMKHIRQRAAADPRAQRLMTIPGVGPFTALCILAELGDLHRFTSRRAVVAYAGLGPQVHQSGQVNRTGPLPRTGDRWLRFALVLAAQHIANSKKLDSPLRRHGWQVNRRHGANPAKIAIARKLVLLAYHLLVHEEDYAA

SEQ ID NO: 315054 - protein, 416 aa, unidentified
MSTTDPLASPVDPCGFTYVVGIDVGSEHLLYTICQPDKRAVVKPSQINNDRVGFGQLDQALHALGSEPSRILIGLEATSRYNENLYQFLAEQGSTLCLLHPRQTHQFAQQRGLRAKTDRLDASTIARLLLSGEARVGYVPDELIASYRELERLHSQLTAESARYQNEIHALLTVLFPEFTQVFADPCGATALGVLKRYPGAAAIATAGVEALTATLRELARRRYGRPTAVELVRLAERSAASGVATSARALSLKVLCDQLEHTLVNLAHREQELDRVLGGDEGASRLSSVPEFGRQTLAVLRAELGDVTRFSRIDQAVAYVGLDLEVRQSGKWKGQVKLSKRGSGRVRRVLSMAALRSLTLPDSPFAAYYHRLVARGLKGRKALMAVMRKMLLVACHLLRSNESYDPAKVCAVTGP

SEQ ID NO: 315055 - protein, 343 aa, unidentified
MQMITTIGLDIAKSVFQVHGVDAAGQVVVRRQLKRRYVLAFFQRLPPCLIGIEACASSHYWSRELRALGHTVRLMPPAYVKPYVKRQKNDATDAEAICEAVTRANMRFVPTKTPEQQSCLMLHRTRHLFIRQQTAVINAIRAHLAEFGIVAPVGRKGVTELLHVVADPSDGRVPEVARACLAALGTQLLGLKEQIVEFDRLIMAWSRSNETSKRLHYIPGVGPLLATALAASVADPQTFRSGRNFSAWIGLVPKQHSSGGKDRLGSISKQGDRYLRSLFVAGALSVIRYAKIHGTKHRPWLTALLARRPTKVAAIALANKLARMAWAMMARGERYRNPVALAA

SEQ ID NO: 315056 - protein, 428 aa, unidentified
MIATVPVTPRCTFVAIDVAKSVHEVLIESPSGRRHRWRVGNCQADFVVLRDRLRAFATPVCIGFEATGNYHRPLAYYLIQCGFELRLIASLAVARTRDALYNSWDKNDPKDTQVVLHLLKTGVSQRYHDPLIHRTNDLQELAQTHHQISLRKVQVQHSIMTHYLPLYFPEAERYYTNSRAQWFTQVLHRFPCPAAITRYSPATFEQEAWTLVGRKVNKRGFLADLYATASQSIGLAVTEDSQAIQMFRVMLAEHQHLCAIRAMIEHQADHVLQSHPDYQRLRTLPGVGPILALTILAEAGDLRRFPHYRQFLKFCGFDLSTQQSGQFRGMSRLSKHGNARLRYAFWMAANGAVRMRQNTFREKYARYIKADPQNPDRKRKALCAVAAKVARVAHGLIKTDADYRPYFEALPPSGALRSHGPSRQVLTS

SEQ ID NO: 315057 - protein, 353 aa, unidentified
MQFPQLRIRGAIQMQTTTIGLDLAKNIFQVHGVTADGTTLFNRPVRRAQLLKFFEKQPPCLVGMEACATSHYWARELTKLGHEVRLMAPSYVKPYVKRGKSDAADAEAICEAVTRPTMRTVPIKSPEQQAVLCQHRARELLIGQRTQLSNIIRGLVGEFGYTLRKGLSYIRTFAEELNDGRGPDLPDVAADVIASLCEQLLTLHRRILALEKKIFQAARRDQRVKLLETIPGIGPVSASAIIATVGTPDNFKSGRDFAAWIGLTPLNKSSGGRERLGKITRMGDQYLRKLLVTGMTSRVRAAKAHPERADRWVANLLERKPTRLVTVAMANKTARIVWAVLTRNEPYRNQSAT

SEQ ID NO: 315058 - protein, 414 aa, unidentified
MEILHPRCAGLDVHRDSVVACARVVALGRVERSVETFGTTTSELERLARWLAGHGVTHVAMEATGVYWKPVWAVLAEAFELVLANAMHVRNVPGRKTDVNDATWLADLLAHGLVRASFVPPKAVQALRDLTRTRKQLTREKASHVARIDKLLQAANLKLGSVLSDIMGASGRAILDALAEGESDPERLADRVRTRIRASRTRLIEALRGHLSDHQRLLLRIHLGQADAIDAAIAEIDAELGDRLEPFRDATTRLATIPGVSTLSAAVIVAEVGTDMGRFPTAAHLISWAGLCPRSDESAGKRRSTKLRKGAPWLKTLLVQTAWCATRAKGTYLRALFGRLKARRGPRKAIVAVAAAILTAVYWMLTRGVTYADLGADHFDRTERTRLAARLARKLGELGFDVTLTPKDAAMVSS

SEQ ID NO: 315059 - protein, 407 aa, unidentified
MRLFVGDDWAEDHHDVELMDEQGRVLARKRLPEGVAGMARLHELIGEQLGEDADDAEVIIGTETDRGPWVAALVAAGYTVYGVNPLPASRFRERHGVSGAKSDTGDAHMLTDMVRTDSHQLRAVAGDSPGTGAVKVVARTHKTLIWERTRQVQRLRHQLREYFPAALGAFEDLDAPDALELLARAPDPARAAKLTRAQISAALKRARRRDIPGKTTVIMAALRGAQLGQPPAITAAYAATVRSLIAVITTLSEQVKILQRQVAAHFGQHPDAEIYLSQPGLGPVVGARVLGEFGDDPHRYASGKARKDYAGTSPITRASGKKKMVMARFVRNDRLIDALMAQALSALGSSPGARAFYDAQRAAGVEHNAALRKLANRLVGILHGCLKTRTLYDESTAWSHRENKRAA

SEQ ID NO: 315060 - protein, 407 aa, unidentified
MAAECDKTGRSFAIQYLNRFTSGRRRHVSQSVENDSTLYVGLDVHKDSITVAYALGTGEVELLGKIGTTKTDIDRLCKRLQSKARYIRIVYEAGPCGYGLYRQLLAKGIDCMVCAPSLIPKKPGDRIKTDRRDAIKLVRSLRAGDLSAVYVPSVEDEAFRDLARAWVSAKDDLKRARQRLKAFLLLHGVRYAGSANWGAAHRRWLSAYAFDSVWQQLAFEEYRRTIEDRLAQCDRLEAALREAVVNWRFYPAVLGLQTMRGVQFTTAVGMLAELGDLSRFAHPRQLMAWLGVTPSEHSSGDKRRQGSITKNGNSYARKLLVEAAWSYQHPARVSPEIQRRHEGIPKPIVDRAWDAQMRLCRRYRKLVARGKQKNIAVVAVARELAGFIWDISQLAMSLSERPEVHMA

SEQ ID NO: 315061 - protein, 341 aa, unidentified
MRMIGCDLHAAQQTIAMLNRETGEIVERTLPHEGTTVRDFYAGLPPPIVVGIEATGSMGWFLRLMEELGVTCHVGDPAKICKVETRRQKHDRRDAALLLRLLTENRFPAIWIPFELRDLRALLRHRDQWVRMRARVKNALQGLALAHGVRRGAGLWSRDGQATLASLPLAPHASHRRSALQTLNDHLTTHIDQLDQRVSEQARERPQARRLMTHPGVGPVTALATEVFLGDPSRFVDAKALASYVGMIPSEYSSGDRQRLGKLTKQGNPFLRYLWCEAAIHAVRRDPTLGRFYRRKLQQKGLGKARVAAARKLGIRLWILLRDQIDYEEFCRRAPSRAAAR

SEQ ID NO: 315062 - protein, 439 aa, unidentified
MRLFVGDDWAEDHHDVEVMDEAGKVLAKRRLPEGVAGIAQLHELIGRHLGEDADEAEVIVGIETDRGPWVTALVTAGYRVFPVNPLQASRYRERLGVSGAKSDAGDAHMLADMVRTDSHQLRAAAGDSAAAEGLKVLARTHKTLIWERTRAVQRLRHQLREYYPAALEAYDDLDAPDTLELLGKAPDPARAAKLTRAQVSAALKRARRRNITDKATAILAALRSPQLGQPAAVTAAYAATVRSLIAVITVLNEQVKILQRQVEENFGRHPDAEIYQSQPGMGAVLGARVLAEFGDAPHRYADGKARRNYAATSPITRASGKEEGRRRPVHPQRPSGRRAQRPGIHGPEGIARRPRPLRRAPRPRHRAQRRPETARQQARRHPARVPENPHPLRRGHRLVPPAKPPSVFRSGLTLKLLGCLSARGRRGGGPGAPTAGAPT

SEQ ID NO: 315063 - protein, 356 aa, unidentified
MAAPERSSSPRDESVRIGGLGIDVHQDFYVVVEQVGGSNPKPPQRFPKAAFLHWAARLKQKSGAQVHAVYEACGFGFSLQRKLSALSINCYVVCPQKLDEQNKRVKTDGLDAKALCLKLDRFVQGNRAALAIVRVPSEEEEQARAIHRQREQLVKARKQLEAQGRSLMVNHGLEPVQNWWKPRTFAVLQVSDWMKELLQNSQSILLGLQEKIAALTVQLQSAAAPNQPRGLGKMTSVIIDREIGDWHRFRNRRQIASYTGLCPGEYSSGNTRLQSCVTKHGNPRLRAALVELAWRLVRFQPDYHPVRKWRQILAKGALTTGAARKKAIVAVARQLAVDLWRIKTGRLRAEELGLIN

SEQ ID NO: 315064 - protein, 368 aa, unidentified
MNNYTLEAARTAGAKELKNQKAAKAKRIVIGTDARSRSYQAARKIDNGPIGAVAKFRSQEELLLYVEKQKEQAEEVVVVYEAGPLGYVLYRALKARGLRCYVCAPDSREQKRKRRKNNTIDTRTLTSNLFNYLHGNERALQLVRVPTEEQEQARWQSRQHDQLVEERKRLGAKGNALLLSRGFGSWKNWWRPKAFSRLSQLVPGWLLELLETWVDLLRKLDEKIRRAKVALAKRCSGLRPKGVGAPSLVQLQSEVLDWGRYSNRRKIGCLAGMVPSEWSTGDTQRRGSITKVGVGAIRRIITEMVWRIILFQPQYKAVQKWQEVLRGSNRGLKKKAVVAIGRQLMVDLWRLQTGRISAQELNLVMIGG

SEQ ID NO: 315065 - protein, 372 aa, unidentified
MASIIYVGMDVHTTNFTFCCYTVDSDRGFAVAQTEPDYRQVIKYMERVQKQRGEECKFVCGYEAGCLGYSLYHQLTRCGVDCVILAPSTMHQEKGKRIKTDRRDAENIARCLAFSLYSPVYVSTTEDDAVKEYIRMRDDIKADLKRVKQQIIAFTTRHGFAFDGKSYWTQKHLKWLETLVFEHPLYKETLQEYLILYYMLDEKVAVYDTRIEEMSHQEHYEENVQKLCCFRGVAAHTALSLLVEVGDFQRFRSAKHFAAYLGLVPGEHSSSDKQIRTSITKAGNTHLRRLLVEAAQSYNRGAIGKKSAALKARQGGNPAEVIAYADKANERMQRKYYRIAFKSRHNIAKTAIARELACFVWGMMTGNISNAA

SEQ ID NO: 315066 - protein, 357 aa, unidentified
MTTYYIGADVHSNSTELAIERNKKIMARHKVPTTIAAISGVLDSLRGQKHLAFEEGPMAGWLYRNLSNKVDTLTICDPRRNKLIDSDGDKDDKIDAAKLACLLRGGYVRPVYHSDNDHRMELKHWVSLYQDRVRDAVRNINKLRARCQMQGISIPRAVIRDPSERSHWLSSIKHPVLAKQLNLLWIGYDATVQQVTIAKRQLSTLGKKYDIIKLWGKLNGIGLIRATTLFAYLDTPWRFKKKNKLWKYCGVGLVRTASGTDKKGRPKPARLQLPWAVNRALKNAVLGAATSAINQKDNLFRSYYERMVADGIMPGNARHAVARKLLTAMWAMFKTNSRFDESLCREPDIEKVTVLSR

SEQ ID NO: 315067 - protein, 402 aa, unidentified
MNCVGIDVSKGKSMIAVMRPFGEVVVSPFEVCHTVSELSELARLLKSLDGETRVVMEATGNYHAPVAWLLHDAGLYVSVVNAMLVHDYGNNSLRRAKTDKKDAVKLANYGLDHWLTLPRYVPDEDTRLMLKTCYRQYQQYSKVQTMLKNNLISLLDAVFPEVNRLFNSSPRADGSEKWVDFVSTFWHCQCVSTLSLKSFSARYLKWCRKHGYYFSQEKAFEIHSKAQSCIGVMPRNETTKLLVQQAIAQLKATSAALAALKQEMQSLAASLPEYPVVMEMFGVGPALGPQLMAEIGDVRRFHSKKALVAFAGIDAPPYQSGQMDVRSRSISKRGSASLRRTLFLVMGVLLQCAPMDEPVYQFMNKKRSEGKPYRVYMMASANKFLRIYYASVKAYLDSLEHD

SEQ ID NO: 315068 - protein, 378 aa, unidentified
MKNHTIKYIGLDVHKDTIVIAIADEGRQEEVRNYGTIPHTMNAVDKFLRKQISQGAELRCVYEAGPTGYGLYHYLTNNGVDCIVTAPSMIPKKSGERIKNDRRDAQNLARLHRAGELKAIYVPDPEDEAMRDLVRARDDSRMAARKAKQRLLSYLLRHGMRYSGKSNWSRAHYNWLADIKMDHPAQQIALQEYINAVEESNERASRLTREITRLVKGWRMEPVVSAIQALRGVSLLTAATVIAEIGPLARFAKPSELMSYLGLVPSEHSSGPSIKRGGITKAGNGFARRALVEAAWTYRFPARVTRHLRKRSEHLPNSVRKIAWKAQLRLCERFKRLRVKGKPTQVVTTAIARELIAFIWAISNEVSLADTVQTGLDK

SEQ ID NO: 315069 - protein, 346 aa, unidentified
MDQIIRIGMDTSKHIFQLHGVDAAERPVLRKRLGRKQMVAFFARLAPTVIGIEACGAAHYWARVLGEFGHEVKLIAPQHVKPYVKRNKNDSRDAEGLCEATGRPTMRFVPVKTAEQQAALMLAGLREQMVARRTQLSNAIRGYAAEFGIGAAKGLDKIEPLLAQIAQDEGVPALARVSFAVQGRQYAQLQVELKAIEARLRAWHRANADSRRLAQIPGVGPIGATALVMKTPDPRAFPSGRQFAAWLGLTPKDHSTAGKTRLGKITRAGDERLRSVLVAGATAVIQQAKHGRGHPSPWLIALLKRKPPKLAAVALANKIARIAWKLMVTGESYDGARMLGASALAA

SEQ ID NO: 315070 - protein, 368 aa, unidentified
MWVGDQYLNHQGALEMAKQSIQREVILGVDTHLDIHVGVVIDRIGKMLDVLSVETNDAGYQELFKWASSFGKLSRAGVEGTGTYGAGIARFLSENEVEVLEVNRPDRSMRRFRGKSDPTDAESAARSVLAGNARAIPKLQSGAAEAMRIASVARRSAVKARTQTINQLRSLLVSAPENIRARLWKSNPGQCVKSCLHLRTLGKTTSLKTLATTLRLLAKRWLYLTVELKDLDGTLEDLTSKSAKRLRRQFGVGPQTAATLLSVAGDNPERLHSEAALAALCGVNPLEASSGKTVRHRLNRGGNRAANNALWTIAMVRMRSDPRTRIYVARRTAEGKSTKEIQRCLKRYIIRELYPLILADLDDAAAAA

SEQ ID NO: 315071 - protein, 372 aa, unidentified
MLDTTTFVGLDVHARSIKAVSLDVMTGEVRCATFGYDAGAVAEWVRSVDPKARCVYESGVTGFDLQKRLSGLGVDCVVGAVSKMIKPSADRRRKNDRNDAEFLARMLSVGNVVEVWVPDDECEAARDLTRALEDARDDLSRSKQRLSKFLLRHGLVFDERTPTGRRKGNWTRAHWSWIESIRFAEGADNDVLAYYVDAVRRAAEEKARLEGLVEAEARKPRWRRRVDSLRCLKGVDTATAADLVFEAGEFSRFRNARSFAAWVGLTPSEHSSGESDRRGAITKAGNKHLRKALVEAAWHYLTCSGRPKDLAKGQAPDRVARRHAAKGVRRLVERREALLARGVHGNKANVATARELACWVWEIGCRSEGTVC

SEQ ID NO: 315072 - protein, 433 aa, unidentified
MQEAEDEPLFAERAAGIDIAKTGIEVTIRVPSDTRRGGRQQETRSFRTVRKDLLALADWLRCWQVAKVGMESTGDYWKPVYFLLEREGLDCVLYHAAQVKALPGRPKTDKADSVWLAKITERGSLPGSFVPPEEIRRLRTHTRYRRHLTQARTAEKARVEKLLEDAHLKLSSVISDIHGVSGRAMLEAIAAGQRDPKALAQLARGTMRGKIARLEEALDCSFLTEEHAAVLAMMLATIDYHTAQIEELTAKIAVLCQPYEHQIAQLDAVPGTGVITAQDIIAEIGADMTVFPTAAHLVSWAKWCPQVAQSGGKRKGAGASGRGNRYVGAALGEAAISAARTQTFPGAKYRRLVKRMPKKKALVATGNSLLAIYHALLSDPEAAYTDLGTDYYDRRASIRRQARNHLRGLERLGYKVTIEPIDPATGELEAAAS

SEQ ID NO: 315073 - protein, 415 aa, unidentified
MSQHYKQTYIYVGMDLHKAQHTAVIINCWNERLGEIQIENKPSAFDELMKFVKKHTPKGLTPVYGLEDTGGNGRSIAVHLVENKQIVKEVNSALSYSERMSNATTQKSDSWDAYCIAKVLLARLDELPDANPQDIYWTLGQVVARRNSIVKHAAMLKNQLHQQLSYHYPSYKKFFCDIDGKAALAFWEKYPAPHHLSSVGAEELAESLRKASHNTCSTRKAAAILELVNEDGATKRNLQEQRDFLVVNMVHDMRRSRELIKEIEEQLRHLLAMTDYKLESMDGISTVTAAELIAEIGDINRFANADKLACFAGIAPKFFGSGGKGKHEASGQGNRVLNSIFHNLAVQQIQVAKGSNKRQRNPLMYEFYQRKLSEGKTKKQALICVMRRLVNIIYSMMKNKSEYRAASPLTERQAS

SEQ ID NO: 315074 - protein, 454 aa, unidentified
MAQGSGLTRGDRNRNRRIAALRGVVRRDRAVLAVDLGEDKQVAALVDHEGRVLARKMVKVKAHQLGGLLEWAAGQAARAGFAGLVVACEPTGHRWKALMGLADGAGHGFCCVQSLAVARAREGDDYTRDKTDHRDAYLIGRLVIRLDCYLPERADEAWARLRHLGARRSGLVADVVSGRQQIGDLLACAWPAALSTAARPLESTTWLAALGVVTDRCCGDPARLRKMGYARFVAAVRRELPRWGAKNVYHKIVRGLWEALADPAGVRAQRRGALERVHLLMADWRSLLARLADVEGRMCAVLGELGLTELVTSIDGLSAVGAAVILAETGDLCRFASARSVVKHAGLNPAENTSATLAGRTRISRRGRPGLRTAAWRAAWAGMGHNRVLRARYEHLTGRAGGNQLAGGQARAACAAALLRWLYAVVTRRQAWDARIAAGTIPARGGTVTTPAAA

SEQ ID NO: 315075 - protein, 422 aa, unidentified
MMNISNTFPLHPKMTRTYCGIDSHKDSHTIVILNCFHEKLGEITIGSAPSEFSKFLKRAKKYLLPNTTWAFGFEDCSAFGRSFVKFLVEKGYCVKHVEASKVATERGQVLHKTDSFDAECACRVLINQFDKLPDANPQDKYWVITNLVTRRNALVKINVMVKNSLHRAIADHYPHYKNFFSCVTRDSALAFYEAYPSPHHLDNVESHELAEFLHSASKGRLSSTKAEIILKHVQRDNVPKLEYQQAQDFTVKSLVRQVRNNLLELSAVDDEIEKLLQEFDYPLTSIKGIDNLTCAKLIAEIGDIHRFKNAKQLAKYSGVAPVTYASGMTNLQRANARGNRKLNEIFFKIALVNITPIGKNNVLLNPICYEYFQKKLSEGKTKNQAIKSVQRRLVNIVFNTMKHNRPYIKPDVAYLSTDLVTA

SEQ ID NO: 315076 - protein, 338 aa, unidentified
MLQLKTPFPPDVVCVGIDVAKSRFDVQVDNARRSFAVPNTPAGRGRLIGRLRAVPAPLARIAIESSGGYERALLFDLFDAGLPAAHVNPRVVRDYAKGFNQQAMTDSIDARVLACYARERQPRLWSAGDKLRHMLQDLNRCRRQLIEQITALKNQAETAFHPTARKVLAAAIVALEQQLDVIDQDVQAEIDKLPQMKRRQQALLSVAGVGPITSRTLVIELPELGQLDRRRLAALVGVAPFNDQSGDVDGPRVIRGGRPHVRGALYMATVTGIRCNPVLSAHYHHLTEHAGKPPKVALVACMRKLLAHLNVKLAQLGDESDKPQASANLTPGDGGEKE

SEQ ID NO: 315077 - protein, 370 aa, unidentified
MGPAVEPQLREAPVMNEGSCVGLDVHARSVVAGVIDMGSGEVRSLRVPPGPEATVAWLKTLPAPVRVVYEAGPTGYGLARGCAEAGIGCVVAAPSKIRPAADRVKTDRRDAERLARLLRLGEITPVRVPGPEEEAARDLVRAREDARGDLMRARHRLSKLLLRHGVVYEATAWTRAHDGWLRRNRFGAGPLAIVFDECYARMLDAKTRRDSLDAAIAELAASEPYVDVVERLVCLRGVSTLTAFALTVELGDWNRFRPESLGAFLGLTPSENSSGERRRQGGITKAGNSHARRLLIEAAWHQRSAPRLSVTLERRRTGKSLAVRAQADRSARRLHGRWGALEARGKPRLIVVVAVARELAGHCWALATME

SEQ ID NO: 315078 - protein, 403 aa, unidentified
MFYLGIDVSKKTSSCLLLNSEGRKGKAFTFENSPEAFQNLVQWLEQHSIPKQDLLIGFEATGNFWENLYAYLKEKGFAVVLLNPFHVKRYREALAKKAKTDHIDALVIAQFLRTGEYVQSQVAEETIQSLREITRLRYELLKEKKNYQRQVCSMLAVVFPEYDQTVLKNPFTICALAVLQRFPTAKDLAQAKPKQIEKIIRSIPGNNFGPKEIDTLISAAQHSMYSGRAKEARAISLRILLTHIAHLVHSIHELEQEIEKMLSPQGLDDTFPGENLLTIPGVGQNTVAAVLSYLGADGANFSSSTRAVGYVGYYPKIYQSGESKRDNTISKRGPKMLRWALYMAAVASLKHNPEMKTLYHRKRSQGKTKKQAIICVAKKLLQIMLAMLKSGEPYKPQMVFVQS

SEQ ID NO: 315079 - protein, 345 aa, unidentified
MATMPQTLGGVTVGVDTHGKIHVGAVADPLGRILGTIEVTTDERGFRQLENYAKGFGTIERFGVEGTGAYGATLCRWLTNRGHEVLEVDRPDRKMRRLRGKSDPIDACAAAQAVLSGRASGVPKARDGAVEAIRVLRMARGSAVRGRTQTMNQMHALVTSAVDPLRTQLRSCSPAKLVDRCVGMRPGKLDSPAAATKFALRELARRHRALDEEVERFDEELSRLVAKQAPRLVALVGVGTDVAGALLVTAGDNPDRLRSEASFAHLCGVSPIPASSGRIHRHRLNRGGDRSANQALWRIVMVRMSWDERTRAYAARRTSEGLSKREIIRCLKRYVAREVYEVLVA

SEQ ID NO: 315080 - protein, 329 aa, unidentified
MIIIGCDFHPGFQQIAFVDTETGDCGEQRLEHCEGAQKFYHDLATQGKKVRVGMEASGHARWFEQLLEGLNIELWVGDAAVIRAKRGRKPKTDRQDALHILNLLLTGDFPQIWVASWENRDLRQLLWHRHRMVQARTRVMNQLQAVALNEGLRCKKKLWRAHGREQLEAFRLAPWASRRREDLLELLDRLNPTIAELTQAIEQEAEKCPQAQRLMTHPGVGALTALAFVLIIGKAERFQCGKQVGCYLGLVPLEDSSGDKRRLGHITKQGNSLLRFLLVEAAQVTSRTIPEWRSKYLHLTMRRGRKIAKVAMARKLAIRLFWMMRQGWN

SEQ ID NO: 315081 - protein, 385 aa, unidentified
MTKLDRTDAPATAEYATIYVAFELSKAKWKLGVIIPGSQKMSRYTIAGGDREALAARLAAARAKAERSGKPVRIVSCYEAGLDGHWLHRWLTEHGVVNHEIDPASIAVSRRARRAKTDRIDLEQMMGALLAYLRGEPRALSVVHVPSEAEEDRKRRSRERERLIKERTAHTNRIKGLLHGQGVRDALPLKAGFIAGLDELRTGNGRALERQLKAEIVREHARLVLVNEQLAEIDANSKAELRAAAPGSAAAKVMQLMDLKGLGPVGAQGLFNEAFYRSFANRRQVGSYFGLVGTPYDSGESRREQGISKSGNARARNLAIELAWLWIRHQPDSELTRWFRERVRDLKGRIRRITIVAVARKLMVALWRYLTTGVVPNGAVLQQSF

SEQ ID NO: 315082 - protein, 349 aa, unidentified
MVADGLDYVVGVDTHRDQHAFAIVEAGSGAVIAQAATAAGADGYRQAVRFADRHAPGARVWAIEGAGHYGAGLCRYLQRHGEAVHQVERTSRLERRLRGKDDRLDAARAARSALASRQRATPRAGQHQEALRLLLLARRSASDTRRVALVQLRSVIITAPDELRSELRRLPLGQLLNRCSRFRRSSSRTPAELATILVLRTLAHRIRAVSDEMTTLEQEILAHVRALVPELLDEPGVGPIVAAQLIVSWSHHHRIGSEACFARLAGVAPLPASSGLTTRHRLSRGGDRQLNRALHTIVLHRRQHDPATKDYIARRIADGKSTRDAVRLLKRYLARHLYRVMQNSTPLTT

SEQ ID NO: 315083 - protein, 423 aa, unidentified
MMKLKYSICCGLDVHKNVIVATIVTTNKDGISEYLQKSFSTINSDIQRFHNWLIENNCYHVCMESTGKYWIPIFNYLENDIDICLTHPKYVKAIKGKKTDKKDSKWIADLYKFDLVRCSFIPPKDFRQLRELARYRFKLVCMKSSEKNRIQNCMTISNVGIASVLSDPFGKTATEIMSYLLEHTADSMDEKAVRKLIKKGAKAKSDEIIEAIKGYNIETDQAKKLELAQGHLEYLDDLITQSEVELYVRIKPYYEFVEFVSTMPGMTELSSTIVLAETGVDMDIFDDAKHLCSWCGLSPANNESAGKKKSVRIAKAGDYLKPMMVQCALAAIKSKKQPYFAIKYGRIKKRRGHKKAIIAIARMMMVCIYHMVSEKKPFTPTDYEELMNPQNHVERVVLNENNVFAYLESLGYDSSKLVKRNDN

SEQ ID NO: 315084 - protein, 387 aa, unidentified
MLGHRTFPTTEAGYRQLLAWLGGFGTLRVVGVEGTGAYGAGLARYLMAQGQAIVEVDRPDRKARRSAGKSDPIDAESAARAALNRVRTGLPKQRDGMVEALRNLRVARRSAVSQRADCVRRIKTLIITAPQGLRQRLRGLSDTQLLRVCAGLRPDLSLIGEPEQAAKVALRVLGRRHAALSEEITELEALIAPLVEQINPALLALNGVGPDSAGQLLITAGQNTERLRSEGAFAMLCGAAPIPASSGKTNRHRLNRGGDRQANAALYRVVLSRMRWDQRTREYVARRTTEGLSKKEIIRCLKRLIAREIYYVLCQPAATNVTGTGTMMTTTPKTMHDHSSIQAAPARALEESTWSTRSAASMNDVDTDERRRTMAVEEQPRTRHHTA

SEQ ID NO: 315085 - protein, 460 aa, unidentified
MKREDQVHRLADRNGGGVEPLRIVHPDAGGIDVGSRQHYVAVPADRDREPVRCFGCLTPDLQAMAAWLQACSVTTVALESTGVYWIPVMQILEECGIEVYLVDARQAKNLPGRKTDVKDCQWLQQLHTHGMLTRAFRPADAICTLRSYWRHRQGLVEMASMQIQLMQKSLEQMNVQLHKVLSDLTGVTGMKIVRAILAGERNPVVLAQMRHPLVKSSEDTIAKALTGDWRPEHLFTLRQAVELYDIYQQKIEACDGEIERYMQGLEARGDPKDLEPRARGTRRKNQVHFDLRSQLHRLTGADLTRIDGIDAMTAQTVISECGIDMSRFATERHYSSWLGLCPNHQITGGKIRRRRTRKVCNRAARALRVAAQSLHRSQTALGAYYRRLRGRLGPAKAITATAHKLALLVYRTLKYGLRYVDQGQQVYEKQYQQRMLQGLAKRVKQMGYALVDPRSGEVVS

SEQ ID NO: 315086 - protein, 366 aa, unidentified
MKKSTKSVSNKTMKNGVAAVGLDLSDRTGRFHGIDDEGKTIETGTVTLRAVELQRWAGAIAPTVIAIEAGTHSPWISRLLTACGHEVIVANPVKVALITRNDRKSDVIDAEYLARLARFDRELLHPIRHRGEQAQIDLQIIRTRVVLVESRTKLISHVRGAIKSFGERLPACGTEAFVNKTKALVPAALKEALSPVYTEIDQLTKTVTAYDRQVLRMVNERYPEVERITQIKGVGALTGLAFVLVIEDAARFRRSRSVGAYLGLTSKRDQSGDDDPQRGITKAGDRLMRRLLIQSAHYIQGPFGDDCDLRRHGIRIAERGGKRAKRRATIAVARKLSVLMHRLWVSQETYEPLRNSSKGIGLSVAA

SEQ ID NO: 315087 - protein, 440 aa, unidentified
MRPRTRMGICTLEDYHLPLSGQAIVMETQRNKVCGADIHKKFLVATTLSRDGTKVTKRFGMTLDDLLKFKSWVIENQCEQVAVESTGSYWIPIHAVLEDSVDLIVANAYKIKHTPGRKSDLIDSEWIAELCLNGMIEPSRIFPKEDRELRRLTRAREGYVNDMTREKNRIHHALESCGIKISSVLSDIFGKSGRYLLNCLLDGVELEKMIKGIPVKSIRNKADQIREAVRGSLETTQIILIRGGLEQIASIQRRIDELDREIKNRIASREEDLKIAMSIPGIGFTSAATILAEIGDFKDFAKAEQLASWAGLVPAVYQSADKLVTGSITKHGSKHIRRILVEVAKAISQTNKSKLKRFFRRVQAKKGYNVATVALARKVLCILFHLLMSREMYREDDVIKTKSVVIDTSSLSSKLDFEEMIRVLAKAGYEIRKTNLGTGG

SEQ ID NO: 315088 - protein, 331 aa, unidentified
MQYHSTKLGIDISKMTFDVCLLNGTKPKQEKFSNNPEGFKKLENWLKKARSTELHIGMEATGNYWKALARFLNANGYQVSVINPLKIKRYASYRLHNNKTDKTDAMMIANFCLQEGENLLLWQDVDEETRHLRELVQYRDNLITMLGQIENRVESILEDEAVLLWQLEDKAHLQQRLEQVNEEIKSAINESEELKKKNALLQTIPGIGPVIASYFMTLIPDVSAFKRSRQIVAYFGLDPSIQESGTSVKKQTRISKKGNASFRGKLYLPAITAVRFNPIIKNLAERMTATGHLKTENNVAAMRKLVVQMYGVLKSGKAFDPNYAQIRVKNP

SEQ ID NO: 315089 - protein, 355 aa, unidentified
MTESSDYESVQVFIGVDVGKDTHHAVAINRSGKRLFDKALPNDENKLRSLISDLKQHGQILLVVDQPATIGALPVAVARSEGVLVGYLPGLAMRRIADLHAGEAKTDARDAAIIAEAARTLPHALRTLKLADEQIAELSMLCGFDDDLAAQTTQASNRIRGLLTQIHPALERVLGPRLEHPAVLDLLQRYPSPEKLASLGEKKLALQLITLRKQRDEVALEVEQRVLAHPLYPVLTSMPGVGVRTAARLLTEVACRAFASAAHLAAYAGLAPVTRRSGSSIRGEHPSRRGNKALKRALFLSAFAALRDPLSRAYYTRKMSQGKRHNQALIALARRRCDVLFAMMRDGTFYTPQGS

SEQ ID NO: 315090 - protein, 389 aa, unidentified
MTQVDDLSRSLAAFDQHTTLTVVVEMSAASWLAAAMIPGVARQPVKKLDPDPDGLLRLVERWQAEAEKAGRTIGRVALTYEAGRDGFWLARWLRGRGVEAHVIHSTSVAVSREHRRAKTDRLDTAMLMRVFLGWLRGERGHCGMVAIPTLADEDAKRPSRERENLVAERTRIGNRLKSALARLGIRGFKPLLRRAARRLAALRTPEGLPIPLNTLAEMRRDMARLAVVREQIEEIERARLQAVQQAPEGGPHAMVRLLARIVGVGIETADMLVREVLSRNLRDRRAVARYAGLTGSPDESGSKRREKGLAKSGNGRVRRGLIQLAWRFLMFQKGSALARWYRARTEGPNGARKTTMIVALARKLLIALWRMITTGVVPAGVELRQPALA

SEQ ID NO: 315091 - protein, 465 aa, unidentified
MTPQRGKKFRTSDKAVDLTITHRQAAGIDVHSAVHFVAVSAEDVPTGFINPDARLPAGVRKFGANTGDLEALAAWLKDCGVKTVAMESTGVYWIPLYDLLASQGFAVILVDPRQTKHAPGRPKSDVLDCQWIRRLHSYGLLTASFRPADEIVQWRGFQRQREMLIRYAAQHVQHMQKALEEMNVKLTEVVSDVAGQTGMKIIKDIVRGERDPLKLAKHRHERCKATEAEIASALYGNWRKEHLFALKQALKMYEFYQRQLRECDQEIETCLRGFADKSGGAALPARPKKQAPRRHEPKFGARALLFRMAGVDLTVIEGISDTTALVILSEIGTDLSRFATEKNFVSWLGLCPQHRGSAGKIFNRRVRRGANRAARAMRMAAQGCHHAKNALGAFYRRIQARCGGAKAVVATARKIAERVYRLLKHGQEYVAQAEQAYEEAYRLRTLKAMARKAESLGYKLVPATA

SEQ ID NO: 315092 - protein, 331 aa, unidentified
MHFSHFVGVDISKETLDAAIYPAKDKKLDFLHFDNTRKGLRGMISWLKRRGVNPAEMVICAEHTGVYTNPLIEFADKYGIKLSLNSPLEIKRSIGIARGKNDKVDAGRIAEYAHSHMDSLRLYEKPSDAIVKLQYLLTERRLYVRQRIALLNIKDAIGKYETREARSRNSSSIRDCDKLLKKVEDQMEAIIAADPQIKRNYDLLLSVKGIGFINAVNTIVFTNNFKSFDNPRKYACFIGVAPFDHKSGTSVNGKTRVSKICRTQQKAELTMAARSAIIHDPGLRKYYLRKMKEKGGGKDAHGIVLNAVKFKLILRMFAVVRSGQPYKILNY

SEQ ID NO: 315093 - protein, 350 aa, unidentified
MLIIGVDFHSRFQQIAMVDMETGELVERRLDHRDGEAQKFYAGLQKSVRVGMEATGYAQWFERMLAKLGHELWIGDAAEIRAAMVRKQKTDARDALHILDLLLANRFPRIWIPSPGERDLRQLLRHRHKMVGLRTSVRNQLHALAMGQGVYRKRKLWAAGGRRELEALALDPWASRRRQELLEILDRLDPSLAELDRAVAREAEQRPAARCLMEQPGVGPVTALMWVLTIGPVERFRRSKQVVSYLGLNPRESSSGGRQRLGAISKQGNSMARFLLVEAAQTAARYDKELRRDYQRLKFRRGTAVAKVAIARKLAVRLYWKLRKLSSPAPPARMQSSPEHPVVGASLSRN

SEQ ID NO: 315094 - protein, 313 aa, unidentified
MAQMVTNAGIDVSKQWLDVALWPKRDEVSRFKRDAAGLEELAFWLRERQVVRVGLEASGGYEREVIDALEAQGLEVALLNPLQVRRFAQAKGRLAKNDRVDARTIAQFTAVMIEAPQPGRRRELDSLSEHLTFRRQLRAWIDDCTNQLEHLRDKALRRTAEALRVKFQRALAAHDKALAKLTAEHADWNVLARRLRTVPGVGPVLSQTLIALLPELGHLSRRAIASLVGVAPFDNDSGQRSGKRHIKGGRGAVREVLYMAALSARTHNPIIAEFAKRLAGKEPKVMLVACMRKLLVILNAMVRDGMDWQVKTA

SEQ ID NO: 315095 - protein, 354 aa, unidentified
MEQRTTIGIDLAKEVFAICVLSPGGAVVESRTMRRAAFERWLVGLQGELVVAMEACSSAHHWGRRLAAAGHTVRLMAPAFVVPFRKSGKNDANDAEAIAIAARQPTMRFVAVKTVEQQSILSWHRAREGWIAERTALINRLRGLLAEFGFSIAQAAFRLRKALPALSTDAALPAPIRALLLEASEQLRCLDARVARCDEEIGAHGRDNETARRLRGMLGIGPLTSSALVATVPDATAFRNSRQFGAWIGLVPRQHSSGGKPHLGELTRRGDKYLRSLLVQGARSALQVALRVAPDKATRLQRWILALYSRKGYHRTLVAVANKHARIIWALMARGEHFDNNAWQRHPLQRAAAA

SEQ ID NO: 315096 - protein, 329 aa, unidentified
MKLLQFLGADLSKDSINLFCYELKTHVQINNSSAGFKELLYWLKRLQLDKDSVFLVMEHTGFYSHRLEKFLHQHQIKFAKVSALEIKRSLGLTRGKNDKIDAERIARYAFEKKDRLVAEKPVHPVIQRLQILHSTRERLMKYRSSLSCAIKQYRCVLSAADPIIKTQLTLIKQVTERIQLMDQQIKECLAKADESVKQNFNLLISVNGIGNVIAAATIIKTKNFTAFKNGRKFSCFCGSAPFDHSSGKSIRKKTRVSHLADKGMKTLLTMGARTAIQHDKELKAFYERRLTMGKSKNSTINIVRNKLILRMFAVINRQTPFIQHYSKAV

SEQ ID NO: 315097 - protein, 435 aa, unidentified
MEKIRTNVAGIDIGAKKVFTAVEGQPVVSHFTFTEDFMLLRDYLLKHKVKTVAMEATGVYWVILHEILEEAGIDVWLVDGRQTKQVPGRKTDVKDCQWIQELHSYGLLGRCLVVNADIKELRSYLRLREDHINTSAMHINHMQKALTLMNIRLKEVLSQIHGASGIAIIEAILNGERDKNVLVSLCYQSVLKNKKDLIIKALEGKYTEAGLFALKQAYDGYMFYIRQIEECDKRISRVINRIGMSGTGQEVKKKRKAIRHHKPAVEKLAPNLINIFEGKDATVISGITDYTWMQLLAETGSDLKKWPTEKHFTSWMGLSPGQHNSGKMHRNAKKKGRPKAGQIFRIIAQGLINSKDIAIGSFGRRLRGRKGPSIAIKAMARKLAVLYWRIMVKGLDYAEQGIKIYEEQLLANKLKTFNKLAKELEIQIPVNVQVA

SEQ ID NO: 315098 - protein, 448 aa, unidentified
MSERTIACEAPCIRLTTDSAAMRATKGRIMNPWMEITHYAGFDWTRDHHDVVIVDRQGQIVADFRIEHSLAGWQQFRDKVTNYPALAVAIETSQGAAVDQLLQLDCTVYPVNPLSAKSYRERKAPSGNKTDHLDGWSLAEALRLDGHGWKSLQPLDPLTQQLQLFCRDEISLIEQRTALVNQIQQALVEYYPAALQAFEDWTQPSCWDFIIQFPTPEKLAAAGRRRWEKYLHTPKLWRPETASKRLEIFQTARHFCGSAAVTSAKSLLALSLAKLLNALQLQLDQYRQQIEALFKQHPDHDLFGSLPGAGQTLAPRLLGEIGGPAHRFEDTETLQCVAGTAPVSFQSGQIHRVHLRYQCNKVLRHTVHLWSQCCLRVCPWAEVYYKQKRAEGKSHACALRCLGQRLLKILWRMQQTRKPYDADLHARNQKQHGSWVLALMKPTAKAGA

SEQ ID NO: 315099 - protein, 342 aa, unidentified
MTYYAGIDVSLECSSVCIVDASGKIVREAKVASEPEALIGWFGSLGFEVRRIGLEAGPLSQWLFAGLKEAGLAVELLETRHVRAAFKTMPVKTDRKDAHGIADLMRLGWFRPVHCKSMGAQEVRAVLTARTLVQAKLHDIEMSLRGILRGFGLKVGRTTSNRFAGRIKELVGGHASLQVIAEALLGVHAVLLREFKGFEKRVRMMAREDGNTRLLMTTTGVGSVVSLTYASAIDDPGRFKRSKMVGAHFGLAQKKYQSGETDITGGISRCGDESVRTALFQAAHIILTRPVKSSLLKSWGHRLARRIGMKRAKVAVARKLAVIMHRMLVEQKPFNPAAAAAA

SEQ ID NO: 315100 - protein, 339 aa, unidentified
MSLYVGLDLHANNNFLAVIDDKGKRVDHKKLPNDAQLVLEALRSDQAEIEGVVVESTYNWYWLVDSLMEGGYSVHLANPSAVQQYSGLKHVDDKHDAFWLAEMLRLGILPEGYIYPKEERPIRDLLRKRRHLVKLRTSLILSLQNIISRNCGFLLKVNDVKCLKEDRVHPLLGENEDLALAGKVSKETIDFLTRKIQAMEAIIVRRIELREPYKYLLTLPGIGKVLALTIMLETGPLSRFAKVGNYVSYCRKVSSRWVSNEKTKGKGNKKNGNKYLAWAFSEAAEFARRYHAEARAYYNRKMQKTNFMVAHSALAHKLARAAYYVMRDQVPYQPEKLFA

SEQ ID NO: 315101 - protein, 348 aa, unidentified
MLIIGCDYHPGFQQIAFVDTDTGEAAERRLTHREEAEQFYRTLEARRVRIGMEASGHGRWFERLLNELQFELWIGDAAEIRTKRVRKQKTDRQDAQLLLKLLMEDRFPRIWVPDAENRDLRQLLWHRHRLVQMRTRIMNQLHVVALNEGVRRKKALWRPAGRSELESLVLAPWALRRRRDLLDLFDQLTPKIHDLTRALEEEVEKRPIARRLMTHLGVGPLTALAFELVIGTPERFHCGKQIASYVGLVPSEESSGDRRRLGHISKQGNALLRFLLVEAAQVTVRSQPQWRSKFLHLAMRRGRKIAKVALARKLAVHLYWMWRQGLDYGQFEKLGSHAGEPGNRHGVQ

SEQ ID NO: 315102 - protein, 441 aa, unidentified
MPMRKREDDEVFPNAAGIDVGGSSHWVAVPRHADDEPVREFGAMTDDLNAMADWLLACRVDTVALESTGVYWIPVYEVLEQRGLTVWLVDARQMKYVPGRKSDVQDCQWLQKLMSLGLLRAAWRPDGEVCVVRAVARQREVLLTEQTRWVQRMQKALVQMNIQLTEVLSDVMGQTGQAIIRAIVAGERDPQVLARHRHGRVKASAQEITRALTGNWRDEHLFVLGQALAMYDDMARHLGECDAKLRALLSERGTGRVELGTPPRAGTRSCAQFEVRQALANWAGVDLTRINGLGVTVVMKLLSEIGPDLSRFATVKHFCSWLALCPATKISGGKVLSSGTRRSANRARQALKMAAMTLSHCDSALGAFYRRLCTRMDKPRANTAVAHKLARMVYFMLTRGEAFVDQGQQRYEEQQRQRSIAALKRRAAALGFQLNPMETAP

SEQ ID NO: 315103 - protein, 402 aa, unidentified
MNAVGIDVSKGKSMVSIMRPFGEIVSAPFEIKHTASGINSLVELINSVEGESRIVMEHTGRYYEVLAHQLLEANLFVSAINPKLIKDFDNDSLRKVKSDKADAVKIARYTLDKWQNLKQYNVMDELRNQLKTMNRQFGFYIKHKTAMKNNLIGILDQTYPGVNTYFDSPARSDGSQKWVDFASTYWHVDCVRKMSLNAFIDHYQNWCKRKKYNFSQSKAEEIYGKAKELVPVLPKDAITKLIIKQAVDQLNSASTTVESLRTLMNETASKLPEYPVVMAMKGVGTSLGPQLIAEIGDVSRFTHKSAITAFAGVDPGVNESGTYEQKSVPTSKRGSADLRKTLFQVMDVLIKTHPQDDPVYQFLDKKRAQGKPYYVYMTAGANKFLRIYYGRVKEYLSSLPES

SEQ ID NO: 315104 - protein, 348 aa, unidentified
MKYFAGLDVSLEETAVCVVDETGHIVKEARSASEPDALIATLQGFDVAIERLGLEACSLTAWLHEELTRAGLPAICIETRLANAAMKTMPNKTDRNDARALAQIMRTGWFRQVHVKSRRCRLWRSLLVARRTVLNQMRTTENVVRAILREEGLKLGTPSRAAFADRVRELAAGDEAVAPLVEPLLAVLAAMLREFGCLTKQALEIVRREEVCRRLMTVPGVGPITALAFRATIDRPERFRRSRDVGAHLGLTPARYQSGETDIQGRVSRCGDELARTALFEAAHCLLVRSRKWSSLRAWGMKIAKGRGMARARVAVARKLAVVLHRMWRDETEFRFGKQPPVARPAIA

SEQ ID NO: 315105 - protein, 408 aa, unidentified
MQVVYPICSGIDVHAKMLVACLRDNGQRETRTFSTMTDDLLRLRDWLVKSQCTHAAIESTGVYWKPVFNILEGSLEVVLVNPLHVKAISGHKTDVRDAERLADLLAHDLVRPSFIPPPEIRQLRELTRYREGLVREQASVNNRVIKVLESGNIKLAQVASDALGASGRAMIAALVRGETNTAKLAELACGKLKRKNTELRRALDGRLTDAQRFVLKEQLRRIEELEAALAQINEQIDQTCQSHPKFAHCRALLQTIPGIGQRVAEIIIAEIGVEVEANFPTDKHLASWCGLCPGNNASGGKRKSGRTRDGNTYLRSALVQAAWAAQRAKNTYLSAQYRRLAKRINKKKAAIAVAHSLIVIVYYVLVRDRSYQDLGGDYFDRQHVEQQRAYLLRRLEALGCRVIVEQNA

SEQ ID NO: 315106 - protein, 424 aa, unidentified
MRFIGLDVHRDFCEVAIAEAGAVRSAGRVKTEPAALLLFAQSLGADDQVALEATGNALGIARIIEPHVRRVVLANPKAVKGFTRAGAKTDRIDARTLAQLLAGGFLPAVWLPDEQTRVLRRRISARAQLVRQRTRAKNQVHATLVRNLKGRPPVSDLFGVRGRRWLADQELPADEQETVAACLRQIAFLDGEIGQVERALAEQVLASAEMRRLLTLPGVNFVTAAALLAAVGAIGRFPTARQLVSYLGLDPRVNQSGSEPARHGRISKQGPGETRHVLVEAAWHASRTPGPLRAFHQRVAGRRGRNVATVAVARKLAVVAWHMLSRGEDYAFARPSLTREKLRRLELMTGAERQKGKRISVWVTREQHQLDKELAAQAELAYRRLAQDWQPTISKGTGAAPGRASRRPSSGQAARQETAPLPAL

SEQ ID NO: 315107 - protein, 369 aa, unidentified
MKKNSKNNKEKARQRALQAKSRKMKVTVGIDLGDEWSHCCFLGEEGEIVEECRVKTTREAVKSRFGELKLAVIALEVGTHSRWVSQMLSEFGHEVIVANARELRAITGSDRKSDRVDAEKLARYARVDRRILRPIKHRGEEAQVDLVVIRARAVLVKTRTQLVNSVRGVVKSFGYRMPNCSTERFVKLNNEVPEKLREHLAGLMEVLEHVQKQIEEYDQRVEKLAKEKYPETTVLRQIWGVGEITSVSYVLTIEDKGRFEKSRDVGPYLGLRPRRSQSSESDPELRITKAGDCFLRSLLVECAQRILSKKGPDTALKQFGLRIEARGKKKAKKRAIVAVARKLAVLLHKLWVTGEVYEPFPETTVRKAA

SEQ ID NO: 315108 - protein, 437 aa, unidentified
MEEVTDEPLYRDRVCGIDIGKAGMVATIRVPSDKDPARRAAETRSFGTTRKEVLALADWLRCWQVPAAVMEATGDYWKGPFYRLEAEGFECVLADAKQVKNLPGRPKRDPSDSRWLAACFERGAVTSCFVATPEFRVIRLHTRYRRDLTEERGREKQRAEKLLESAAIKLSSVVTDLHGVTGRDIMDHLIAGERNPKVLAQLARARARRKITELEEALEGAEFFTQEHAALLKTMLDRIDRVNAEIDELTAVIERLLAPYEEQLQQAGSQPGWGRRSAQDAVAETGVDMTRFRTGGHLSSWAGKTPLDNQSGKRTGRAKSKKGNRYLAAVTGETAIAAGKTATREGARYRRLARRRGKAKAQVALGNTQLKVYHALLSNPGMRYEDLGPDYYERQRDVRRQVAHHVGKLGALGFEVTLCRIPGPEPEPSGSADTQTA

SEQ ID NO: 315109 - protein, 344 aa, unidentified
MEYYVGLDVSLRSCAVCIVDAKGKVAFERELVCEVDDIAECLSQFPHSIERVGFEAGTMSQHLYFGLTAEGFDVVCMEARQVNAALSAMRNKTDKTDARGIAQVLRTGWFSPVHMKSREAHGHRALLSTRKALLKKTMDLANEVRGLLKIFGIRLPKTVKHGTFDDVVRPMIEMDNILAHAMVPLLDARVVLYQHFLELDRRVKRAATHDEVCMRMMTVPGVGPIAALTFKAAVDNPTRFKRSRTVAAHFGLTPRRYQSGEHDNPGRISKAGDRDVRATLYAAANALLMRTMASSQIKTWGMRLMRTKGRRRAVVAVARKLAVLLHRMWIDGTEFRQERVGGAA

SEQ ID NO: 315110 - protein, 388 aa, unidentified
MLLLGIDIAKLNHVASLVDSTSGELIFSNFKFQNNFIGFSSLLEKISKFPTTEILIGLESTGHYGENFINFFFQKGFNIVVINPLQTSHLRKANIRDSKNDRLDSINIAKALLFGEHRYVTQKNLTNFALKKLTRFRRNLIKQKTKFKIQLVSLLDIIFPELQYFFKSGVHSNAIYTLLKKYPSTEKIAALREKTLFSILNKASKGHYKEEHASQLKSLAKSSVGIKDTSVSMHIPQLIKLIEMLDSQINSMEEEIKSSIDKESVVLSIPGINFVAAASILGEINDIDNFDSSSKLLAFSGLDPKIRQSGNFNASSCRMSKKGSPYLRYALIITAWNLVRNSETFQKYYLSKRAQGKTHYSALGHTAHKLVRIIYTLLKKNILYQEIN

SEQ ID NO: 315111 - protein, 352 aa, unidentified
MDASRFQATIGGQAMEADVTFDMVAIDLGKLSFHLHGVSSDGVVLSRKVSRAKLFAVMTELAPAIIAMEACPSAHYWGRRFQEAGRHVRLIHPRFVKPFVRGAKNDAIDAEAIFEAASRPTMRFVPVKTIVQQDLQAVHRIRDRLICQRTALINQVRGLLAEYGIILAKGPSRLTTEGPAAVADAGLSDLAREVFVDLFDQLRDLERRIGALDTRLVAICRENAASRRLATVPGVGPVIATALVASIDDGRHFRSGRQLAAWIGLVPRQYTTGGKPKLGGIGKQANHYLRRQMIHGARSVAFRASGRGDVRSRWLQALVARRGFNRAIVALANKTARIAWALLTRQEVYQTA

SEQ ID NO: 315112 - protein, 523 aa, unidentified
MSSRFRHRKRRPRRFQAVSKPRGVIHPRVVKAGPERFGVVSVDCAKARSKWMLCDFYGKVLIPPSVVPHGRCEFAEALSRLGKAVKAHALRDVLVAVERTGRYHHPVQRAFAGGGYEVRTVHPFATKQFRQPANPGAKTDDNDLAAIHRCAVNGFALAHPVVDPSWQELQLLIRHRRDWVRKCSALCCQIKDHLEAAMPGYSGCFPKLWDCPAALYLGLSCGSAEEIGRSDVEGISAWLREAQIGFQERTVRRVLEWARRAPHSDPAASQHRRIAQALNADRLHKERDIQALERDIAGRLARTPYVLLLSVVGINVVSAADFAGEMGPIRHYANARCLTGRAGLYPSRYQSDEVDLADGPLVRCGNRALRAAILGIADNLVTCNRHFRNLAERWAQAGKNPRWTRVKVGMRFCRIAFQMVAGQQVFRHPSIRERAYVLQKLMTFHREHQTGMNQTLADLQAAVDQLPKAEHAAEADPLVKELEVIEKGRRRGPQPIGKILPLVLARLGVRRVQSGKSGVNDPR

SEQ ID NO: 315113 - protein, 352 aa, unidentified
MVVVGADVHKFKHTFVAVDEVGRKLGEKTVKATTDGHITAIMWAREQFGAELLWGIEDCRNMSARLERDLLAAGQKVVRVPTKLMAQVRKSSRTRGKSDPIDAEAVARAVLREPALPAASHDEVSRQLKLLTDRRDVLVAQRTSAINRLRWHVHEIDPERSPAARSLRTAKQQQALADWLNTQPGLLIVELARAELTDIIRLTADVNALEKRLSDQARALAPRLLELPGCAELTAAKILGEAAGISRFTSEAAFACHTGVAPIPVWSGNTEGQVRLSRSGNRQLNAAIHRIAVTQIRMQDSQGHAYYQKLTTAGKTKAAARRCLKRRLARIVYQALHADHQTRSEHPQPAAA

SEQ ID NO: 315114 - protein, 444 aa, unidentified
MSKKRSAHLRGDRGQAFADLVRGIPPEQILCVSVDISKYFHVAMIHNSLGEIITPPFEVDIYQSGLDQLCQKIDAARLQVQAQVVLVGMEPTSHYFENLARHLLDRSQPVKLVNSFSVKQNREQQLMRREKTDQIDVAAIGDLLRRGEGTPYQPPSRVYLQLQQIDRVRLGKLKIETMLKNQILGHLDRIFPGLVLIGEAAQARYTPFFNVDFWQCRTLQALIRICPNPHQLAGMSPEQLIQLFHAQKCRMGPAMAAKIIAQAQKTLLPDPELAAIRCELLQHDLALLESVQAHIASLEQRLTSLLAQTSYRVWTKFKGISAVQAASLAAAIGDPSHYSEAAQVFRRSGLVSGRNDSGNHQRKGRGNPILKVGDVYLRRNLMNAVSTLLVHQPALYCYYKRLALSKPAGVARIATARKAIGLLWAAQRDQFSNTLIHCKGADMQ

SEQ ID NO: 315115 - protein, 348 aa, unidentified
MGYFAGLDVSLEETAICIVDGSGHIVREARVASEPEVLVAFFRSSGIEMERVGLEACSLTAWLHAALTQAGLPAICIEARQAKAAMGAMPNKTDRNDARGIAQIMRTGWYRAVHVKSPSCRSWRALLTARRMVLNKRRDVENGIRALLREVGLKVGTPSRKDFPARVRELTAGEPVLASLAGSLLSVVEVMTQEVERLTKRALDEVKSEPTCRRLMTVPGVGPLTALAFRATIDQPSRFRKSRDVGAHLGLTPRRYQSGGTDVQGRISRCGDELARTALYEAAHSLLIRSTKWSALRAWGMNVAKRRGMARARVAVARKLAVILHRMWVDGSEFRWGKQAAAPVMAAA

SEQ ID NO: 315116 - protein, 342 aa, unidentified
MSIYTGLDLSRKRLDWHACAGDGALVDAGAVPPDSDGLARLVHRLGGTDVLAVVEVMNGARFIHDQLELAGWDVRLADPQRARALAPLACKTDRIDAWVLAELARRDLVPEVWLPHPEVRAERERVRFRMHLVKHRTMLKNRIHQTLIAHGHARPTANLFTAKGRALLAGLELPEPWQGTVAASLALIEELDEQIDALERELRRLGADHHYVPLLCTIPGISWVLAYTIASEIGDITRFPSPRKLIGYTGLCPRVYQSGETDRRGALAKNGPDYLRWALVEAAHNAARQPAYRELAAHHRHRHGRPRGSNIAAITIARKLAEAIWWMLTRNQPYAPAGAKTV

SEQ ID NO: 315117 - protein, 345 aa, unidentified
MNKVVAGVDLHSNNLVIGVMDTDGKRLASRKVECQLSEVVKFLSPFKKRLEQVAVESTSNWYWLVDGLRALRYPVVRANPAGMEQYSGIKHADDTNDAFFLAELTRLKILPTGHIYDAELRPVRDLLRRRLTLVHQRTALMLSFKSLYTRTTGQAMSLGELKDLEVKEAQQLYDHPANQLIAGLQIKHIEQLTESIEQIEKAVLGSARELPSYAKRTTLPGVGKILGMTMTMEVGDSKRFAEPGHWASYCRTVEAQRTSNTKKKGENNAKCGNKYLAWAFVEAAHFARRSDGQCRQWYDRKASKTNNVIATKALACKLAKAAWYLMAESTDYDSKRMFGQPASAK

SEQ ID NO: 315118 - protein, 420 aa, unidentified
MGFIGGDLRESFIGRVKGADPGKLLAVPIDVGKNSAAAMVCDFWGEIISPPFAFELNERGFRDFAVTVARAEAERDASWVRVGLEQAGHYHRPLQARLEAHGLELTLFNPAQVKANRNQDLLRALKSDAIDLAAMAELLIRGKGRPSTVGDETIAIQGALAAHRSRKVKARTALKNQIHANLDLVFPGLSGCFDTILDTKVGRLLIDEGLTPERVRRLGPERLRRFCSTRGVILKRPKAHQLVDAARVALALNEAVSGVHARLLGADVGLLARLDRDISWTEGELAEILPQTPAHILTTLPRVAVVRASNYGGALGDVTRFRNAGQVYRLSGLVPRLYESAGKKRAGAHISREGKVELREAIIDLGKALHQGHPDFARYATGLLARGKHPGVVRCALGQRANRVAFALMRDQQPFDPARW

SEQ ID NO: 315119 - protein, 458 aa, unidentified
MNRNRSKAKIDRTMPMVHPHAAAIDIGATMHMAAVRADRTPEPVRSFGTFTTDLHRLVDWFKECGVETVVMESTSVYWIPIFELLDASGFTVFLVNARDAKHVPGRKTDVSDAQWLQRLHSFGLLRASFRPKGQIAELRAYMRQRERLLEYAASHIQHMQKALTEMNVQLHHVVADITGATGLRIIRAILAGERDPKVLTRLRDYRCHSSAETIEKALTGSYRAEHLFALEQALALYDVYHEKASACDARIESVLKELSIDRGRRSDPLPSSGRPRSDQANALAFDVRAALFALLGKDITQIDGLGPYLSLKLIAECGDDLSAWPSAKHFTSWLGLAPSNKISGGKILSSRTRRCGSRASALLRLAAVSVGRTDTALGAFFRRLSARIGKAKAVTATARKIAVLFYNAVRHGMEYVDPGASYYETRYRTRVVNNLHRRAKAFGFVLQPMEPPPGVVVS

SEQ ID NO: 315120 - protein, 367 aa, unidentified
MKKVSTAAVKPTKNFSQAKLTIGLDLGDRSSWYCVLDEVGEVLLEQKLGTTPKAMREAFGSMPRCRIALETGMHSPWVSRLLSELGHEVIVAHARNVRLIGESRKKDDRLDARTLGRLARIDPQLLCPVKHRSARAQADLTVIRARAGLVRARTALINTARGLAKSYGERLRGCNPRNVNPEKAQGLSPELQTALKPLLAAVESLSERIREYNERIESLAQTNYPQVALLKQVKGVGTLIALTFLLTLEDAHRFRKSRDVGCYVGLQPGRRNSGQSEPQMHISKEGDPYLRTLLVQGAHHILGPFGADSDLRRWGLKLAERGGKNGKKRAVIATARKLAVLLHRLWVSGEVYEPLRNSHQAVMPAAA

SEQ ID NO: 315121 - protein, 369 aa, unidentified
MSEKIVFVGVDVDDKAFHIAGLDLAIGEFSESKCKPTFGALMQKLEKFQEEGYTPKVCYEATYLGYSLCRQIRASGIWCDIIAPSLIPEQSSARVKTDRKDSLKLAEYYAKGLLTAINIPDEEDEQVRSLIRIRSFFVNQSKECKQEILSFCRYNNLHYRSDNAASYWTATHRKWIEQELVKLPLPAKTSVEALIENLDRLAKHVESFDKEIESLSQSDRYRLRCETLCCFKGIQTLSAMTIITELGDVRRFKHPSKLVSYCGMDIREYSSGGKERKMGITKMGNRRLRTVLVEACQVADKGSTISKYLKARREKVPEKLSDIAVRCQVRLRKKSTKMFVAGKHRNKIKVACARELTGFLWEALMTVAA

SEQ ID NO: 315122 - protein, 411 aa, unidentified
MTTSLSEGVESSADLDVVAGVDTHADTHHVAILSVTGARLGDRQVPATVAGYEQLLSYVRSFGSVRLVGIEGTSSYGAGLSRYLRSQHVEIREIVRPRRSQRRGGKSDPIDAYAAAQQALAEPEALPLAKTGDGLVEQIRVLLTVRRSAIKARVAVIRQIKSLLVTAPEPIRMRWAGSSERRVIEDLAATRPGAPSASVSAATGQALRRLARRHQYLTSEINELEEDLRDLVGRAAPAMIATKGYGVITTATLLVTAGSNPERLRSEASFAALCGASPIPASSGKTNRFRLNRGGDRQANWALHQIALVRLSNDRRTKDYAARLRAKGKSKKDVLRCLKRAIAREAFHLLVHPQPVPATDDLRELRLQRGVTLVRAAMSIGAEPARLSELERGRRPNAELATTYRAWLTAA

SEQ ID NO: 315123 - protein, 312 aa, unidentified
MTEVTIGIDVSKDRLDVHRLPTGEEQAFANTKAGLTALIRWLGTDPVLRIVFEPTGRYHLDLERRLATAGHALVKVNPRQAKRFCEALGVRAKTDRADAAMLARMGAALALDPQPVRSEILNELNELVTARRALIKDRTAAKNRAKGLRLALLRRQNASRLTRIEADLAAIGKAIAILIASDPALAGKQAILLSIPGISDVTAAALLAQAPELGDLDQRQIAALAGLAPITRQSGNWRGQSFIRGGRAQLREALYMPALTAIRLNPDFKRIYARLTDSGKPAKVAITAVMRKLVILANALLRDKRNWSPEAP

SEQ ID NO: 315124 - protein, 362 aa, unidentified
MTINAGVDLHKTQFTVFVKQSGNQFEQYSTEEDGYKKFLTRIQRWKKSGMTVRIGVESTGNTRYFKTRMEQAGAEVVVINTLKFKVVNESVKKTDRHDAATIAEFLEKDMLPESRLCSEESEQLRRLLKVRTTLVRTMVTVKNQIHALLTGLGMKDSRATLQSKRGRQKILDALRKADSELVVQPLFETIEQLEKSVKSIERELEKLTEGDRTVELLMTIPGCGKIGAWTIRAFTDDINRFASAKKYSAYAGLVPWVQNSNETVHHGKITKRGPEELRTALVQLVMGMRRCRSTVSWRLMERYTEMKRNKGSGKSIIATARKLSTIIWCMLSTGQEFDPSLMIDRQLIRKADSMRTTASQSA

SEQ ID NO: 315125 - protein, 402 aa, unidentified
MNAVGIDVSKGKSMVAIMRPFGEIVSAPFEIKHTASDIHSLVELINSVEGESRIVMEHTGRYYEVLAHQLSKANLFVSAINPKLIKDFDNDSLRKVKSDKADSVKIARYALDKWQNLKQYNVMDELRNQLKTMNRQFGFYMKHKTAMKNNLIGILDQTYPGVNTYFDSPARSDGSQKWVDFASTYWHVDCVRKMSLNAFIDHYQNWCKRKKYNFSQSKAEEIYGKAKELVPVLPKDDITKLIIKQAVNQLNSASTTVESLRTLMNETASKLPEYPIVMAMKGVGASLGPQLMAEIGDVSRFTHKGAITAFAGVDPGVNESGSYEQKSVPTSKRGSSDLRKTLFQVMDVLIKTHPQDDPVYQFIDKKRAQGKPYYVYMTAGANKFLRIYYGRVKEYLSSLPES

SEQ ID NO: 315126 - protein, 408 aa, unidentified
MRVVGLDIHRVFAEAVMLDDGRVTRLGRVGMTRDHLAAFAQTLTHDDDVVIEATGNASAVAEVLRPHVGRVVIANPRQVRLIAEARIKTDVIDATVLARLHASGFLPEVWIPDEHTLGLRRQVTRRTQIVRQRARLKTIVQSILHAHLIPQCPHADLFGPRGRAWLLRQPLPADESDAVERHLREYDRLTDDLRVVERELARDALTNPKVKRLMTIPGVDMVVAVGLMAAIGPAERFPGPDRLVAYLGLNPTVHQSGEGRPRHGRISKQGRIHARTMLVEAAWQAVRGPGPLRAFYQRVARRRGNHIAAVAVARKLAVIIWHLLRREEDYAWVRPALHAKKLRDLELRSGEPARRGQRGAAYAYNLSRTRVEEKRRAEQAETAYRRLTEGWSRRGRRVPTGPAKEERP

SEQ ID NO: 315127 - protein, 422 aa, unidentified
MKTLLHEKFSAYISMDWADNKHDVRLQAADGGQCELSVIDHTPEAIERWVLDLHKRFPGFIAVAVELSKGPIIAALLKYDFVRIFPINPATVAQYRKTFVRSGAKDDPTDARWILELLLKHPEKFPQLEQQSPAMCSLASLTEHRRKLVEERVKVSNRLVSSLKEYYPLALELFQDHGTAVFCDFLMRWPTFEKIKRVQPERLQKFFNEHNLRKPQRNQARIEQISRAIPLTQDRGIIEPMSLYAAVLAEQLKAILKAIKRFDTQIESVAATLADYSIFRSLPGAGPQLAPRLMSALGERRDRFENASAVQKYAGVAPVMERSGKTKIVHWRYQCSTIIRQTFVEWAAQSINKSVWAKAYYDKQRAKGCSYQAALRALAFKWIRIVYRCWKTSTPYDEAAHIQNLKRRGSSLAGAFDQAKAV

SEQ ID NO: 315128 - protein, 415 aa, unidentified
MKVVFPTCCGVDVHKTFLVATIITTPADSLQPNYQKKRFSTFNSDLNRFADWLLEHNCLDVCMESTGKYWVPVFNVLEKRGIRVVIANPKWVKAVKGNKDDTKDSKWIGDLFRIGLVKSSFIPDLNIRILREFTRYRYKLVSMKSSEKNRFQNAFTVCNVALDSVVSDMFGKSATAITDYLTSDESFDSEHCVSLLQRSLKKKAEQVLESIEGFSIASEQKSRIKIIREHYDFLEKMIAKVDTCVSEMVEKHEGEINLLCTIPGIDRNSAITIISEIGTDMRQFGSSKRLCCWAGLTPGNNESAGKKKSVRISRAGVYLKPALVQVAHAAVKDKASPYYALKYERIAKRRGKKRAIIAIARMILTAVYSMFCTGEVWNPVDLYKVDMPEHLKEQQLAKAIKQATRFLEKQGLSVA

SEQ ID NO: 315129 - protein, 342 aa, unidentified
MKDMMIGVDLAKNVFQVHGALRTGEVQFRKKLTRKQFPAFMAKQEPCLVIFEACGSAHYWAREMETLGHEVKLIAPQYARPFVKRQKNDAADAEAIVIAARQPEMRFVEPKTGEQQSRAAVFRGRERLVHQRTADMNALRALLYEQGHVFPAGIRYLDRMTALVEDEASDLPALIREECQDLLAQIAEKTARIIERTAKLKTLAAQSDRARRLQTMPGVGPLTAIAVEAFGPDMAQFKTGRDFAAWLGLVPRQHSSGGKERLGRMTKAGQADIRRLLIIGAMSRLNWLGQRSIVEGSWLSRMLTRKPKMLVAIALANKMARQIWAMLTKNEDYRDPVLASTA

SEQ ID NO: 315130 - protein, 379 aa, unidentified
MKKELYLGLDVHQEWILTAVAEPGRRGEVRDSGAISCDLQAVEKWVGRLRKAHGKEVVLRACYEAGPCGFGIARRLKQLGVKCEVVAPSMTPTRAGDRVKTDKRDARKLARLLRAGELTPIYIPEPTDEAMRDLCRARTDAVDDRRRSRHRLKGFLLRHGYRYQGKSAWTEAHMRYLRELVLPHPAMKAILEEYLMAISAASEGIERCEVAMRDLLPQWRLEPAVKALMAMKGFQTVAAMIVVSELGEVHRFAHPRRVMAYLGLIPSEQTSSDRRRQGAITKGGNPESIRGWLLVECAQHYATAPKVSKELSRRQEGQSREVRALSWKAQNRLHHRYTRLFARRLPRNKAIVAIARELCGFIWALLRRQRCYQEQAASV

SEQ ID NO: 315131 - protein, 414 aa, unidentified
MSNKMKKGEKVNGKVLIVGIDIGKNSNTGYWRYPNGPESKVFSFCNNKSGYESLMLRIYAAGKIKNAEEVIVGFESTGSYCIPLAHYLQNQPIKLVQVNPMHTKRWKDVADNSRTKSDKKDPKIIADLIEMKRYLSVIIPRGASAHLRHLMHARERLLTKKNMSMSQLHDLVFILFPEFLKVMNGLKSKSAFYLLGHYPLPDNLIELGFEELYLLLKKISRGKLDHTRALELIEVAKESIGIKEGIESIINEIKQFLREIRLYNETIQEIEEKISLFLKKIPYRDYLLSIKGIGELSVAGLIGEVGDFEAIRTQDALIKLAGLNLCENSSGKRKGRICISKMGRALLRKILFFMAINVVKEGRILHDYYQKLIKKGKFKMKALVAVMRKLLKIIFALVRNKTYYQENTKIKLAA

SEQ ID NO: 315132 - protein, 485 aa, unidentified
MAKRRMSTFERLESGRLNRKQRRELGRQVAVADPGLTIVHANAGGIDVGNESHYVAVPPDRDPNPVREFGCWTAALNQIAEWLQSCRIDTVAMQATGVYWIALYDVLEQHGIQVVLANAQHTKNVPGRKTDVQECQWLMKLHTYGLLRDSFRLAQEMESVRTIWRLRDRHVKEAGRAVQHMQKALTKMNIQLANVISDINGLSGQEIIAAILQGERDPWKLADLKHYRVRASREEVARSLEGNWREDVLFELQQAVDSYHFAHRQMQECDRKLEGYLASLPARMLDIPVQPESRQAATPKKKTKKAKRPRGNQPHLDLKTELKRICGVDLTSIDGIDVMTALTIVSEIGTDVSRFQDETHFASWLGLTPAKDITGGKTIGRGKRKVKNRVAVALRTAATTLLKSDSYLGARYRSLRRKLPSFASAVKAMGRYLAILIHRLLTKGEAWVDRGATQFERRHTEQELASLSFKARAKGFKLIPITEAS

SEQ ID NO: 315133 - protein, 439 aa, unidentified
MAGKGKTGRLEIVHPDCAGIDIGKRAHYVAVDGERFPEPVRNYGTSTADLKKMAGFLGSCGVRTVAMEATGVYWVPVFEVLERAGFEVHLVNPRATKQVSGRKSDVMDCQWIRQLMSHGLLRGAFRVPDAICPLRTYLRQRDELVGQRSRAVHHMQKALVQMNVQLDNVLSDIMGVTGQLIVRAIVAGERDGAVLAGFRDGRCKADGATIAASLEGNWRAEHLFALKQALERHDALQAQIEECEVRINAELDQLARPGAGDPPEDKRSRKGRDRALRRKLKRMLGVDLLAIPTIGVETALTVAAEVGADLSRFPSVGHFCSWLGLAPGTRISGDKRLKGAPGRRSNRVGQALRMAATTARRDKSAIGAAHRRRLARMDTAKAVKATAHQLARLIYAMLTRGEEYVARDIAEWETERRERMIANLQRQARRLELQLVPAA

SEQ ID NO: 315134 - protein, 437 aa, unidentified
MLSPGIRSLRGPYELVTSTNSKLEGKGLIYCGIDWAERTHDVALVDDSGQLLAKRHITDDAAGYKILLDLLAEYGDTEENPIPVAIETSRGLVVAVLRTGKRQVFAINPMAAARYRDRHSVSRKKSDPGDALVLANILRTDMHAHRPLSQDSDLARAVAVLARAQQDATWNRQQISNQLRSLLREYDPSALAAFESWKNGLCRREAHELLKAAPTPTRASRLTRTQLQAALKRAGRQRGVEAEADRLREIFRADWAHQPSLVEDALGTKMLALVVQLEAACTAADNLAKAVEETFPQHPHAEIILSFPGFGIQLGARLFAEIGDDRTRFADARGLKAYAGASPITRASGKKSSITRRWVKNDRLNHVGYLWAFSAITASPGAKAHYRRRRDNHGDWHAAAQRNLFNRMLGQLYHCLKHGQLFEEAVAFPIATAALAA

SEQ ID NO: 315135 - protein, 391 aa, unidentified
MQQPEIGRSTATFVPEETLVAVIEMSLSTWLVAGLVPGVDRRPLKKLSPDENDLLLLLDGWRCEAIAAGRTITRVVVAYESGRDGFWLARWLRTRGIEAQVIHASSVAVSRDRRRAKTDRLDTMLLMRVLLGWLRGEAGHCSMVAAPGIDEEDAKRPTRERENLVAERTRIVNRMKATFARLGIWNVNPALRKTAERLDKLRTPEGGMIPANTLAELRRDIVRLRMVEEQIAEIERDRMDRIAQAAPQRSRADGMLRMLSRVVGVGVEMAGLLVQEILLRDLRDRRAVARYAELTGSPDESGARRRKRGLSGAGNARVRKAMVQLAWRFLVFQKESALVKWYRERTADGRARTRMALIVALARKLLIALWRMVKTGEVPQGALVRPDPATA

SEQ ID NO: 315136 - protein, 377 aa, unidentified
MKRVKFVGLDVHAETIAVAVAEQNGEVRSLGVIPNREDSVRKLVRKLGPVEEPRFCYEAGPTGYVLYWQLTRMGAKCEVVAPTLVPVKSGDRVKTDRRDALKLARNYRAGELTPVWVPDAAHEALRDLVRAREAAKKDELRARHRLNKFLLRQGRRSPMGVKLWTIKYLEWVKREVHFEQMAQEATLLDYLHEVEHAAARIARLDGAIAEAVKLAPPKMRAVIAALQALRGIAHVAAVTVVAELGELSRFARAKQLMGYGGIVASEHSSGEHTRRGGITKTGNAHLRRVVVEAAWTYRHRPAVGTSLRKRQEHVSEEVKEIAWKAQQRLHQRYKKLLANGKNKGVVVTAIGRELLGFIWAIGIKVEAAQKESLQRAA

SEQ ID NO: 315137 - protein, 407 aa, unidentified
MNAVGIDVSKGKSMVAVMQPLGVVIAEPFEVNHTEIELGKLARFLKSLSGDTKVIMESTGHYNIQVADYLHDEGIFVTVVNPILIANYDTNITVRKAKTDKKDSIKIANWGIEHWLNLIEYIPSDDIRKSLKIFNRQYNQLLKQKTMVKNNLIAMLDQTFPDADKLFSSYPRPDGREKWLDFCMKYWHCECVCELSQKEFTKRYAKWCKHNGYHFSESKAFEIYSEACGNVGLLPKNESTKTLITSCINQLNSVNENLSVVLNEMDRLARMLPEYETVASMYGIGHIVAPQLIAEIGDIYRFRNKKALIGYAGIDAPPYQSGDVNVSSRSISKRGSSDLRKTLFVIMKIYLQHKPENEPVYQFLDKKRSEGKPFKVYMIAGANKFLRIYYAKVKECLDSAETNLVNT

SEQ ID NO: 315138 - protein, 392 aa, unidentified
MIYVGIDVAKDKHDCFITNSDGEVLFKSFPISNNREGFETLFQRIQSVSDDLSKVKVGLEATGHYSYNLLGFLLEKGLTTFVINPLHTNLYRKSLSLRKTKTDKVDSRTIATMMMSDMNLKSYSDTSYHNEQLKSLTRYRFDKVKERAKLKSSVSRLICILFPELEKLVPTLHMASVYALLSEFPSADAVANAHLTRLSNLLSESSKGRYGKDTAVMFRDAARSSIGSHMPAKSLELKHTIKLIQELTAEIDEIEAVIKQIMDEEIQSPILTIPGISYRMGAMIIAEIGDFCRFDSADKILAYAGMSPSTYQSGQLDNCYSHMEKRGSRYLRYALYNATKYVCHWDESFRVYLEKKRSEGKHYNVALSHATKKLVRLIFAMEKSGRAYLPIA

SEQ ID NO: 315139 - protein, 343 aa, unidentified
MAYFAGLDVSVKETSVCIVDDAGKIVREVRVASEPEALLQVLTNTIYRFKRVGLEAGPLSQWLYSVLAEAGLPVICVETRHIRAVLKAQINKTDRNDARGIAQMMRVGLYRPVHVKTLRSQKLRMLLTHRKLLQSKAIAIENDLRGSLRNFGLKVGMVGTVKFEARINKLVENLPDLAVLVEPLLIVRRVLREQLGILHRRLLAIVRDDDVCRRLMTIPGVGPVVALTYRVTVDVPARFRNSKAVGAVFGLTPAKYQSGENDRTGAISRCGDEMMRMMLYEAAQSMLVRAAKWSWLKAWAMKIARHRGMKKAIVALARRLAVIMHRIWVDGTDFRWTREVAAA

SEQ ID NO: 315140 - protein, 362 aa, unidentified
MNYVGVDIHKKYSVLCAVDERGRKLREARVEGNAPFGFAQFFSGLGGPSKAVVEACWNWGRIHDELEELEGIEEVVLAHPYKTRLIADAQIKTDRLDAYALSTLLRGNLVARAHVPRRETRMRKNLLRQRLYWARLRTMLRNRIHALLDRQRSLELPQCSDIFGVRGLSFLRRLELPETDAALLREQLALHDLIAQQMKAQEKRIGLEFGSEAIHRQLMSVPGIGPTLAAVIACEVDSIERFSSAEKLCAYAGVVPTTHSSGGKTRHGQLLPFCNKWLRWALIEASWVAIGCSPYFGALYKQHRARGKKANSAVLIVARRMCRIIWQLLHEKRDFEKRPLRPNFNFPGCSVVRLTAGTAARP

SEQ ID NO: 315141 - protein, 348 aa, unidentified
MKNKSFVGIDISKKVIDVSIFREDTNIKMFPHEVFNNTRKGFGDMCSWLKKSRVVLSQALFGMEFTGCYSLDLEKFLTSKNYSFCMLSTRIVKHHPMGTIDKRDKNDSAKIADFLYRYDGTECAKPYKLPSKAMQQLKQLVNERKFLVEQRTNFMNRMQMFETKEDSAMYESYIKKLNHDIEKIDQEECELMSKEEDVFDTFQNLLTIPGIGFVNATNIIAITRNFTAFDTARQYARYVGVAPCSHTSGTSVKWRARPSAHCNGQVKADLSMAALRAVEYDVEMQIFYNRKLGGRKDSDTKRKALNAVKFKLIRRMFAIGKQKRKWEVLKTSDDRKNLHIEKSKASEL

SEQ ID NO: 315142 - protein, 421 aa, unidentified
MHKQRKWFSGVDWASQEHVVSLHDDTGTKVGQRKFAHGGAGLSDMIAWLLKASGGTAGEIHVAIETPHGPIVEALLERGFNVYSVNPKQLDRFRDRFTVSGAKDDSRDADVLADSLRTDMRAFRKLSIAEPTIVELREWSRIDEELKVEHVRLTNRLKHQLWRYYPQMLELADDVGANWFLDLFEAVPTPEKAANVREKTIARILKNHRVRRFDASHVLAELRKPALAVAPGTIEATTARIRGLIERLRLINGQLTDARQQLDRLCKKLSEPVAEHDAEAALGQKNEQRDAAILDSLPGVARTVLATLLAEASDTLQRRDYHALRLLCGSAPVTRRSGKSCMVVRRYACNHRLRNATYHWAQNAIQHDPTSRAKYDALRAKGHGHARALRSVIDRLLQVACAMLNSGTLFDPEFASKRTTA

SEQ ID NO: 315143 - protein, 311 aa, unidentified
MTGMTFVGIDVSKDRLDVHVRPGGMCFAVSRDEAGLEELVARLAPLPPALVVLEATGGLQLRAAAHLGAAGLPVAVVNPRQVRDFARAAGRLAKTDRLDAAVIAAFAEAMQPETRPLPDDETRYLAGLVARRRQLVDMRTTEKNRRNASEEGPARRQLDEHIAWLTRAIEEIDNDLDGAVRASTVWRADEDLLRSVPGVGPVLCRTLLAELPELGTLNRRQIAALVGVAPFNRDSGTLRGRRTVWGGRATIRAVLYMATVTATRVNPVIKATYNKLVDQGKPAKLALTACMRKLIIILNAIMRDKTPWKHA

SEQ ID NO: 315144 - protein, 355 aa, unidentified
MDKIKTNFEGQTVYVGMDVHKASWNLGIYLNDVYVKNVHQKPNPDILHNYLQKHFPGAIYKTAYEAGKFGFWIQRQLSSRGIECLVVNPADIPKSQKDSLQKTDKRDARNISLRLQSGVLRGIHIPDEQQEADRLFFRHRKRIWKDLTRCKNRIKGCLAFSGIDIPEQYDNASWSHNFINWLKELDCKQITRRTALDYMIKQMEFLRQELLSISNAIRKMMREQRYKTNYYLLRSIPGIGPLTAASLLVEIGDVKRFLTFNHLNSFVGLLPMEHSSGQSENKLSLTVRKHRQLRSDLVESAWTAKRTDPAMALYFQEQIKRKDSKIVIIKMARKLLNRIRFVLLNQQPYEFGIVK

SEQ ID NO: 315145 - protein, 361 aa, unidentified
MRIIGCDLHARQQVLAMLDTTTGEIVAMTLKHEGNNVREFYSKLPRPVRVGIEATGSMQWFVNLMEELEIECQVGHPANIRAAEPRKQKHDRRDADLILKLLVENRYPKIWLPSKEQQDLRALLRHRHQWVRIRTRIQNALQAIALANGLRRGPALWSQDGQRTIASLPLAPHAAYRRSELQAMYAKFAKEIEKLNQRVEEQACERPGARLLMTHPGVGPITALATEVFLGDAARFADSKALASYVGIIPSEYSSGERQRFGGLSKQGNPLLRFLWGEAAMHAVRRDPELQRFYRRKLIQKGLGKTRVAVARKLGIRLWIMLRDEIDYNEFCRRGQMQQKSSEACAGMPDTGHGAKQSPIV

SEQ ID NO: 315146 - protein, 350 aa, unidentified
MIIIGCDYHPGFQQIAFVDTDSGELQERRLQHCEEAEKFYRNLAAQGMKVRVGMEASGHARWFERLLAELHFELWIGDAAEIRTKRKRKQKTDRQDAQLILKLMLKDDFPQIWVASWENRDLRQLLWHRHRMVQARTRMMNQLQAVALNEGLRYKKRLWREAGRKQLEAFRLAPWASRRRRDLLELLDRLTPTIAELTQAIEQEAEKCPEAQRLMTHPGVGALTALAFVLILGKADRFQCGKQVACYLGLVPLEDSSGDRRRLGHITKQGNSLLRFLLVEAAQVTVRSIPEWRRKYFHLALRRGRKIAKVAMARRLAIGLYWMWRKGWNYEQVKKFGSHAGQPEHRHGVK

SEQ ID NO: 315147 - protein, 344 aa, unidentified
MEHLGIDVHKVESQICILTESGEVVERRIRTQRERFAAVLGERPRAKVLIEASTESEWVARCLEELGHEVVVAEPNFAAMYATRSRKVKTDLRDARTLAEACKLGAYRAAHRTSDRQRHVRTQLSVREALVQTRARYISLIGAVLRREGLRVASGSAASFVRRVAKLALPGQLKSEIAPLLAVFVSVDRQLVWIDTRLEHLARTDETVERLCTAPSVGPVTAAAFSSTVDDPRRFKSAHQVEAYLGLTPSEWSSGEKQSKGHITKAGNTRMRKLLVQVAVSILRLRSPRTEALRKWATGIAVRRGKKIAIVALARRMAGVLFAMMRDRTCYLQPALLAPAAQVA

SEQ ID NO: 315148 - protein, 296 aa, unidentified
MMIHFVGLDVSQKMTAICVVDNAGRRLWRGQCPTAPEQIAAMVRRHAGDDSRIGIETGAMTPWLVHEFRALGLEVICLDARHARAALKMQINKTDQNDAEGLAQIVRTGWFRSVHVKSFDSHRARALLGARAQLVGMTTRLSNHIRGVLKTFGLLPGAMRGLRFDRKVEVLLENRSDVAPIVRPMLVAWRQLREQISAFDKAIRVLVRSNSPCRLLMSVPGIGVLSALAYVSTIEDPARFSQSRSVGAHLGLTPRQYQSGEVDRSGRVSRCGDMLARTLLYEAAVVIMTVSATSFL

SEQ ID NO: 315149 - protein, 410 aa, unidentified
MVERFVGIDVALREHRIAVLDRDGEAVGQSFTIAASTDGVATLLRTLGARGATAAQTLIGLEASGHLWENLEAALVGAGYRVIVLNPLQTRRYRDVVRRKAKTDDIDAHVIAGLLRSGAAQASYVPDEQIQSLRELARLRARLMADRQDYLRQLVAQLDVVLPEHRTVLGDLLTARARGILAQFPTAQHLAHANPRAIRRAAEDAGARGFSLNDATVVRDSARRSLYSGKAAAARAHVVRTLVSQLERLTSAIDEVDRAATALLPPSAPGTGPSDAELLQTIPGIGPQTAATLLGELGAFTRFTDARALVAYVGFYPVINESGDRAATPRLSPVGSRIARHSLYLAAVNAVRRSAEWRTIYLRKKAQGKTAKQALVVVAVKLLHALYAMLKHRQPYNPSRLLVAPATIGS

SEQ ID NO: 315150 - protein, 328 aa, unidentified
MENKLHFIGIDVAKAKLDVDMLRPDGRHRSKKFANTPKGHNELVSWLCGHQVSNAHVCMEATGTYMEDVAAHLSDAGYLVSIINPLLSKAFVQSQGIRSKTDTVDARQLAYFCREKRPVIWEAPHPVERALRALVLRHQALTEMHVQEQNRRESAREVQLPSIDMHLLWLETELKRIEKQIKDLTDDDPDMKHRRKLLDSIPGIGAKTSAVLLAYVGLKNRFLEARQFAAFAGLTPKQHESGSSIRRVSRMSKMGHMSLRRALYMPAMVTLYKTEWGRIFRERLEKSGKNAKLIIGAMMRKLAQVAYGVLKSGRPFDATQHTENACMA

SEQ ID NO: 315151 - protein, 399 aa, unidentified
MDRPQRRVAGLDVHKDTVFLCIMDNSKAKIFEKVYSTYTPSLAEMRRDMVTFGVTEAAMESTATYWIPVWNALCGSMALKLANPYFIKQLPGRKSDVKDAQWIAECLVNDTIRGSFVPDAAVRDMRKYNRRIFDLQEYLTYNTNKLDSLLQGCGFRLSNLVSKINCKSYTECVKAISSGTTDPKELVELVHGRTKNKHGRQAVLDALTADFHAADIDLIRQYLEMVETTERHIEDCQQQLTALCKEHFPKQFERLQTIPSVKERAASSIIAETGADMEPFEKATDIVGWCGLKPRNDESNRKIKSNKITHGNRFLRQILIEGSWVAARTRNCFFSNYSFVQCTQRHKSKMKVQVAIARKVLVAVWHMLHDEEDFKDIYLERLKKQTGEEKKRATESSMA

SEQ ID NO: 315152 - protein, 397 aa, unidentified
MIAVGIDVSKSKSTVAILNGHGSIRAKPFDVHHVADELQALVDYIKRTSEPPTILMEPTSHYHYPLLKAFTEAELPVCLINPYQMKKYGDTELRKAKTDKRDSLRIAQYALEKSYSLIPYTPQDQKYEDLRFLSRQYSQRISTLTVAKVQLLSLLDETMPGITTILPLKSRDPDNCVLLRFIKRFKSFDVIRKMGKTRFLDSYQVLVKKTKDRFAGSKGLAIYELVLNSVTTRGENPLSAMTQDQCVDLVSTSQKAANEINLQMRIIAETMPEYKVLRSMAGVGDRLGPIILGEIGDIRRFHSGKALNAYAGNDAPPYQSGQFESRNRHISKRGNPALRKACFEVMQALKLTKPQDDPVYLFLLKKEQEGKPYNVAKMAAVNKFLRIYYARAMELYK

SEQ ID NO: 315153 - protein, 435 aa, unidentified
MSSKAYRATRVNEVNWAQIARGKEGLGVTVGIDVGKFDLFVICRWADGRFERPWRVKNPWAIPTLVGVLKEVKADRKLVVALEPSGTYGEALRQALGDNGIEIQRVGAKASHDYAEVFDGVPSQHDGKDAAVVAELAALGKAKPWAYQAADSWEEELAYWVEEMVAQRQMLMPWQGRLEGLLARHWPEASQVLKLSSGTLLRILKRYGSPQALAEDADAATQLARWGRSLLSPAKIEELLTGARSSVGVRPGPWQQRQIQEYAERALAARQQANRAQRRLRQLAAGHPVLQAQGKVVGVPTACVLWVSTGDPRDFDSAGAYRKAMGLNLAERSSGTYQGRLRISKRGSARTRQWLYFAVLRLVQQCGVRPWYEAKKGRHEGEARRVLVAVMRKLAVALYHVGVRNEEFQPRRLFGRIGRSSGRSAKPSVSSQQRA

SEQ ID NO: 315154 - protein, 457 aa, unidentified
MSKGSGMTRGDRKRNARRERLRGLLPRDGAVVGIDLAEDKQALAVIDHDVRVLARKTVRVKAFRLGEALDWAAAQARVKGFTQVTVACEPTGPRWMQVQRLCAERGLPLVCIQPLVSHIAREQQDYTPHKSDESDCVMIGRLAAELHCYVPEELDETWAQLRHLGRRRAQLITAASASAHRIRDFLSVAWPVVTETCAKPLLSRTWLAALQVVTGRCGGDPARLAVMGEEAFTAAVRAAVQDWGGKRAWGPISRRVFAALTGTEGVVVSSRRGLLRRCADELGDLQRARAQLRAVEADMVAVLDELGLSRLGRIPALTAVGAAAILAEAGGPHRYDSSSSLVKHAGLSPSGNASGAFAGQAHISRRGRPGLRLTVWRAVWPMLQFNPVMAAKYQAMTSTADDEAGAAAARARRAKARVACAASLLRWLYSMAVHGTSWDPAAASGRQHDPRDQAEAA

SEQ ID NO: 315155 - protein, 334 aa, unidentified
MEGPIVSIDVSNGNSHYMCFIKNNKRFGIVKKIDHDIEGFKRLLEDIQKLEAETNEKVCAVFEATGVYTKPLERFLSKNSIKTYIINPLESARKRKEEIHNKKTDKLDPISISKVYYDKEEMMELKKKDETYNWLRKKNRLYEDQLNHLRKYKVTFQNQLSICFPGYLDLFRDGYSDIPMTILKKYPHPDLLKNKKAETVASTLEEYRYISSIDGIGPNLAARIIAEIGDIEEFKSREALVAYAGLDPHIYQSGDQDGKHLKISKKGNKYLRCLLFLAVGCSIRGAKDNPVNRFYQKKKQQSNPLNSKAAKTACTAKLLKIIYGICKNKTTYKR

SEQ ID NO: 315156 - protein, 356 aa, unidentified
MSRMTGKARAVIGGVDTHADTHHAAALDDQGRLLGVRPFTATEAGSQQLLAWMRGWGPIRVVGVEGSGSYGAGLTRHLRAVGVAVVEVNRPHAHTRARRGKNDAIDAEAAARKVLAGECTAIPKDTTGIVEAIRQLHLARASAVQARTAAVNQFGELLVTAPDAVRAALSAKTLPGKASQAARWRPNSGKLADPAHAARTALYSIARRIRTLTTETATLEHQLSILVKRAAPETLKLLGVGPIHAAQMLITAGQNIDRLHGETAFAHLCAADPIPASSGKTERHRLNPGGNRAANRTLYMIAVVRLRYCPRTRDYLTRRTADGKSKREIIRCLKRYIAREIYNTLRTDLKNLAQTT

SEQ ID NO: 315157 - protein, 466 aa, unidentified
MIGSVGIDLHQGQHRARCLDDRAQPCDSFSFQTTPEGLATLEEHIFKDGANPVIVLEPAGLPWLMVAVYLKSKYPVCRLVKAKTQKVAALRRYLRGPVKSDRLDALTLAKMPFIDSERLEDIYLPPADIHALQRLVRQRKRLESGISGRKMRISAIVDGYLPGIRKNFKDVWSSPFISFLKSCINPFSVIQEGEEALHSCLSQAGYRGSWTKENTRMVFLACQGIATVCKQSDAAGTISEEFFIELQDEIARELRILEFEEAESESLSKRITGIYLKLHSSNNLCTIPGVGEHTAPILLASIGDPTRFRNQSAFANWEGVVPGSRQSSNMEAKGLRMTKAGPPILRMALFQAGDVGRRCDPQLAAVYHRQMVFHGKNHKQAMGAVMSHLGARILTVLKENRPYEIRDIDGKPMIKELARRLIVSKYRVPEEIRRERRRRNSKADKKRETASYRANEAAKAPQPVPF

SEQ ID NO: 315158 - protein, 356 aa, unidentified
MQTQVTKKIDFTGKDLFVGLDVHKKSWSVSIVVEGMEHRTFTQPPDPEALQKYLQRSFPGGNYHSAYEAGYCGYGIHRRLNDLGIKNMVINAADIPTTQKDKLHQRDPVDSRKLARGLEKNSLRGIHVFDRDLEELRSLNRTRFYLMRDLRRSKNRIKSFLLYYDIPLPVEFDNNQWTLKFIAWLKEVKLQTTAGEEAFSHLITSYEHHRQQLLILSRIVRLRISQHDKELYNLLKSISGIGPLTSSALITEIGDINRFPNIDDLASYVGLVPMIRESSETTHTGGITFRCNNFLRVLLVEASWQAIRHDPALMQYYHHHLKGRKGNKVIIKVARKLLNRIRYVMKNRKPYVTGVA

SEQ ID NO: 315159 - protein, 516 aa, unidentified
MVWWRVGLKRPSSTPSESVCSRRQLSRAWQIQKQREYDMAKRKMSTFERLRSGERLSRQQRRELQQQLHAADPKLQIVHPDAAGIDVGNQSHFVAVPAGRDAQPVQEFGSWTADLQRMAAWLKGCGIRTVALQSTGVYWIAVQEVLEREGIEVYLVNARGTKNLPGRKSDVQECQWLMKLHTYGLLRNSFRPPEQIRAIRTIWRQRDRLVRDAGRAIQQMQKALTIMNIQLANAISDISGVTGLAILRAILNGQRDPWELAKLRDPRIHASAEEVAHSLQGNWREDVLFELEQVVDGYDFYQKQIAACEQQLQKYLAVLPDGKVAEVTSPQGSGKQKRRKPKSRRKNEPNFNLEAELHRLFGVDLTRIDGIDVVTAQVILSELGTDLSAFPNEGAFSSWLELAPRRDITGGKVIKQKSRESKNRVANALRMSAESLWQSDSYLGARYRRLRGRMDGKRAVKAMAHYLACLIYRLLTKGQQYVDRGAAYFEKKRTQREVLSLTRKAAQLGMKLVPTS

SEQ ID NO: 315160 - protein, 370 aa, unidentified
MSHVTSIGLDVHARSVAACAFNLYTGEVARRSFGADAGEIAAWIKGFEDPKAVYESGPTGFALCRELRALGVDCVVGAVSKMQRPAADRRRKNDRRDAAFLARLLAARNVVEVWVPPLEAESARDLSRALDDAREDLRRARQRLSKFLLRRGHAFDEVDALGRRKGAWTRAFWRWAEGLRPNDAAAASAFDHYAACVRCAESDKRALERRVLSEARSDRWRAVVGALSCIKGIDAVTAFCLATEAGCFSRFATAGAYASWLGLTPSEHSSGEREARGGITKTGNAASRRALVEAAWHYASCSPRPKAAPAGYEVAPQVKGRADDATARLARRHGALRAAGKRPCVANVAVARELACWVWEIGRRAEGTLG

SEQ ID NO: 315161 - protein, 358 aa, unidentified
MRVQSKELNFKGQNIYIGLDVHKKNWSVRIQSKELTYRTFSQLPSVEVLVQHLHRNFPGATYYSAYESGFSGFWAHRALVSQGVNNIVVHAADVPTTQKERAFKTDKRDCRKIAHSLCNGYLEALHVPSIKTQEDRSLVRLRLTFRKDLTREKNRVKCMLNLYGKEIPERFLSSSHWSKAFIEWLKGVKFETGSAEQALQLLIGQVEQLRSALLDVTRKIRKLAQSPDYCANMELMLKLPGVGLVTGIAFLTQLETIDRFPNTDALASYIGLVPNCHSTGDKDNTGEMTYRGNKWLRTLLIECAWSAARSDPALHLAYLNLCKRMKPNNALIRIARKLLNRMYYVLKYKREYEKGVVQ

SEQ ID NO: 315162 - protein, 343 aa, unidentified
MELQAIGIDLGKTVFHLVGLDSNGKIVVRKKCSRTQILAYTANVRVRVIGMEACSGAHFLGRALRAQGHEVRLMPAQYVKPYIKTNKSDYIDAEAIAEAVQRPTMRFVPIKTEEQLDLQATHRVRERWVMRRTAVVNQIRGLLLERGLTLPKGRSHVDHALPEILTDPALRLSGSFRVLLGQLQLELEQLTARIEQMDAVIRQTARENEACQRLTAIPGVGPVTATALVAAIGNGAGFRRGKDLAAWVGMVPREYSTGGKQKLLGISKRGNSYLRRLFVQGARVVLQYRTKQAPGLSVWLSQLMARTHQNVVVVALANKLLRMAWAVLCKNEAYRTPELAAAA

SEQ ID NO: 315163 - protein, 397 aa, unidentified
MTKLTSTPAGAVLVAIDMSKNRQEVLIERPEGGRRRRLTVMATRKDYDGFAEQLAAIGRPIVVGFEATGNYHRTLAHRLLTAGFELRLISSVALARTREALHNGWDKNDSKDAQVILHMLRIGATQRYVDPLAAGINDLQELSKTHETISRMKTQTWHRILTHYLPLYFPEIARFAGNSRSDWFLALIEQFPTPATITALDREAFSAAAWPLIGRKVSKARLINDIYETASASTALPVPEDSAAITMFRMVIAQGRSLIHQRDEIERLAHARLTDDVDYQLLRNIPGIGPINALTILAEAGDLRRFNHHRQFLKFCGLDLATCQSGTFRGRTKLSKYGNARLRRTFWMAAQVAARQRDNSFRDKLGRYTAGHADDGRAFLAIEAQTVILGFRHVSRA

SEQ ID NO: 315164 - protein, 483 aa, unidentified
MSQAKKHFQKPGARTTTAGKGKRGRKRKGMCLGDRPILEPNAAGIDIGAREIFVAVPPDRDEHPVQVFSTFTEDLERMAKWLVSCGVTTVAMESTGVYWIPPYDVLEQHGVKPCLVDARGMKNVPGRRTDWHECQWIQFLHSVGLLRAAFRPDGDVCAVRSLMRHRSELVQMAGQHIQHMHKALTQMNLQIHHAISDITGVTGLAIVDAIVGGQRDAQELAKLRDPHIKASEETIRKSLVGNWRGEHLFTLQQSRQMYQHYQEQIIACDEEIEKLLLTFQPRVDPTEKPLPPDRKKGKRGGKNKKKIVNPKTGFDLRTESYKLFGVDLTQIPGLMTMVLTLFSEVGRDMSRWKTAGQFISWLALCPDNDISGGRVLWKGMRKVHNRAGDLFRMAAYSLHHDPTPLGDYLRRMKSKLGPAGATTATAHKIAIIFYTMVKKQVEYDGTLWAARDAEREKRFEAKLKRQAQQLGYKLVPIEEKPAA

SEQ ID NO: 315165 - protein, 483 aa, unidentified
MAKRKLSTFERLRKGKLNRKQRRDLARRVDSADPGLQVLHPDAAGIDIGNESHFVAIPPDRDSTPVREFGSWTSDLQEMASWLKAHGIRTVAMQSTGVYWIAVQEVLERAGLEVYLVNARGTKNLPGRKSDVQECEWLRKLHTYGLLNNSFRPPEQIRAIRTIWRQRDRLVKQCGRVVQQMQKALTTMNVQLANAISDISGATGQAIIRAIVSGTRDPWELAKLRDRRIAASEEEIAQSLHGYWREDVLFELRQVVECYDFYHHQIEACDQELKKYMEAVATREVTVKQDLPKDASPIPSSKPARRRSKSRRKDQPKFDLASELQRAMGVDLTRIDGIDVITAQMIFTEIGPDFSSFPDENHFSSWLTLAPQRDISGGKVIRHVPAAGRNRVANALRMAAQSLSHSDSYLGARYRRLRMRLEGPLACKAMARYLACLVYRMVVKGQAYIDRGAAHYESKRLEKERLALQRRASSLGLKLIPAT

SEQ ID NO: 315166 - protein, 338 aa, unidentified
MKSYAGIDLHSSNNYVGIINEEDQRLYQKRLPNQLEHILQALEPFKESMEGVVVESTYNWYWLVDGLQERGYKMHLANPSAIKQYEGLKHTDDKWDSFWLAHMKRLDILPEGYIYPKEDRPVRDVLRRRLLFVRHRTSHILSLQSAITRNLGYKMSSRDIKRLDESDADTLFEDPFLILAARSSISAIQFLRTRIAEIEKAAKSHVRLKPEFEYLLTMPGIGNILGLTIMLEVGDISRFPTVGRYSSYCRCVKSERVSNNKKKGEGNRKNGNKYLAWAYVEAANFANRFYPEVQSFYKSKKAKKNGIVAIKALSNKLARASYYVMRDQVPYDPKKLFE

SEQ ID NO: 315167 - protein, 340 aa, unidentified
MKKVSTIGLDLAKNVFQAHGADASGAVIFRKKLRRAQVLEFFATQPACTVAMEACGGSHFWGREIGNYGHRVRLIPPAYVKPFVKRQKNDAADAEAICEAAQRPTMRFVAVKSEAAQGAAVVFRTRDMLVRQRTQIINALRGHLAEFGLIVAQGPAHVAKLIMAVQDPKQPLSEAARPILCVLVDMLGLLDQRIKLLDIAIARRAKEDEVARRLMSIPGVGPVIATAMAALAPPAETFKRGRDFAAWLGLTPLQHSTGGKQRLGATSKMGERTLRRLLIIGASSVVRWAARKGAPAGSWLASMIARKPAMLVRVALANKMARVIWALMAKGGTYRAPVVA

SEQ ID NO: 315168 - protein, 337 aa, unidentified
MDRQYVGIDFHRRRSVIVRLGADGERLGLYRIVNDPFELAAVIALCGEAPQVVIEATYGWYWAVDLLQELGATVYLANPNALNWGDRRVKNDEIDAHDLADMLRLNRLPQAWIAPPAIRELRELVRYRAKLVQLRSGLKAQVHAVMAKEGVLPAVSDMFGPAGTRQLDTLELGAPFAHRVRSLRELIALYDREVATLERNIHQHLKHDRGYRAVQAINGVGPISAAVLVAEIGDVTRFPTPAHLCSWCGLTPKHRESDLKTRRGHISKQGSRLVRTTLIEGISRYHGGTVLDAQYRKIAKRRGKNKARVALARKTLTLVYYGLRDGEIRCLAPAKAA

SEQ ID NO: 315169 - protein, 360 aa, unidentified
MQKQRTELNFKGQNLFVGIDVHLKSWTVTILTETLFHKTFTQPPSVEALHNYLVRNFPGGIYHSVYEAGFSGFWTHYKLKEMGINNMVINPADVPTTQKEHLQKDDPTDSRKLARSLRSGDLEAIYIPDSSTLEDRSLVRLRSTLVKDMTRYKSRIKSFLYFYGISYPQEFQKAGTHWSKRFMKWLNEGISLQHDSGKQALKILVQEAEQQRKLLLEVTRRIRLLTRDEKYASNIELLRTIPGIGFVTSITFLTEMEKIERFENTDHFAGFIGLIPNKHSSGDKENNGEMTFRGQEALRSALIESSWFAARLDPALNMSFQNYIKRMEPNKAIIRIARKVLNRMYYVLKNKREYVPCVVK

SEQ ID NO: 315170 - protein, 338 aa, unidentified
MTVVTVGIDLAKNVFAVHGVNAAGKAVLVKPLVRRAKLLELIATLPACLIGIEACTGAHYWAREFQKMGHTVRIMAPQLVSPYRMSGRHGKNDAADAAAICEAVTRPNMRFVPIKSVEQQGQLFVHRAHQGYVSERTALINRIRGLLSELGIVLPQAFKAFLSGVAQVLEDLPGYCNQVIGDLLNELYHIEEKIKNSEKLIQQLARDNSAAQLLMQFRGIGPITATAIVASIGNGHDFKNGRQFSAWLGLTPRQQSSGGKARLGRITKAGDSYLRTLLVLGARSVLLGAAKNDDPVSRWALQLKERRGYGRALVAIAAKNARMCWAMLHLRDEFRFPA

SEQ ID NO: 315171 - protein, 325 aa, unidentified
MRKVGQTGVRRSDVPCFVGIEVAKAQWDIALRPSGERWAVPNDASGGATLVDRVQTLHPTLIGLEATGGLERAATSALAAAGLPVVVVNPRQARDFARATGQLAKTDALDARALAHFADVIRPTPRPLPDAQTQELRALLGRRQQLIVMRTAEQNRLAGTSARLTQAIAAHITWLNADIATLDDDLETLLRASPLWRENDDLLQSAKGIGPVCAHTLLLELPELGTLTRQQIAALVGVAPLHCDSGTLRGRRTIWGGRAHVRTVLYMGTLVATRFNPQIKVFYERLLAAGKVKKVALTACMHKFLTILNAMLKHRTPWKPQEVQN

SEQ ID NO: 315172 - protein, 370 aa, unidentified
MAKRSMFVGMDVHKESIDVSLAEEGRDGEVRHYGVIPGDLEAVAKVLRALRAPNRRLRFVYEAGPCGFGIHRYLIAQGEDCVVVNPSSMPKRSGDRIKTDRRDGDALARLHRAGELTAIYIPTADDEALRDLVRGREDAVGLSTQAKHRLKAFLLRQGRRYPGRAGWTRPYRRWLADLSFPLAPQHIALQEYRDTIDETERRVERLTDQLRQHTPAWRWAPVVDALQALRGVSFVTAVGLVTEIGDIRRFTHPRELMAYLGLVPSEYSSGPSVRRGGITKAGNPHARRLLAEAAWAYQGVPRIGRQMLYRQETLPKPVCDIAWKAQLRLTSRFRKLVARGKAKPKVATAIARELTGFIWAIAREVPAPPA

SEQ ID NO: 315173 - protein, 344 aa, unidentified
MEKDTVVAVDIAKSVFDVAVSHEPGRVAERRRLSRKVFLLFFAQMPAATVVMEACGSAHFWARKLQELGHRVVLLPPHQVRPYVVRNKTDRTDAKGILEAYRNADIRPVPVKSVPQQVLVSLHRFRSGWLAARTAHINTLRGLLRELGLVIPLGAEKVLPEVMALIGDADSGIPDALRPVLAAACEEIKTLSQRIKMTERQIEAIAEQTPVVERLWSIPGIGLLIATALVAFVGDIQRFPSGRHFASYLGLTPREYSSGLRRRLGRISKRGDAYLRMLLIHGARSVLCHAKKTNEHDRLRTWALDLERRVGHNKAAVALANKLARIAWAVWKNDRAFESLPRAA

SEQ ID NO: 315174 - protein, 481 aa, unidentified
MWDGSRFAPRIVPSRKALGRTVIRYKGEGRAAIYFKETLEMAKRKVRDGISENDSVIVTEDNEVYYERCAGIDVHSGLFTVCLRIGRRSEIREFGTTTGEIRVLCAWLKDSGCQMTAMESTGPYWKPLYNIFEQEGIPAMVCNAYHIKNVPGRKTDVADARWIARCLREGLLNPSFIPDREQRELRDMTRFLKSQTEERARNINRLQKFLEGANIKLSEHVSDIEGMSATELLDLVIGDPDFTLDDVRQRMHGNMKSTPEQLFASLEGYITPTQRRFFIHVMHIIREQTRQLEETKALIDSVLSDNYKSAIAALEKIPGIGEASALTIVAETGTDMSHFRNQHAFSKWAGVAPGNNESAGKAKKAKTTPGNKTLKSALTQSAKTAARNKRSFFNAQYHRLVSHRGKNRATMAVAHSLAIAIYFVLSGQEFKDLGSDYYDQFDREKKINSHIRQLSKLGVSIRVSDDSIERAVEKPPDTSVA

SEQ ID NO: 315175 - protein, 329 aa, unidentified
MDVLFVGIDIAKASFAAVVRQRGQNGKARTFKNTAAGFAQFFAWLPDVPPQQLFACLEATGSYGQALAEALYARAMPVSVVNPLAVKRFAQAGLVRNQTDPVDAGILAEFCESKKPRLWQPPTPAQAELRALSRRLDDLQRMLQMERNRLAANQNQGATLLASLQRLIEQLQAEIELITAELRARLDQEAELKRQKELLMTIQGVGQLTAMRFLAELGDLRQFADAKQLAAYLGLTPAWKRSGTSVHSRPRLSKQGPAQVRHLLFMPAIVAKRFNPIVHAFCERLADARKSDMAIIGAAMHKLVHLMFGVVHTGRPFDPLYLSKQPGPS

SEQ ID NO: 315176 - protein, 323 aa, unidentified
MQGKVSLERSAATRVYVGIDVCKAWLDVYVHPLGQSFRVPNTRDGLKQLKRRLANLDVALIVMEATAKFHREAHRNLHASGFAVAVVNPLRSRLFAEATGQLAKTDTVDARMLALLAAMLEPKAKAPPPAALENLQEIARGREAFVAQRTALLNQLGAAKATCLKQAIRRQLKTVESAIDRLETEIECIIQAEPSLARRFAILTSIPGLGTIAAVTLLANFPELGSCTGKQAAMIAGLAPIACDSGETKGERRIKGGRAGLRTGLYMAALSAARFNADLKRFYARLVANGKRPKVALTAVMRKLIALANTLIREDRLWQPTHA

SEQ ID NO: 315177 - protein, 439 aa, unidentified
MPYRIAGIDVHKKMLAVVVSDVEVDGEYQLERIRYGSTPEHLRLLAEWLIAQPVEEVVMESTAQYWKPVWGALERYWKPICREREGAGPMSGTLPLAQAQSNRGRRGRKKDFPDAERLVKRLVADELILSFVPDAEPRLWRTVTRRKYQLTRNHVRLQNQLEGLLEECHIKLSSLVSDLLGASARRMLKALAEGETNPAALAAMADKNLRATQAQLCDALGACTELKPIYRRLLKMFLEELHLIDQQINQLDQELASLLSRHHDAVVHLAEIPGLGADSAQQIIAEVGAGAATFPSAKQLSSWVGACPGDEESAEVSKSHRSPKGNRHMRRILNQAANAAAKSKGTIFEIVYRRLISRLGHNQTIGAIAHRLCRLIWIILHRGVRYEERGPSVSAKSRRHRTNRMIRELPSLGYRVEPLLTTISEEGFRPCEPNFFTCS

SEQ ID NO: 315178 - protein, 359 aa, unidentified
MRMASSRMPQQDTGVTVGVDTHGEIHVAAAFTSDLGRPLGHLEIPTPPAGYRRLLEWARGQGTELRFGIEGTGSYGAGLARFLRDAGCTVIEVNRPNRQTRHARGKSDPVDAEAAARAVLSGEATGIAKADQDHVGMIRALRVARRSAVKTTTEIVNQMRALIVAAPAELREQLRQLSRDQLIATAAAMRPGSITSPTAAVKLALKGLAQRHQLLTDELEILDGELGRLTLEAAPKLYALMGVGTDVAGALLVAAGDNPERLRSEAAFAHLCGVAPLPASSGKTTGRHRLSRGGDRQANNALWRIVITRLSWHQPTKDYMARRTTEGLSKKEIICCLKRYVAREIYRVLATADELATAA

SEQ ID NO: 315179 - protein, 314 aa, unidentified
MVAQTVQDIGIDVAKGWLDVAVFQTQEQARFDNDKDGWAKLVRWLRGRTVRAIGMEPSGGYERGVAKALRSADLPARNVNPHKLRHYARALGRLAKNDRIDALLIARYTAELPTRPVRCDPIAEQLADLVVARRQLSDDKVSLANQLEQLREPMVKRIFTQRLRRIELDIALLAKRMAELVASQPALAAKDRLIQSFHGAGPVLSHTILALAPEIGQASRREIAALAGLAPYDFDTGTFKGRRVIWGGRHALRRVVYMAALTASRSNPALKAFHQRLIANGKQPKVAIVAVARKIMTILSAMLRHNQPWYPDKA

SEQ ID NO: 315180 - protein, 321 aa, unidentified
MIKSKQIYGVDISKDVFDVVNSDGKYFQFSNNSKGFKDLLKVLSLEALVVMEATGYYHYRLAQFLYEQGVLVSVVNPLSVKRFIQMKLSKVKTDKSDAKAICEYATINEVPLYTAKNKHQAECLQLLSMIDIYIKQSTALKNKEHGERTLGKPSKAVYHSLHRALKGIQVEIKVLEDKLMALVKEEQQKQLTLLKSIPGLGNKTAMHLIVITDGFSNFENARQLCSYTGITPIIRESGSSVRGRSRISKMGNSKLRNLLFMCSFTACKHNKACREIYERIIAKGKSKKLALIAVCNKLLKQAFAIVKSGLPYDEKFISKMG

SEQ ID NO: 315181 - protein, 373 aa, unidentified
MTKIIRIGVDTSKSIFVLHGVDAAEQPVLRRKLRRRQFLDFFAKLEPTKIGLEACGAAHYWARELRALGHEVVLLPPQYVKAYLKRGKNDAADAEAICEAMSRPTMRFVPVKSAEQQAALMLEGTRDGLVARRTQLTNTIRGYAAEFGLSAAKGLDKIEPLLARLAKEAQLPGLAKQLFAVYAKEYAQLKERIAKVEAKLMAWHKSNEQSRRLAEVPSIGPIGAVLLTMKVVDPHAYRSGRDLSAWIGLTPKDHSTAGKTRLGVITRAGDERLRSVLVAGATSVIKQVRLGKGNHPRWLVELVNRKPPKLAAVALANKTARIAWKLMVSGERYDPARASHREGRSATLLGGSAPRPSLPPCSTTQEHPAPTNA

SEQ ID NO: 315182 - protein, 392 aa, unidentified
MDKAWAGVDAGKEFHWAHVLDASGTQLLSRKVENDEADLVALIEEVFSFAEDVVWAVDQPGGSAALLLALLWERAQRVLYIPGLTVDRVRDAYRGESKTDAHDAYVIADQARMRPDLGKLTPSEVELAELRLLLARRRDLVTDQSRTIIRLKEALLALFPALERALDLNRKGSLTLVAHYHRPAQIRRVGRKRLAAYLRNRSVQGAEDIASKALEAARAQNVALPAEDVAARIVAELTKEALSLKERIEALDEELGERFFARPEAQIITSLPGMGLILGAEFLVCVGDLSAFKSADELAAYAGLVPAAHDSGKRTGNHKRMRGGNKILKRAFYQSAFASLRSSAESRAFYDRNRREGKRHTQALIALARRRVNVLWAMLRDGTTFKSPPLRA

SEQ ID NO: 315183 - protein, 342 aa, unidentified
MEEVTIIGVDLAKNVFQVHGAAADGSVVFRKKLSRLQFARFMTDHPACDVAMEACPSAHHWARELSAYGHHVRLIAPHYVQPFIKRQKNDAADAEAIVEAALRPTMRFVEPKTAEQQARAVAFRTREQLVKQRTEAVNALRSHLYEFGYIVPVGIGYVPRLTRVVEDPEADIPDLARDICRMLIEQIAQLTDRINALKARIAAMSNEAEMPRRLQTMPGVGPITALAVETFAPPMEQFRRGRDFAAWLGLVPRQHSSGGKQKLGKTSKMGQRDIRRLLVIGATAVIRWASRRGAPAGSWLARMLERKPIPVVAVALANKMARSIWAMLSRDEDYNNPVLIGA

SEQ ID NO: 315184 - protein, 333 aa, unidentified
MGPWSRTPHDKLGRPAHATVKDLVGIDVAKDELVIHLHPQGRCWRVANTKRGLSALGRQLERLAATDALKVGFEASGGYERALAQRLDALGLKAYLLDPARVRSFARAERQIAKTDPLDAALIARCLAAIHDQLTPYVHDRQALRLAEHVRLRDLPLAQAVQLNNQLETIADAAMRRLVQTQIARLKAMALRIEQQIARLIAASPNLSARERLLRSAPGVGPIVAATLLARLPELGRLSSRQIATLAGLAPFVRQSGTRARPARCTGGRPAVRRALYLAALAIVRAHKHPFANIAKRLKTAGKPPKLIIIAIARKLLTTLNAMIKYNQSFLTT

SEQ ID NO: 315185 - protein, 292 aa, unidentified
MWIIGCDYHPRFQQIALVNTETGEYGQLRLEHMSQAEKFYRSLAGQAVCVGMEAGGYARWFERLWAELGFELWIGDSAKIRAAATRKQRTDARDAQHLLELLRNGQFEKMRIWIPRAEERDVRQLVSHRYRLVQIRTRVKNQLRAIALNEGMGRRPGLWSRPGRKQFEELVLPTWTARRRQDNLELQQLELRTQGLDLAVRQEASRRPEVVRLMTHPGVGEVTALAFVLTLGDPGRFASSKQVASYLGLIPAEDSSGGRQRLGHLTKQGNALLRGLLVEAAHSAVQHDEQLA

SEQ ID NO: 315186 - protein, 363 aa, unidentified
MIVIGVDAHKQTHTLAAVREATARQIDGRTVRARDDGLVGMLAWGRSLEAEGGRRVWAVEDCRHVTGRLERFLIAHGERVVRVAPHLTGGARRGSREPGKSDPIDALAVARAAIRDGVETLPTAHLDAQALEIRQLSDHRERLVGQRTALINDLRWHLHDLDASFEVPPRRLTLTSWQDRTAKLLHALTSTAQVRVARDELARVRELSSAIKALHNELEELVKSYRPALLRMPGCGPLTAAKAIGQTAGAQRFQTAAKFAKITGTAPIPASSGNNKRHRLNPGGNRQLNATLHRIAVTQLRVHPPARAYLDKKLAEGKTYREAIRCLKRQLANTVWALLQPNPSTVRSRHLAPVAIHCNKPLP

SEQ ID NO: 315187 - protein, 321 aa, unidentified
MKNDKSHNPIVGIDVAEKHLDVHIIPEDKCFQVTNDSEGHQELVKRIRKLKPSIIALEGTGGLEKMVAAALAQAKLPVAVVNPRQVRDYAKALGILAKTDRIDAKVIAEFAHAVKLEPRFIPDKTHLEMNELIARRSQIIKMLNAEKNRRHRVYSKKVSNSHKSVIEFLNEQLNDIDQQLDWLIASSPIWRATDNLLQSFKGVGPNVARTLIFVLPELGHLNRREIASLVGVAPFNNDSGKQQGKRYIRGGRSNVRRSLYMATIVAIQWNPAIRSFYERLLSKDKKKKVAITACMRKILIILNVMMKNKTYWEPNFSTVCP

SEQ ID NO: 315188 - protein, 367 aa, unidentified
MFHSDYTVGCDAHKHFSLFAVLDGKGDLVERTRVGHVPGAIGAFLSQYPEGTPVALETVGNWYWIVDEIEDAGCIPLLAHAGKAKVMMGNIHKTDKLDAQGLATLLYLGKLPSVWIPPAEVRDERELPRTRMTFAKHRTMVKNRIRSTLAKYALSLDTDSDIFAPKWRPELEAVLQKLPAETERCVRQQLQILDALNDHIQQLEDRIVDRIQTTPTLQLVQTVPGPAKVLAIVIDREVGSIDRFSAAKHFTSYCGLVPKLTASAGRAHYGRMVKQCNTYLKWAFIEAANVIVAHRHAPNWRHKYVVHLYERTRRRKGHSVAVGATARYLAESTYWVLKKSEPYREPPHWAPAGMDSPVSLSQGQARA

SEQ ID NO: 315189 - protein, 349 aa, unidentified
MNSTTVAVDLAKNVFELAVADAAGNIVERQRLNRVRFSSFFVQRAPCRVLMEACGSAHYWARRIAEHGHSIQLLPAQYVRQYVRRNKTDRADAAALIEAARCADIKPVPVKSLEQQQVLALHRLRSQWMGTRRRYLNTLRGLLREFGIAIPLGATVARAHIAQHLAVSRRELPAAIRPLLEQMLADTDHLERLTDQVERQLACLTHADPVVQQLRQIPGVGLLTSTALRATVGDIQRFPCARRFASWLGLTPREYSSGECRRLSSISKRGDIYLRTLLVHGARSALMAAHRQQRTGRPLDRVRLRALACQRQRGHNVATVALANRMARIIWATWKHGRPFDGNWTCSTN

SEQ ID NO: 315190 - protein, 347 aa, unidentified
MNFYTTPHKHYCGVDLHARSMYVCVLSQQGVVLLHRNLRCDAQMFLLAIQPFREDLVVAVECIYSWYWLADLCAREGITFVLGHALYMRAIHGAKAKNDRIDSHKTAALLRGGLMPRAYVYPAEMRATRDLMRRRLHFVRQRGSLLAHIQMTHHQYNLDSPGKRISYRSNRDGLGEGFEDASVRDSIAADLALIDHYEVVIGELELAVLRQARVHDPNAFRLLTTLPGIGRVLGLTILYEIHDIRRFPSVQDFASYSRLVKCEKSSAGKSLGTSGAKIGNAYLKWAFSEAAVLFVAKCAQGRTMLTRLERKYPKSKALSILAHKLGRAVYFMLARNQAFDLERFTKS

SEQ ID NO: 315191 - protein, 367 aa, unidentified
MRKHNTAKESEAIRRETNRELTVGIDLGDRSSRYCILDEQGEVLAEGSVATTKKGFAQVFGSKPRSRLALEVGTHSPWVSRYLANLGHEVIVANARRVRLITDSTRKDDRLDAKTLARLARIDPELLSPIRHRSAQAQADLMVIRARALLVEARTMLVNAARGLTKSYGERLGSCGTGQVREGLAEPLSEALQNALKPLLAEVESVSEHIREYDEQIENIAKSRYPETELLQQVHGVGTLTALTYVLTVDDPHRFRRSRDAGAYFGLRPRRRESGDSRPQLRITKEGDAYMRKLLVQCAHHILGPFGPDSDLRRWGLELAAHGGKNAKKRALVAVARKLAVLLHKLWVTGEVYEPLHVRAGSKTAAA

SEQ ID NO: 315192 - protein, 341 aa, unidentified
MKNLFIGVDFSKEKVDVAILFADGLAETAARVFNEFKTTVSGYRQLVKWVEQNSCGIDSSLWLFCGENTGDYSKGLCNFLYGKGYDMWLENAKSIKDASGLRRLKSDRADASMIAEYAMRNYDKAIMYEPLSESLAQLRELFLYRQMVVRHRCSFQVRRGEKRLTMEKSPVKTMISQSGRHIVSELNKEIEKIDKRIAELIKSDEELTEVFTIVTSVPGIGTQNAVCLMVYTDNFRRFNYDSRKISCYYGIAPFGKDSGTSVHSDPHVHYMANRQIKAMLTQAALAAVNFNPIMARYYMRLVERGKKKQVALNNVKNKLVHLVTAMVRNRQTFTPEYKISA

SEQ ID NO: 315193 - protein, 351 aa, unidentified
MTIVANTYTHVIGIDTHARTHTLTVIAAATAARGATAAFPTNARGLSRAGSWIARHGSHLATLVVIEGASSYGALIAHAVSQAGYRVAEPLPIPKSLRAGRGKSDPIDAALIASSVLHADVGELRNPRDDQGVRAAATVLLAGRELLTRHRSASVNALTALVRLHDLGIDARRPLKDAQIATIAAWRDRTEDIATATARVEARRLARAIIQANLDLADNHDQLHSLVLASPVAPLLAEVGIGIVNAAIILTAWSHPGRIHSEAAFASLAGACPIPASSGNRTHHRLNRGGDRRLNRALHSIVLTRKRHDPATRDYIARRTAEGLGRRAIDRSLKRYLARHLYRALEHPSAY

SEQ ID NO: 315194 - protein, 390 aa, unidentified
MTYYVGIDIAKYKHDCFIADDSGCVIRDSFSFSNDKDGFNVLLSILKELKPKGQIKIGFESTGHYHFNLKLCLEANGFDYVEFNPLLVHKFISTQTLRRTKTDKKDASMIAKYLMTIDYKPYVNSFYHINNLKSLTRLRETLITDRTRFLNQITSYLDQIFPEFKPLFENGLNESAFYLLTHYMTPTKMSKLDSNKYSKMKSELGHTISYQKICQIKDAAINTIGHTSKALEYALKSSLNVYLYLDNQIDELESKIIEIYDSLNCHIHTIKGIGKLTSAGILSEIGNFNKFLTPAQFQAYAGLEPSKNDSGTHDGLGVMVKHGSSYLRKYLMNSAETFYIYNPSISDFYWKKRNEGKHHRVALSHVARKLINTIFYIEKHNQDFDSKLVK

SEQ ID NO: 315195 - protein, 348 aa, unidentified
MAMTIVGTTRLVTGGVDTHLDVHVAAAVDASGGVLGVCSFATTAAGYGELRVWLASFGTLGRVGVEGTGAYGAGLARYLRGCALEVIEVDRPNRQLRRRAGKSDTIDAIEAARAALSRRASGIAKTADGNVEAIRVLLIAKRSARDTRIKCLNQIRHLGFTGPDELRERLRDVTRPRLARTAAGLRPTVGSDPVMYATKLALSTLGRRVVDLDTTTQRVDATLERLVRATAPELVAVTGVGVDTAAILLVAAGDNPERIRSEAAFAHLCGVAPIEASSGKTVRHRLNRGGNRQANHALWRIVFTRMSTDARTRAYVARRLEQGRSKPEIIRVLKRYVAREIYKHLPRD

SEQ ID NO: 315196 - protein, 397 aa, unidentified
MGQRTVGIDLAIRGDHVARILDDGRPLGKPIRFRLTPDSLSTLIGRIRHGMAPDSAITAVMEPTGMAWFPVARWLTQAGVKVIRVKGQRVRALRRYLSEHTKTDAADVYVLGAIPMFGGVPADPVYVPNAERHALQRLTRQRERLEDELTAIKRRLLDLIRWACPAIEAVLPDLRTNLSLAVLRDLFDPASVAKARRTTLLGFVAKHASGNHPHSGPFAEVLVDGLKAAAAETQRLHGTAVDFQLLQLEVVLEVDRLRLIEVQLTRLGREVEQLYAKLHPSDALRTIPGIGVTLGPLVLGVLHEAQRFAGLHQLRGFCGMYPRVNSSGGTDRPGQAITQSGNNRIKRALYLAADAARRVDPGLAEVYWRLMVRKGHHHKQVTAQPPPPPKTHSRSMG

SEQ ID NO: 315197 - protein, 429 aa, unidentified
MRNESTPDARGPVFCGVDTHADSHWLYVLDWRGRKVLSRRFPADAAGYEALAGAIAAAGEPACVAMEGTSSYGAGLTRHLASLGMPVREALSPARTQRRRPGQGKCDEADAERAARAAMSGSRLGTPKSQDGWVDGVRCMLAARSGAVKARTSAINTARSLLTTAPEGLRSRFRGMAGPKLMEELPSVRAEGALGAALGALADLWAAARDAALDMERAIEASLEENCPALLAMYGCGPVSAAKLAVAAGDNPGRLRSEASFAAICGACPIPASSGKTVRHRLNRGGDRQANSALHEIARRRVMRDPETAEYAERARARGKSDREVMRCLKRYVAREAYRALMRPHEIRRPEDASGLVAARRAAKVSQVRAASILGTSEKYISMLERGQRELKPIRRAYEAWVEAGLPLDWDRQAFEAERKMDSKKHLAK

SEQ ID NO: 315198 - protein, 321 aa, unidentified
MTIIGFDVSKNELVGARTNKSGLLKESIVLENTRSAIAQFLEGTRQQYPKLLVASEATAEYHRALAEECIGRAIPFRLINPILTKQFTRATIRKQKTDYTDSLIVAKLALAGEGTVLRKESLHPAKSVARVAYKLARLERMLAAMQSRVRRVFPEELEMSAVIEQPRKALGDSVRVLRDHLAKRVDSKLAMLLTSIPGVGPTLAATFIAEIGSVHQFPSGKSLVAYAGLDPRVRQSGISLRRNTKITKRGSPYLRKAAYIAAYIAKRHDAELGAYHAKKMMEGKRYKEATVATARKILYRVYAVWKRGTPYQKRALSTAIA

SEQ ID NO: 315199 - protein, 368 aa, unidentified
MFKQAHYKVGCDAHKHYSLFAVLDHRGKPVEQTRVNHVPGAIRAFVSRFPPGTPVALETVGNWYWIVDEIEQAGCVPLLAHAQMAKKMMGHVHKTDKLDAQGLAILQHLGSLPTVWIAPGEIRDERELPRTRMALSKVRTMLKNRMHSTLAKYALSLDTQSDIYAPKWRPQLLELICSLPDETRRCMRQELELLDQVQEQIHRLEARILERVQVTPTIQLIQSVPGPAKILSIVIDREVGSIDRFPSPHHFASYSGLVPKVKASGGKTHYGKMIKAANNYLKWAFIEAANVVVRQQHHPNWRQKYVVALFERTRQRKGHAVAVGTVARYLAEATYWVLKKGEPYREPVPQHPVGRKSAVSPKQGQVRT

SEQ ID NO: 315200 - protein, 321 aa, unidentified
MHILGIDVAKAKLDLALRRPDGKWRSKVVENTPEGFARLDAWLAAHGVESVHACLEATGTYWEAVAEHLADAGHTVSVVNPAQVKAFGGAGLTRSKTDRVDARLIAAFCAAQCPPPWQAPPPSVRTLRALVARREALDAMRTQERNRLPVADQAVRDGIEAHLTHLEQAIKDIDAAIRQTIDDDPGLRRQGELLVSIPGLGDKTVAALLAYYGGPLRFESAKQAVAFAGLDPRQHQSGSSVRGKPRLSKVGHARLRKALYMPAMVATTRTAWGRALKQRLAVAGKPPMLILGAMMRKLLCVAYGVLKSGRPFDPSLHSMAG

SEQ ID NO: 315201 - protein, 392 aa, unidentified
MRYWVGFDVGKAFHWVCLLDEEGKEVLSRRVEATETDLETSCSEVEALGAERTVGIDLLGGPATLLEAVLLGRGERVLHVPGIAVNRARNAYPGEAKSDAKDAHVIADQLRLRSATLHEVCLKDETTAEMRTLVAHRRDLLQDQTRRAARLREVLLGVFPGLEATLDLKREGPLLAVTKLATPAQARKLGTSRLSRWLKARGVRKAPDLAERIVAAARAQRRELPAAEAKATLVAEIASEILRTRGRIAELDRRLEELLADDPKARIVRTMPGMGVVFTAEFLAEVGNLGRFASAEALAAAAGVAPVLRASGATSYRRRARRGNKVLKRVLYRSAFSCISHHERSETFYRRKRAEGKGHHQAVIALARRRVDVLWAMLRDGQTYSERPSPAP

SEQ ID NO: 315202 - protein, 345 aa, unidentified
MEQISRIGMDTSKHFFQLHGVNAAEKVVLRKKLRRKEMEAFFEKLAPTIIGIEACGASHHWARLLQSFGHEVKLIAPQLVKPYVKRGKNDAVDAAALCEAMSRPTMRFVPVKTAEQQAALMMVGLRDRLIRNCTQLSNAIRGYAAEFGVTAAKGMAHLDPLLERIQADESVPNLARELFALQAKEYAQLQAQIDDVDAKLMAWHKADECSRRLAKIPGVGPIGAALLTMKTPAPQLFKSGRQFAAWIGLTPKDHSTAGKVRLGVITRAGDETLRSVLVVGATAVIQHVRRGGRGSPWIVDLLKRKPPKLAAVALANKMARIAWKLMVTGESYAAKSAPAALASVA

SEQ ID NO: 315203 - protein, 353 aa, unidentified
MEYIAFDAHKHYTLASVARPDGQLVREQRIAHERGALQHFLERCERGSPVAVETVGNWYWIVDEIEAAGCIPRLVHARKAKLMMGQINKTDKLDVRGLNQLQRTGTLPTVWIPPGQLRDQRDLPRTRIVLVRQRTQLKNRIHANLAKYALHDLEVSDLFGARGRALLRQRLELLPPCTAYTTQHLLEQVERLDHQLREFEQRIRTLFTPTPAIQRLLTLPGVGLTLAVLIALEVGDVARFHTAEKLAAYAGTTPRVHASGGKSRFGPSRPDVNRYLKWAFVEAANAICLNRRRAPRRHVTRLYERVARRKGHQKAIGALARHLAEATYWVLTKQEAYREPHTAAVSSTGDQRG

SEQ ID NO: 315204 - protein, 343 aa, unidentified
MKLSRVGIDLAKNVYQCHGADRTGKTVWKRRLKRHQWFKTLLDRIEPGCVIGMEACASAHHWGRELQSRGFTVKLIPPQFVKPYVKSNKNDARDAEAICEAMSRPNMRFVTVKTVEQQDIQATHRIRAELITQRTAKANQIRGLVAEYGLVAPKRLSSLRTAIPCWLEDAENGLTADFRSLLHGVWDDLLILDDRVGEMDKLIKRLAENHEECVRLQQLRGVGPMISTAMIATVGDARQYHKSRQMAASIGITPKQHSSGDRDRLLGISKRGDVYLRTLMIHGARAVVARAKYKDDRLSRWVTGIATKRHPNVAAVALANKTARMAWAMLRNETDYDPDYAIS

SEQ ID NO: 315205 - protein, 408 aa, unidentified
MKVFVGDDWAVAHHDVHVMNEAGDKLAAKRLPEGLDGIARFHALIAEHATEPGEVFVGIETERGMWVQALIAAGYRVYAINPLSVSRYRDRHSLAGAKSDPGDAKLLADLVRTDSHNHRPVAGDSDDVSGLKVLARAHQNLIWDRTRHTNRLRNDLREYFPAALVAFDSLAHGDAVAVLAKAPHPDQAKALSIAQIQSALKHGGRQRNLDTRSTEIRKALREPQLAAPPATAEAFAATTESLVEVIAGLNASIAKLETKLATHFRNHPDAGIYLSMPGLGVTLGARVLAEFGDDPERYNSAKSRRNYAGTSPRTIASGKKRAVLARHVRNRRLYDAIDQWAFCAINTSPGCRTFYDQRRTAGDLHHQALRALGNRLVGYLHGCLKTHQPYNEHTAWAHRQQPPVTIAA

SEQ ID NO: 315206 - protein, 355 aa, unidentified
MDSKKYIGMDVHKESISIAAMNGAGKIVMECVVETKASMILQFINGLRGDLQVTFEEGTSAAWLYDLLKPHVTKLVVCDPRKNASMREGNQSDKIDARRLAELLRLNHLNPVYHGEHGLRSLKELVRSYLTVTKDLARVMSRVKAIYRSWAIPCTGKQVYAPRHRAEWLGKIGEPGVRRRAEFYYQQLDALRTVRQEVRQELLAEGKKHKAWKRLCQIPSIGPIRSAVLLGILQTPHRFRAKRQLWTYSGLGIETQSSADHRSVNGQLERAKKQISIRGLNRNCNHDLKNLFKGAAIVASSKPGPFQEFYTALLAKGIRPDMARLTLARKIATIVLIVWKRGACFDAQHLKPQTA

SEQ ID NO: 315207 - protein, 341 aa, unidentified
MKNLFIGIDFSKEKVDVAVIFADGLAETSVRVFNEFKNSVSGYKQLVKWVEKNANGIDSSLWLFCGENTGDYSKPLCNHLYGRGFDMWLENSKCIKDASGIRRLKSDRADAAMIAEYAMRNHDKAIIYEPLSESLTQLREYYLYRQMVIRHRCSFEVRRGEKRLMMEKSAAKTVIAQSGKHIVSELNKEIAKIDRKIASLIESSDELSEVYRIVTSVPGIGTQNAVCLMVYTDNFRKFNYDARSIACYYGIAPFGQDSGTSVHVDPHVHYMANRHIKAMLTQAALAAVRFNPIIAQYYQRLIGRGKKMPVAMNNVKNKLLHIVTSMVKNKQVYKPEYRLSA

SEQ ID NO: 315208 - protein, 462 aa, unidentified
MASRSKGPKGAKEAQAIDGLPVIRRNVAGIDLGSKDHWVCAPSRDGSGREVAKLGATTPELQRMVEWLKERQVESVALESTGVYWIPPYEVLEAHGFEVRLVDTRQLAQVPGRNKKTDPKDCEWIQRLHSCGLLKGSFRPGEEVCKVRTLMRDKGNLVAEAGDWVRRMQKALDQMNVRLHRAVVDVDGVTGMAILRAIVAGERDPRKLAQLRDRRCHKNESEIAEQLTGHWREDHLFSLQQSLKMYDSIQERIGEYEKEILKKLAAMAGERRGEEAAPLKNAHKAQAIRRRGQEPMRQALYQMSGVDLTQIDAIGVETVAVVISEYGPDLSSFPHEKEFVSHLRLAPYVPSSGGKQLTKKKRRNSASTRVAAQLRMAALSLRNSKTAMGAAYRNTARRLGPDVAVFVSARKLATLIYRRLRWGAAYVDEGLEAYEKRYQQIRIKSLTAKAKDLGFKLMPMTA

SEQ ID NO: 315209 - protein, 429 aa, unidentified
MRTESTPGARGPVFCGVDTHADSHWPCVLDWRGRKVLSRQFPADAAGYEALAGAIAAAGEPACVAMEGTSSYGAGLTRHLASLGMPVREALSPARMQRRRPGQGKCDEADAERAARAAMSGSKLGTPKSQDGWVDGVRCMLAARSGAVKARTSAINTARSLLTTAPEGLRSRFRGMGGPRLMEELPSVRAEGALGAALGALADLWGAARDAALDMERAIEASLEENCPALLAMYGCGPVSAAKLAVAAGDNPGRLRSEASFAAICGACPIPASSGKTVRHRLNRGGDRQANSALHEIARQRVMRDPETAEYAERARGRGKSDREVMRCLKRYVAREAYRALMHPHEIRRPGDASELVAARRAAKVSQVRAASILGTSEKYISMLERGQRELKPIRRAYEAWVEAGLPLDWDRRAFEAERKMDSKKHLAK

SEQ ID NO: 315210 - protein, 343 aa, unidentified
MQTVTTIGLDIAKSVFQVHGVDADGNVVVRRQLKRRYVLAFFQKLPSCLVGIEACASSHYWSRELQVLGHTVRLMPPAYVKPYVKRQKNDAADAEAICEAVTRRNMRFVPTKTPEQQSCLSLHRTRHLFIRQQTAIINSIRAHLAEFGIVAPVGRRGVEQLLKVAADANDTRLPEIARACVAALGNQLLALKAQILAFDRRIMAWHRSNETSKRLDAIPGVGPALATALVASIGDPKAFRSGRDFSAWIGLVPKQNSSGGKDKLGNISKQGDRYLRSLFTAGALAVIRYAKLHGTGHRPWLAALLARRPTKVAAIALANKIARMAWAMMTKGEHYKEPVALAA

SEQ ID NO: 315211 - protein, 318 aa, unidentified
MNDAKYIGLDVHQATITVAVRDSAGKLVIEAILETKAETILQFLRGVRGSLHVTFEEGTWAAWLHDLLKPHVTRVVVCDPRKNALLKVGNKNDRIDARKLSELLYLNKLSPVYHGEQGIRTLRELARSYLTITRDLTRVMSRLKALYRGWAIPCAGQQVYAPHYRGEWLAKISEAGVRRRAELYYLQFDTLAALRQGVRRELLAESRKHPATRLLRQIPSIGPIRAALLIALIQTPNRFRTKRQLWAYGGLARRTYTSGEYRFVSGELKRSKKVLAVRGLNLNHNHDLKNLFTKALQRERLLLRDPFRIFTKLVLLEG

SEQ ID NO: 315212 - protein, 345 aa, unidentified
MELHTIGIDLGKTVFHLVGLNLRGEVVVRKKFSRTQLLRFTANVHVGLIGMEACGGSHFLGRALREQRHEVRLIPAQYVKPYVKTNKSDYIDAEAIAEAVSRPTMRFVPIKTDDQLDMQSLHRVRERWVMRRTAVINQIRSLLLERGITLRKGRRYVDAALPLILEDADAKLSGAARMLLAQLKLELDQLAARIDEADAVIGKTAHENEACQRLVAIPGIGPVTATALIATIGNGGAFHKGREFAAWLGIVPREHSTGGQQKLLGISKRGNSYLRRLFVQGARAVMQQRSKQSLGLSAWLAQLTARTHRNVAAVALANKLARIAWAVLAKNEQYRPQVLAHVAAA

SEQ ID NO: 315213 - protein, 367 aa, unidentified
MKKVAYVGIDYHLNSLSIAVVVKGKKEPVDVVRLKNDDKMIRKYMNKLSERFEIKACYEASSNGYCFQRKMAAWGYPCEVIAPSLIPRKPGDHRKNDFRDARDLAQNYAHGTLSIVHPPTEEEEAVRSLVRCRFAFKEAAKKVKQQINSFLLGQDQHWNHSKWTPQHRKWLWEMRMPNAYLQQVLEEHLAHLDYLETRLQHLEDQIERIATSPVYAPSVTKLAAMKGIKTLTAMLLIVEITDFRRFPNPRALMAFLGLIPSEDSSGDKRKDGPITRAGNKRCRSALIESVQHYPRSPHMSAQMKSDLSQLDAYSAGIAVKCLKRLHKRFWALTLKGKLRPVAITAIARELVGFIWAMMQPPQPAIAQ

SEQ ID NO: 315214 - protein, 461 aa, unidentified
MRKNGKKTTAIQFSSGLQQLRKDAVGMDIGAREIWVDVGMENDPEPVRRFETFTADLNRMAEWLIGCGMKTVVMESTGVYWIPACQILEDRGIEVLLVNARYAKNVSGRKTDALDCQWLRTLHCYGLLPASFRPAHEIVALRSYLRHRQMLIQCAAAHIQHIQKAMTQMNLQLHHVISDITGVTGLKIIRAIVGGERDCQKLAAMRDARTHASQATIEKALEGDYRTEHLFALKQSLDAFDHYQKQIAECDRQIAQHIRSLETKAEPSSNLKPARSAKKRQRNLMEFNAREEAFRISGVDLTQINGINETAALNLISEIGINMNPWPTEKHFASWLTLCPNNKISGGRVLNRHTRKSANRARDILCLCAQSLLASRSALGAFCRRVCFRLGKPKGLIATAHKLALLIYRMLKYGRDYADIGQEQYEKQFKERALRSLARKAKELGFQLVSNSDLASEDGVP

SEQ ID NO: 315215 - protein, 344 aa, unidentified
MEHFAGLDVSVKETSVCIVDDTGKIVREVKVASEPAALLAVLKNPAYHFKRIGLEAGPLSQWLFSALAEAGLPVICVETRHMQAVLKAQINKTDRNDARGIAQMMRAGLYRPVHVKTLRSQKLRMLLTHRKLLQSKAIAIDNDLRGTLRNFGLKVGMVGTVKFEARIKELVENLPDLAVLVEPLLIVRRTLREQFCILHRRLLAIVRDDEVCRRLMTTPGVGPVVSLTYRATVDVPARFRKSKSVGAVFGLTCAKYQSGEVDWDGRISRCGDEMMRVMLYEAAQSMMRSKKWSWLKAWAMQIARRRGMKKAIVALARRLAVIMHRIWVDGTEFRWTREQAAAAA

SEQ ID NO: 315216 - protein, 461 aa, unidentified
MIIPALLSMQQVPLLPTNPQGVLQTRLSIFASKSKGYITNFTSRRFVMNDMKVKFAAYVGLDWADKKHDVCVQVGEADERHYYVIEHTPEVIEQWLVDLHKQVKGNIAVVLELNKGPIVYALQKYSFVTVFPIHGLTLARYRQAMFPSGAKDDPSDAELALDMMLHYPKKVTPLKPSSGATRKLNHLVAQRRLLVDDKRRNVNRLINALKQYYPQPLDWFSHRDSQLFFEFLLKWSSLQSLKRARHTTVANFFKSYGGNAVSNTVKRIEAIDAALPLTQDDAVIMPHQMLVVALCRQMLTLVENIRLYDKAIRKLFEEMPDAKLFDSLPGTGPCLAPRLLAAIGEDRSRFNSALEIQNYAGLSPVTERSGQSHWVHWRWQCAKFVRQSFIEWAAKSVHQSYWAGLYYANQKAKGKSHQQAVRALAYKWVRIVYRCWKTRTPYDESKYLKALKERNSPLLAA

SEQ ID NO: 315217 - protein, 338 aa, unidentified
MRDFFVGVDVSKAELVCRVLDEKGQERGKGSFANGAAGFRKLKKFLLGLDIDGRFHVGMEATGVYHRNLALFLYKSGERLVPGVFNPASVKAFGQSRMSRTKTDGQDALILARYTLELFRDGALRPWEPERPEVAQLQQLVSRREQLVSMKVSEQNRLHALEEDGESLPFLVESVRDEILHLEDRIREIEKMITRHMEGHPNLKADKDLLVSIPGIGQITAAAWLGHLGDLSRFEKPSQIVAHIGIAPRERQSGSSVRGKPQICRTGLKELRCALYLPVMAAATRLNPVLKSFYERLVTSGKRKKAALIACMNKLVHIIWAIMKSRRPFDPNYALARN

SEQ ID NO: 315218 - protein, 400 aa, unidentified
MGQPLWAGVDAGKSDHYCVVIDADGKRLLSRRVANDEAALLELINAITALADGSELTWAIDLNAGGAALLIALLIGAEQRLLYIPGRTVHHASGGYRGEGKTDAKDAAVIADQARMRRDLQPLRPEDDIAVELRILTSRRTDLVTDRTRAINRLRAQLLEYFPALERAFDYSASKAALILLSGYQTPDGLRHAGAARLAAWLRKRKARNADAVAAAAIEAAKSQHTVVPGQQLAAAMVARLAEEVMTLDTEIGDTDAMIEERFRRHRHAEIILSMPGFGVILGAEFLAATGGDIAAFGNTDRLAAVAGLAPVPRDSGRISGNLKRPRRYNRRLLRACYLASHIAIRTDTASRIYYDRKRVEGKRHTQAVLALARRRLNVMWAMLRDHKPYQPTAPNAAAA

SEQ ID NO: 315219 - protein, 370 aa, unidentified
MAQSTPLFVGLDVHKDSIAVAHAAGGRADPPVFVGAIGPRQADLDRLIHRLQGKASALTFAYEAGPCGYGLHRYLTGKGLACQVVAPSLIPKKPGDKVKTDRRDAVELARLLRSGDLTAVYVPSVEDEAVRDLCRARDAARVTGKDAKLRLKAFLLRLGRHYVGRATWNDAHRRYLAKVVCPTPAQQIVFQESVRAVDEQVDRLRRLEAELLERAPAWRLYPIVQALQALRGVQFLVAITVVAELGDLTRFDNPRQLAAFVGLIPSEYSSGGSRRQGGITKAGNGRARRALIEAAWAYRHPAKVSAHIQQRIDQLPKPLQDLGWKAQVRLCKRFRRLVARGKHPNVAVTAVARELIAFMWAIAKEVPLAA

SEQ ID NO: 315220 - protein, 364 aa, unidentified
MFTERTSVGLDVHARSVYAAAIDSDTGELLQSRLTPSHEHILTWLRDLPGPVAVVYEAGPTGFGLYRRLLDAGIRCEVLAPSKLQRPAGDRVKTDAKDAVHLARLLHLDEYVAVAVPSADQEAARDLVRAREDCRGDLMRAWHRLSKLLLLRHGILDTGGNAWTAAHHSWLVREAQTQLAHSSTRMAFDSDYEAVLAMEARRGRLDEAITVMATSPQYAPLIHRLGCLRGVSTLTGFGLAVEIGDWHRFTGNSIGAYVGLVPSEHSSGQSRSQGPITKAGNTHARRLLVEAAWHHRARYTIGKTMRDRWELAPAAARARGDAGNRRLHDRWARFIARRKRSTVANVAVARELAGWCWSLAVMQD

SEQ ID NO: 315221 - protein, 369 aa, unidentified
MKHSIIFTGLDVHKDSIDIALADDGRNGEIRFYGTIGGDLDSLDKAIRKFRRSGIELRFVYEAGPCGYEIYRHLIAQGFHCDVIAPSMTPKKSGDRIKTDRRDAISLARLYRAGELTPVYVPREDDEAMRDLVRGRGDAVNATRKARQRLSAFVLRHGFRYSGRNAWSIAHLKWLADIKMPHPAQQITLQEYINSIEESSERVDRLTDQILKLIPTWRMAPVVAALQALRGVAAIVATTMVVEIGDLRRFENPRQLMAYLGLVPSENSSGQTTKRGGITKTGNSHARRALIEAAQTYSFPAKVSRELRKRQEGLPREIKEISWKAQVRLCGRFRKLMARGKNRNRTVTAIARELSGFMWAIAKEVPMSA

SEQ ID NO: 315222 - protein, 340 aa, unidentified
MRLIGCDFHASQQSIAMLDRDTGVVVEKTLTHEGGTVREFYASISPPVVVGIEATGSMGWFLRLMEELAIECRVGHPTAIRKAETRRQKHDRRDAALLLQLLAEDRFPAIWMPSTEYRDLRSLLLHRHQWVRMRTRVQNALHAIVLAHGVRRGHTLWNRDGQALLASLPLAPHTAHRRSELQALYQHLAEQADRLDERVKHAADERPRATLLMTHPGVGPVTALATDVFVGDPTRFPDGKALASYVGMIPREYSSGTRQRLGALSKQGNPFLRFLWCEAAAHAVRRDPDLQRFYRRKVVQKGLAKARVAAARKLGIRLWIMLRDQIDYAEFCRRGLARQA

SEQ ID NO: 315223 - protein, 328 aa, unidentified
MHVAAALDPIGGLLGAGEFPATPAGYARLLGWLGGFGTVCLVGIEGTGSYGAGLSRHVTAAGIRVVEVDRSDRQDRRRQGKSDPLDAVSAARAAQSGRARGAPKGRDGAVEAIRALMVARRGAIRERTRTINQARALVLTGPDDLRIRFARHTTAALVAGIASLRPRPGDVPGYATRVAVRELGRRAVFLDGQLERLDELIAPLVTARAPGLLALYGIGPHTAALLLIAAGDHPGRLRSEAAWAHLCAAAPIPASSGKVTRHRLNPGGDRQANHALWRIVFTRMGSDPATRAYVERRTGEGKSKAEIIRCLKRYVAREVYPHLRPAAG

SEQ ID NO: 315224 - protein, 466 aa, unidentified
MEPFYMGIDVSKGYADFMIINSKKHPVVQGFQLDDTFDGHRSLYNILGRFLSEHPDASLFAGMESTGGYENNWYSALIEFQDVFNVQTARLNPLGVMHNSKAGLKKNITDKISAQNVAEYLVAHPEKIVYQQTDQLAGLRKQWGFIKMLTKQSTQLLNQLNTLLYTANPELLSYCKDGVPKWVLRLLVKYPGAARLKRARIKTVAKIPYVSPKRAQQLIADAKRSVASTTDVIAEQIIVATVRQILGLKKTIAVQTKRMINECAIPEIDLLKTFPGIGDLSAVGLFIEIQTVKRFAGAKKLASFFGVHPVYKISGDGLGGFKMSKQGRTAPRQILYMIALSAIQNNPLIKAVYEKHQQQGKPNMAAMGICMHKILWVIYGMLKNNQPFNPQIDIAHRQRSTPVKNDKPVKNTTRRFQDYDQKAPVTRRQKKKRLERERSHSVGDTKSGITAPVPLGNIIAKILPPL

SEQ ID NO: 315225 - protein, 394 aa, unidentified
MFLVGIDIGKLSHVFCIMDSTTGEFLVEPVSFKNNKQGFDLLINKIKSFPEKNVLIGMEDTGHYHFNLLKFLLDAGHTVALINPVTTDMTRKMQLGATKDDNLDAQLICDILASNQRRKGYRISKVNSFELYEQKRLTREHHDLKEQLNVYSNKLQKCIDIVFPEFNSLFRSKYGIVYMNVLKTFGSADSIAHANIRSIRKCFETNGRGRQIALTPERLKEVAKNSIGFPSKAEVIEMKHLIAMMELIHEQIRELDKKIEEFSLQLNSPILSIPGISHFSGTSILAELGDLHNYSTASQIIKFAGVSPYKHKSSQYEAQHTAITKKGSRYLRKTLYQVILPVIKLNPVFHAYYRHKLSQGKGHRCAQGHCVRKLLRIIYHLVTTNQRFDSELLR

SEQ ID NO: 315226 - protein, 458 aa, unidentified
MSYFYLGIDVSKGYADFIMVDASKNPVMEPFQLDDTKQGHSVLYQVLSRFLQQHPQATIYAAVESTGGYEDNWLNSLSSFQARMNLHCARLNPCGVHNNSKASLNRITTDAISAREVAEYMITHPEKVYFDQEDRLATLRKQYSFISTLTKQKTQLLNQLESLLYSSNPDILAYCRDKTPQWVISLLQKYPTALDIAQASPSSLAKIPYITKKRADELIQQAQNSVASATDKISSQLLASLAQQIDHLQKTINAQTKILSDSCSLPEVELLKSFPGIGTTTAVGLLLHIQTVHRFPDVKKFCAYFGVHPQFKESGDGTWEFRMSKTGHPEVRRILFMIAFSGIKSNPLLRDYYHRQRQKNISKMVALGACMHKVARVIYGMLKSGQPFNYEVDRRNRERTPASKPSKGRENTQRRYQAYDSKAPVSRRQKKKRREQGESQSAHGTGVRVHRACSLEES

SEQ ID NO: 315227 - protein, 372 aa, unidentified
MEQNTTYVGFDTSKETIAVALAEGGRRGEVRFFGTVANRPEAVRKLVDKLAGRHSRLAFCYEAGPTGYGLYRQIRALGHDCQVVAPSMVPVRPGGHIKTDRRDATTLAALFRAGELTAIWVPDADHEAMRDLVRARQAAMEGVRRARQQLLSFLLRHGRIYPTKRHWTRAHRRWLAEQRFEHPAQQIVFEELIQAVEQVMARRDRLEQQMIALVPSWSLQPVVAALQALRGVALVAAIILAAEIGDFRRFANPRQLMAWLGLVPREHSSGASTSRGAITKAGNGRARRLLIESAWTYRLPARIATGLLARSAALPETVKAIAWKAQVRLCARYRRLRCRGKPTNVVTVAIARELAAFAWAIAVTVMPAPQTV

SEQ ID NO: 315228 - protein, 338 aa, unidentified
MAIVYVGIDLAKNVFAVHGVDEAGKPVLVRPAVPRAKLHELIASLPPCTLAMEACTGAHHWARLFVARGHAVRLIAPKFVTPYRMSGARGKTDAADASAICEAVQRPNMRFVPLKSEQQQSQLMVHRARQGYVQARTACINRTRGLLAEFGHVLPLKAHTVRRQAAGLLEELPGWANTVIGDLLSELHRLDERIAAYDRHIAQIAREDERAQRLMSLNGVGATTATAVVAMIGSGHEFKCGRQFAAWVGLTPGQYSSGGKTRLGRITKAGDGYLRSLLILGARSVLALAKSRSDGLSGWALALQQRRGYWKAVVAIAAKNARMAWAVLRRGESFKLPT

SEQ ID NO: 315229 - protein, 403 aa, unidentified
MNNPALCIDVSKSSSFATGFLTYNKPYSKPFDFSHTPEGMKSALHCLKELQNDTNSKPDVVLEATGNFYKPITQYFTDNGYSVYVLNPLQTSMEKRKSIRKIKTDPVDTYRIAQVYYTNDLKPFKEQKHDAQELRSLCRQWDGFNALSTETQLRFRSILALVFPRYDAVFDHLCNPTSLRVISSFPSPNAVLSAKREELFNLVKLSKHSNDWCNQKVDMLIAAARESLSYDGAQQSNIRVLQSYVKSLLTHKEILSDIRAQINEWTKLSPDFQFLLSIPGVGEVTAATILGEIGDIGNFDTAKQLVAYAGLDPSVYQSGNFRAKNTKISKRGTPYLRKALFQAASAAVRKRPKGPCNSVLYEYYTNKLNAGKPPKVALVAACNKLLRIIFGMLSTQTEFRAEY

SEQ ID NO: 315230 - protein, 400 aa, unidentified
MISVGIDVSKGKSTVCILKPYGEIVSKPFNITHTQKDLSELSSMLFRLNDEVKIVMEATGIYHLPVLTYLQEKGFFVSVINPYLMKSYRNESLRKAKTDKIDSRIIANYGIDHWFKMKEFQTSGEIYEELKLLGQQYRHYMKLHLLSLAELTHLLDLTMPGIKNLLASWNETNRKDKRSDFVERFWHYDVITSMSEQEFTEEYILWAKEKKYVPSQEKAKVIYTLAQESIPTLPSETSSVKILVTEAVRVLKEVDATLGLILSRMQEIAKTLPEYSVVIEMGGVGNTLAPKLIAEIGDVRRFRNGKALVAFAGIDPPPYESGQFVGCNRKISKRGSASLRKVGYETMRSLKMRSRPEDPVYRYVVKKESEGKSKKSAKIAGLNKFLRIYYARVTELYKNI

SEQ ID NO: 315231 - protein, 364 aa, unidentified
MLDSSTLVRKIRPQEYDVFIGMDVDSRSIVMTQVDHLGIEKSVSMPHQGRSLLRYVGNHLRGQRIAFVYEAGPTGFGLHDTLGEAGYPCLVVTPAAVPTARGRRVRTNRLDARKLALQLRGGSLEGIRVPSEDYRLLREYVQLRKMHITEAARCKQRIKALFLRHGLEFPGAPAGGYWSRELIRQLRDYPCAAALRFKLASLLTSLEFSRLQGAAAQAAMRRFVAASPEIAASVGYAMSLPGVGWIVATYAVARIGDWRLLGDSQQMASFFGLTQREDSTGKGAERGSITKAGDPVMRSLLIEGAWTAIRKDAELRSFYQRVKATHAQDKGARIAIVAVARKLACRLHCVLKERREYQIRRTED

SEQ ID NO: 315232 - protein, 335 aa, unidentified
MKKFTYQVGIDVAKSTLDCTFLQEGKKLNYQRIANTPKAVNSYLRQLEKQGVRCCDTLFCMEHTGVYNAHILQVLIQNKANIWLEAALRIKESLGFTRGKNDKVDSYRIARYAYLHQDSAMLWVPRREVVQQLTRLTMLRKRLVKTKVALLQPLAETKQFLGNRAFRQERALTDPIASTLKKQIKRVEKQIEEAIKSDEHLSYLFELVTSVEAIGPVTAGHLLVVTNEFRNFSCPKKFACYAGTAPFENSSGTSIRGKSRVSPYANKDTKKLLHMAAMSAINMQNELANYYQRKVSEGKNKMAVINAVRNKLIKRIFAVVERGAKYEKNYTPTLA

SEQ ID NO: 315233 - protein, 313 aa, unidentified
MNNNEINVGIDTSLKILDVGIRPFGDFFSVSNDQKGIAELVKKLKKIMPTRVLIESTGRLEMDFVIAAFDAKLPVVICNALQINRFAQAIGQLAKTDKIDAFTIAHYGEAVKPELSQVKPKNLRKISSLITVRSQLLTSSTMYKNQIKRTPKEALSPLKAVLKTIQAQVDSVDKKLDKAINNVPHWKEKVELLMSTHSVGRVLAYTLLSELPELGRLNRKEISALVGVAPMNRDSGTKTGKRRIRGGRHKVRTVLFMSMMTAIQYNPKIKAFYQKKIAQGKPKKVALIACARKQLVTLNTMVKNGQHWDANMA

SEQ ID NO: 315234 - protein, 407 aa, unidentified
MDRAAGLDIAKASLVACARTPKPGGGYKIEKRKFASTTRSLLELAAWLAERGVTRVGMESTSDYWKPVFYLLESQAECWLLNARHMRAVPGRKTDMSDAEWICDLVAHGLVRPSFVPPPPIRRLRDLTRRRSVLLADRTREKQRMEKLLEDAGVKLSAFISDIFGASGRAMLDALIGGERDGAVLAQLALGRMRPKVAALTEALTGRFTDHHAFIAGMILRHVDQISTMVAELDTRIATEIAPYQQQVALLDTIDGVDVRTAQVIIAETGADMAHFPTAAHLASWAGICPGNNKTGGKAKPGHTRPGNRWLKSALGTAALGAIRKKSSYTNALFRRVAARRGGKRAQTAVAHSLLVTAWHLLTTNTAYHDLGGDYLTNRVNPDHHRRRAIATLERLGYHVTLNPIAA

SEQ ID NO: 315235 - protein, 310 aa, unidentified
MDAIYVGIDVSKDRLDVHVRPSGEAFAVARDGKGLEELVTRFAACSPTLIAVEATGGFETIVAAALAGAQLPLVVVNPAQIRHFAQALGQRAKTDPIDAAVIARFVEAVRPTPRALPDQEARLLAELVSRRRQIIEMIVAERQREKRVENVRVRKSLARHIKVLEKELPEIDNDIDTLVRGSPVWRDKEELMISFPGVSNTLARTFLAEVPELGTLNRRQIASLAGLAPFTRQSGRWKGKSMIGGGRAALRAGLYMAALSASRHHPQLKVFYRRLLAAGKPKMVALIAVARKVLTILNAMLRDQKQWQPA

SEQ ID NO: 315236 - protein, 437 aa, unidentified
MDVMFDRVAGLDVHKAMIVACVRKICSGKVERECRTYETTTTSLRDLLAWLAESQCTQVAMEATGVYWKPVWNILSDGDFDLILANAAHIKNVPGRKTDVNDATWIADLVACGLVKPSFVPEEEIQELRSLQRARKQLTREQTRHTQRIQKTLEEANIKLDSIVSNIMGVSGRRMIEAMIEGVKNPTKLAALADRRLKASPKELYDALHGRLTDHHRFMLKLYLGQYDALDKSIIEIDQMVDAAIARMDAEVAAGNATFRSLIDLLSTVPGLSALSATAILAEIGTNMSRFATAGHLVAWAGMCPGQNESAGKRKSSRLRKGAPWLKTMLVQCAWAAVKKKDSYYRAQFNRLKARGGAKKAICAVAASMLTAIYHMPKDGTEHTDLGADHFDSRTADIKAKRLVNQLNKLGFNQQKKLHKINGNYPCFSLGALRARI

SEQ ID NO: 315237 - protein, 385 aa, unidentified
MSELNDLSRSLTSLEQDKTIIAVIEMSQSSWLVAGIVPGIERHPLKKLEPSEEELVRLLMRWRTEATKNGHTITRFAVAFEAGRDGFWLARWLRARDIETYVIHPTSVAVSREHRRAKTDRLDTGLLKRVFIGWLRGEPDHCHMAAIPTLAEEDAKRPNREREGLVRERTRIVNRMKSCLARFGIRNFKPTLRKAPERLATLGTPEGVPLPPNTLLELRRDMARLRFVMDQIKEVEEARAQRLEQAPQEKTHAMVRLIARVIGVGIETADMLVHEILSRQLRDRRAVARYAGLTGAPDESGNKRREKGLAKAGNARVRRGMIQLAWRFLVFQKDSALARWYRTRTESAGKKRKTMIVALARKLLIALWRLVTIGEVPAGVVLRAA

SEQ ID NO: 315238 - protein, 387 aa, unidentified
MPEQFDSHNARAAFDHDSTLVVALELSGKSWQVGAVVPGVARRPRRRLEPRDMAGLLKAIERWVAEASAAGRAVRRVALIYEAGRDGFWIARYLLAQGVEVQVVHPASIPVERPGRRAKTDRIDLDMLLRTFLAWLRGEPRVCSMVRIPNEAEEEMRRPGRERERLVSERLQLENRIENLLCLHGIAGFRPRLKKAAERLEALRSFAGTPLPAKTMAELRRLMARHALLSEQLQEIEAERDRVATVAQPDPAEQMIQHLALLVGLGLETATLLVREMFCRSFRDRRAVAGFAGLTGTPFRSGGIEREQGIGKNGNARVRRIVMQLAWRWLRFQPQSALARWFAARTGGAKGRIRTVMIVALARKLLVSLWRYVGTGEVPAGARLAAA

SEQ ID NO: 315239 - protein, 458 aa, unidentified
MGKESKRQAARKVDWKALDVVHPEAAGIDIGGREQWVAINPEKEERPVRCFECFTADLERMADWLASRGVRSVAMQSTGVYWMPVLEILQQRGIEVYLVNARHTKNLPGRKSDVAECQWLLKLHTFGLLNNRFQPSDTVRALRTLWRHRGGLVAQASSPIQRMQKTLIEMNIQLSNVLSDLSGVSGMAILEAILGGEREPRKLAALADPQVKASKAVIAKSLHGNWRPELLFVLRQEMEIYRGCQNRIAACDQQLQRHLGTMESKVDTQAQPLGPRPKGKRARGNAPQFDLRTELYRLTGVDWSQVDGIDVQIAQTVIAEVGTRLDAFPSEKHFANWLGLCPSIETSGGKVLKRRTTKVVNRAKLAFRQAASTLLKSKSYLGAQYRRLRTRLGAPKAITAMARKLACLFYRLLTKGQQYVDKGAVYYESRHRQQQVRSIMRRASQLGLKVLLTDGEAA

SEQ ID NO: 315240 - protein, 343 aa, unidentified
MPDYVGLDVSLDQTSLCVLDAAGQIVRETKLDTDPDAIAEYLGQAALVIERVGLEAGPLSQWLHAGLVAHGLPAVCIETRHTKAALGAMPVKTDRGDARGIAQLMRTGWFKAVHVKTHQAQEWRLLLTQRRLLVNKLIDVAAEIRGTLRGYGLKMGRVGRAGFAGRVRELLADRPSLLRVVEPVLLVQAMLLSQREALHRMVLQAVREEEVCRRMMTVPGVGPITALAFRATVDKAERFAHSRDVGAHFGLTPRRYQSGETDRSGTITKTGDALMRHALYEAATSMLVHATKPSALRNWALVVAKRRGLQKARVALARRLAVVLHRMWRDGSVFQPQGRLTTI

SEQ ID NO: 315241 - protein, 400 aa, unidentified
MLSIGIDVSKGKSTVCGMKPGGEIVYTPFEVQHTREGMSELVSLLRSSGEEVRAVLESTGSYHCLVVAALLENGIFVSVVNSLRMKRFCSQSIRKVKTDRIDAMQIALYGLAYWQELQPTRLPEDTYRELQLLARQYYQMTSILIKAKVDFNALCDQVLPGMQELMNDHAGRHKISGFVLRYHHTTHILEMGETRFRKDYCKWAEKKGYRNCERMAALIFATAQNGIPVLPNAPSTQIVITEAIRVLHTVEASRDAILTQMQALAKTLPEYSLVREMPCIGDTLAPRLIAEIGDVRRFHSKRALIAYAGIDAPPYQSGKFCANNRHISKRGNRYLRKTGYEVMQSYVMHKPANDPIFTFIEKKRSEGKCGKLAMVAGLNKFLRIYYGKVTELYRSSSAIE

SEQ ID NO: 315242 - protein, 338 aa, unidentified
MELKRIAIDTSKWVFTLHGVDAEERPVLRRDLRRGQLVAFFTKLAPTEVVLEACGGSHHWARTLSRLGHRVGLIPPQYVKPFVKRGKTDRNDAEAISEAASRPAMRRVAIKSAAQQADAVTLSARELLVAQRTQTINALRGHAGEFGVVVAGGANRVAELLAAVAQEADMPPTARRLLAFLGQQVAHFDREIAKLDTALMRQHKANPVSQLLAEIPGIGPIGALTLAVRIEPAQFQSGRHLAAWIGLTPREHSSGGKRRMGGISRAGDERLRQLLVLGATAIIRYAKPGRSSAWLLSLLERRPRKLAAVALANKMARIAWAMMTTGEAYRRTPFAATA

SEQ ID NO: 315243 - protein, 424 aa, unidentified
MKFKMQDKQNQLIERISDKHLVVGVDIAQQLHVARAVNFRGIVVGDPLTFENNEEGFANLLHWINNLQRLNNLDTTIVGMEPTGHYWINLSKWLFNQNIEVVTVNPHLVKRNKENRDNTQSKSDKKDALVIADMVKNGYYALVRPTSESFEKLRVLMSNRDVVVKRLVSSINQLNRWVDIVFPELREVFKDITGKGAIATLRLFPSPMELRSMQPHEVIMGWKSLMKRQPGLKKAQLLLQVARRSIGTRQALDAHKFHLEQLLEEYDLAVLQLERVEKEVKDVLDQIPFAKKLLTIKGISEISLAGILGEAGDLSGFSHGNSLLRHAGLHLAEASSGKWKGQIVISKRGRSRLRRFLYLATMSLVMNNPEFKAIHSNNVKVKKIKKMKSIMKLVGKLARIFVGIARRNEAYCPSKVQPLTELAA

SEQ ID NO: 315244 - protein, 427 aa, unidentified
MKKNISKTTKTQKQGNGKRKQLRETKRNVAGLETAKKRKAKQRGVEQEVKEGHGNANGGADERQAVVEFKAGEGEGYTIGIDIGDKRSRYCILDKEGKIVRESSVATLPASLQTVFSKLAGCRLAMEVGTHSPWVSRLLTALGHEVIVANAREVPLIYKSRRKNDKLDAEKLARLARLDPKLLKGIRHRGAEGQGDLLLIRSRAQVVETRTGLMNMVRGLVKSRGERLPGCSSEGFVVELLEGVDEAAVRALKPVMVLIEQMTATIKEYDKQVEEMGKKHAEIARLDEVKGVGPLIAATYVLTIEDPERFGRSRDVGGYLGLVPGQSDSGESQPQKRITKAGDGYLRYLLVQGAHYILGPNGPDTDLRRWGLKLGSSGGDRGKKRAVVAVARKLAILLLVLWKTGAKYEPLRNSDKQEKQDKQKVAA

SEQ ID NO: 315245 - protein, 351 aa, unidentified
MPRTSTVHAVTTIGMDMGKNTLHMIGLDTRGAIVLREKVSRGRIASRLANLPSCLIGIEAGLATHYVARELAALGHDVKQVPPTYAKPFRQGHKNDFRDAHSVAEAVQRPTTRFVPAKTDEQLDLQALHRVRSRLVSERTAVINQIRGFLLERGIIVRQGLRFLRQALPDILAKRTDVLSPRMVRIVADLASDWRQLDERIEPVTDEIETLAKSDDGCRRVMTVPGIGPIISSAMVAAIGNGAAFARGRDFSAWIGLVPKQMSTGDRTILGRITKRGNGYLRTLFVQAARVILLRPASWPKHSFGVWLARAAQRLHRNVLAAALANKLARIAWTVLAQERSYEARVTKAAA

SEQ ID NO: 315246 - protein, 441 aa, unidentified
MNLNAAGIDVGADRHLVAVPPGRDAGNQDVRQFGTFTADLQALADWLMVCGIETVAIESTGVYWIPLFDLLSERGFDVKLVNPRQLKHAPGRKTDVLDCQWLQQLHTFGLLTGAFRPDDAGCVLRAYLRQRAMLVSCASEHIQHMQKALEQMNVKLPEVVSDITGVTGMAIIRAMLAGERNPQTLATLRDRRCKQDEATIARALEGSWREEHLFSLRQAVELFEVYQTKIGDCDRAIETCLQGFDDKSDGQPLAPERRSSKPHRNEPRFDARSYLHRLTGVDLTRIDGLNAHSALKIIGEIGTDISPWRTEKQFARWTMLAPNSNITGGKAHRSRTKIAASRVAAILRMAAESLHHSQSALGAYFRRLKNRIGAAKAITATAHKLACLIYKMLKFGTEYVDQGQDYYERRYQQRVVANLARRAQQLGYQLVKNEGPSPAAA

SEQ ID NO: 315247 - protein, 309 aa, unidentified
MKQSVVYIGIDVAKAHLDVAWAGTFRRLPNERSGHAVLVRWIKQSATPVQLICEASGGYEQGLLESLEKSEVKVTLVHAVRVRQYARAAGILAKTDQMDAKVLAAFGSAMQPPPTPPLCAEQKRLRQYEAQRRHLSRVLVAEQNRLAQLSCAELRTLSRGLISKIKKQIETIDTRIGDLTAQDQTLREKAQKLTAIRGVGVRTAALLLAQMPELGQLNRRQAAALAGLAPFNHDSGSICGKRAIFGGRRALRSGLYMAALSAARFNPILSRFYRRLRTKGKPHKLALTAVMRKLLLALNQTLKPIPSLA

SEQ ID NO: 315248 - protein, 384 aa, unidentified
MHDHLEHTAIRTDLGAIFVSLELSRSIWLITSLSPGAGEKLSRHSVPAGDVGGLLARLAQLKHKAADRLDREFPFIVIQEAGLDGFWIHRVLESEGIESHVVDAASVLVSRRRRQAKTDRIDGETLVRTLLAYKRGEPRVCSMVRPPSPEEEDRRRICRERKTLLAERIKHTNRIKGLLCAQGIFDYDPLLRNRRARLDGLQTGDGRTLPARLKAQIGRELDRIELLLDQLKAVEVERDALIQPAEETAPTPAVMLAQLKGIGSQIAAILWSEALYRKLDNRRQVAAYAGLAPTPWKSGSIDHEQGVAKAGNPRLRTTMIQVAWLWTRHQPTSALSQWFFERVARNGGRMRKSNIVALARKLLVAFWKYVSSGVVIEGAVMQAT

SEQ ID NO: 315249 - protein, 348 aa, unidentified
MDHIGIDVHKKESQICILAEGGELLEQRIRTEPARFAAVLGARPRGRIVLESSTESEWVARCLEGLGHEVVVADPNFAPMYATRTRKVKTDRRDARALAEACLLGAYRPAHRLSDPQRHVRARLLVRDAIVRTRTRYISLIRALLRQHGYRLPSGSAEGFLGRVRAVALPGPLRSQIAPLLAVMCHLNRQLTYSDATIEHLAVQDPRVQRLRSVPSVGPVTAAAFVATIDDVQRFRHAHQVEAYLGLVPREYSSGESQYRGHITKVGHARMRWLLIQVAVSILRRRPPEADALRAWALRIALRRGKHIAVVALARRLAGILYALLRDGSVFTPRPAPHPDAVAAAPRE

SEQ ID NO: 315250 - protein, 310 aa, unidentified
METKLYVGVDVSKDSLDVAIGPQTNIITLSNDQNGVDALVKKLSRMGPELTVFESTGGYELLAASLLVEAGLAVVIVNPRQVRNFAKATGILAKTDAIDARVIARFAEAVKPDVRPLKDRETSDLTALVTRRRQIVEMIVAESNRLKLANKRSKKDIKDHIRWLEKRLDKIETDIGKTIQNSPIWRCKDNILRSVPGIGPITSATLICDLPELGVLSSKKIAMLAGLAPLNCDSGKYKGRRRIWGGRASVRSGLYMATMAAIRCNPAIKIFYQRLTAAGKCHKVAATACMRKLLIIVNAMLRDQTLWQQN

SEQ ID NO: 315251 - protein, 394 aa, unidentified
MNPSDRVVIGMDPHKRSATIEVMTGEETILGGGRFGTDRHGYAAMVTYVKQWPQRIWAIEGCQGIGRHIAHRLLADGEQVVDVPPKLSARARVFATGQGRKTDATDAHCVALVGTRMAGLRPVVNDERLALLRILVDRRRSLGQDHTRMVSQLHQLLLELIPGGAKKSLSAAQAKALLATVRPRDVVGKARRRVAAELIADLERVYQRSKQADKELREMVASPGTTLMDLHGIGPCGAARLLVEVGDISRFPNRAHFASWNGTAPIDASSGDQVRHRLSRAGNRQINRVLHIMATVQLRNPTEGRAYFDRKKAAGKTSMEAMRALKRRLSDLVYRQMINDATTATAVTKTGPGGHQGTSTNSSVASSHPHAGSSEKSLPGPADDQPRTPPPAVT

SEQ ID NO: 315252 - protein, 338 aa, unidentified
MAMYCGIDLHSNNNYVAILKRELEDVCGRRLGNDLGRVLSYLEPYREELVAVAVESTYNWYWLVDGLKEADYDVRLVNTTKASKYADMKYTDDKHDARWIARLLALGILPEGYIVAPEDRGVRDLLRRRSFFVQKRTAHLVSLRTLLERSIGKRVEVSNVQKWTAGTVRELVDDPWVVESVSVMLPVIRVLNTQIRNVEKRVLAESKPRAEFRLLKTAPGIGDILAMTIMHETVDIARFQKVGNYVSYCRCSKSEHTTNHKPKGAGNRKNGNKYLSWAYSEAAHHAIRYEPLAARYYARKKRRSHPMVARRALAAKIARACYYMLRDQTCFDALRTFH

SEQ ID NO: 315253 - protein, 343 aa, unidentified
MEIRSVGIDLGKTTFHLVALGDNGKVLLKKKFTQRQLIAFTANLQTCLIGMEACSGAHFLGRTLRQQGHDVKLIPAQFVKPFVKSNKNDFIDAEAIAEAVDRENMRFVPIKTDDQLDLQALHRVRDRLIARRTSVINQLRAFLLERGLVFAKSPARLRERMPEILENADEDLTPRMRNLLALLWNEWKDLEQQLVDLNQEVERIASSDAACARLRQIPGIGPLVATAIVAAIGNGAAFRKGREFAAWMGLVPKQYSTGGKAKLAGISKRGNHYLRKILIHGARAVVLRSKRDRIAMGEWMTALEARAPRNVLIVAMANKLARIAWAVLSSGQDYRAVQEPVAA

SEQ ID NO: 315254 - protein, 347 aa, unidentified
MKFYTKSHQYYCGIDLHARLLYVCILDERGNKVLHQKIKADPHQLFKLLEPYIGNVVVGVECMHCWYWVSDFCRELKVDFILGHALYMKAIHGGQAKNDKIDSYKIASLMRGGNFPLAYNYPAETRSTRDLLRRRTHIMRHGGELKAHVVNTDSQYNLPAQSLNLKNVSAREGLRHHYDDPIVQRMIELDMNILDCYIRELKHVESFIENKAKQHYGALLSIVRTFPGIGQILGLTILYEIGDIERFASVQKFASYSRLVKCKAESAGKTYGTSGNKIGNGYLKWAFSEAAVLYLRNNDKAKHYLTTLQKRMNKAKALSALAHKIGRCVYFMIRDKQVFDEKKFLKG

SEQ ID NO: 315255 - protein, 342 aa, unidentified
MEYYAGIDVSLECSSVCVVDANGKIVCEAKVASEPQALISWFGSLGFGLQRIGLEAGPLSQWLFAAMKAAGLAVELLETRHVRKAFEAMPVKSDRNDARGIAQLMRLGWFRPVHCKSMSAQETRSLLTARKLVQSKLQDVENSLRGILRGFGLKVGKTTGQTFAGRIEELVAGHPHLQIIAKALLAVRAVLRTEFAAFEKQTRRMVRSDTQARLLTSVPAVGPIVALTYASAIDDPARFKSSKQAGAHFGLTPKKYQSGETDYTGRISKIGDAAVRTALYEAANVMLTKPVKGCSRLKSWAMRIKRRAGMSKAKVALARRLAVIMHRMLADGTPFNAAVAAA

SEQ ID NO: 315256 - protein, 373 aa, unidentified
MPTNLRYVGLDVHAETIAVAVAEADGEVRSLGILPNRLEAVAKLIRKLGPREHLRVCYEAGPCGYVLYWQLTRLGVHCDVVAPTLVPMKPGERVKTDRRDAEKLARCYRAGDLTAVWVPDAAHEALRDLVRAREAAKQDQLRARHRLGKFPLRQGRRPPEGVKPWTQRHRRWLDALHFELPAQQATLADYLYEVDHAAARVARLESALDEAVAAAPAPMRAVIAALQTLRGIRQVIAATIVSEVGSLARFTHPRELMGYSGTVPSEHSSGDRVHRGAITKTGNAHLRRVLVEAAWAYRFPPKCAKGLRQRQRGQPAAIIDIAWKAQQRLCHRYHRLLARGKPTPHVITAIARELVGFIWAIGIAVERGQAMAA

SEQ ID NO: 315257 - protein, 343 aa, unidentified
MKFTRCGLDIAKQVFQVHGVNEHGVVKGRKRLPRAKVLEFFAQLPCLIGIEACGSAHYWARELATLGHTVKLMAAQYVTAYRKRGKNDVNDAEAICEAVGRPNMRFVAIKSEEQQAVLMVHRARALTVANRTAQVNQIRGLLGEFGLVVPRGLWRLRRELPDILEDAENGVPALAREVLAGLLEQLREADTRIGAYDRQIRALAQASEPARRLMRVESIGAQTATALVATVGDPHVFKNGRGFAAWLGITPRQHSSGGKEQLGQITRQGDGYLRTLLVHGARSYLRVVDKKTDAKSDWARRLKERRHVNVAAVALAAKHARIAWAILAHGTEYRPAGPQSAVA

SEQ ID NO: 315258 - protein, 411 aa, unidentified
MSGLLQKALPVETLVVAIDPGKVSNRVWLASGDRGLVAEPVSLPTLCDGVDELERLVERSGVPGRPLIAIEATGSLHRAWTAELERRFPGRVRLLAPSETQAARAQLGSRRFKSDDRDCAALVWLARQGLGRRPDEPALEALLGSVRHRRALVSELKVLRQRLHDQLNVLCPGLSAPTGHGRALDLLRPSGRAVLSCAVAFGGRAPSARSLIARAPGRLTRASAEYWSTRWRACLPPPADAELRVERLRFDLERLELLSAALAATDAQSERLLTETQGQVLTTLPGVRVVRAAAFACHSLPIERFPSAERLYSATGLAPASYESASVSRRGGISRQGLPDHRDALMAIAWGLSQHSHAFRQRARQYAARGFAPIQARVALARHACRLCHALLRTQQPYDEERYCQARSRGR

SEQ ID NO: 315259 - protein, 388 aa, unidentified
MLPVINALEVQKGKPAMKKNITELENPRRRVARKNKQRELTIGVDLGDKASRYCVLDREGNVLFERSTATTKRGLAQAFANMGASRIAMEVGTHSPWVKRLLESWNHEVIVANAHRVRLITESTRKDDRLDARKLARLARVDPELLSPIRHRSEGAQAHLVMIRARAALVEARTKLVNSARGVTKSFGERLESCDPDQMRVKCLVRLPSSLQSALQPLVTAVESLTRQIHEYDNQIAQIARREYPETARLRQVTGVGELIALTYVLTLEDPQRFRRSRDVGGYLGLRPKRRDSGASRPQLRITKEGDVYLRMLLVQGAQYILGWHGVDTDLRRWGLKLAARGGKNAKKRAVIAVARKLAVLLHRLWITGERYEALRQNQAASSLPVAV

SEQ ID NO: 315260 - protein, 379 aa, unidentified
MMTPSIAATCFVAIDLSKSKWLVALDAPQLAKIKSVRLDGFDTAGLIDLVRATVAEASELCGPHQRPIVCFETGYDGFWLQRLLSSEGIETLVLDPTSFLVNRRARRVKTDRVDAEGMVVLLKNYCSGDRKAFRTVRVPTVAEEDAKRFHRERKRLMSERTGHINRIRALLALQGVRHINPAMVTWRKKLDGLETADGRPFPDQLMREIVRSFERLELTNKMIKALAEERDEALATESERFPEHEKAVLLEGLRGVGRHSAMLLSAEVFGREFKNRRHLSSYLGLTPSPYSSGDVERSQGISKAGNRPARTLGIELAWCWLRYQPQSALARWFRKYTAEHPGVRKKVAIVALARKLIVALWRYVETGLVPSGAVLKAEV

SEQ ID NO: 315261 - protein, 345 aa, unidentified
MTRFVGLDVSQKLTAICVVDETGRRLWRGQCATDPGQIERMVRGHAGGDARVGIETGPMTPWLVHELRGRGLDVVCLDARHASAALKMQMNKTDQNDAEGLAQIMRTGWYRPVHVKSLDAHRARALLGARAQLVGMTTRLSIHIRGVLKTFGMLPGAMRGLPFDRRVEGLLVDRDDLAPIVRPMLAAWRQLREQIAAFDKAVRALAKASPTCRLLMSVPGIGVLSVLAYVSTVEDPARFARSRSMGAHMGLTPKQYQSGEVDRSGRISKCGDTLARTLLYEAAVVLLTRVKRASRLKDWAQALAKRSGPGKARVALARKLSVILHSIWKTGKPFRWSEQELPQAA

SEQ ID NO: 315262 - protein, 340 aa, unidentified
MAIVAGFDVHRVQITFDVLNEETGEVHRGRIRATPEAVREWAGRFTGGEVHVAVEACTGWLFVCEALVEAGATPHLAEPVETSALRGNKRRAKTDREDARWLRTLLCEGRLPEAWIPPAHVREWRTRARLRKTLVDERTTWLQRVQATLFHHGIAGAPDKLLSPEGRAFLDALELPDAARERIGVALGMIEALDGQLAPIERELRQLARRQTGCRALMAHYGIGELTAPTILCELGDVTRLSASRKAVRCAGLDVGVHRSDRRSRAGKLTRQGSPQLRWALYESAQAACRPTSPDRADYLALKARGLSHTRASLTMARKLARRCFHTLRELGPDALEPLA

SEQ ID NO: 315263 - protein, 339 aa, unidentified
MSEAGYVGIDLHRRRSVIVQMDAAGEVLSTTRILNDKESLARALEPAGPDAKVVMEATYGWYWAADVVKASGAELHLAHPLGIKGFNYRRVKNDVRDAMDLADLLRMNRLPEAWVATPEFRELRELVRHRYKLVSGRTSLKNGIHAVLGKQGAELGIGDIFCIEGRRRLENILLDPAFRMRVDAQLRLVDVFDEEVDAVDAELRQRLKGHQGYHAIQAIPGVGPVLAATMVAEIGDVSRFPTSRHLCSWAGLTPKVRDSDTTSKKGRITKQGSRVLRWACIEAACRTHPNHLRAWSDQITERKGNRLIARTAVARKILTLAFYGLRDGEIRCLARAEAT

SEQ ID NO: 315264 - protein, 419 aa, unidentified
MASNKTKKVKNINKKTMIATIDIGKNIHYGYFRAPDGHELKPFRFYNSKKSYHQFWSKICQFKSQHQLEDIVIGFESTGPYAEPLFHYLKKKPAKLVQINPMHSKRVKELAGNSPNKTDHKDPRVIADIISLGHALTLVVPEGAAAHLRRLTQGRERALKARTAMLNQLQHLIFVIFPEFLSIMKDISTKTAAYLLNHHAVPESIVELGLDDLTRVMKKVSRGRLARQRAEELFEAAKKSVGIGEGKQSILLEIEHLNAMIANEDRFIASLEKQMMCYLEQIPYSDSLLSIKGLGVVTVAGLIGEVGDFKKFDTHAEIMKLAGFDLFEVSSGQHRGQRHISKRGRALMRKLLFFAAINTVRSQGIMHTRYQQMLDRGKPKMKALIAISRNLLRLIFALARDNTMYIENYNPTHNYKLAA

SEQ ID NO: 315265 - protein, 345 aa, unidentified
MKITTIGLDLAKRVFQVHAVDGAGEVTVRKTLRRAQMLGFFAKLDPCLVGIEACGTSHYWAREITKLGHKVRLMPPAYVKPYVKRGKTDASDAEAICEAVTRPTMRYVAIKSPEQQAALALHRTRDLFVKQRTQLVNMIRGLLAEFGIEIRRGITHALMLAERIAAGEIPDIPPLAAKVITGLAGQILDLQARLREIERELLAWHRSSDIARRLATIPGVGTICATALAASVTDPHRFRSGRQFAASLGLTPLQHSSGGKERLGRISKMGDKYLRRLLVVGMTSLVRRAKYKPKAVDPWLADMLSRKPARVVTVALANKTARVIWAIMARGGTYRASQPAGGGIS

SEQ ID NO: 315266 - protein, 359 aa, unidentified
MQASTVDTPTAGHCCTIFVAIELSQKAWLVTLHSPDRDRISRRTLEGGDDAGLLALLEGVRTRAAGKLGTAPKVVTCYEAGYDGFWLHRLLTAAGITNLVFDPASIAVEQRSRRAKTDRIDGELLLRTLMAHLRGEPRVVRIVRVPSVEQEDVRRASRERDRLVKEQTGHTNRIKALLRLMGMAVSNPRRSDWLSWLAQQRDRQSRPVPPHLMSEVAREHARLMLVREQLAALEQAPTAAVAAAPAPMAERRNLLLRLKGLGPVFAATLTNEVFYKDFRNRREVASYCGLTPSPWRSGGIDREQGISKAGNPRARLKAVELAWLWRRHQPDSALSRWFAARTANAGKRARRISSPWRAS

SEQ ID NO: 315267 - protein, 356 aa, unidentified
MKYVGIDVHKKMCQAAILDDEGELLDQIRFLNEKKDIKEFALKLTTFRDDVKAVVESTGNLWIQIYDILEKFGFEVFLSNPGKTRLIAEAKNKTDKIDAKILARLLRADMLFTCYVPGEEIRNRREFLRARQDFVKNKTQVKNRIHSILDKHGLRFPGTPFSKKSIPWLREQDLGFMDNAVVKGQLALYETLEEQIQIFEDKIAAMGMEDPQVKLLMTMPGIGYFAASMLVAEIGDINRFSNDKRISSWAGLAPRIHQSGGTTRIGRVGRGNKKISGLLVQCAHNARQHDPRFKRFYDRYHKRSGKGKALVAVAHEMIRIIYFMLRDNAPYRGQNVKMTTRKLKRMKYRASVGLQN

SEQ ID NO: 315268 - protein, 344 aa, unidentified
MTKTSITVLGIDLGKNSCSVAGMDATGAVVMRKRMTRDAIVTFAASLPACVIAMEACCGAHFLGRTLALQGHTIRLMSPEYVQPYVKAQKTDDRDAEAIAEAATRPTMRFVSLKNETQLDLQILHRVRERLVNARTALTNQMRAILLERGIIVPKGRINLMRRVEGLMTGDPALSARTRTLLGDLCDEWAGLDRRIKEYDDELAALTRDDVQARRLTTIPGIGVINATALIAAVGDGSAFAKGRDLAAWLGLTPRQHSTGGKAKLLGISKRGNRYLRKQLIHGARAAMPHLAAKPNQMGAWLQKMLTRAHPNVVVVALAAKLARIAWAVLRHGESFDRRELVSA

SEQ ID NO: 315269 - protein, 345 aa, unidentified
MEHYVGLDVSLKLTAISIVDRTGTIQREGVVHSDPEAIAAFIKSNAPHVARIGLETGATSTWLWTELNKMGLPVICIDARHAKAALKMQINKSDRNDAVGIARIMQCGWYKEVRVKDLDSHAVKALLISRALLVKIKRDLENQIRGLLKNLGLVIGSARMNAFALRAAELIENRPELAVAVTPLLTARVAIGQQIADLDRKVMKLARSNAQVRQFMTAPGIGPVTALCFLATIDDPTRFKRSRSVGAYVGLTTRRYASGEIDWTGRISKCGDKMLRGYLFEAANVLLTRVAKWSALKAWGIRLAKRSGLRKAKVAVARKLAVILHRMWIDGTEFRWSKETAMQTA

SEQ ID NO: 315270 - protein, 354 aa, unidentified
MLIIGCDFHTRYQQIAMAREETAELLVERRLDHESGEARAFYRGLQNSQEPVRVGIEATGPIHWFVRLLAELGHELWIGDSARIRASEIRKQKTNERDARLILDLLLAKRFPKIWVPTSAERDLRQLLWHRHKLVCLRTMLGNQLHFLAMSQGLCRKQKLFTEKGRGELLGLALGPWAGRRREELLKLLDQLAPAITELDRAVLEAAKHRDDATLLMPHPGIGPVTSLAFVLAIGPITRFHCSKKIASYLGLNPSEASSGGKRRLGAISKQGNTMVRWLLIEAVHSAVRKDFALRQDYQRLKFRRGHAVAKVAIARKLAVRMYWMLRSGAAYAQLVRRQGSPGATLVDASPSLG

SEQ ID NO: 315271 - protein, 403 aa, unidentified
MNNVAGIDVSKGKSMVSVLRPFGEVVAKPFSIGHTGSELKELADYLKSLDGETRVVMEHTGRYYEPVARFLHEEGVFVSAVNPKLIKDYGNNTLRKVKTDKADARKIARYGLDNWAELRQHTPMDTIRMQLKTLNRQQSLYTKTKTMMKNNLIALLDQTYPGVNALFDSPVREDGSQKWVDFATTFWHVDCVRNMSLTAFAERYRKWCKRHGYNFSQSKAVEVHAGAQDLIVMLPKDALTKTMVRQAIDALNAVSASLERLKAEMRTLAAQLPEYPVVMAMHGAGDSLGPQLMAELGDVTRFTHRNAITAFAGVDPGADQSGTHEAKSTRVSKSGPPELRRALFLVMDCLLKTQPQDDPVYRFMDKKRAEGKPYLVYMTAGANKFLRIYYGRVKEYLASLEGN

SEQ ID NO: 315272 - protein, 454 aa, unidentified
MREPPHKKTNIMNPTHPYDLVIGLDRSDKKADLCLIDTRTGQRRAEIIDTAPEALWEWLLELRQQHPQARVGLCLEQPAVHLIPFLEAYDWITLHPINPITLQKYREAFVTSRAKDDTKDADFLADLLLTHHAKLPVWAPEDSATRAVQQLVFHRRAVVDERTGLSNRLIALLKSYFPQALILCGDDLWRPLATAFLLKWPSLQAVQKAKAATLKPFYYLHGSRSAKLVEQRLALIAKAVPVTDEKAVIGSFALRVQLVCRQLQLVQQSVSEFDRQIAAAYAAHPDRMIYASLPGAGPVLAPRLMASMGSQRERFAAAENLQHYTGIAPVTKRSGGSCYIHRRYRCPKFHRQSFHEYAKESILWSRWAAAYYLQQRSKGSPHHTAVRALAFKWQRIIWRCWQDHKPYDEPTYEAALQKNGSPLVALFDRVELGKSPFKNPANKLKKSVDGLPQR

SEQ ID NO: 315273 - protein, 368 aa, unidentified
MPSMLLRRDDVLVGVDTHKDEHVAVLLDGLGGRLGEKFIPATAAGFTDLLSFCQSHIGPAGRLVGFGVEGTGSYGIGLARYLRRQGQTVHEVHRPPRRGERRMSGKSDSIDAEYAARQVLAGSMMAVPKTADGQVEALRLLKIARDSAVKAQTSAMITLKATLVTADDQLRAELEPLTDHKLVLACAALDSPPCLSDPDAAMRHVLASLARRWLTLHDEVKIHTAHLKTQTKTAAPQLVAAVGVGFDIAAEMLTTAGDNRTRIKSEAAFAKMCGACPIPAGSGKTNGRHRLNRGGNRQANAALYRATIVRMRWHQPTIDYVARRTQEGLSKREIIRCLKRFLAREIYHLLPPLAEQLEAPQQPLQTAA

SEQ ID NO: 315274 - protein, 353 aa, unidentified
MKFDKYIGCDLHQATTVVAVLDGEGKVVLETIIATEAAAVIRLLKSLSGPLHITFEETTQARWMYDIVRGYVSEAIVCDPRRNKLLGEGSKADKPDARKLAELLRAGLLRPVYHGHEATRQLKELVRGYETLSADTQRVMVRIKAIYRAHGIRTSGSSVYQQKQREQWLQLLSEPGTRQRVSWLYEELDHLRPLRKQAKMAMVAEGRKHQAFRLLRTIPQLGPIRCAMLVATVDTPYRFRTKRQLWAYSGLAIVTYMSSEYEIKAGRVVRNRKPVATRGLNRNCNRRLKDLFIGAAVAGSRSEPYRSYVEGLQQKGIRAEMARLTLARKIAAVALRVWKKGEAFDPKKLNSTT

SEQ ID NO: 315275 - protein, 437 aa, unidentified
MTTHNHSTSPRAIVASLNETINQNNSEPAVSVNITGSSTIRLIDGFRPMGIDLAARKYQICFQENLGRLINTEVNKAELRQFLINAEHKYLICIEACSGASYWKRYAESCGHKVKVISGKVTKALNWLKNKDDYIDAYSLYQALFIPGLPSCQTHSEEELAISALISEKEALLKNLNVQINKTRSLLIETGEYDRAIRGADSAMNAIDDYLSAHIHDAVEHRYTIICMKELRKMLVILTKSIDEINCHICEYAMHSEVAGLLLTIPGIGVETAVSIAIDAKSIDRFASARQFQAFFGFFPSHSGTGGKIAMGRMANNGNRAVKRTIYEGALSIYHQGKISGEPRSAWINSKAALNKGAFKKGMIVIAGKMLRTAYGVLKSGKGYNPAVDNSLGRMKARLHRRSNPKYREQEQNATQLNCYLNSYMQEERLTDIDYLF

SEQ ID NO: 315276 - protein, 416 aa, unidentified
MEGSITWVGIDAHKKTLAVAVLAPGNRPVEEFTIDNNEQAIKKLGRRLARTAKGQEVRACYEAGTCGYTLQRRFEAAGVVCEVIAPSLIPRKPGERIKTDRRDARKLGELLRAGVLTAVSPPSPEQEAVRDLCRCREDVRADLARCRHRLVKMLVRRGLVFDAHQRLWSVAHRRWIEELVFDNETDRVIVAEYKLAIEQLERRLRAMDAELEKAAQLPLYRDHVAWLRCFRGIDTTVAMIFVAELHGIERFDSPRALAAYLGLVPSLYASGESERRGKITKTGNGHIRRALVQACWQYRHRPGVGANLRRRREGQPERVLTIAEQAERRLTSRYLRLKGRGKHTNKIVIAIARELVGFLWAALRDDRDTARHGARSSTLIEGVKASAAPRSSPRLRKTSTSIPSTSKIAVGQRRKA

SEQ ID NO: 315277 - protein, 391 aa, unidentified
MINIGIDVGKFKHCAAVLDDKTGEVLIKPFFFSNDQEGFELFYSKVKRYIRRRHAVGMEDTGHYMVNLTNYLLEKTLSVKYINPRTTSMRRKELGMSAKNDRKDALLIAEMLSEKKFWRSVSKTSMETSKLRELTRLYHQLQEQQNEDMNRLQRALDIVFPEVNSLSWTRYSKAYMQFLTAYSSASSIAGEDIRNLRKALKTESRGRQCKVTAEEIKELAKRSIGDDNIAAELEVKSVIAIINARSEQIRVLEKKIEEFSRQLNSPIISIPGISHITGMTILAEIGDIKDFPEAAKLISYAGMEPLVHQSGKYDAAHMPISKHGSRYLRKAMYQAVFTVCKYNPTFQAYYTKKRNQGKSHRCAQGHCVRKLLRVIYRLLSSDLSFDTNLIH

SEQ ID NO: 315278 - protein, 350 aa, unidentified
MASTKISYFGKKVYIGTDVHKETYSVTCICEGVVTKKVASVPANPAEFAQSLCHWFKGAEIYSAYEAGFSGFNLHRELENVGIKNIVVNAASIAVAANDKVKTDLRDSKKIAEQLSASRLKAIYVPSKDEEARRTLSRTRDQVVEARATASRQIKSKLHYHGLMAKDDTRAISNRYLKGIEKLELPAEVHYSFKIFIEQWRFLTSQLLGLRKALQKQADSDEKLESVYRSVPGIGLVTSRTLANELGDLSRFKNEKALYSYTGLTPSEYSSGEKIRRGHISRQGSARIRGLLVEAAWRAIGKDVALNEAFERIAKTSGKKRAIVAIARKLIGRIRACFRTGKTYAVGTYA

SEQ ID NO: 315279 - protein, 343 aa, unidentified
MQSISTVGLDIAKSVFQVHGVDAAGQVVVRRQLRRRYVLAFFQKLPPCLVGIEACASSHHWSRELQGLGHTVRLMPPAYVKPYVKRQKNDSTDAEAICEAVTRPNMRFVPTKTVEQQSCLMLHRARHLFIRQQTAAVNSIRAYLAEFGIVAPVGRRGVEQLLEVVADTADHRLPEVARACLAALGNQLRALKAQILEFDRRIIAWHRSSATSKRLDAIPGVGPALATALVASIADPKAFRSGRDFSAWVGLVPKQNSSGGKDKLGSISKQGDRYLRSLFTAGALAVIRYAKIHGTDHRPWLTRLLARRPTKVAAIALANKLARMAWAMMARNERYKEPAALAA

SEQ ID NO: 315280 - protein, 341 aa, unidentified
MKNSTTISIDLAKTVFQVALFNKYGALKSNNKMSQAKMVQFINQHPEATICMEACGTAHYWGRRFQQLGHKVLLVPAHIAAKYRTGNKNDANDALAIYESIKRPKTYFVQVKNLDQQDLASLLKLRQGYVKQRTQTVNRIRGLGLEYGVKIPQGIAKIRKNLPCFLEDAENELTTSSRFILRNLLDQLLLLDTQVEEATNRLVARAKEIPVCTRLIALPGVAWIIASALYARLGDGSAYRCGRDASASVGVVPAHSGTGGNNKLLGITKRGDRCLRSLLVHGARAVVSSIKDKQDGLSCWIREQLSKNHLNKTAVAYANKLVRMAWAILKSGEDYRTPLAQ

SEQ ID NO: 315281 - protein, 377 aa, unidentified
MHGPLDLRSHSTAFTRILALDLGKFNSVLCVYDPLTHDHHFVATQTTPQRIHDLLVTHQADDPAGAGATLLVIETCDVAGWVHDLAVALGMSVAVANPAHEAWRWTRVKRKTDKDDALKLAKLAVLGQLPAAHMPSPQQRQRRRLVHYRRVLVDRRTQIKNQVRSIHSQQGLSLPKRGKAWTAAGIAQIAEEARPLGECDSIDDLWRGRLHTELQLLEALNQQIDQLDAKLDALGAGDDRVQLLQSVPGVGPRLAETVVAHLDDPHRFKSAGQVASYAGLVPKQFESGTIKRSCRITRRGPGLLRSMLVEVAWMVYMRNDWAKHFVQRISRGVASRKNIAIVALARKLLVTLWAMLRDNTRWRGPKATIPSPALAIA

SEQ ID NO: 315282 - protein, 415 aa, unidentified
MEPMHQRVAGIDVHRMKHVVTILIGQEDGAVSSETREFGGFKRDMRALVAWLQTHRIQQVVMESTGIYWKSVFAHLEAAGIAALVVNAFHVKNVPGRKTDVGDSEWLAQLARFGLLRGSFIPPKDLRDLRIVSRYRRKLTGMLAGEKNRLHKLLDDAGIKLGGVVADIDGVCASKMVEGLIAGGKPDELAALGRGKVRATTDILEAAMDGELSARHRLVLDMAYDHLRYLEGKLAALDRYLLAAMQPYAWAWRLLQTIPGIDAISAAMILIEIGDDPHRFGSPARLASWSALCPGNNESAGKRKSGKTRHGNPIVRYLLCEAANAARRTKTVFRAKYESLVIRRGHKKTIIALAHKLVRTIFCVLVRRKPYRDSTVDYEAASVAKNAPRWIRALKKYGYWPQVAAPSAPIVATAS

SEQ ID NO: 315283 - protein, 366 aa, unidentified
MKKISTVAMERIDIFKQNQLTIGLDLGDRISHYCVIEEAGQVILESKLPTTPKGIEEVFGRIPRSRVALETGTHSPWISRQMSQLGHEVIVAHARNVQMISESSRKDDRLDARTLARLARIDPALLGPVRHRSAKAQIHLTVIRARATLVGARTALVNTARGLTKSYGARLPKCGSEQMGREIAKELSQELRDALDPLLAEIESLNERIAEYDRRIARVAKEVYPQVALLQQVKGVGTLIALTYILTLDDPHRFRHSRDAGCFVGLRPGRRNSGMSEPQMHISKEGDRYLRTLLVQGAHYILGPFGQDSDLRRWGLKLAERGGKNAKKRAVVAVARKLAVLLHRLWVSGEVYEPLRNNHKVESAAA

SEQ ID NO: 315284 - protein, 348 aa, unidentified
MAKTIVDPPRPVTGGVDTHLDVNVAAAVDAIGGLLGVAQFPTTSAGHSQLLSWLNGFGLVARVGVEGTSSYGTGLARFLRRADVEVVEVDRPNRQSRRRTGKSDPADAIEAARAALSGRAHGAAKAKDGNVEAIRALFVAKRSARDTRIKTLNQIRHLGFTAPEELRERLAGLSRTQLAGAAAALRPRQGGDQVAFATKTALCLLGRRVLALDAEKEQLDNLMAKLVEKTAPELLGLYGVGVDTAAALLVAAGDNPGRIRSEAAWAHLCGAAPIPASSGKVTRWRLDRGGDRQANAALYVIVLARMSADKRTKAYVQRRVAEGRTKLEVIRILKRYVAREVYHCLPRA

SEQ ID NO: 315285 - protein, 345 aa, unidentified
MKITTVGIDLAKNVIQIHGVDERGKAVLRKQLKRAQVASFFATLEPCLIGMEACGSAHHWARKLQGFGHAVRLMAPQFVKPYVKTNKNDVADAEAICEAVGRPNMRFVPLKTTEQQGVLAVHRARQGFVKARTAQANSIRGLLGEFGIVIPQGMSPLAKRMPEILEDGENGLTGSFRQLLQRLMEHLKELDRQVGELEREIQVWHRDNEASCKLAKVPGIGPITASALVASVGDAKNFANGRQMAAWLGLVPRQHSSGGKPALLGISKRGDSYLRTLLVHGARSVVRYAEGKTNPAADWLKSLLARRNTNVAVVALANKNARIAWALLAHDREFRSEYAPERTKA

SEQ ID NO: 315286 - protein, 319 aa, unidentified
MHCIGVDVSKQELVTFDGKTERIFPNDRGLSEFRRFVKRTEDAFIVFEPTSTYSRKLETLCRTNHILCCQLNPRVVPHLRQVGRGRSKTDSSDAELLYRYGIERGHNEASELRQDSLSESIQARLACYRVAQKARVAYQGLHEALENDPATPRTLLAEIKAEISALKNREERYLVAAQRNAEEDEQTGRRLVALLSIPGIGPITALTLLALFRKYPGATRSQIVALAGLDPIQFQSGTSVHGKTRISKRGNRELRKRLYQATLSAARYNPSVKALHRRLKEQGKPDKVARIAAARKLLLIAHAIYKSGEEFRSPTEEVT

SEQ ID NO: 315287 - protein, 352 aa, unidentified
MNFYNNMHPYYCGIDLHARLLYVCIIDNTGEILVHKKIKDDPNALLQLLMPYIGEIVVGVECMHCWYWVSDFCDENGINFILGHALYMKAIHGGKAKNDKIDSYKIAKLIRGGNFPLAYVYGKKMRATRDLLRRRTKLVRHGANLKAHVANSTSQYNLPAHKVNLKNICDREKVRTHFPDPVVQRSINLDMALLDFYQTQLKPLEHYIEQTAKQHKPIHLHLLQSISGIGRILALTIIYEIGDIQRFATVQKLASYSRLVKCKAESAGKVYGTQGNKIGNAHLKWAFSEAAVLLLRHNHNANRYLEKLQKRMSKAKVLSALAHKLGRCVYYMLKNGKRLMNHRHYQRVPVAA

SEQ ID NO: 315288 - protein, 394 aa, unidentified
MKLVGIDVGKNSHHFCVMDKETGEFNVAPSSFSNNKEGFDFLINSLKPYSKKSILIGMEDTGHYHVALLKFLLSNGYTVALINPKTTDLTRKMEGSITKNDKLDTITICDVLDTPERKKQYRITKVDRFDLYEQRQLTRHHHNLKEELNVYCNRLQKSIDLVFPEFNTLFSSKYSIVYMNLLKTFGSAEAIASTDIRTIRKCFEIKGKGGRISLTPEKLKECAKNSIGISSEVETIQIKHLVSQITLIKEQIAEIDKKIEEFSITNNSPILSIPGISHFSGTSILAELGDIGNYSKPSQIIKFAGVAPYHYESSQYNAQHTGITKKGSKYLRKTLYQIILTVINNNPVFKKYYLLKISQGKGHRCAQGHCIRKLLRIIYHLLETGQSFDPALLR

SEQ ID NO: 315289 - protein, 423 aa, unidentified
MMKLKYPICCGLDVHKNVIVATIVITNKDGISEYLQKSFSTINSDIQRFHNWLIENNCYHVCMESTGKYWIPIFNYLENDIDVCLTHPKYVKAIKGKKTDKKDSKWIADLYKFDLVRCSFIPPKDFRQLREIARYRFKLVCMKSSEKNRIQNCMTVSNVGIASVLSDPFGKTATEIMSYLLEHTADSIDEKAVRKLIKKGAKAKSDEIIEAIKGCNIETDQAKKLELACGHLEYLDDMITQTEVELYVRIKPYYEFVEFVSTMPGMTELSSTIVLAETGVDMNIFDDAKHLCSWCGLSPANNESAGKKKSVRIAKAGDYLKPMMVQCALAAIKSKKQPYFAIKYGRIKKRRGHKKAIIAIARMMMVCIYHMVSERNPFTPTDYEELMDPQNHVERVVLNENNVFAYLESLGYDSSKLVKRNDN

SEQ ID NO: 315290 - protein, 338 aa, unidentified
MKKNYFVGIDVSKQTIDAAFIIREGEQNTPPCWKAFGNDDKGLWQMKTWLQQNSVPLDGDTLFVIENTGLYHRHLVSFCDKHQLRLCIENGAQVKWSLGIARGKSDKVDSRRLAVYALRFADRLKPAAALHQGIQAIKDLIALRNRHMVHLRSLQAHLKELKLTTSAKEVRELEKIHGPLVKSVKAVIKKTEAAIAKKITANELTQKQYKLLLSIPCIGPVTASYLIACTNAFSNCSSGKQLACYCGVVPFEHQSGISIKGKHRVHKMANKNLKALLHLCALSSIKYVSELKDYFNRKALEGKHKMSIINAIRNKLVLRVFAVIKNNRPFVENMFIAA

SEQ ID NO: 315291 - protein, 335 aa, unidentified
MQVYGIDLSMKKFDVNFIDLKGKEKNREVKNEVVSISKFLSSVPEDGILCAEHTGAYGDLLVYLCNQAEVPIALVPGYTIKHSLGLLKGKSDPLDARRIREYGERFIDKLVFSEYDKENIIELKQLYTLRSQLVKARKSLLTSEKGRGHLPLQSVSVHNHLQPVLSGLDTKITAVEEEIEALIKADEDLNENYDLVRSIKGIGPVIATDLLIKTGNFENIDTARKAASYAGVCPFPNSSGKMKGKSRTSPFADKKLKSLLYMGAKSAVKHNKEYWLYYQKKQLEGKSHYLIMNNISNKMLRTVYSVIKNKIPFSLDHICLDPRERNINSSSKKVA

SEQ ID NO: 315292 - protein, 346 aa, unidentified
MTIVTLGIDLAKNVFAIHGVNSEGKPELQRPTVRRDKLEELVAALPRCLIGMEACSGAHEWARRFGHYGHTVKLIAPKFVAPYRLSGKRGKNDAADAAAICEAVSRPSMRFVPIKTVEQQGELCLHRARQGYVEQRTALINRVRGLLAEFGIVLAQKAATIRREVVLLLEDLPGHLNTVIGDALTDLERLDTRVAEYDKHIAMCAKVNAAARRLMQLPGVGPTTASALVASIGDGHDFKNGRQLAAWLGLTPGQYSSGGKQRLGRITKAGDRYLRTLLILGARSVLQSAKKKEDPISRWTREVEGRRGYWRAAVAMAAKNARLAWAALRHGEDFRLYGKAAPAGDA

SEQ ID NO: 315293 - protein, 360 aa, unidentified
MITIGVDAHKRIHVALALDATGRQLGQWRGPNSADGWDALRRWATAQGEVRQWGIEGAWNYGRGLAQFLATAGETVFEVNPRWTALGRRSARRPGKTDRLDAQAVALLVLREGAGLPSVAVEDETAVLDLLVTEREGALAEATRLRSQIHSLLLQIDPEYKQRLPTLTSAKGLRALLVFEDAATPLQYERAAAVRRAAQRLKLALEQAEELAVQISARVVSTGLAPLTQLCGVNLLTAAALAGILGPGDRFASDAELAAYAGAAPLEASSAGQVRHRLNRGGNRRLNAILYRIALTQARHAPTAQAYLERRRAEGKTTREAFRALKRFLVRHIWRLWQVCLRANAIAAARGIEIADAPSA

SEQ ID NO: 315294 - protein, 337 aa, unidentified
MSVYVGIDVHRKRSQVAVVTEDGKVQVNKNVVNGSEPMLRLIGDLPAGTPVAFEAAFGWGWLAELLEDYGFEAHLVHPLRCKAIASARLKNDKVDAAILAQLLRADLLPEAWIAPPAVRQLRALLRHRAGLVRLRTQQQNRIHAVAADFGYDRSGSYLSGVGRGWLAGLELPAASREIITDCLAVIDGLAPLIERIDGELRQHARTDPRVKVLTELPGVGQFTALVMLAEIGDITRFASARKLASWAGLTPTVRGSDLTVRHGHISKQGSAWLRWVLNQAAQTAKRSPEFAATYATIAQRRGKKIATIAISRKLLTRAWHLLAGMQDTGTTTPPQRP

SEQ ID NO: 315295 - protein, 349 aa, unidentified
MAMLADQVDAVIGVDTHKHTHTAAVVTPTGGLVADVTIPTDAFGAKRVLAFACQHAPGRRVWAIEGSGSYGSGLTTFLLEQGEWVVEIDRPARPARRNGAKSDELDALRAAREALSREHLAQPRRRGDREAIRVLLCTREGAVLSRTRAITHLHGLVVNAPEGIRNQLRKLTTDELLERCARLRTGPAQSSEHRATITALRSTARRALACEAEAGDLESALELIVARVAPELLAQPGVGVISAARLLNTWSHPGRIRNEAAFASLAGVSPIPASSGQTVRHRLNRSGDRQLNRALHTIVLSRLAHHPATRAYAERRRAEGRTDREIKRCLKRFAARGLFRLLERSAQAA

SEQ ID NO: 315296 - protein, 320 aa, unidentified
MSGMLVVVGIDVAKAHVDVAVLGRAWPAQRFANDIDGHSALAAAMQPLAVSLVVMEATGGYEAPVACALQATGLPVAVVNPKQARDFAKGIGRLAKTDRIDAEVLAELAAVLVRRDDLARFLRPLPDAQQQELAALVTRRRQLLTMLGSERLRLPLAVPKVRPSIEAMITAIRNQLDDVEGQMQTQVHEHYAELDALLRSTKGIGPIASATLIAALPELGRLNRREISALVGVAPMANDSGTVRGTRRIHGGRFDVRNVLYMATLSARTCNPAIRAHYERLRAAGKLPKVALVACMRKLLTILNAMVRTRTPWRNNLHST

SEQ ID NO: 315297 - protein, 411 aa, unidentified
MRLFVGDDWAEDCHDIEVMTEAGKVLAKRRLPEGVAGMARLHELTGRFLGEGAEDAEVVIGIETDRGPWVAALVAAGYTVFPVNPLQASRYRERHGVSGAKSDGGDSHMLADMVRTDSHQLRPAAADSPQAEAIKVVARTHKTLIWERTRGVQRLRHQLREYFPAALQAFEDLDAPDTLELLAKAPDPARAAKLTRAQVSAALKRARRRGIADKTDAILAALRGEQLGQPAALTAAYAATARSLIAVIITLNEQVKTLQGQVEAHFGRHPDAEIYRSQPGLGAILGARVLGEFGDDPHRYTDGKARKNYAATSPITRASGKKKVVAARFIHNDRLVDALNAQAFAALGASPGARAFYDELRARGIEHNDALRRLANRLVGILHGCLKTRTLYDEATAWGHRENLPQSSVAA

SEQ ID NO: 315298 - protein, 413 aa, unidentified
MEILHTRCAGLDVHKKVVVATILVSDEHGQLTKETRSFETMTASLLALSDWLTGFGITHAAMESTGEYWKPIFNILEENFEILLVNAQHIKAVPGRKTDVKDSEWIADLLRYGLLKASFVPPKGQRELRDLTRFRTTFIKERATLINRVQKALEGANIKLASVVTNIEGVSGRAILDAIIEGKATPEAMAELAKGRLRTKRDALEQALAGRVQAHHRFILQELLCQIDSLDETIERFDTEIQDYCRPFDVAIEHLDTIPGVARETAEVIVSEIGVDMSRFPTANHLASWAGVAPGNYESAGKRLSGRTTKGNQALATALTQAAWAASHTKNTYLSAQYHRIASRRGRKKAIVAVAHSILIIAYHLIMDKQTYQDLGGNYFDRRNSEATAKRLVQRLEKLGYKINLERPIAMAA

SEQ ID NO: 315299 - protein, 346 aa, unidentified
MDFDPKETDVKYCGIDLHSDNSVVIVSDEEDRMVFQKRLPNDLGQIRAALETHQEELAGVVIESTYNWYWLVDGLMDAGYQVHLAHPAAIKKYEGLKHSGDFADAAYLGQLLRLGLLAEGYIYPREERGARDLSRKRMQLVRYRTAQILAIEGILMRQTGARMKGEAVKRLTAEQVDEFAFAPDVALAVEANRAVSQALGQQIEALERRLKERVSLRPEYRLLKTVPGIGQTLATTIMLETGTIGRFAKVGNFSSYCRCVDSLRESNGKKKGEGNTKNGNKYLAWAFVEAANFAVRYCPQAKSFYDRKKSRTNRVLAIKALAHKLARACYHMLRDQKPFDVHLCFG

SEQ ID NO: 315300 - protein, 345 aa, unidentified
MNELYEGQQFVGMDLHRRRSVLVRMTETGEHLETVRIVNTRDRLAEVMTRAGESPEVVLEATYGWYWAVDALAELGASVHLAHPLGVKAFSYRRVKNDQRDAADLADLLRMGRLPHAWIAPPETRELRELVRHRAKLVAMRSRCKAEVHAVLAKGGVWVPMTDLFGVEGNLLLDKVTMPAPYMARIASLRRFVEAFDAEIDLFTGLAQRRLTHDAGYTAIQQIPGIGPVLAAVFVAEIGDVHRFDGPAKLTCWAGLTPRHHESDTTVHRGHITKQGSRLVRWAAIESVKILPETSHIGAIREQVAHRRGNRNIGAVAAARRQLELVFYGLRDHHVRALHRLPRAA

SEQ ID NO: 315301 - protein, 346 aa, unidentified
MLYAGLDLSRKRLDFHLLDGEGETVDVGAAPPDADGLLGLTRRLDRHREPIRAAIESMNGARFVHDRLELAGWQVEIADAQKVKGLAPLACKTDRIDAWVLAELARRDLVPAIWLPDPRVRAERERARWRLHLVRHRSSLKQRVHAVLLTHGKPCPVSDLFGVRGRQLLARLGLPEPWQGTIEASLRLIDELDREIGDCERELRRLGAEHRYVPLLLTVPGISWVLAYTIAAELGDIGRFPTPRKLAGYTGLCPRVYQSGERDLRGPLAKQGPRYLRWALVEAATHACTHPIYRERYTQTKARIGKQRGAKVAQIDLARRLSEAIWHMLSRNQPFAPKGATDPLAA

SEQ ID NO: 315302 - protein, 343 aa, unidentified
MKDTIYDQYIAIDWSINNMAIARMTKKSNKITAIDVPSDIVDLQAYLKNLKGTKILAIEETTTSQWLYAELKDYADTIFICDPNRNKLLNEGPKTDKIDAAKLVQLLKAGLMKEVYHSGDKFLYLRRVTSGYEDLVKAGVRLKNQRYALLRACGKAGNEKKDINLGSQGEQFVLECLDRQIEVYEREKQCYENEFERLARKNPAIKHQKSLPGIGTINAVKIVTRVVTPHRFPDKGHYLSYAGLIKLDKISGGRSYGKKNPRFSRQLKSVYKSGLLAAIGGTNPINDYYEHLIQEKGYPEHNARHKACRRLAILSLGVFKSGKKYQPYRRDHVKGGKQDTSGL

SEQ ID NO: 315303 - protein, 337 aa, unidentified
MSKHSEAFVALDTSKLRNAVAIADGGRAGEVRFLGEIENSTAATAKLIRKLEAKYERITFCYEAGPTGYELHRQIKALGHECVVVAPSLIPKKRGDRVKTNRRDAVNLAKLLRAGELTAVWVPDRRHEAMRDLTRARETAVIDLRSKRQQVSAFLLRQGRWYPAGKKTWTNAHMNWLASQKFEQPERRIVFEEMMFAIRQAQERVERLEPAIRAAVPDWSLAKVVTALMALRGIDLISATGLLAELGDLSRFQTAPELMGYLGMGSSESSTGDTIKRGPITKSGNRERDARSWSAPGAISIRPVLALPNSRRSRQRRQRCARSPGRRSAVSTGATER

SEQ ID NO: 315304 - protein, 343 aa, unidentified
MQIHSVGIDMGKTTFHLVALGAAGKVLVKKKFTQRQLLIYTANMQTSLIGLEACSGAHFLGRALRKQGHDVRLIAAQFVKPFVKSNKNDFVDAEAIAEAVERKNMRFVPIKTDDQLDLQAIHRVRDRLISRRTAVINQLRAFLLERGMVFAQTPAKLKAAMADILENAEADLTAQMRNLIDMLWSEWKTVEQQIEELTTQLERISAADAGCTRIRQIPGIGPIVATAIVAAIGNGAAFRKGRDFAAWLGVVPRQYSTGGKAKLLGISKRGNVYLRKVLIHGARAAVLRIKRDRAPIGPWLDRLDARAPKNVVVVAMANKLARIAWAVLSSGEDYRPLPIISAT

SEQ ID NO: 315305 - protein, 356 aa, unidentified
MQNDHQSYESVILGVDTHLDIHVGAVISQAGKLLGTHIIQTNQAGYLELLDWARSLGSLERAGIEGTGTYGAALTRYLIKNGIYVIEVNRPDRSKRRLEGKSDPLDAENAARTVLSGGSKAIPKMQSGACEALRIISVARRSAVKARTQAINQLRALLVSAPQDVRDRLWKSKPHECVAACINSEVSEHSPLRIALFGTLRSLAKRWISLTEELNELDESLDKLTRKYASNLRSQFGVGPQTAATLLAVAGDNPERLKNEAALASLCGVNPLPASSGKTVRHRLNRGGSREANNALWTIALVRMRSDPRTRIYVDRRTGEGLSTKEILRCLKRYIVRELYPLILSDLAYANRPLLT

SEQ ID NO: 315306 - protein, 414 aa, unidentified
MLKIVYRVCCGMDVHKSFVVACIASTTEYGVTTYKSKRFSTFTGDLRRCAAWLAENSCKDVCMESTGKYWIPIYNILEPTCNIVLAHPKYVKAIRGKKTDKRDAKWIADIFKHDLVAGSFIPPADIRQLRDLVRYRWKLTNFTTGEKNRSQNCLTVSNIKLDDVFSDVFGKAASAITARILEDPTEKITDISGFRTKGMKATDEQVLAAVDGEMCAEQAEKLRIIRSHMDSLQLCKLDLESLILATAEKYLPQLGLVMTVPGIQSFTAIGIISEIGVDMSVFPTSKHLCSWAGLTPQNNESAGKKKTTRISRAGAYIKPLLVQCALCAIRTKQFPEVRNRYLALKKRRGHKKAIIAIARMLLTAIYNILKWNEVYNSELYRKADRPPAHREVSVEEAVFILQRQGYLVTAPAVT

SEQ ID NO: 315307 - protein, 429 aa, unidentified
MIMGFTKPIEHSNLTRKEGDFMNPLYVGIDVSSKSNVVYFMLPDGSKHSNFSVANSHDGSTQLVKRIHAAIESMSLDTVLIGLESTSVYGDNLVYFLREDESLAPFNRKIHVLNPKQVKKFKDAYNDLPKNDYVDSFVIADCLRFGRINKEVYIGDYRYKALQNLTRARFFTVCNLTKEKQRFINVLFKKYSTITQEKVFSDTFSTTALAVYDEFESAEALAYMDLQELTAFIIKKGKNRFPDPDAVAKAIQKAARSSYRLPKTVNDSVNQVLSISITSIKALEVQIKEFDKAISAQIQLLPNVLISIPGIGPVYSAGIMAEIGDINRFANQAQLAKYAGLAWTQYQSGNFEAENTRLIKSGNRFLKYYLCEAAFSLVRCDKEYKAFYHQKYKEVNRYQHKRALALTARKFVRLVFTLLKDNRLYRSAK

SEQ ID NO: 315308 - protein, 351 aa, unidentified
MTRKTDAVVASTIGIDTGKNTLHLIGLDDKGAIVLREKLARGRIAARLANVPKCLIGIEAGMATHCVARELIALGHEVKQVPPVYARPFRQGHKNDFRDAHAVAEAVQRPSTRCVPVKTDDQLDLQALHGVRSRLISERTAVINQIRGFLLEHGIPVRQGLRFLRQQLPDILAKRIDVLSSRIIRIIEDLSGDWRRLDERIENVTEEIEGLAHGTEGCRQLMTVPGIGPIIASAMVAAIGSGTAFARGRDFAAWLGLVPKQMSTGDRTILGRISKRGNRYLRTLFMQGARVILLRPANWAKHSFGPWLAAAAKRLHHNVLATAVANKLARIAWTVLVQARSYETRVTSEMA

SEQ ID NO: 315309 - protein, 338 aa, unidentified
MNSTKYIGMDVHTATISVAVRDAAGKLIMESVLETKASTILQFIHGLRGDVYVTFEEGTWAAWLYDLLKPYVTNIVVCDPRRNALLHEGSKSDRIDARKLAELLRSNLLRPVYHGEKGLRSMKELARAYLTMGKDLTRVMNRVKAIYRSWGIPCGGRSVYDPRHREQWLSKITHLSVRRRAELYYQQLDALVLLRKQARQELLVEGQKHPAWKWLRSIPTLGPIRVAVVMAIVQTPHRFRSKRPLWKYSGFGVVTHTSADHRYVQGRLERSRRPVTVRGLDPSHNHDLKDLFKSAAIQASLRKGPFREFYQALLAKGIRPEMARLTLARKIAAITLTV

SEQ ID NO: 315310 - protein, 341 aa, unidentified
MQITTIGLDIAKNVFQVHGIDAEEKVVVRKQLRRSQLLRFFEELSPCLVGLEACATSHYWARELTKLGHEVRLMPAKDVKAYVKRNKNDAADAEAICEAVRRPTMRFVRVKSAEQQGQLMQHRSRDLLMRQRTQVINALRAHLAELGITAAQGREGIKELLAIVADDRDERLPMDARASLLVLAAQLQAVQTLIGTLEKRITAQHRANADSKRLQTIPGVGLIGATAIAATVTDPKAFRSGRDFAAWIGLVPREDSTGGKRRLGPISKQGDRYLRRILVVGAHSVLRRAKQSPEKYPWLTRLLARRPFRVVAIALANKMARIAWALLAKGETYRAPRLAAA

SEQ ID NO: 315311 - protein, 433 aa, unidentified
MLKLNYMSTLFVGIDVSSKTNAVYAMDFEENKYISSSFGNNQPGADKLVNMIAECMHKHKNLNTILIVLESTSVYSVHISSFLSTSEVLMPYKPYVFCVNPKATSNYRKSYIGMEKTDPTDAYLIADFGRVGRTKKLEPWRGGQFIALKRLTRHRMHLSECITREKTYMVSNLYLKFSELQLLEGDDKPFGSLYGATSSAVLTEFLSPQEIIDMPEEELLTFLAGKSRNRISDLSKTSELLRKAARDSYRLDKCMYEPLNVSLASSFNCIHAYQKEIKLIEQAIEKCINGMNPNALLILQSIPGIGPIWASGILSEIGDITVFHSSDALAKYAGLYWPKGDSGDFTSEDNKMSKAGNPYLRYYLGEAANSVRKHIPEYADFYARKYAEVTKHQHKRALALTSRKFVRLVFGLLVKNQLYTGEKLDAEYNIESN

SEQ ID NO: 315312 - protein, 472 aa, unidentified
MRVDDENSDVLLLSLTGLVCQNSKEDVVVQGSGLSRGDKRRNAKLARLRERVPADNAILGIDLADTKQAVVVTDHDSQVLARGPVNAKAWELGPVLDWARQVAHAHGFTDVTVGCEPTGHRWRVLDQLAAQQNMALVCVQPLLMGQARQREDYTSDKRDDKDAVLIARLVAQLHCYAPERAEEAWAALRQLGARREELITQATRCVQRLRDLLECAWPAVLNAAGSPFDSTNWCAALAGVLERCDGDPRRLARLGQQRFSAAVRRELPRWGGQRLWRPIVGAVFSALSDPAGVLAQRRGALQRARWVLDDWRLTKIRLAEVETHMVATLDELGLTELVTTIPGISAVGAAAILAETGDPTRFDSPRALVKHAGLCPREDTSGTYTGRSRISGRGRPRLRTAAWRAVWGALHTNPVMAARYRHLTTRKANPLKDGQARAAIAAALLRWIHVIATHRVSWDAALAGAGALATAA

SEQ ID NO: 315313 - protein, 324 aa, unidentified
MIDGILGIDVCKNTLDVSISSYTKVRTKSFTNSPDGWRHLLDWLIAQKIQRVHACLESTGRYSLGIACALYEADHVVSIINPAQIRDFVRTKLGRNKTDGVDASHIREYCELFKPSPWVPPSEAHRRLGELQTIRSGIIAGLTEWKNRKNSGIVDGEAQALADATISHFTSQLGAVDKAIALTIDNDRDLQSKRDLLLSISGVGETLAGVVLAELPGPDVLRSSAEVVAYAGLNPRQHQSGTSIDRATRISKIGNAVLRAALYMPALSAMRYNSAIVALVARLKSRGRLKPKQIVVAAMRKLLVLCFGVLKTGRPFDAAIAMGG

SEQ ID NO: 315314 - protein, 342 aa, unidentified
MSIVYVGLDLGSSNFQQVALNHQGVSRVNRDFRTSEANLIKAFSDLQGEIHVHLEAGELAPWAAAVIAPLVTRVVCSHPQSNAWIAKDADKCDRIDAYKLAELLRLNRFKEVHYAPDQPRRNFKQLVQHYDEMTAQQARLKTKLKARLRMQGVIVTGERLFSATGRKEVLARVESRDLRTAIKQLYEVLDQSVAAQAQARLLMLRAAQAFREIKLLRTVPGVGPIGACRFSAYIHTPNRFSSKRKLWKYCRLSVSHRSSNGKPLRRPRLDRSGCGRLKDVSRKAFDAAVRSRQDNGFKRAYQRALDTTHDATHARLTVQRKIVSTLRAMWLNQTPYCDELMR

SEQ ID NO: 315315 - protein, 341 aa, unidentified
MKEYIGLDVSLKETAVSFRRDGKRVWRGKCASDPKIIAELVRKRAPAVERIVFETGPLSVWFYHALILEGLPAICIDARHAAGALGMAPNKTDANDADGLAQLAEIGYYKAVRVKGFDSMLARTLVTVRTRLVRITVELSNQIRGIMKTFGLVVPAGQGNVFDQNVRHLVDDQDELAKIILPLLAAWRNMRERTAELSRKLVADARQSEACQILMSIPGVGTITATSFVAAIEDPDNFRKSRSVAAWLGLTTRRYQSGEIDYDGHISRRGDKHLRGLLYEAAVVILTRSFAQSGLRIWGLKLKERIGFKRAATALACKLAVTMHAMLKSGELFNPSIGAEA

SEQ ID NO: 315316 - protein, 317 aa, unidentified
MTYIGIDISKSWFDCFNSTTGTHHQYDNTIQGWNEFAGSLSDEAWAVMEASGPYYLGLACFLADRKIPVSVLNPLVIRRYSQMRLSRTKTDAKDARLIAEYAAQQPLTRWNPPSSVNQTMRQMISVCQGLIRQRAMLLGQKEAFTNSPATDPLVIDVIDEQIHRITSALSTLEGRLRQLIVTHYQHCFDAVTSIPGIGPKTAVLLICLTDGFSKFDDARKLASYVGICPRIFNSGSSIKGRGSICKLGSSQIRKLLYMCTWTAKKCNPGCKQMYDRMKQAGKPERVIKIALAHKLLRQAYAVGTSGEHFTKEKALAA

SEQ ID NO: 315317 - protein, 340 aa, unidentified
MNMTLGLDVHKRTTAYALVNERGEIQQRGETKTNPKLCLELVSWLPKSAVQIGMESSTYIYPLYDAFNDAGYKVRVAHPAKLSRITKAEVKHDDKDALDLALQLLRNDFPESYILSKEMRDKRQMIRQHMALTNEESRIKCRIHSLLAQHDIRVPCQLGTKKSFEFMQSVQLPTNSKLTLEIFTLQLKKAKELLRIIDTQIHHFVANNKEAQAIMKLDGVGEFTAATFLIELGDWKRFKSVKQLTSYAAMIPKMSGSAHKMYYGRMRTDGNQQIRFAFNRAAEQAIRKDNEFKLYFQKLISKGKRRRTAIGAIANKLLRCCYGVLHAEELNNSGSSMERG

SEQ ID NO: 315318 - protein, 398 aa, unidentified
MVPSDYAVFVGLDVGKEEHHACALDPGGARLHDKVLPQSEAQIRQVLTGLAARGPVLVVVDQPASIGALAVTVARDVGIDVAYLPGLAMRRIADLHPGNAKTDARDAYVIAEAARSMPHALRRVHAGDEALADLEVIVGYDDDLAGEVTRVSNRIRGLLTQIHPALERVLGPKIQHPAVLELLGRFGGPQGLAGASRRQLLAATKARAPRSYEALIDALTAALGEQTVTVPGTRAAELVLPKLAATLRELLQQREQAAGQIEEMLDAHPLSTVLTSMPGIGVRTGARILLEVGDGSSFPTSGHLAAYAGLAPVTRRSGTSIRGEHPARGGNKQLKRAFFLAAFASLSDPASRAYYDRKRAAGKKHNAALICLARRRIDVLHAMLRNGTLYETRPARAA

SEQ ID NO: 315319 - protein, 343 aa, unidentified
MSIMILGIDLGKNSCSVVGVDATGAIVTRRTMRRQTLIDYVTKLPACIVAMEACCGAHHLGRLFKGRGHEVRLMSPEYVRPYIKVQKNDDRDAEGIAEAASRPTMRFVDLKSQEQLDIQTLHRVRSRLVAERTNLINQLRAILLERGVIFPAGRRKLELGVDSMLAEDVKLLSLRVQQLVRELRAEWQELDTKIGALNTELIQLARNDAATRRLTTIPGIGVLNATALVAAVGNASSFAKARDLGAWLGLVPRQYSTGGKPRLLGISKRGNTYLRTLLIHGARASLPSLSKSDTPTGRWLKAMMERGVHRNVMVVALANKLARIAWAVLRKETGFDRSCPAVA

SEQ ID NO: 315320 - protein, 345 aa, unidentified
MEQITRIGMDTSKHIFQLHGVTAAEEPALRKKLRRKEMVTFFEKLAPTVIAIEACGASHHWARLLQSFGHSVKLIAPQLVKPYVKRGKNDAADAEALCEATSRPTMRFVPVKTAEQQAALMLVGVRDRLIRNRTQLANAIRGYAAEFGLTAARGKAHLDPLLERIQADESLPALARELFAAQAKEYAQLQAQIDEVDARLMSWHRADECSRRLAKIPGVGPIGAVLLKMKTPEPELFRSGRQFAAWIGLTPKDHSTAGKVRLGVITRAGDEGLRSVLVVGATAVIQHVRRGGRSSPWLTELLKRKSPKLAAVALANKMARIAWKLMVTGEHYAAKSAPAALAGVA

SEQ ID NO: 315321 - protein, 347 aa, unidentified
MQVTTIGLDIAKNVFQVHAIDAAEKVVVRKQLRRSQVLEFFKALPACLVGMEACATAHYWARELTKLGHRVRLMPAKDVKAYVKRNKNDAADAEAICEAVRRPTMRFVQVKSAEQQGRLMQHRTRDLLMRQRTQLINALRAHLAELGIVAAQGNAGLKELLKIIAGERDARLPVDAHASLAVLAAGLHAVQTMIGSIDKRIMIEHRSNEASKRLRSIPGIGIVGASAIVATVADPMAFRSGRDFAAWIGLVPRQDSTGGKQKLGPISKQGDRYVRRILVVGAHAVLRYAKQNPEKYSWLTQLLARRPFKVVAVALANKMARVAWALLAKGGTYYRARALVTVVTAAA

SEQ ID NO: 315322 - protein, 350 aa, unidentified
MEFFVGLDVSLDETHICVVDEGGRIVKETRAASEPKAIAKAIRHQGRRIEHVGLEAGNLSQWLHEGLVREGFSVSVMEARHVRAAFAAMRVKTDRHDARGIAQLVRLGWFKRVHVKSLTAQETRVLLTARTFLIEKVTATENSLRAALRTFGLKMGSVTRKTWEARARELAAGNPLLEGIVDAMLRVRALLLDELASLDGQLMALAKSDPVTRLLMTTPGVGVIVALTFRSAVDDPDRFPRSRDVGAWAGLTPRRWQSGKTDIAGRITKAGDPRVRVMLFEAAASILGRARVMSPLKSWGLRIAKRTSMKKAIVAVSRKLATILLAMWKSGTAYWAAGRPPASAQDLAAA

SEQ ID NO: 315323 - protein, 400 aa, unidentified
MAVMIGIGPHKGSHTAVAVGAAGEPLGKLRVRACPDQAAKLVAWAQAWPERTWAVEGARGLGRLLAQQLVAAGERVLDVQPKLAARVRLLEAGDTNKTDPDDARPVAVAALRSKGRQEVTADGHAVVLKVRAKRHRDLSRTRNQVACRLHAVLCELIPGGVPDEITAGQAARILEQVAPAGAVAQARCELAAELLAGIRHLDAQRREVKKKLAAAVTASGTSLTEVFGVGPVIAATVIGDVITVARFPSRDHFAAYNGTAPVEVSSGQRKIHRLSLRGNRRLNHAVHMAAITQIRHKHSDGRAYYQRKLAEGKTHKEALRCLKRRISDAIYARLRADARKAGPGGQPGNDTGSSVTGSHPGHRLFGQATSGPEPSLRAPATFTQATPAPEPSAKKIQRAT

SEQ ID NO: 315324 - protein, 319 aa, unidentified
MAQNDLVVAGIDVAKDKVDVCIRALSLRRTFAATAEGRRELASWLRRQKVGKAVMEASGGYERDWAKALRGAKIEVRIVDPKRVRSFAQSAGRLAKNDTIDAEMIAWFAETFDEARSQAYDATREQLHQMVNARQALKGMQAKLESQGEHALPAAVQRMHARILKTITVELVKFEAAIAAMIQATPRFTELAEIIESVPGIGRTTSAALIAAMPELGQANNKIVAALLGVAPYDDDSGRRRGERHIKGGRRRTRNVFYMACLGAATQHNPVLKAFYDRLVAKGKEKKVALIACMRKLISILNIMIERRQKWDASRYALS

SEQ ID NO: 315325 - protein, 350 aa, unidentified
MVRKFDTAVVTIGIDPGKNTLHLVGLDARGEIVLREKVARAKIVSRLANMPTCLIGIEAGMGTHYVTRDLLALGHDVRQVPPVYAKPFRPTHKNDFRDAQAVAEAVQRPTTRCVPPKTDEQLDLQALHRVRYRLVGQRTAIINQIRCFLLEHGITVRQRLHWLRHALPDILAQRTDVLSPRMVRILEDLAQDWRHLDDRIEAVSGEIEALSKNTKLCLNLMTIPGIGPIISSAVVAAIGDGAAFARGRDFAAWLGLVPRQISTGDRTILGRITKRGNRYLRMLFLQAARVVLLRPKNWMQHSFGPWLAAAAQRLHHNVLATALANKLARIAWSVLVQHRKYEARLSVAAT

SEQ ID NO: 315326 - protein, 352 aa, unidentified
MDKIIRVGVDLAKNIMQVHAVDAAGRVVVRKAIAGQRFVSWFANLEPCLVAMEACGAAHYWARKLRALGHDVRLIPPQFVAPYRKGGAHVKNDALDAEATCEAASRPHMRFVPVKSPAQQSVLVLHRMRTGFVEERTALVNRLRGLLAEFGVFLPQGIRQLRRNFLDRVEDGDNELSGAARQALMRGWAQWQALDDEITWFDKQIAEHATHDPQAQRCMDVCGVGRLTASAAVATVVDARQFKNGRQMAAWLGIVPKQKSSGGKQRLGRITKQGDTYLRTLLFQGARSAVLTAHQRKDRLSRWIVQLQARVGFYKTLVAVANKHARILWAVLAKGERFDPSYAPARRMAAGA

SEQ ID NO: 315327 - protein, 343 aa, unidentified
MTKLNVIGVDLAKNVIQVSVLSPSNQELRNSALTRRKFSEFLGRQRPSLVAFEACATSHYWARVAQRQGHEVKILPAKAVFPFRQGHKTDENDALAVAEAARRPNVKLAPLKTVEQQGMQAIQRSRELLVHERVSLANHLRGLLMEFGIVIPQGFASLYRLLPEILEDGENELPDLYRPTLNLLYGRLCDLREDLERLNREIEVLVQANPVCRRLTALEGVGPIGSVLLYATLGTGEAFTNGRQFSAYLGLTPKQFSSGGKVNLVGISKRVANRRLRAVLITGARAYVYHMKEPKTAKDRWLWAIVERSGKCKAAVALANKNVRTAWAMLTQNTEYQHYPIAA

SEQ ID NO: 315328 - protein, 337 aa, unidentified
MKITLIGIDLAKNVFQVCGVNQAGKSVFNRAVKRAQLLSFLAQHPAVQVAMEACSGSNYWGRTLQRLGHKVLLIPPKHVKAFVTGNKNDRNDAFAICEAANRPRMVFVQPRSIEQTDMILAHRVRERLVGQRTTLINQLRGLLQEYGIVLAQGKEKLRNQLPDILEDAENELSMAARACFQQMLNEWAQLDESIAGHERSIKRQCKETAACQRLTGIKGVAEITATALVAYAGNGAQFHSARHFAANLGLVPREHSSGGKQKLGGITKRGNSYVRRLLVQGAWSIIRHLDRSSDRLSEWAKQLIQRRGKHVAALALANKLARISWAMLYKQQDYKAV

SEQ ID NO: 315329 - protein, 337 aa, unidentified
MIVIGVDVHKHSLSAVAVDEVGRQLDCLETGDDEELLAWSRRVARRRLWALEDCRHVTRGLERALQRQRQRLVRVPPRLTAPERRRGRARGKSDLIDALAIARAALREPLLDSPRPEEGRLRELKLLVDHRDDLVDERRRAQQRLRWHLHELDPTLRVPLGALDRTVWLDRLVRRLVRREQTVQVRIARELVSRCRSLTRAILELDRELQHQIAALAPGLLALPGCAALTAAKLLSEIGPIERFRSDAQLARHAGVAPLDASSGKHQRHRLDRGGNRQLNCALHRIAVTQGRVHPPARAYLERKQAEGKSRREALRCLKRQLARTVYTTLKSESLLT

SEQ ID NO: 315330 - protein, 332 aa, unidentified
MPNPQSIGFVGIDIAAKTFTATWSPGDPPRPRQFDQTTPGYQLFDQQLRAVLPDPTTVLVVMEATGSYWIALAVFLHDHGYHVAVINPAQIANFSKSLPRRPKTDPHDSLLLRQFAQERHPSTWTPPPAVYHELRQRLVARDALMEMRQHARNQRHALEQWPVHIAPVLTQFTAVIADFDTRIGELDQAIAQVLTDGAWAASAALLASIPGLGPTTTAWLLVATLNFALCPTPEAAAAYAGLAPMAHESGTSVRGGSHLGRGGHRRLRAALYMATLSAARANPLIRPFYQRLRAKGKPFKVAHCAAARKLLTLAWAVVTKGRPFDPQQGLTA

SEQ ID NO: 315331 - protein, 393 aa, unidentified
MLKIVYPICCGMDVHKSFVVACIATTNDHGVTNYKSKRFSTFTGDLRRCADWLSENNCKDVCMESTGKYWIPIYNILEHTCNIVLAHPKYVKAIRGKKTDKRDAKWIADIFKHDLVSGSFIPPADIRQLRDLVRYHWKLTNFNVGEKNRAQNCLTVSNIKLDDVFSDVFGKAASAITTRLLESNEPFDVKPYLTKNIKKPIEQIQAAVDGEMCAEQAEKLRIIRSHMDSLELCKLNLESLILSTAEKYLPQLNLVMTAPGIQSFAAIGIISEIGVDMSVFPTSKHLCSWAGLTPQNNESAGKKKTTRISRAGAYIKPLLVQCALCAIRTKQFPEVRNRYLALKKRRGHKKAIIAIARMLLTAIYNILKWNEVYNSELYRKADRPPAHLSLIHI

SEQ ID NO: 315332 - protein, 343 aa, unidentified
MSACYFIGLDIHKKMIAYCIKTIDGRLVDQGMVSADRVSLSAWAQRLPGPWIGAMEATIFTGWVYDFLAPHALALKVAHPEMLKAITAAKKKNDQADAEKIADLLRVDLLPECAMLPQEIRELRRILRYRNHLVRTAVNMHNKMSGLLMEVGASYSKNRLRGKKYFHELLDRLDEIPPSVKELLILSRAGFEMFQTFQKRLIQALRTNPLIQERVTRLITIAGVGEVTALTWVLEIGPVSRFGSIRQAISYCGLCSAQRESAGKQQRGPISKKRNKHLQSILVEAAKLAPRWNPQLADIHQRELNRGNRNRATLAVARRLVAYMMAVDKGETNFVFREEQKAA

SEQ ID NO: 315333 - protein, 346 aa, unidentified
MEHHAGIDVSLELSSVCVVDARGKIVREAKVASEPDALVSFFKGLGSPVKLIGLEAGPLSQWLHAGLMRAGFEAVLLETRHVKAALSAMTVKTDRKDARGLAQLIRMGWFRPVHAKSIGSREIRALLVARKQLLGRLLDVELSIRGILRGFGLKVGQVTRKTFEARIRELVTGHTMLERIAEAMLSARATLQAQYEKLHKAVLAFVREDAVCRRLMTVPGVGPVVAVTFKSAVDDPSRIAKSKAVGALFGLTPKKYQSGEKDVTGGITRTGDEMVRTALYEAANVLLSRITQFSKLKRWGMDVAKRRGSKRAKVALARKIGIILHRMWIDGTTYRWAEAKPIAAQA

SEQ ID NO: 315334 - protein, 312 aa, unidentified
MVDHCYGGIDVSKDRLDVQVLPQGRCFSVDNTAAGWKQLVDRLRGLSIAALGIEPSGGYERGVIRALLDAGLSVRRINPNKLRQFARARGVLAKNDRLDARLIAEYVAIMPTRVVHRDPAAEQLAAVVTMRRQLSDEHVTVENQTAHIEDAMLRRLNKRRLARLKADILLLDKRMAEIVASNANLARRYDLLTSMRGVGPTLAFTLIALLPELGQMSRKQIAALVGLAPYDFDSGRLKGHRCIYGGRMPVRNVLYMAALSAALYNPVLKTLHNRLAATNKKPKVVIVAVMRKMITTLNAMLRDNLAWQPKSA

SEQ ID NO: 315335 - protein, 370 aa, unidentified
MKNDTTLFVGMDTHKDSISVAYAEAGSTAPPVFLGPIGSRQADVDKLVRRLQGKAAKLVFAYEAGPTGYGLYRYITAKGHECRVIAPSLIPKKPGDKVKTDRRNAVGLTRLLRSGDLTSIWVPGVEDEAIRDLCRARDATLLTLKAAKLRLKSFLLRLGLQYTGRADWNAAHLRYLSRIVCPTPAQQIVFQELLRSVDEQVDRLARIESELAGLVPSWRLYPAVKAFQALRGVQWLVALTVTAELGDITRFDNPRRLSAFVGLIPSEHSSGASRSQGGITKTGNSRARRALVEAAWAYRYPAKVSEHIRKRIEDLPKPIQDIGWKAQVRLCKRFRRLTARGKHHNVTITAIAREILSFMWAIAKEVPIQG

SEQ ID NO: 315336 - protein, 343 aa, unidentified
MQIRSVGIDLGKTTFHLVALGDNGKVLLKKKFTQRQLITFTANLQATLIGLEACAGAHFLGRALREQGHDVKLIPAQFVRPFVKSNKNDFLDAEAIAEAVDRQNMRFVPIKTDDQLDLQALHRVRDRLITRRTSVINQLRAFLLERGLVFAKSPAKLRERMPEILENAEEDLTPRMRNLLALLWNEWKGLEQQVVDLNHEVELIASSDAACLRLRQIPGIGPLVATAIVASIGNGAAFRKGREFAAWMGLVPKQYSTGGKAKLYGISKRGNRYLRKILIHGARAMVLRCKRERIPMGAWMTALETRAPRNVLIVAAANKLARIAWAVLSSGQDYRAVQEPVAA

SEQ ID NO: 315337 - protein, 401 aa, unidentified
MAETQRLFNIFLGIDVSKEKFDVCCINNKGEKLFRSSLSMEKEGFDELSRKLSSLSVSKESILIGMESTACYHINLFSFLTHLGYTVVIINPLLISQFVKLQLRKTKTDKKDALVIAQFLALNRESLTKGSVSSDIADLRDLSRQRESLVHQMNAVKHDIKRVLTITFPELERTAGIFSQSMLRLLQHYPSAHAIRKAKHKKIAKVLIQGSYGKQDDESVKRIREAAETSIGTTSPAKEVILKQKASLLMQMEEHLEELTDILINQCKAMIRDDVEILKSIKGVGDKTATNFLLELGGDINKFKGHKQVLAMAGIDPTVYQSGKYTGQGKISKRGNRHLRRVIWIMATKVIQFNRIFRLYHSKRMKEGLPYKKAVLATAHKLVRVIFSMLTNKTLFIAKAN

SEQ ID NO: 315338 - protein, 342 aa, unidentified
MNTMHYVGFDIHKKTIAFCEKEMDGTIVDQGTIPATRNALSIWSKQRACLWTGAMEATMFTGWIYDFLLPCAAELKVAHPAMLKAITAAKNKNDRDDAEKIADLLRCNLLPECYMAPEEVRELRRILRFRNLMVKEAIKMKTKTSGILMETGAMYNKQKLHGQKYFEELLGNLEYIPESVIELLKLCRLSVTHFTQIQKQLVKGLIANPDISARVELLMTIPGIGEITALTWVLEIGEVERFSRVRRAISYCGLCSAQIESAGVNKRGPISKKRNKHLQTVLIEAAKLAPRWSPQLAAVHDKELATGNRNSATLAVARKMVAYMLAVDKNQEAFRVMEEKAA

SEQ ID NO: 315339 - protein, 472 aa, unidentified
MKSKSSRKRNPVDPVAEEIPDAEHELAIERVAAIDVAKASGKVCVRLPGKTGRRFSRVWDVPARTGAVSELAEQLIESGVEKVTVESTSDYWRIWYYLLEAAGLDVQLVNARDVKNVPGRPKTDKLDAVWLAKLTEKGLLRPSFVPPAEIRQLRDYTRLRVDLTRERTRYWQRLEKLLEDALIKISAVASTLDTLSTRDMIEALIAGERDPGRLADLARGKMKAKRSELIAALDGRFDDHHRELARMLLDQIDTLTAQIAALTSRIEQLLAAMPDTRSRGDGGTGGDPDRPSTGHGVEPETAARFTDATLLTPVERLDEITGIGELNAQVVLAEVGLDMTRFPTPAHLVSWAKLCPRTIQSGPVTRGGKTGRGNPYLKGALGEAAAAAARTDTFLGERYRRIVKRRGKLKALVAVARAILVVIWHLLANPEARFRDLGPDYHTQRIHTERKLRNHIAQLTAMGYRVTLEPAA

SEQ ID NO: 315340 - protein, 404 aa, unidentified
MGDDWAEAHHDVEVMDAAGRVLATARLPEGVAGMARLHALVAKQFGDADPDEVQVVVGIETDRGPWVAALVAAGYLVFAVNPLQASQYRKRYVVSGAKSDAADAHVLADMVRTDSHQLRTVAGDSAQVEAVKVVTRIHKTMIWERTRTGQRLRHALREYFPAALVAFDDLHAADTLELLAKAPDPVAAAGLSTVQISAALKRARRRGIGEKTEQIRSALRADHLGQPAVVTAAYAASTRALVAVLVVLNEQIKTLEKEVEANFGRHPDVEIVLSQPGLGTIYGARVLAEFGDDPHRYANAKARKNYAATSPITRASGKKKVALARFVHNDRLIDALMGQAFAALNTSPGARAYYDKQRARGAEHNPALRQLANRLVGILHGCLKTSTPYNEETAWQHHTEPLAA

SEQ ID NO: 315341 - protein, 356 aa, unidentified
MCPIVSEEYELVIGVDTHAATHTFAVVAGSTGAVLDHAVFPTNPAGLERAKGWITRRCGDARTLVVIEGTGSFGAIVTERLMAAGRTVVEAARMPAGDRRGKGKSDELDAVRIARAVLGLSLDDLRIPRSLTGDRSRVAMRVLVVAREAMTGERTRAVNALTALVRTIDLGVDARTSLSAAQVTAIAAWRTRTEDTSTRTCRQEAVRLAQRIRTLDGDLASNRASITKLIEQDTPQLLELTGVGAIVAATVLVAWSHPGRVRSEAALASLAGTCPIPASSGNTVRHRLNRGGDRRLNRALTTIVIVRMRIDPTTRAYVARRRAEGRTTKEIMRSPKRYITRQLFRTLATAHPIPVT

SEQ ID NO: 315342 - protein, 348 aa, unidentified
MDTSLDARPVVGIDLHRRRTVLVTMQPDGTQVGKAVRIANSPARLKAALVGAGPGPKVVLEATYGWYWAVDALQEAGAEVHLAHPLGVRMFTLRRVKNDERDARDLADLLRLGRLPEAWIAPPPVRELRELVRHRHKLVQLRSGLKSQVHAVLAKHGVHLPVTDLFGVGGRALLAGADLPGAYAARVDALRRLIDALDFEVQVADHLIRVRLAKDPGYLALQAIPGIGPVLAAVIVAEVGDVHRFERPEQLCSWAGLTPRHRESDTTVHRGRITKQGSRLLRWALIEAVQKAPPGSPMRQVRERIENRRGHAGRNIGTVAAARKLLTLVFYGLRDGHIRALTSHAQAG

SEQ ID NO: 315343 - protein, 455 aa, unidentified
MKVNKVSALRVKRGLHRVNGAEPQVVGLTPQTTDIRKTDTMKTYILRQPKPVQPQKASRSPRLKPAPPVTTASPSGRPETPAKGPFLFIGLDVHNDSIAVSLAPSDSTEVRRYGIIGGEHDDVLKLAHKLQAAHPAATVKFCYEAGPRGFALCRCLQTHGWDCILVCPSKIPRKPGERVKTDRRDADDLARLYRAGELTGIYVPEPEDEAMRDLIRARFQVGKQQHRARQQLKMYLLRHNLRYGGQASWTPAHLRYLAKIKMPFPVQQIVFQEMLDVISAATARLERYDQELERAVPGWRWEPAVRALMSLRGMALLHAATLVAELGDFNRFEHPGQLMGYLGLVPSEHTTGKDRQQGGITKMGNAPARRALVEAAWQYRIPARLSPHLKKRQEGLPKAITDIAWEAQRRLHHRYTHLTRVGKKKSQVAVTAVARELTGFVWAIARQVHPRPAQA

SEQ ID NO: 315344 - protein, 357 aa, unidentified
MVRLRDLRSGWEIDMTIKVLGIDIAKNTFQLHGADDAGKAVLKKRLPRNRLSPYVANLHPCTIVMESCGGANYWARVFQRSGHTVKLISPQFVKPFVKTNKNDANDAEAIVEAASRPSMHFVPIKRPEQQDVQSIHRVRSRIVKNRTALINEIRGLCLEYGVIIAPGAARVKKSLCAVVADSGNGLTPSSRDCMQELYEELVDVEARLKKLDARNRQLCRQNDSCRRILSIPGVGELTATAIVAAVGDAQEFKNGRHMSAWLGLVPRQSSSGDKRVLLGISKRGDRYLRTLLIHGARAALSHYKTTDNDYGLWLARKKATLSFNKAAVALANKNARIIWSLLNSGEEFNYGVQTAAA

SEQ ID NO: 315345 - protein, 339 aa, unidentified
MTVKIVGLDLAKDVFQVHGISETGHKIFNKKIKRAKLLAFFEALPRCVVGMEACGSAHHWGRELRKLGHDVRLMPAAYVKPYVKRGKTDAADAEAICEAVQRPTMRFVEIKSEDQQAVLAIHRSRDLVVRQRTQVVNMIRSLLREFGQILPTGIEAVTSFANKHRDGDALDMPEIADGILGVMCHQLLGLNVRIEGLTKLIEQHARLDANARRLMRMPGIGPITSSAIVATIGDAHQFKTGRDLAAWLGLTPLNKSSGGKERLGRITKKGDRYIRKLLIVGMTSRALMAKRCPEKADIWTAKILAEKPFRLATVAMANKSARIIWAILTKREEYRQRVV

SEQ ID NO: 315346 - protein, 359 aa, unidentified
MFNNSTFFIGLDLGDKQSHIFVLDPKGEVIEESRLPTNPTSLQRKFASFPRSRVAMEVGAHSRWASQLLKDLGHEVLVANARKLRAIYSNPRKGDRADAETLARLARLDPNLLSPIHHRSPQAQADLAVLRSRDALVRSRTLLINHVRSVAKSSGARLPSCSADSFSNKAAASIPQPLCPALLPLLETIASLTQQIHAYDHRITTLGETRYPETQPLRRIDGVGPITALAFVLTLEDPSRFQKSREVGPAIGLVPRTDQSGDRDPQLRITKTGNSYLRRLLVNSAQYMLGPFGPECELRTWGLMLAERGGKNAKKRAVVAVARKLAILLHRLWKNGEIYDPFYRSRSNAGQPVIASAAA

SEQ ID NO: 315347 - protein, 314 aa, unidentified
MTENTSERFAGVDIAKHSLELHIEGQPVLHLTYDDAGIQEACSRFRAAAPTLIVMEATGGLETRLATELGALGLPVAVVNPRQVRDFAKASGRLAKTDRVDAQVLSAFARAIRPQARPLKEDEVRELDALVTRRRQLIGIRVQETLRLGTASRLQAKSLKEHIAWLDRRIARLDIDLTAKLRQSAAWRAKEDLLKSIPGVGQVTCTTLLAKCPELGQLNRREIASLVGLAPLSHDSGRRRGKRFVWGGRAEVRAVLYMATMSAMRSNPLIQSFAKRLKQAGKPAKVVIVACMRKLLTIMNAMIKHNAPWNPNLA

SEQ ID NO: 315348 - protein, 329 aa, unidentified
MSALVCGLDVHKDSTYATIVDPHGKIVDQMRMNNERVLSYLSHFNVDKVAMESSNQVASLYRKLKGRGYSVVVSHPKKTRYIAEAKIKSDRVDSRAIAELARLDALPLAYMPDKEISVLREQVRRRAFLVRERVKLRVKIKSILTYEGIKWPSESGLFTRKGVEWLHGLCFEPVESYLRVLKPLDDEIKLVSKQLRGLAGKDEDVKLLMTIPGIGYYSALLVKSEIGDISRFPFGDRLCSYAGLVPSTHASGNTVRHGGITKEGSRWLRWVMVEAAQTHVHKYDTSVTRVYNRIAERRGKRSAVVAAAHKLLLVCYSVLKNRRPYYDQA

SEQ ID NO: 315349 - protein, 361 aa, unidentified
MQSTTIIAFDQHAATTVAACLLPGQQKPAVHHLTSDLPTLLRFVQRVRRGAPVQCCYEAGPCGFALQRALVAHHYPCDVIAPSLIPRRPGDRIKTDRRDAVQLALLYRAGALTAINIPTEQEEAARDLLRCREDIRADLLRARHRLSHFLLRHGRRFTATKRAWTKRHAEWLQAQRWPLPALEQTHRAYVRAVDEAVARLHSVDQELRDLLTLEPLRGRVERLRCFRGIDDLTALTIAAELGDPRRFPNAPSLMAFTGLIPSEHSSGAKQARGPITKTGNAHLRRVLVEAAWQYRHHAFLGPALTTRQRGAPRAAIDIAWHAQRRLHRRYRVLAGRGKPKQVIVTAVARELTGFLWAALTQ

SEQ ID NO: 315350 - protein, 450 aa, unidentified
MPTLFVGLDLSLKNIAAAFELEDTTEPIKRFSIPHNPIGVDFLVERIKDVTAKLGIDNVEIGMEATGNLWMQLIETLRSHPGLAHLEANVHNLNARQVKNFKKIYSEIPKNDPLDALMIAEFLRFRRLPEPPPTNEKYLALQKLTRHRFQLAQSLASEKNRFLTNLFLKFSAFRQQKPLSNPFGAASSALLTEFLTVDEIAEMSIEDLASFLMQKSNNSFADPHEVAKAVNQAARNSYRLNKCLADPVNLVLSMTLENVRFFERQIAAVDKAITKEIAAFKSEATILLSVPGLGPVFTAGIIAEVHDIRRFYSDSALAKFASIVWKKSQSGEFDSDDTPMSRAGNKYLRYYLIEAANSLRMHNDEFAQFYQSKYRESTTHHHKRACVLTARKLVRLIFNLLHKGVLYKTPDKRKEDRADNPLPESTTPGELVRHITRRRRAQRALKIHRD

SEQ ID NO: 315351 - protein, 442 aa, unidentified
MDVLYKRCAGLDIHKKTVVACRLETLADGHKVQEVQTFGTMTADLLRLLDWLQSWACTHAAMESTGDYWRPVYNLLEGHLEVLLVNAQHVKQVPGRKTDVSDAEWLADLLRHGLLRGSFVPPRPQRELRDLVRQRSNLVAERADVVNRLQKVLEDANIKLGSVVSNVSGVSARAMLEALVAGERDVSALADLAYGAMRKKRAELERALTGRLRPHHGFLVTQHLIHLDFLDEQIALFSAEIAQRMEPPPAEPPVEAPPPSGSQAPAPGHTLSYSAALALLDTIPGVNRRVAEVILAEIGTDMTRFATPRHLAAWAGLAPGNYRSAGKRLSGRILPGNRSLRQALVQAAHAAARKANCYLAAQYHRLAARRGKKRAIVAVAHSIVVIVHHLLTRHESYRELGGNYFDERKREAVVNRLVHRLEKLGYQVALEQEPRPASVAAS

SEQ ID NO: 315352 - protein, 320 aa, unidentified
MTPTLGIDIAKARFQVALGTADGKLRHKSCPNTAAGFLELGAWLTKHGVAQVHACLEATGTFGEALATWLYDAGHAVSVVNPAVIHAYARVQLLRTKTDGLDAALIADYTATQHPALWAPPAPEIRQLQALVRRLDALYAMRTQEANRLAAGVSVAEVHASIEAVLDRLDDQIADVRRLIRAHIDRHPPLRHQRELLTTIPGIGDATAAVLMAELFAKPYTSARQAAAFAGLAPRIRESGTFRGRAPLSKVGTSRLRKALYFPALTALRHNPTIRAVRQRLQARGKPPMVIVGAAMRKLIHLAYGVLKSGRAYDPTCVPA

SEQ ID NO: 315353 - protein, 325 aa, unidentified
MPLTPVGIDIAKSVFQVHYVDPETGEIVNKPVKRAKFLEYFANRAPCLIGMEACGGAQHWARALTRMGHQVRLIPAEFAKAFNIRNKNDAADARAIWLAVQQPGRPVAVKTETQQAVLALHRMRQQLVKFRTMQINSLRGLLTEYGEVMGKSRAALDKAIPAVLARVSDRLPMVLIDTLREQWNGLTKLDEQIAQIERRLRQWTKEDKAVKTIMEIPGVGVLTATAAVATMGEASAFKSGREFAAWISLVPKQTGSGGKVNLLGISKRGDTYLRTLLIHGARSVLSHAKEPGPWFEQISKRRPPNVVIVGLANKMARMIWALLAH

SEQ ID NO: 315354 - protein, 409 aa, unidentified
MIYCGIDWAERTHDVALVDDSGQLVAKRHITDDAAGYQVLLDLLAEYGDTEESPIPVAIETSRGLLVAVLRTGRRKVYAINPMAAARYRDRHAVSRKKSDPGDALVLANILRTDMHAHRPLPQDSELARAVAVLARAQQDAVWNRQQIANQLRSLLREYYPAALAAVEAWKKGLCRPEARELLRLAPTPTRAAKLTRAQLQAALKRAGRQRGIEAEVERLRDILRADWAHQPRLVEDALGTQMLALLLQLEAASKAADDLEQAVEEAFPQHPDAEIILGFPGLGVQLGARVLAEIGDDRQRFVDARGLKAYAGASPITRASGRKSSVTRRWVKNDRLNHVGYLWAFSAPNASPGAKAHYRKRRDHGDWHASAQRNLFNRLLGQLYHCLQHRARFDEAIAFPAAADALAA

SEQ ID NO: 315355 - protein, 405 aa, unidentified
MSTPEGRLYAGIDWASTTHAICVVDDTGAVVVRFEILNTGKTFTGLIKRLGKLGVTGVAIERGDGPLVEALLDAGHPVFVITPRQVKGLRSRYSGSGAKSDAGDAYLLADVLRTDGHRLSPLTPDSDATHVLRSLSRTRKQLVESRVALVNQLQSELERCFPGAIGLFNRLDSDVAIAFLHRYPTQHAASRLTKSRFAAFLKRIAYCGRKPLDELYARVTDAPTAGLSPAEADGRAIGIHALLRTIETTRREERELEAEIIERLDAHADAHIFTSLPRAGHGVRAALLLAEIGDVRARFPDEESLAALAGVAPVTRASGKLHTVGFRWAADKKLRNALIDFADGSRHASPWAAKIYNDAITRGKRHPHAIRILARAWVRVIWRCWQDHTPYNPQLHGGANQLQTA

SEQ ID NO: 315356 - protein, 351 aa, unidentified
MTSLSEIVEAVIGVDTHVATHSAAVVDARTGGVLGELTVAATVDGYQQLVDFAGEHCGLRAWAVEGTGGHGAGLARLLARRHELVVELDRPERARRRNGAKSDPLDAIRAAREALSRAKLGTPRSTGQRQALSVLLAARRSAVQAGTDAQRQLFSLVIAAPECLRQRFRGHKLPAMLRLAAQLRVSPHWDSETATTATVLRGLARRALDLAAEATQHENSIQAIVCSWRPDLLAQPGIGPITAATVLCAWSHPGRFRSEAAFAMLGGVAPLPADSGSGSTPVRFRLNRHGDRQLNRALHTITLSRLRWDPATQAYARRRTAEGKTARETKRCLKRYIARDLYRLLEHPHAT

SEQ ID NO: 315357 - protein, 392 aa, unidentified
MIYAGVDVAKANHVIGAVGDDGQPLCKSMEFKNSDAGFERCSAWLEGLAEEPSDVFVGMEATGHYWMALFARLAAEGYSVCVINPMEVKAVRKLKGKSKVKNDRVDALLIAETLRIGEYVETKLASDEVQSLRTLTRYRQAIKEEAAQVKIRLTCVMDSYFPEYAGVFSDMFGSASLAVLEKSPMPSELLRRKAPSLASDISKAARRQIGQAKASELKAAAKSSVGITLGLGAASFEVRSMVSQVRFLEERASEAEERIEELLMGIEPLVLTIPGVSLATGAQIVAEVGDVSRFRSAAALVSYAGLNSSVSQSGQFDSGGGPITKQGDPYLRRAVWLAANRARPHDPALKAFYDKKRAEGKRHRVAVTAVARKLCHIVYAVMRDQVPYDPNR

SEQ ID NO: 315358 - protein, 426 aa, unidentified
MYSNTQNSKIAAITERTLVIGIDIGSETHYARAFNWRGIEFTRKPFIFNNDDEGFEAFRVWIEELKTGHDLDKVMPGMEPTGHYWFNLGAFLQDNGMRPVHVNPHHVKKSKELDDNNPSKNDRKDPRVIARLVIEGRYSYPYIPTGIYADVRNLSILRLQAQGELTRIKNRIARWFAIYFPNYKDVYGKLDAVTGLAVLKVAPLPEDIVKLGAEGVNKIWRDAKMRGAGMKRAMTLVAAAEHSVGCTEASEAARYEIRILLSDYDLYAERESELMGMINESIAEIPYIDKLLEIKGVGLKTAIGFVSEVGDISRFDDPKQVQKLAGYAIVENESGKHKGEHHISYRGRKRLRYVLYEAAISVVAHNAEFKEIYQHYITRDKNPLKKMQSLIAVACKLIRVFYMLATTDNHYDGQKMICDIKRPVVA

SEQ ID NO: 315359 - protein, 452 aa, unidentified
MAKLQNKISKCASKSTQALLERIKLKAAGIDIGSELIFIAIMGQMVKSFTTYTSGIQEAVNCLKENGITTVAMEATGIYWFPVYEAIEEAGIEAYVVNGGHVKNVPGRKTDVLDSEWLRELHTYGLLRSSFIPREDIRKLRYYIRLRNDHIGVGASYIQHIQKKFDAMNLKLHNVISDIMGKSGQRVVRAILAGERCPETLLKLCSPDIQKNKAVQVLKSLEGNYRQEYLFGAKQALEMWEIYQQKIVECDREIEKLLKEMTKDKNELVKLSPPKQIRHHKPEIKDLHLLMMKLTDNKDATQIAGINDYTLLQLVSETGLDLLKWPSEKHFTSWLGLAPSANSSGKQGKKGRKKKRKPNEAGKIFKQIAMNVGNGKYCALAGFYRRIKSRSGAAVANKATARKIAVYYYHLMTKGFDFVDEGLKKYEERCNTQRIKSLEKKAKELGLKLVAA

SEQ ID NO: 315360 - protein, 428 aa, unidentified
MEPSISTHPSAAVAAYIGIDWADQKHAIALRSAAEPSKVQHQVVEQKPEALMQWIGQLEQRFGAQGKILICLEQSRGALIYHLMGYEFLELYPVNPLQLARYRETFSPGGAKDDRPDSELLCELLYCHRDRLRAWKADSVLTRKLAFLNEGRREAVEQRTGLSNAIKSQLKVYFPLALELLNEESSTALAADLLLRWPSLEVLQKQSASTVRKFFYGHNCRGETKMLQRLELIQQAGPLTQDSALIEPAAFRVQLLARQLKSLLADIARYDQKIAQLFAAHPDRFLFENLPGAGAALAPRLVTAFGSDPTRWDSAQEVATLLGIAPLRRASGKNTGKKASVHFRLACPKFLRQSLHEFAGCSIRYCSWARACYESQRARAKAHHASVRAVAFKWIRILFACWKQRTPYDPQRYQSALKHRGSPFANAR

SEQ ID NO: 315361 - protein, 424 aa, unidentified
MTIMTVPPAAANPSGNTNPGRYAGVDTHRDTHHVAVVDELGRTVADRQFVATNTGYRQIVDFLHDHGPVLAVGVEGTGSYGAELARILAAAGVTVIEVMRANRQHRRLKGKSDPLDAEQAALTVAAGRATVVPKQRDGLVESLRILLAERTSATKARTAVLNQIHALLITAPGDVRTDFHRYHGQKLMDVLARTRPGPGDDPDQLARASLKRLAGRHRVLTEEITVLDDQLAQIAARLNPALLATHGVGPVVAATLLATVGDNPDRIATQAQFAGLCGVAPIPASSGRTHRHRLSRGGNRQANHALHRIVLIRMRFREPRTMAYFARRRAEGLADRDIIRCLKRHIANEVFALLTHPPADPLPGPLLRRQRQALGIRLTDAARTLEVPYQRLRRLEPGTRTDPDLVHRCQHWLEETDQQRLKTA

SEQ ID NO: 315362 - protein, 342 aa, unidentified
MDHYAGIDVSLECSSVCVVDASGKIAREGKVASEPEALIAYFGALRLPVVRIGLEAGPLSQWLYAAMKEAGLAVELLETRHVRTALETMPVKSDRNDARGIAQLIRLGWFRPVHCKSIGAQETRAVLTARKLVQSKLLDVENSVRGILRGFGLKVGKTTNRSFAGRVEDLVVNHASLHRIAAALLSVHAVLLRELKAFDKQVRSMARVDVKAKLLMSAPAVGPIVALTYASAIDDPGRFTSSRRVGAHFGLTPKKYQSGETDYTGRISKIGDATVRTALYEAAHIMLTKPIKGCAPLKSWAMRIARRSGMKKAKVALARKLAVILHRMLANATPFNAAMAAA

SEQ ID NO: 315363 - protein, 329 aa, unidentified
MVFLGIDVSKGRLDCALLAGEGGRPLGRRAFPNDAGGTERAASWASRVSGAAAADTHVILEATAAYHEPAARQLAALGMRVSVVNPAQVRSFAKGLGILGKTDRIDARLLARYGQLVRPRVWQPPAEAVADLQALVARLDDVEADLRREESRLEQARTRGCPGVVERSLLESIAALKSRRRSLRRAIVAHTAAHDGLQADLERLLTIPAVGPKTATRMLALLRARGFESARQAAAYLGLVPVERRSGKSVRGRPRLSRAGNPRLRAALYMAAVVGIRRNPDLKAQYERLLKAGKCKMAALGAAMRKLVHLCFGVLKGGGDYRAGVATPA

SEQ ID NO: 315364 - protein, 343 aa, unidentified
MQAITTVGLDIAKSVFQVHGVDAHGNVIFRRQLKRRYVLAFFQKLPPCLVGIEACATSHYWSRELQVLGHRVRLMPPAYVKPYVKRQKNDATDAEAICEAVGRPTMRFVETKTPEQQGCLMLHRTRHLFIRQQTSVINAIRAHLAEFGIVAPVGRRGVDQLLNIVADASDKRLPEVARACVAALGAQLQMLKARILEFDRMIRHWHRSSEVSKRLDAIPGVGPALATALVASVADPKAFRSGRDFSAWIGLVPKQNSSGGKDRLGNISKRGDRYLRSLFTAGALAVIRYAKIHGTTHRPWLTALLARRPTKVAAIALANKLARMAWALMARGDRYKEPAALAA

SEQ ID NO: 315365 - protein, 346 aa, unidentified
MAIKVAVLGIDLGKNSCSLVGLDAAGAVVKRRRMRPQNIPAFTSSLPTCVVAMEACCGAHHLGRLLASQGHTVRLMSPEYVRPYVKAHKNDDRDAEAIAEAATRPTMRFVELKSETQLDMQTLHRARDRMVGERTALINQLRAILLERGQSVPQGRHKLEQYLAAMPEPETDTSLTPRIRQLIEDMRAEWRELDRRIAAFDNEFAAQARSDPAARRLATIPGIGVLNATALVAAIGNGQTFARGRDLAAWLGLVPRQATTGGKPRLLGITKRGNKYLRKLLIHGARAALPRLANSGTPLGEWLQALMGRAHKNVAVVALANKLARIAWAVLRREEDFKTIAAEVTV

SEQ ID NO: 315366 - protein, 361 aa, unidentified
MLLRLLGLFQVPFFSFWISSKDKFMKKVVIGIDVSKEKLDFCYQRTGEKILKECMVENTTCAIKSSLKNGFKEFCLTKPDVLLCAEYTGSYTYPLSCACEELGIDLWLENPAEIKHRSGVQRGKNDRLDARKIAAYALRFQDKARLFKLPEQNIASLKQLLSERDMYVSDKCKYQGQLTDQQRFMSRENYACKSKRLKRQIKELELSISEIEQEIEGLIQRDATLARQHELLCSIDGVGKKVAVKMIVETNAFKDFKNARQFCCHAGVAPFRYDSGTSIRSKSKVSHRADKSIKALLHLAALSVATRKKDGELREYYARKVAEGKNKMSVLNAVRAKLVLRMFAVIKLNKVYEKNYHFALA

SEQ ID NO: 315367 - protein, 435 aa, unidentified
MQTNWFQNLYISIGIDVGADFSWMSIALPNQTFHGKPFKIIHSDLDSLKLAVSKIEEAEELYSLEIRIFLESTGIYHYPLFCYLRDKGFNVSIINPIITKNSTNINIRKVHNDPADSKKAALVGLKSDLKVSLIPSDTVLDLRNICREYYNLMDSRSAYVNKLQGELRMFFPQYLGIFSKITINTSLTLLDAYGSPQAFWDAPKEEIIQSIRNTSRFGLTYAENKYEAIRKAAEAALVFGHSVPSNFKRMSRYIQSIWQYDQQISAVLSDMHELVDCNEGTKLVEQIHLIESFRGAGFLSAVSLMAEIGDFSAFRSPKQLFAYLGLDPSVKKSGKWEGTKNSMSKRGSAIARRVIHTLALQSIVKNRDGSARNPVLRDYYEQKCQSKPKLVSLGAVMHKVCNIVFAILRDEKPYRVITPEEHCQDYLKAKCGIAA

SEQ ID NO: 315368 - protein, 310 aa, unidentified
MDAVYVGIDVSQARLDVHVLPGGEAFAVARDGKGLEELIERLRVFSPQLIAVEATGGFETIVAAALAGAGLPLVVVNPAQIRHFAHALGKRAKTDPIDAAVIAHFVEAVKPELRALPDEAQRLLAELVGRRRQIIEMMVAERQREKRAANVRVRKSILRHIRVLEKELPEIDEDIGTLVRGSPVWREKEDLLVSFPGIGNTLARTLLAEVPELGELTRREIASLVGVAPFTRQSGRWKGKSMIAGGRGSARTALYLAALVASRHNPILKAFYMRLLAAGKPKMVALIAVARKILTTLNAMLRDKRKWQSA

SEQ ID NO: 315369 - protein, 355 aa, unidentified
MSQEKYIGMDVHQATISVAVMDAKGKLIMECVLETKAATILEFIQGLRGTLAVTFEEGTSAAWLHDLLNPHVNRLVVCDPRKNALLKDGNKSDRVDAQKLAELLRTNQVKPVYHGKHGTRALKELGRSYLTITKDGTRVMNRIKSVYRSWAIPCAGTSVYTRRHRAEWLAKLVEPGVRIRAEHLYQQLDSLQPLRLEVRRQLLLESHKHAAVKLLRQVPAIGPIRAALLVALLQTPHRFRTKRQLWAYSGFAVEVHDSGEYRWVRGKLQRNRERITVRGLNDNHNKEVKSLFKAAAISASTRPGPLHDFYVARVESGMRPTMARLTLARKIAAITLTMWKKGVSFDPKQLYRQAA

SEQ ID NO: 315370 - protein, 409 aa, unidentified
MLYVGIDWASDHHDVCLTNDSAQTLAAFRIAHDTEGFERLHCVIKEHQPEPQQVLVALETTRGLLVHDLLRSGYQVYAINPKAVSRYKDRHVVSKAKTDSLDASCLAHLLRTDRHRFKPLVLLPEAYRLLDRLCLDLRKLVDDRTRVVNQINDCLKEFYPQPLELFYKIDSAISIAFLETFSDPNTLLATTKRRFRAFLKKQNYPYLEKADQLYEKIHAPAPEADPVIVQTGKLRLEALLGQFLAVRRHQKVYEQQIRDILRKLPESKPIRTLPGLGKRLVPELVAVLGPRQSHRRFDSARALSNLAGCSPITQASGKWKTVRMRTACVKPLRRTFRHWSFASLTCSKWAWAYYQYRRSRNHLHETILRSLAQKWTKILFAVWASGQAYDEQLHIERLKRHRVAWALFL

SEQ ID NO: 315371 - protein, 388 aa, unidentified
MLQPLDASKSLTAFEQDSTVIAVIEMSQSKWLVAAVVPGIERQPLKKIEANEETLLKVLHRWRAEAGQAGRVIKRVAIAYEAGRDGFWLARWLRARNIEAYVIHPASIAVSREHRRAKTDRLDTELLMRAFLGWLRGERRHCSIVAIPTVAEEDARRPNRERENLVTERTRIVNRMKAALTRFGIRNFKPTLRKAAEKVDNLRTAEAMPLPENTRAELRRQLARLHVVREQIREIEHERLRMLKAAPVTEKGPHAMVRLLARVLSVGIETADMLVNEVLSRHLRDHRAVARYAGLTGSPDESGRRRREKGLARAGNARVRCGMIQLAWRFLRFQKDSALAKWFDARTADGRAGTRKTMIVALARKLLIALWRLVTTGEVPQGVVLRPA

SEQ ID NO: 315372 - protein, 338 aa, unidentified
MKFKRVAIDTSKHVFTLHGVDEQERPVLRRELRRDQVEAFFSKLEPTEVVLEACGGSHHWGRLLARLGHRVRLIPPQYVKPFVKRAKNDRADAEAISEAASRPTMPSVAVKTAEQQAGAIILKHREMLVAQRTQAINALRGHAAEFGVIAAKGTAQVQALLDKLAATEAIPAVARAMFAQMGAHIAALDQQVAALDADLAALHKATPVSQLLAEIPGVGPVTAITLALSIEPGSFASGRHFAAWLGLTPKEHSTGGKHRLGRISKAGNERLRQLLVVGATALIRCAKPGSKSASAWLLQLLERKPRKLAAVALANKMARIVWAMMARGEAYRRQPTAA

SEQ ID NO: 315373 - protein, 464 aa, unidentified
MSRKVQNQQERRSARPKVDWKALEVVHPDAAGIDIGGSEHWVAISPDRDEQPVRCFDCFTADLEQMADWLKARGVRSVAMQSTGVYWIPVFEILQQRGMEVYLVNARHTKNLPGRKSDIAECQWLLKLHTFGLLQNSFQPSDEIRAVRTLWRYRSGLVAQASSTIQRMQKALIEMNVQLTNVLSDLSGVSGMAIVQAILDGKRNPKELAALADPQVKASKQVIAKSLRGNWRSELLFVLGQEMDSYRAYRKRIVDCDTEVQQHLQRMESKVDLSTQPIGPRPKGKRARGNAPQTFDLRSELYRLTGVDWSQMDGIDVQVAQTVIAEVGTDLKAFPSEKHFANWLGLCPTNETSGGRVLKRRTPKVVNRAKAAFRQAASTLIRSNSYLGAQYRRLRTRLGAPKAITAMARKLSCLFYRLLTKGQKYVDRGAQYYESRYREQQIRSVIKRAQRLGLQVLSPEVKPA

SEQ ID NO: 315374 - protein, 377 aa, unidentified
MTRIPVSTSNEQSIYAALELSKNSWLLAIQFPDRDSPSLYPIRGGNAEGLMAKLDAARKRVAKVSGQTPKVTLCYEAGYDGFWLARFLDQRGIECRVMEPASLQVNRRARRVKTDRIDVENILHTLIAWCRGERHVCSMVVIPSVEEEDLRRTHRERNRLVRERTAHVNRIKGLLFGQGIRGINVMKNYKTLTPAELVTGDGRPLPERLGREITREIERLAQVQAQIVEVERERDLAPTPCAATERKRHDLLRLNGIGPTFSAILAREVYYRRFANRRQVASYLGLAPSPYDSGDGRRSQGISKAGNSLARYTLIQAAWLWLRHQPNSALTQWFHRRTEGQGKRVRCIMIVALARKLAIALWRYVETGLIPEGAAVK

SEQ ID NO: 315375 - protein, 417 aa, unidentified
MKSAPPILPEEAPNGLTCGIDWARDDHAVAVVDTRGREVHRCVVEHSAAGLRALLGMLGKRGVSEVAIERPDGPVVEALLEAGITVVVISPNQVKNLRGRYGSAGNKDDRFDAFVLADTLRTDRARLRPLVPDQPATLALRRACRARKDLISHRVGVANQLREHLKRVFPGAVGLFAELDSPISLAFLTRFDCQDRAGWLSPKRMAAWLASTGYCGRVDPAVLHARLAAAPRGATGEHGTAEAHVTRALLAVLVTLTEQIKALAAQISEQLALHADQHIFTSLPRSGRVRAARLLAEIGDCRARFPTPESLACLAGVAPSTRQSGKIRAVGFRWACDKQLRDAVTDFAGDSRRASPWAARLYDDAIARGHDHPHAVRILARAWLFVIWHCWQDGVAYDPARHKALQRILAEQKPATA

SEQ ID NO: 315376 - protein, 344 aa, unidentified
MTNPNLLAIDLAKNVFQVCKLCPNGKVIYNREVSRAKLKEILINEKQALVAMEACGSAHYWARFAISAGHIVKVINARAVKAFQTKQKTDRNDALAIGVAAQQEHIHGTHIHSTEEQALQSLERMRHLAKVQLVAQSNQMRGVLAEFGIILPQGLSKLRKEIPFILEDADNSLPDSFRTALHKSWSYLLCQIEHLQELDRQLESLVKSHHICKKLMKLEGVGPLGALGLALRLGRGENFSNGREASANIGLTPKQNSSGGKERIGHISRYSADKRLRSVLFQGALSVITHVLDRPATTYKEQWLQALVERRGKKVAAIALANKTVRTAYALLKNDSDYQPIKLA

SEQ ID NO: 315377 - protein, 393 aa, unidentified
MTTNETQLTPTVAAPQGVKPHRLIKLGVDVHWREYVVVRQIDGTSPQPPQRFSPEGFIAWVAKQVKLADEVHCCYEAGPFGFVLHKRLVALGIKNYVVRPRNWDEYGKQVKTDRRDARALLSCLDRYLAGNHEALTVIRVPADQEERARSDTRQRAQLLAERKRLAAQGLSTARYYGDDLPEEWWRAKKFEALRAELPEFLVTLLERWQRLLVAINEELEALSGQIELAQTQELPTGLGALTAQVLDREIGDWERFHNRRQVASYTGLVPCEDSSGERCFRGSITKHGNARVRHILIEASWRLQQFQPEYRAVKQRRGALDQAKARNNKSAKKKLGVGLARQFIVDWWRIRTGRTTPEKLGLQMSWPAAYVLRGKAPPRVAAPVATTGPEAAV

SEQ ID NO: 315378 - protein, 335 aa, unidentified
MNYRLFAGIDVSKLKIDVVFFLAENPDNEFHELFENTDEGCSKMIAWINSLTGLLISDMLFCAEDTGLYTLPICTFFDDHGGNLWVENALRLKRSLGLKRGKSDKADAAEIANYGFLHRRKAVIFKLPGKTISKLKHLLSCRKQLVKQQTALKNTCGELEIFDKESAGFTLEIRESLIKEYDKKIDMVEAKLLAYVKEDDILEKQYYLVKSVHGIGSQTAMFIVVLTQGFTMFDDYRKFACYCGLAPFGNTSGTTLKGKPKVSHLANKRIKTLLTMCALNTIKKDNEFKRYYDRKIKEGKHHSAVLNVLRNKLVSRAFAAVLKDRPYEKDYHIAA

SEQ ID NO: 315379 - protein, 341 aa, unidentified
MKITTIGIDLAKSVFQVHGVDERGKAVLRKQLKRSQFLLFFSNLPTCLIGLEACGGAHHWARKLQGLGHTVKLIAPQYVKPYVKTNKNDAADAEAICEAVARPNMRFVAIKTVEQQAVLSEHRVRQALVQARTAQANQIRGLLAEFGLAIPKGIANLPKQVPLILEDPAYELPGTFRELMTRLLAHFHALDRQVDELEAQIQAWHRSNAASRRLAQIPGIGPLSASALVASIGDARSFKNGRQLAAWLGLVPRHHGTGGKQTLLGISKHGEVYLRTLVIHGARSAILAAQRRSETDSWLAKLMQRRNPNVAAVALANKNVRTVWALLAHDREYQSDYAAAA

SEQ ID NO: 315380 - protein, 337 aa, unidentified
MKYCGIDLHSNNSVVIVSDEEDRIVFNKRVANDLGQIRATLEAHREELAGVVIESTYNWYWLVDGLMDTGYRVHLAHPAAIKKYEGLKHSGDFADAAYLAQLLRLGLLAEGYIYPREERGARDLARKRMQLVRYRTAQILSIEGILIRQTGARMKGEAVKRLTAEQVDAFAFAPDVALAVEANRAVSQALGQQIEALERRLKERVSLRPEYRLLKTVPGIGETLATTIMLETGSIGRFAQVGNFSSYCRCVDSLRESNGKKKGEGNTRNGNKYLAWAFVEAANFALRYCPQAKSFYERKKSKTNRVLAIKALAHKLARACYHMLRDQKPFDVHLCFG

SEQ ID NO: 315381 - protein, 342 aa, unidentified
MKFYCGIDLSARDSSLCVIDESLSIILRQKVRNELPRIINLLEPFKPDIQIVVESTFNWYWLIDGLQTAGFEVHLAHSLGLAMITAAKVKTDARDAFTLAKLLLAGLIPKAYIYPAQSRPVRDLLRRRRLLVQLRAREYGSLRHLLLREGILSSSRNGIKQATEEELQQWLNHPLVQLHATQQLERIKLFSVQIDKLEDAILQIAQFEPSYYKLLEISGIGKTLALTILYEVGEITRFENVRRFCSYCRLIPGVAQSGEVNRRGRGSKQGNHYLKSAFSQAAVAAVRCYPKIRRCYERHLKNRRGSAGKLIALNIIAHKLAQAVYFVLKRQTDFRPELLFGS

SEQ ID NO: 315382 - protein, 431 aa, unidentified
MSKKVAAIDVGSEKMHVAIAGGEVKVFECFTDSLHQLRDHLQAARVTSVAMEATGVYWLPVYVILEAAGLEVCVVNGAHVKNVPGRKTDLQDCQWLAQLHAQGLLRGGFVPPAQIRKLRQYVRLRQDHVSQAGQHILHMQKSLDLMNLKIHDVLSETVGVSCLRMVRAIVAGERAPATLLALCDQDVIRRKTGLLLRALRGTWDEEHLFGLRQAVEAWDFYQQQIAACDVAIEKVLQELAAQKPEPGPDAGPTLKKRRHNAPTMAGLENLLHRFSGADLSALPCLSAYSQMLILSEIGTDLSPWPTPKHFVSWLGLSPGSRQSGKRRRNQRRFRGTAGKIFCVIARSLGRSKYLALAGFYRRLRSTRGGQVANIACARKIAILFYNALKHGVKYVEQGLEAYEKKYREQSIKRMKKAAARFGLTLVEPKLA

SEQ ID NO: 315383 - protein, 328 aa, unidentified
MAKEKFDVSFFDLTSKKVSNQPSHKVVTNNLKGIGKFFKGLPSDAVLVAEHTGVYGDTLLKCCMDSNVKIAFVGGYVIHRYRATPDRAKTDVLDCALLRDFGERYPDKLKYKTFPEEALYELRQLARHREMLVEQRKQLITADRSEDCRPIRSLAVKRSMDRIKEMLDTEIAETEKEMLKVINGHESIHHNYELVKSVDGVGLITAVELLVKTENFTKITTARQYAAYAGTAPYEKSSGKMDKGAHISKIGNRRSKTLLYICAESARLHNKEIKLYYERRTLIDKKPRHYVLNAIANKLLRIIFTLVEKGEYYDANFIRQDPRVVKYN

SEQ ID NO: 315384 - protein, 444 aa, unidentified
MMHECQREIDSSSHRRTPFMNSNTNQKINQVSEKTLVIGIDIAKRTHYACAVDERGRVLQKSFSFSQTREGFDTFYERIMALRATHEKSDVLVGFEPTGHYWMNLAAYLCAHGIPFIMVNPHYVNRSKELDDNLQTKNDQKDALVIARLMRDGRFSYPRILEGVEAELRNGATLHAKIQEDLNALQNRIIRWLDRFFPEFTQVFKNFGKMAYAALEKTPLPMDIQGKTPEELLFLYRQVDGMKSPQLPKAKQLVEVAQSSIGLTEGLVMARIEIATLLSQYQLMQAQLDELTAQLIELAKQMTDYAYLASVPGIGDVTIVELLSEVGSLTQYEHPRQLIKLAGLTLRENSSGQHKGQKRISKRGRRRLRALLFRVMMPLIRHNEAFKKLHEYYTTRTVNPLRKKQSMVVLCGKLLKILHALCKKKVQFDEQQMMKDLYCLQEAA

SEQ ID NO: 315385 - protein, 352 aa, unidentified
MTVINLARSITGGVDTHLDVHVAAALDDRGTLLGVESFATTTDGYKKLLGWLSDFGPVELVGVEGTGSYGAGLTRHLQAEGIRVVEVDRPNRQRRRRKGKSDPQDAISAARAAQSGDAAGEAKSRDGNVESMRVLRVARASARKARTQALNQMRGLISTAPEPIRDELGALNVFHLLERASIYRPGTKRDIVSLTKFTLRMLAKRAIALEAEITEIDAILTPLVKETAPELVAALGLGTDTASTLLVAAGDNPERLRGEAAFAHLCGASPIDASSGKQERHRLNRSGDRQANSALWHIVITRMVYDPRTTEYIERRTTEGLTKKEAVRCLKRYVAREVYSLLPHQKLGLDSP

SEQ ID NO: 315386 - protein, 410 aa, unidentified
MGYETINRRAHVMTRKNTLKSLPTDTEFRVVGLDLAKSDVSVAAIPVDDNTPSLVDRMTYADLLDWAGKISPTLFAMEPCNGYSLLCLQLENLGHEIKVISGSTVSMWINTHLSGQKTDLNDAIALARLAVSDAELTPIRHKSITEIRIQTVQAVRQQLMSQRSKSIVSFKALAQQWGIPCAAGHRNLKKLRESIEAKVDLITRPVANAMLFLLDAVKSLDRQIGQLNQTLQELVMSDERGRLLQSVLGVGTQISARVITVVGNVERFNSPRSLVAYVGVAPRNFITGHKNLTKKKHGNCPDLSHKGQGKIRRRGDKLLRSLFIQGAACLYMQFCKDQLPECQLKRWILKQLASQKPYGKLIVSLAAKLIRIVWAVLTYREKFNIQKAGMTRSMWSEMALETPLNKEVPA

SEQ ID NO: 315387 - protein, 310 aa, unidentified
MEHFFTGIDVAKDQLDVHVRPTGEAFRVSHDSAGIATLLTRLRALAPTLIALEATGGLEVSLAAALAAAGLPVAIVNPRQIRDFARATGQLAKTDTVDARVIALFAEAIRPTPRPVPDEQAQALGELMARRRQLVDMLAAEQNRRRPVRDRRVQRQLDAHLTWLEEALRRLDHDLTTLVRSSPIWRDADDLLRSVPGIGPVTACTLIADLPELGHLDRRRIAALAGLAPFARDSGTIRGRRMIAGGRAPVRRVLYMATLAAIKHNPVIRLFHRRLVTAGRPAKVAITAAMRKLLTILNAMLRDRRPWQPA

SEQ ID NO: 315388 - protein, 439 aa, unidentified
MCGGTVNGFFISFLKGVLTMKVVYQTCCGVDVHKSFLVATIIKTTSGIEPSYQKKRFSTFNNSILQFKDWLIKNQCRDVCMESTGKYWVPVFNLLEDEINVTIANPKWVKAVKGNKDDTKDSKWIGDLFRLGLVPGSYIPCKPIRILREFTRYRYKLTSCRTSEKNRYQNALTVCNVALDSVVSDIFGKSAASVIDYLIEQSGNSVNHEEIASRLLRSLKKKSDSIIESIEGYQMTDSQKYRMRLVRAHLDYITSTINDIDTMLDSLIAPYENAVQLLCTIPGVDRNSAVTVISEIGTDMTPFSNSKRLCCWAGLTPGNNESAGKKKSVRITRAGVYLKPALVQVAHAAVKSDKSPYYKQKYERIMKRRGKKRAIIAIARMILTAIYQILSTGEVWNPTDLYKIDMPEPLKEKQREKAIRQAKKLLISEGIISESQLAS

SEQ ID NO: 315389 - protein, 370 aa, unidentified
MTSIFYVGIDVHTTNYTLCCYSAGNDRIFAETEVDPDYRNIIKYLERVEENHGGDCFFQCGYEAGCMGYTLYRQLTNSGFDCVILAPTTIPQTAKNKVKTDKLDARKIAKSLAYNNYSAVYVPTREDNAVKEYIRMRNDVKDTLKRIKQQLLAFCTRHGKQFTEGRNYWTQKHLAWLKKQEFGDAVLQEAYQEYLALYYQATDKVEMFDKRIVEMAHQEAYAERVNKLTCFIGVKELTALATIVETGDFKRFKTAQQYAAFLGLAPGENSSGESIRRTGITKAGNTHIRKLLVEAAQSYTRGAVGAKSQALKKRQEGNEPKVIAYADRANERLKRKYYRIQYHSKRNIAVTAVARELACFIWGMMTDNTA

SEQ ID NO: 315390 - protein, 347 aa, unidentified
MHLYFVGLDVHKQVIAYCVKTAGGEIVMEGQIPATRAALTQWTKTLPGPWCGGMEATMFSHWIYWHLKPYAQQLEMGHAARMKAVCAGKKKSDKIDARTIADLLRCDLFPACFVISEKLGALRQQMRFRRLVVEEQTVFKNKTATLLMSAGVEYERKRLHGKRYFQQVVQENREWLKDQVQPLLEFNRSQIDALGRMEQRLISLLESHPELRARVEALERIDGVGPVTALTWALEIATPSRFRSIKRALSYCGLTSALRESAGQSRRGPISKQRNRHLQSVLIEAAKLAPMYNEKLREVQQKALEAGSHRNRATLAVARKLVAFLLAADRAYSATQGATAASQGCVF

SEQ ID NO: 315391 - protein, 434 aa, unidentified
MTRYVGLDLHKHVVQASLINEEGKRLESYRFACTQESLLAFARERLRPEDQIALEATTNTWAVVALLRPFVARIVVANALRTRAIAEAKVKTDKVDAESLAQLLRCDYLPEVWQPDQETQQLRELSVRRSGLVADQTRLKNRVRSLLAQRLISAPMPTLFGVAGRQWLRQAVLTPTDRVIIDGFLHLLEGLEAEQERIEKRLAELSYPKEEVRLLMTLPGVGAAAAQALVAALGDWRRFADGDVAASYLGLTPRVHQSANTCHYGRITKAGNPQARWLLTQAAQQVAQHPGPLGVFFRRLKAKKNHNIAVVATARKLVVIAHLMLKNREPYRYAVPATTRDKLAGLRVAATGVRRRKSGPLREPMQSQPEGIRVHKTPALNEVYSDEGLPAAKSLSELGAGETKMLTEMTLLEHASNVQMRKQRFCRRHTQKTG

SEQ ID NO: 315392 - protein, 402 aa, unidentified
MKASKNYLRFCGIDIAKRRHVACIVERDGRYILRPKSFNNDAEGFQKILNSLKQTGRSTSVLVGMEATGHYWYALHDFLVAQGYTVVVLNPIQTSQQAKQGIRKCKTDKSDAFHVATLLRTHQYKPAIVPGELAMTCRQLTRLRYRMVRQGALIKQLVNSRLYPLWPEYETFFADHLCSTSRTLLKAATSPQELLALDTKDLSELIQKASRGKLGPVLAQRIRQTATHSVGVQRGRYGRSACIRILIEYLDAVGPIRKKLEAQIEDLAHQLPPYLETLPGATPLTLVSLYGEVDPIEAFTGPSQLVAFAGLDPKVFQTGQYDAPRRHVSKRGSPYLRRTLWQMAHRAVCTEGELRDYWRKKRRQNKHHLVAVTAAASKLTRIVWRIMTDRRRYIPRQNNTHS

SEQ ID NO: 315393 - protein, 342 aa, unidentified
MKFYCGIDLSARDCHVCVIDEQLKIVVQQKLRNELAKICQLLGPYKANLKIVVESTFNWYWLIDGLQAEGFDVVLAHTLGLYLITGAKVKTDRRDAYSLAKLLLVGAVPVAYIYPVETRPVRDLLRRRMHLVQVRAGEYGSLRRLLLRQGILSSKQQEIKTATEAELEQWFEHPLVRLHASQELRRIELYSQQIGELEKTILALAQTAPSYELLLQLPGVGQTIALTILYEVGELTRFANVKVFSSYCRVVPGIAQSGNVSRRGRASKQGNHYLKAAFSQAAVHAVRCYPKVRRYYERQLKRHRGRGRQMICYNIIAHKLAQAAFHVLKEQTEYREELLFGR

SEQ ID NO: 315394 - protein, 310 aa, unidentified
MGVYVGIDVSKQHLDWVLGAEGNVERSPNSSAGIRWLVTKLKKVEVTSIIVESTGGYERALTEALSAADLPVILVNPWRVRRFGEGLGVLAKTDPLDARVLALFGERARPPQRPLPGPRQREMTDLVRRRRQLIAMIVAEKNRLDTAPRIIRRDILSLVQLLERRVAKLDLRIDQAIAGDAERAENWKRLQTVPSVGPGVARALIVDLPELGALGRRQITSLVGLAPFAKDSGKKSGYRRIRAGRAAPRTALYLAAMNGARFNPVLKAMYERMIAAGKPPKVALIALARKLLTILNAMVRDRTDWQETAT

SEQ ID NO: 315395 - protein, 334 aa, unidentified
MSKVTTVGIDLAKNVFSVHAVDERGVVLFRKTVSRARLLPMVAQWPACLIGMEACSGAHEWARRFQAHGHTVRIMAARFVAPYRKSGKNDGNDAEAICEAVQRPAMRFVPVKSAEQQAVLSLHRVRQGFVEERTATINRTRGLLAEFGVVLPGRAVEVRRGAAAAAEALPALARQAIGDLLGHLHTLDERITAYDCELEHLARTNEVATRLMSVPGVGPMTALATVASVGHAHEFASGRQFAAWLGLVPRQWSTGGKTRLGRITKRGDAYLRTLLIMGARAALQMAARRNDKLSRWAIALKERCGYHKAVVALAAKNARIIWALLARETTFRVA

SEQ ID NO: 315396 - protein, 309 aa, unidentified
MEIVVGIDVSKAQLDVHVLPSGEAWLVANDAEGLAALCDRLGQLGPQVVALEATGGLETVAAGGLASAGLPVVVVNPAQVRAFAAALGQRAKTDPIDAWVIARFTQATCPKVRPIPDPEIRLLADLVARRRQILQMLTAERQRLQRTAEPRLKKSLGRLIRALQKELEQIDGDIDQAVRASPAWLRKEDLLRSVPGVGKIVSRTLLAEMPELGTLDRRQAAALAGLAPFTQRSGQWRGKSFIGGGRASVRSALFLASLSAARHNPQLRLFHQRLIAAGKPKMVALIAVARKLVILLNAILRDQTPWQTA

SEQ ID NO: 315397 - protein, 403 aa, unidentified
MGHDSEAFIGIDTSKLTNAVAVAEAGRNGEVRYLGEIATTEAATRKLVAKLSAKYRKLTFCYEAGPTGYGLCRLIGSLGHACDVVAPSLIPRKASERIKTNRRDAESLAKLLRAGELTAVWVPDGAHEAMRDLSRAREAAVDDLKRKRQQISSLLLRHGLHYPAKKTWGRKHRTWLSQLKLGHVGTRLAFEELMAAEREAQARVDRLTAAIREAVPAWSLAPLVTALMAMRGIELVTAVVVLAEIGDMSRFQSPRELMAYLGLVPSEASTGDSVKRGPITKAGNKRARRVLVEAAWSYRHPPRVGRDLQARVAAAPRVAREIAWKAQTRLSSRYRGLARKGKRSTVVTTAIAREMTGFIWDICRQVMPGGARPVTAEHAERAVDRSSNAGARPAHSPPSAINP

SEQ ID NO: 315398 - protein, 350 aa, unidentified
MPQRNMPRSAAVYGIDIGKNIFHVVGLGSDGTVVQKVRFRRDTLLQFFERATPAVVGMESCAGSQWIARKIQALGHRVRLIPAQFVKPYVKSNKSDIIDAEAIAEAATRPTMRFAAIKSEEQADLQALHRVRDQMIGTRTRLINQMRAFCLEYGIALRQGAGLFKLDLPQTLEDLSNGLSGAMRKLLTDLFNDLRQLEQRIADVTREIEAIANREDVARRLMTIPGIGALGATALLAAVGNGRQFQKARDLAAWLGLVPREYSTGGKQKLLGISKRGNRYVRKLLVHGARSCFRHLDRTRDRLGNWLDGLQARMHPNKAVVALAAKMARIVWVVLTKPGALYERRDPAFA

SEQ ID NO: 315399 - protein, 343 aa, unidentified
MHTITTIGLDIAKSVFQVHGIDAAGQVVIRRQLKRRAVLAFFQKLPPCLVGIEACASSHHWSRELQALGHAVRLMPPAYVKPYVKRQKNDMADAEAICEAVTRANMRFVPTKTPEQQGCLMLHRTRHLFIRQQTAVINSIRAHLAEFGIVAPVGRKGVMELLQVVADPSDKRVSEITRACLTALGNQLLSLKEQILEFDRMIMAWHRSNEPSKRLRYIPGVGPMLATALVASVADPKTFRSGRNFSAWVGLVPKQHSSGGKDRLGSISKQGDRYLRSLFVAGALSVIRYAKIHGTKHRPWLTALLARKPTKVAAIALANKLARMAWAMMARGERYRNPVALAA

SEQ ID NO: 315400 - protein, 394 aa, unidentified
MTATYTHSIPAGTLVLHVAFELGANQWKLGFSTGLGVAVRLRTIGAGNLAVLRREIELAKKKFRLTDDVPVCSCYEAGRDGFWLHRWLVEQGIGNIIVDAASIEVNRRYRRRKTDSLDAAKLVAMLIRHHAGEKLWSVVRVPSREDEERRHLHRDLEEMKAETTQHRNRIRGLLAGVGARVAEINSNFLEMLPTLQTADGREIPGELRARLLREFERLQFVEQQIRSLERQRNQKLRDGDDQEYVVKARKLMGLRAIGPHSAWVFVLELFGWRRVNNRRQLASLVGLTPTPYDSGEDEREQGISKAGNRRLRTLLVEIGWCWLQYQKSSALSQWYQKRFAGGSKRQKKIGIVALARKLLIALWKYLQHDEVPEGAVLGNWRSKLIGLGAQSLPN

SEQ ID NO: 315401 - protein, 414 aa, unidentified
MELLHERCAALDIGKKDLKACVRTPSPTRKRSRRQEIRTFATTTNALLELRDWLLGERVSLVVMEATGDYWRGAFYLLEDDLNVILVNAAHAKGLPGRKTDVSDAAWLCQLGECGLLRASFVPPEPIRQLRDLTRYRTTLTTERTREAQRLEKELEDAGIKLSSVATDILGVSGRAMLTALIDGERDPRVLAELARARMRPKIPHLVQALTGNFGDHHAFLCRLHLQRIDSLSAAIGELSARIEEQMRPFARQLQQLATIPGVGQSIAEVIVAETGADMSRFPSAGHLASWAGVCPGHYESAGRRRSGKTRHGNRWLVGALGTAAMAAARTKDTTYLGARYQRLAHRLGKKKAIVAVEHSILTAVWHMLTNDADYTDLGGDYFARLDPQRAMRRIVRQANILGFTVRFDPIQAA

SEQ ID NO: 315402 - protein, 341 aa, unidentified
MNVTTYGVDTAKSVFHLYWVDPQSGEIHRKKLSRAKFVEFFSRREPGCVAMEACGGAHHWGRLLQSMGHQVQLLPAQRVRAKRSGNKDDAADARAVWEASNDTALRRVPVKSCEQQAALAVHRVRSHWVSVRTASVNALRGLLYEFGVVIPKGREVLIGWLAQHRAEFQDKLPATMVQLLDAHLQALRELDAHIRATEVQIKSTLKTTGQARRLHQVPGIGVLGATALAATLGDGSGWKNAREFAACMGLVPRHSGTGGKVRMGAITKRGDSYLRTLLVHGARNLVRTGKPAPWIVAMLRRRPFNVVVVAVAHKMARTAWAMVARDQAYNPSLGPTSASAA

SEQ ID NO: 315403 - protein, 376 aa, unidentified
MSSSILYLGLDVHKESVTIAVLPADAPAPTRLERLPYDLKKLQRFCTRLAQGGMALRACYEASSAGYVLQRAMTSWGHVCEIVASALIPKKPGERRKFDKKDAANLARLYRAGELTPIRIPTEAEERVRELVRCRETLQREILRSRHYLLKLLLRRGLIYHAGAHWTHRHRAWLEDQRRCGVLTGGDVVAFDEYLALLDYKLARRAELDRQIEALALTPLYRPVVARLACFRGINTLGAMVLATELGDWQRFAKPTQLMAYLGLVPTEHSSGPHERRGAITKAGNSRCRHILVQAAWSARRPPSRSGLLTRRQRGQPPALVAHAWKAQRRLYTLFHRIAARRPAQIAAVAVARELGGFLWAAMRQVEVVEHSSVAA

SEQ ID NO: 315404 - protein, 339 aa, unidentified
MKVSTLGIDLAKNVFQLHGVGCNGQTVLKKKLTRVKFLPFLMQLEPCLIGMEACASSHHFARVLRQYGHEVKLIPPQYVKPYVKTNKTDAADAEAICEAVARPNMRFVQIKTAEQQAILVLHTERNILIRERTACANSMRAILAEFGIIMPRTLSQLYKKIPEILEEYDNELSPFVRCSVARQLEHLQGVEDQITLIEQELSRWAKTQPACQRVMKVPGVGLMTATYLGASVGNGQQFHSAKQFAAWLGLVPREFSSGGKQRLGRISKRGDRFFLYLLVHGARAVAAVIERHKDNRPWLYRLLNKKAYNVAVVAQANKTARILWSMLVHHTEYRTLSAV

SEQ ID NO: 315405 - protein, 455 aa, unidentified
MSNRSRRGLSRGDRRRNEKLARLREIITRETAVLAFDLAADKQVCALTDPDSRVLARRTARVRAWQLAQTLDWGLAAAAEAGFTSVVVACEPTGHRWRVLDQLAAERGVVLVCVQPLLVARAREAEDFTRNKNDDTDAMIIARLVTELRCYLPERADPAWARLRHLGARRARLVVEVGAARQQVRDLLECAWPAVLDAASKPLDSANWLAAVATGLDRVAATGELSELGQRGWEQFAAAVRAELAPTRWYSVIVRAVFDAATDPAAAAVGVVDQRAGALERVRFALADLAHLRAQIAEVETRMTRVLDTLGLTELVTGIPGVSAVGAATILAEAGDPTRFSSARALVKHAGLCPRANESGNYAGTTSISGRGRPELRLAAWRAVFTALQHNPVLAARHAHLTGRAENPLTDTQARIAIAASLLRQLHAVIVTRTAWDPAIAAGLDRAEPEVHTAA

SEQ ID NO: 315406 - protein, 359 aa, unidentified
MAVIEEGERRVVGGVDTHKDLHVAAVVDQQDRVIETRCFATTRQGYRQMLAWMRSLGELQRIGIESSGSYGAGLLRFMQQAGIAVLEVTTPDKQDRRRRGKNDDLDAQNAAHAAFAGQRTVTPRSRDGMIESLRVLMACRKTAVSARRVALQMIHNTIVCAPDGLRDQLRSLTRMQLVRTLAAWRPDMTAYRDLDSAYRIGLKSLARRYLELHDEIVDLDVMITAIVDELAPNLVARNSIGHIGAAQLLLTAGDNPERLRSEASFASLCGVSPVPASSGKTVRHRLNRGGDRAANSALHIIAIGRLRTDQRTKDYVARRIAEGHSKLDAIRALKRYLAREVYTLISQRRREINATRIAA

SEQ ID NO: 315407 - protein, 322 aa, unidentified
MTGENYVGIDVGKKSLDLAVYGSKKTTTFPNTEEGIEKLLLALQKINPSLIVVEATGGYERLLVVALISQGFPISVANPTRVRALAKASGKLAKTDAIDAHLIAEYACLMKPQPISSFDEAFLRLQALVKRREQVVEMRTAEKNRLDKSPLFVEEYIERHILQLEEEVALLEKEIRTLAASIPCCREGMELLSTIPGVGFITSVTVLALLPELGTLDNKAIASLAGLAPFNRDSGKKQGKRKIFGGRKRVRRVLYLSTLSAIRCNPVIREFHERLIERGKPSKVAITACMRKLLTIMNAMARDNTPWQEFSLPEVEILLPVS

SEQ ID NO: 315408 - protein, 355 aa, unidentified
MNSEKYIGLDVHQATIVVAVTDSSGKLIMESILETEAATILQFFAGLRGTLAVTFEEGTWSAWLYDLLNPHVDKLVVCNPRKNALLKDGNKSDRIDARKLAELLRGNQLKPVYHGENGVRMLRELSRSYLVIVKDLSRVMNRLKAVYRSWAIPCAGRDVYYRRHRAQWLDKIREAGVRRRAERLYEQLDMLQHLRQQARRELLAEARKHAITARLRQIPYLGPIRSALVVALMQTPHRFRTKRQLWAYSGLALETRISAEYRMVEGQVRRSKKLLCIRGLNKDHNHDLKGLFKGAATMASVRPGPFQDFYQAALAKGVKPTMARLSLARKIAAITLTLWKKGESFDAEKLKSQAA

SEQ ID NO: 315409 - protein, 341 aa, unidentified
MLHIGLDLHKRFSTVSTVAVMDDDGKVLLEDKLYHEDQARLREFLSAYAGKAVVTVEATRNWYWMYELLERLGVTVKLANARKVRLIAEARLKNDKVDPRALAQLERTGFLPEAYIPPLLTRDNREYLRYRLTLVRMRTGLKNKVHALLDKLGIRHRFADLFCPAGRRFLGQLKPRPVYQEELTNYLALMDDIECRIVVVTKEIKRQLKPDSRAKLLMTIPGIGHLTAYLLLNEIGDIKRFATPGKLSAYGGIVPIVRQSADHRWQGHITKEGNRYIRWALTESAYLAPSKDYALGSFYRRVAFRRGPLRARVAVARKLLVAVWCVLTYCEPYKVTQFPTV

SEQ ID NO: 315410 - protein, 330 aa, unidentified
MNYVGIDISKNSFVVAFSYEKNTKTQSYKNTPEGVRKFIKSLDKEQHHCVMEATGNYCFLLLYMLVEQGYRASLINPKQIKYFAKAALSVTKTDPQDALLLALYGKRFEPELYKMPSESIILLKQKRTAIRQLKKQRIASQNLKKSIEVLPYKDKKTIKVLNTTIDFLNNQVKNLEKELFDIASSDFQKQISLLTSIKGIGMTVATSLIIATGGFSFFENPKQISRYIGICPTYQQSGTSVNIKGSINRNGDTSLRSMMFLASITAIRCNSACKEFYTNLKEKGKPSKLALIAVANKLIRQAFAVVKSEIPYQDGFVSLAPNQKQINYNA

SEQ ID NO: 315411 - protein, 399 aa, unidentified
MKYCLGVDVAAVDSMYCLAAENGEVVFLPEKQPHTISGFNNILNKIQEIPQEDISVMMESTSIYHIKVEHFFRTNTNCNVIVINPMISKNHKRNLRKTKTDKEDCFNLIDIFFKNEYNAPNCQDDIYSELQFLSRQIQHFQESATRTRNRFRQLISMINPVYFSVLRSDFMYSENGLKFISQWPHCDMIKAATVDDIANSFAFISNRSPNYYRRKAEALKYSAEDCYPAVDKDSVITVCLSDTALHLLYELKEIDSLKQRLVALASDHELFKLYITVPGIGPYLAAVLVAELKDIRRFENHKKLIAFCGLDPTIVQSGKTINYHGPISKRGNATARKMLFYAVNIILTVARKTNPDMPLLLYYKKKRDEGKHHHASVIACCTKLLRILLAMSKQNIPYK

SEQ ID NO: 315412 - protein, 333 aa, unidentified
MNTIGIDVGCKELVVVIMVNGKARKAKSFDNTPSGHQAIIHSLTKLKGETKVCIEATGVYHFDLAVALSRTDGIEVMVINPKAAHNFAKALMTRSKTDAIDAENLAIYAERMPFEVWERPADECISLRAISRRIAALNKQKTQTKNQLHALESTLETPKLVIEQTKELIDILAAQIKTLRDSALMLIQQHEGLEQAYTLITGIKGIAQASAIQILSELMILPKNMTARQWVAHAGLDPRIFDSGSSVSKKPRISKVGNKYIRQALYMPALVASRFDPNIKGYYHHLIDDNGLKKVQAVCAVMRKLLHAIHGMLKTNKKFDGERFYTFPAEAKS

SEQ ID NO: 315413 - protein, 359 aa, unidentified
MAKARTLVGLDVHATKIVAAVLDAETGELQFFGLGGDVCEAAGLCAGLPRPVRAAYEAGPTGYGLARELARRGAECVVAAPSKIPRAAGDRVKTDRRDAELLVRMLWAGKLHAVRVPGPEEEALRDLVRAREAVRVDLMRCRHRLSKLLLRHGIRFEDGRAWTDRHHAWLAGIELPWPAAQATLADACGTVDALVHRRDALEREIVAFLPDSPWHQQVGRLRCLRGIDTLTAAGLCAEIGDFTRFAHPEQLMSYLGVVPSEHSSGTRRRQGSITKSGSQHARRLLVEAAWHYRQPPRVSEPLRRRQAGADPVIVALSWKTQRRLHRVWSRMEQRGKRRTIIAVAAARELAGFCWAVATA

SEQ ID NO: 315414 - protein, 353 aa, unidentified
MHATTVAIDLAKDVFELAFADTRNRVLERKRLSRKSFAHCLDNRPPLRVVMEACGSAHYWGRRFQALGHDVRLIAARDVRPYVRRNKTDRTDVAGMLEADRCADIAGVPLKTPEQQGVQALHRIREQLKAQRTATINVLRGVLREFGVVIPLGAAKVRLAVLSALEDGDNDLPMSLRDALAAQLDQVLALEAQMRRIEHHLEEFAARDATTMRYQDVPGIGLLTATALRASVGPLARFASGRHLSAWIGMVPREHSSGSQRKLGRISKRGDGYLRTLLIHGARSVLHAAATRRRNAQPLDRLQAWALDVQQRQGHNKAAVALANKLVRRLWAMEHHGKRFDANHCSVRPEVTH

SEQ ID NO: 315415 - protein, 328 aa, unidentified
MTKRTTICAGIDTGKRKLDVGLDGSGKQLQVENTPEGHKVLLAWLLQHRVKRVGIEASGGYEQPVVAELRRKRFVVVVFQPAQVRAYAKFHLQRAKNDKIDAALIAACTAAVRKIHAAPDPRLLPFAEQLTMIDQINEDIARLKNRIESCRNAQIKKLWKEDIARLEKREKAELKALVASIRKHPDLAKRLGLINSVHGIGLPTAVAILVRLPEIGRITREQAVALAGLAPYDDDSGEQVGVRHIEGGRKRLRRALYTASLAASFRWNQQLIQLYQRLTAAGKEHKRALVACARKMLIFANTVVARGTPWCDEPLTVKASMTGSLSVS

SEQ ID NO: 315416 - protein, 338 aa, unidentified
MGTYAGIDLHSSNNYIGIMDQDHKRLFGRRLPNSLEKILMVLEPFKSDLKGVVVESTYNWYWLVDGLQEQGHRVHLANPSAIKRYEGIKHTDDKWDSFWLAHMKHLNILPEGYIYPKEQRAVRDLLRRRLFFVRHRTANILSLQSTITRNLGIKMSSNEIKKLDMDDACDLFDSANLVFMAQNNISTIKHLAKIIKGIEKEVKSQVKLRKEFVMLTTTPGIGLILGLTIMLEVGDIGRFFKVGNYSSYCRCVGSKRLSNGKKKGENNKKNGNKYLAWAYVEAAHFAKRHMPKAQRFYQQKMAKANGAVATKALANKLARASYFVMRDQVPFDEDMLFR

SEQ ID NO: 315417 - protein, 441 aa, unidentified
MSDTAVTAPEPAWAAFIGLDWGSQKHAWILEPAAGGQRQQGVVDNTPEAMVAWAADLNCRFAGQPVAVALEQKRGSVVNLLLPYAHLVLFPVPASMSASYRKTFVPSGAKDDPSDASWILDLLLRHRDRLRRLEPDEPNTRLLLMLVEDRRQLVDDKTRLALRLQDCLKQYFPQLMQWFDMDSALVGDLLKQWPDLQHLQRCHDGTLRRFFRQHHSGEDRIAQRIDAIRAAVPATNDPSVLEACSMKARNLTESMAMLRDQITRLEHRRDELVASHPDAPIFASFPGAGRATVPRLIAAFGTRRERYQSAFEVECDSGIAPVHIRSGKIDRVSIRRACQDFTRQTFHEFAGQTIPRCEWAKAFYRAHCHKPEQHHAAVRALAFKWIRILFRCWKNGVPYDEQLYLTSLKRRSALLGHGLASATSVGWTTVAGFSKLSEKKP

SEQ ID NO: 315418 - protein, 400 aa, unidentified
MNTEYDVWLGLDVGKIGHHGCGLDLSGERVFDRELPQDKAALRDVITTLQDGHGRVLVIVDQPNTIGALPVAVARDCGADIAYLPGLAMRKAADLYPGQAKTDARDAFVIADTARTMPHTLRTVDRESDVLANLKVLAGTDEDLAHDITRAINRLRSLLLQIHPALERVFKGTVLTRTIVLDLLIRYRGPAGLRAAGKSGVKRWAKNHTRKDPSALIDAIFDALAEQTVTVPGSEASESVVPRHAARIKALKAERKEIEAEAEELADSLPLLQVLTSMPGVGVKTASQILLAADDFSAFKSAGHLAAYAGIAPVTRRSGTSIRGEFPSRAGNKRLKNALFHSAWVASCHDPLSKAYYDRKRAEGKRHNAAVMCLARRRLNVLFAMVKAGAFYETRTPAAA

SEQ ID NO: 315419 - protein, 370 aa, unidentified
MLDTTTFVGLDVHARSIKAVSLDVMTGEVRCATFGYDAGAVAEWVRSMDPKARCVYESGVTGFDLQKRLSGLGVDCVVGAVSKMIKPSADRRRKNDRNDAEFLARMLSVGNVVEVWVPDDECEAARDLTRALEDARDDLSRAKQRLSKFLLRHGLAFDERTPTGRRKGNWTRAHWSWIESIRFAEGADEEVLAYYVDAVRRAAEEKARLEGLVEAEARKPRWRRRVDSLRCLKGVDTATAADLVFEAGEFSRFRNARSFAAWVGLTPSEHSSGESDRRGAITKAGNKHLRKALVEAAWHYLTCSGRPKDLAKGQAPDRVARRHAAKGVRRPVERREALLARGVHGNKANVATARELACWVWAVGLMAEEA

SEQ ID NO: 315420 - protein, 372 aa, unidentified
MTSIIYIGMDVHTTNFTLCCYTMDSEREFATVQTKPDYHEILKYMERIRKQRGEDCRFVCGYEAGCLGYSLHNQLRAHGVDCIILAPSTMPQEKGKRIKTDPRDAAKIAKCLAFHLYSPVYVPDAEDDAVKEYIRMRDDVNADLKRTKQQIIAFCTRHGFCFEGKTYWTRTHLKWLETLVFENDLYKEVLQEYLILYYTLAEKVDIYDARIEELSHTERYEEKVQKLRCFKGIATHTALSLLVEVGDYNRFRSAQHFASYLGLVPGESSSGEKQVRTGITKAGNSHLRWLLVESANSYSRGAVGKKGGVLKAKQEGNTPEVIAYADKANERLQRKYYKLALRSRHNIAKTAIARELACFVWGMMTGNISNAA

SEQ ID NO: 315421 - protein, 345 aa, unidentified
MLADEVDFVIGVDTHKDSHSAAVVNATGGVVAGLEAVACESGYRRLLNYARVHATGRRAWAVEGTGSYGSGLSVFLQGQGERVIEIERPRRAARQKGKSDKLDAIRAAREALADDKLVTPRQRGQREALRVLLTTREGAMRARTAALCQLHALVIGAPEELRGRLRHLSTDQLVRRCSHLRRHARQCLELQVLTQALSSVARRAEALHVEAVAYERDLVQLVNALAPTLAAEPGIGPICAAQILCAWSHRGRLRSNAAFAALAGVAPIQASSGQVVRHRLNRGGDRQLNRALHTIVIWRTNFHAESKAYLARRRQEGKSDREIRRCLKRHLARRIFHLLQGVDSL

SEQ ID NO: 315422 - protein, 365 aa, unidentified
MNTIYIGVDFHARQQTICYLTTEGGEIITHQLKHQDKDEVRGFYAQFSGRVIVGLEASGYTPWFEQLLEELGHEVWLGHATEIRRRARWRQKNDRRDAELILDLMIHDEFPRLFRPAPQSREILRMLRYRQKLIKIRTMGKNSLQALALQSGLAKRGYLFTKSGQQELRAARMSPAMQWQRDQWLQLLEPINERLVETMLWLKQQSQGDARVSRLRTHPGIGLLTSLCLVHTLWPVTRFRNQRKVTAYVGLEPMERSSAERKQFLGISKAGSRVLRHLLVEAAHTAVRKDDDLKCFYQRLAARRGRPKAKTAAARKLLIRSYIMLRDEIDYAEFRRRAVAARLARRYARPNMPGPLIGQPASPAD

SEQ ID NO: 315423 - protein, 404 aa, unidentified
MELTAIYRCVAALDVHQSKLTVCILYENESGEIITELKEFGGFKRDRRAMADWVVSFQPELVVMESTGIYWKSPYAALEKQGLTIWVVNARHVKQVPGRKTDFADAQWLAILARNGLLRGGFVPPAVFRELRLIARQMQKLTGILSGEKNRLHKILSDGGIRLGVVVSDIHGKSAKAMIKGLLAGESPEQVLKYASNRLKASEEELLDALAGDLSPSHQFVLTELMAHIDELEARIETFRQALLQGLAPYQAILRSLQTIPGLDETGAALLLVEIGDDMSAFGTPERLASWAGVCPGNNESAGKKKTGKTRKGNPYVRRILCEAANAASRTQCRLQDMFKGLLIRRGRKRAIFALAHKLLKIVFLLIERGDYYRDATVDYEKLSVQRNAPRWIKTLKKYGYIAA

SEQ ID NO: 315424 - protein, 378 aa, unidentified
MREVPVEIERTFVGLDVHARSVVACALDDRTGELSKARLVPENETVLAWLQQLAGPVAVVYEAGPTGYGLARFLTGRGVRCVIAAPSKLHRPSGDRVKTDAKDALLLARLLRLGEITPVTVPSLAQEAARDLVRVREDVRADLMRARHRTSKLLLRQGIVWSGGTAWTGAHEQWLGQQRFELAGLQAAYDTTLETVLLATSRRARLDKAIVEMAHEPQWWPTVSRLQCLRGVSTLTAFGLAVEVGDWTRFSGSTIGAFLGLVPTESSSGEGRQQGSITKTGNTHARRLLVEAAWHHRRPYRPTKTMRDRWDLAPAAARARGHAGNQRLHERWVRFNERKKRTVIANVAVARELAGWCWSLATLTEDTPPARGPRGGRR

SEQ ID NO: 315425 - protein, 351 aa, unidentified
MINEKINQKETKINDYVDTLESYEHYIAIDWSKRTMAIARLTRIMKKPKVIEVRSDVYDLKAYLRNLRGKKILAIEETTSSQWLYVELQGYADKILICDPYRNRLLSEGSKNDKIDAIKLCLLLKNGLLKEVYHSLEYQYRLRQQVSDYEDLVKSGVRLKNQLSAIYRANGDEEIKGVVTKRIITRIEQNIELYEQQKEEYERIFGQEYRKDKDINHLRSVSGIGSIRAVMIVATVVDARRFENNGKYLSYCGLIKHEKLSGGRSYGKRSPRYCRRLKCVYKSAAQTVINSKDNSLKQYYNYLIDKGVSEDRSRNALARKIARVTYGILKTRTNYKPFIWRENKAKEISIK

SEQ ID NO: 315426 - protein, 361 aa, unidentified
MNATTAAIDLAKNVFQVVLVDANYRVLEQHRLTRAQFERFFDNRKVSRIVMEACGSAHHWARVFGARGIEAILLPAMYVRAYVRRSKTDAADALALLEALRCADIVAVKVKSVEQQSLQALHRTRSLWMGTRTSRINALRGFCRELGLHVPIGARTGLEAMGRAVADEQSPITPLLRPIMLQLLDEIRLLETRVAQLERQLAQLARESHACKLLMSIPGIGLLTATAILAATAGSVAHFKSARHFASWFGLTPKENSSGTMRRMGRISKMGDRYLRMLLTHGARSVLRAAKVAQLKGIELIGLRHWALALQARSNHNKSACALANKMARICYAVLRDQTPFGQPAARLAKKMQRQSFELAY

SEQ ID NO: 315427 - protein, 358 aa, unidentified
MTRKRLSGNHLLDFIGVDEKTPVWIGLDVHKKSYHVALRRADGVCQSWVSPADPIVLARRLSTISQRISLIVYEAGPTGYSLERVLKANGYKVAVVAPSRIPRPVTNQAKTDKLDCLKLAEYAAKEMIEAITTPSEQESAERSVLRRRNQLVDSTRKTKQRIKSFLLFHGIEEEYGLRYWSRSAKAKLSKLPLQSDLKFVLKSLLRQLSYEEEELAKITNRLSRIAKRRQHGEVVKNLKTVPGVGDIVACAFRTELFRPERFRRAEEVCSFLGLAPAIRQSGEKRQGGWLMRSGQTRLKSLLIEAAWMWRAKDPWARKKYQTHLSRCGITQKAITALARRLAVILWRLSVENRAYVMR

SEQ ID NO: 315428 - protein, 392 aa, unidentified
MLKQGQEESNGGRTVVGIDPCSEFLQLAILTPKKATMFKKLPLSPSITEEIAKSTDPKTTQIAIESYGSYGKLFVYDLLRKGYDIREVNPHISHKLANLYSEEHSDQKDAESLAKALLLIPNLPKISITDKKQWLAKLTRTRRKLVKDLNGYLNRLHIALTESYGAVYKKLFTTLFAKKALQFFEDYPTINDSLSGRNVKKHLGEKKWELLEQAGRWADDFYLETLRTEIRGLIGIIRSIDSTKLSIEEKIREVADQVEEMRILETFPGIGGIAGATLLSEIGDIDRFGKDSYLSAYCGVSPVMWQSGIGRIRTKRRKRYSRRLKGILYFISLSQIRINPESRAYYDRKIKEGKTHWQAMNALSRQLIKIIYYMLKNNEPYRREPLENNLLT

SEQ ID NO: 315429 - protein, 327 aa, unidentified
MMTISMLAVDLSKGSFQVCAVGSDGTVLYNRALSRARFALLLADQPACVVAMEACATSHHWGRVAQASGHEVRLVPAVYVKPFVKRQKNDRADAEAIAEAAARPRMRFVAVKSAETQGRAVAFRTHQCLVRQRTQLINALCGHLAEFGVVAPKGPANLKVLDEALAVEVADLPVAVRAIGTIYLDQIAGLTQVIERLADELETTSRTDADLRRLCTIPGIGPVTAGAVAAFAPDLDTFDSERNFAACLGLGPRQRSTGGKAKLGSVSKMGQTDIRRLLIVGAMSVIRWVVRKGGSANRWLTTLVARKPKMARTIWAVTTKQEDYRMA

SEQ ID NO: 315430 - protein, 345 aa, unidentified
MQKISTVKSKRKKILKGQLTIGLDLGDRSSCYCVLDENGEIIREQKIATTPEGMQQAFGKMARSRIAMETGTHSPWVSRVLTELGHEVIVAHAQKVRLIVKSRRKDDRLDARTLARLARIDLELLSPVQHRSAQAQLHLAEIRARAGLVSARTALVNAARGLVKSHGERLRKCGTQQVSREITSGLSAGLREALEPLLQEVESLNERIKEYDRRMEKMAKETYPETELLKQVKGVGDLIATTYMLTVEDLHRFWKSRDAGCFVGLQPGRRNSGESEPQMHISKEGDEYLQTLRVQKGTLHLGPFGEDSDLRRWGQKLAARGGKNGKKRAGVAVARNPTNRHPTWH

SEQ ID NO: 315431 - protein, 410 aa, unidentified
MDTLIERCGGLDVHKDTVVACVRVPARGGGREQSIQTFGTTTAQLLALRDWLVAQGVTRVGMESTGVYWKPVYYVLEDALECLLLNARHLRNVPGRKTDVADAAWICQLVEHGLVRPSFVPPKSIRELRNLTRYRKAQIEERTREAQRLDKVLQDAGIKLSSVASDVLGVSGRAMLRALIAGTRDPETLAELARGTLRRKIPALRQALHGRFGPHHALLVGTILAKLEFLDEALGHLSAEIEQVIAPFAAEAALLRTIPGVDRRTAEAVVAEIGVDMSRFGAAGRLASWAGWCPGNNESAGRHGSGKTRKGSKWLHTYLTEAAKAAARTKGTYLGAQYARLRGRRGSARATVAVGHSILVAAYHILDRHEPYRELGPDYFRRRHSREHQTRRLVRQIEALGYHIRLEEVA

SEQ ID NO: 315432 - protein, 345 aa, unidentified
MKITTIGIDLAKNVFQVHGVDEHGRTVFNKPLKREQMASFFVNLPACLIGMEACGSAHHWACKLQSMGHTVRLMAPQFVKPYVKTNKNDAADAQAICEAVTRPSMRFVPIKNVEQQGVLALHRARQGFVKARTAQANQIRGLLAEFGFVIAQGRHHITERVPQLIEDACNELPGAFRRLIQRLLEHLQELDRQVQELEVQIVAWHRQSDLSRKLEQIPGIGPITACALAASLGDAKSFKDGRQVAAWLGLVPRQHSSGGKQNLLGISKRGDTYLRTLLIHGARSVIYHAQNKDQDSPQCCWVNGVVQRRNKNVAAVALANKNARIVWALLAHERSYESGYVREQA

SEQ ID NO: 315433 - protein, 343 aa, unidentified
MSIVGAFDVHRRQITFDYLDTDTGQLLRGRIAPACRAVLRRWLVERFAGRADVAFAVEACTGWRFVVEECERAGIEVSLAEPADTAAARGRKRRAKTDPADAAHLRELLAGGRLPTSWIPPQQVREIRAILELYKDLRDEHTAWVQRIHATLFHQGVPGLGTGGVASPAGRARLEAGEGLSAAGRQATTVALRVLDALDTELDALHRQIRAFANRQPGCTALQAQYGVGAITSAAIWAMMGDTRRFTASRQAVRHTGLDVTVYSSDGKRAPGHLAKQGPPLLRWALYEAACLASHTRAPDHDFYTSVKDRIDHKRATISVARKIARRSHHILRELGDQAYAAA

SEQ ID NO: 315434 - protein, 358 aa, unidentified
MQVKGTTNCYTGQNIYIGIDAHLKSWKVTILLENSDFKTFSQDPSAETLVQYLRRNFPERAYYSAYEAGFCGFSVHRDLEKQGIKNIVVNPADIPTTDKERKQKEDKRDSRKIAKSLRNGQLEGIYIPSVIGMEFRSLVRYRKTLVQDLTRNKSRVKSLLHFNGIKIPRELDTASKYWSGKFISWLKEVRFSSSFGDKSLSMLMDSAVFFRQKLLEVNRELRSISNNGPYAVQLQRLCTIPGIGLVTACTLLSEIEDISRFRNLDTLCSYIGLVPSTNSSSDKEILRGITPRANKPIRAVLIEAAWMAIRNDPSLALRFNELRKRMDSNKAIIRIAKNLLSRIRYVLKYETEYAYSKV

SEQ ID NO: 315435 - protein, 387 aa, unidentified
MSQVSDLSRSLAPFDQNTTLTVVVELSEASWLVAGMIPGIERQPVKKQEPDPVALLRLLERWRLEAIKAGKTIGQIALAFEAGRDGFWLARWLQARDIAAHVIHSTSVAVSREHRRAKTDRLDTAMLMRVFVGWLRGERGHCRMVAIPTLEQEDAKRPSRERESLVGERTRIINRMKAALARLGIRGFNPALRKAPQRLAALRTPEGVPIPPNTLDEFRRDMDRLAVVREQIDGIERARLARLENAPAAGPHAMVRLLARVVGVGVETADMLVQEVLSRNLRDRRAVARYVGLTGSPDESGKRRREKGLAKAGNPRARRGLIQLAWRFLRFQSGSALAQWYRARTDGPKGARKTTMIVALARKLLIALWRMVTIGDIPVGVALRPTI

SEQ ID NO: 315436 - protein, 338 aa, unidentified
MPLYGGIDLHANNSVVVLLDDQDQVVYQKRLPNDLPSLLQQLSPYQASLHGVVVESTYNWYWLVDGLMERGYVVHLANTAAIQQYAGLKYTDDHSDARWLAHLLRLGVLPEGYIYPKEGRAVRDLLRKRSQLVQHKTTHLLSIQTLLTRNTGRAMSGNRIKQLTAEDIDGLLPEPELALAVQSNLAVMRCLETQIATIAQTVTQRVKLQAEFKDLLTVSGIGQILALTIMLETGDIRRFPTVGNFASYCRCVGSQKLSNGKRKGTGNTKNGNKYLAWAFVEAAHFAVRYNSCIKRFYQRKQAKTNTVVATKAVAHKLARACFYILRDQVPFDVNKAFQ

SEQ ID NO: 315437 - protein, 341 aa, unidentified
MTLYVGLDVSQKTTAICIVDETGQRVWRGECRTLPEEIAAVIRQHTGEDVRIGIETGPMTPWLVHELRSRSHSVVCLDARHARAALKMQVNKNDRNDAEGLAQIMRTGWYRPVHVKSFEAHRARALLAARLQLIETTTRLSNHIRGVLKTFGMLPGTVRGLRFDRRVELLLEGRSELATIVMPLLAAWRQLREQIAVFDKSILAIVRASPVCRLLMSVPGIGALSVLAYVSTVEDPARFSSSRSVGAHLGLTPRQYQSGEVDRSGRISRCGDHLARTLMYEAAVVILTRIKRDLPLKSWALAIARKSGSGKARVALARKLSVILHAVWRSGEPFRAISSQA

SEQ ID NO: 315438 - protein, 414 aa, unidentified
MTEQIQVAAGLDLHKSFIVATILTTAGEKFLERFNRTQTGLFALKDWILSNKVQVVGCESTSDYWVRIFDLLDPYVQVIVGNARDMKALSHKKTDKIDSEFIALLALKDMIRPSRIFPKEHREFRATVRLRHRIVQKRTSIKNEIHHILDSELFRLSAVLTDIFGKSGVLIMRGILNDIPVNEILALLPPSVKKKEEALREVMQSTLSDGALARLASCLRIIKTLNDEIAELTNISTNYALVNFPREFEILRSVPGVGEIVAITLLAEIGDVRDFSTGDKLASWLGIVPRVYQSADKLHTGSITKRGSKTARWILIQAAHAAVRARDNDLKTFYIGKKEVIDAGKAIVGVARKMITIIWHLLTNDETYEDNQYRVIKLPKKVYVKVPRETSLEEVLRLLRDAAVVLKEPDPEIG

SEQ ID NO: 315439 - protein, 347 aa, unidentified
MTIVETTRPITGGVDTHLDVHVAAAVDANGGVLGVESFATTPAGYGELCAWLETFGTVARVGVEGTGAYGAGLARHLRSRGLVVIEVDRPNRQERRRNGKSDELDAIEAARAALSGRASGIAKSADGDVEAIRALLVARRSGRNVRVKYLNQIRHLSFTAPDELRERLRDVPVDHLAATAAALRPRVNGDSVTYATKLAIATLGRRVLALDDDGKRLDQALDTLVRRRAPSLLDVYGVGTHTAAILLVTAGDNPHRLKNEAAFAHLCGVAPLPASSGKTRARFRLNPGGDRQANHALWRIVFTRMSGDERTRKYVARRLAEGRTTREIMRSLKRYVARELYPHLVGA

SEQ ID NO: 315440 - protein, 343 aa, unidentified
MEKNTMIGVDLAKNIFQLHIASMTGHLLSKKKLSRDRFRTFMQQHEPAVVVIEACGSAHYWAQTLGEMGHEVKLIAPQYVKPFVKRQKNDAADAEAIVVAAQRPEMRFVEPKTKEQRAKAILFRGRERLVHQRTDQINALRAILYEFGHVVPQGIVHVPKIVDIIDRTDSDLPDIVRDECRDLLSQISGNTERISLKTKMIQKLSAETDTARRLRTIPGVGPMTAMAIDAFAPSMEVFKNGRALAAWLGLVPRQFSSGGKERLGRVSKAGQADIRKLLIIGAMARMTRNGRKSIREGSWLSRMMASKPRMLVAIALANKMARMIWAILKSGTDYRDPVLGAAA

SEQ ID NO: 315441 - protein, 459 aa, unidentified
MNKVKTKTAKTKSIIEMPIVNPYSAGIDVGDKELVVALPEGLAEQRVRTFGTMTCDLEQIVDLLKVCEIDSVAMESTGVYWKPLFSMLVRTDLEVYLVNAGHVKNVTGRKTDENDAMWIQKLHSCGLLKSSFLPDDEQEALRTLVRYRKTLVQDSSRFVNRMQKSLELMNIKFHTVIKDITGKTGKAIVEAIIAGERKAANFLPLIGKGIKADLFTIEKSLQGNWREEHLFTLKESYTIYKQYREHIAVCDIEIEKQLQQYEAKRNEGIIEETTAAKKGEDHESVKKQRAKNHPRFDVRGYLQRIYGVDVLSIYGLNSVGGLEILAETGTDLSKWKNEKHFVSWLNLCPNNKISGGKLISSKLLSKKPSPASIAFRHAANGVQKSDHWLGDYFRRMKTKGGNKYAIIATANKIATIFYKMVRYKEEFKPMDLALYQQTYKQAKIAYLERKLMELKKQVA

SEQ ID NO: 315442 - protein, 343 aa, unidentified
MKLSRVGVDLAKNVYQLHGVDRHGKTVWKRRLRRGQWLQALLDKAEPGCEIGMEACTGAHHWARELQSRGYKVRLIAPQFVKPYIKSNKNDANDAEAICEAMSRPTMRFVTVKSVEQQDIQATHRVRTELKEQRVAKANQIRGLVAEYGLVAPQTLLALRRAIPCWLEDADNGLTDHFRSLLHGLWGDLVALDDRMTELDKQIKALADNNEVTRRLQQLRGVGPLVATALVATVGTGEQYRKGRQMAAALGLTPRQCSSGDKQRLLGISKRGDVYLRTMLIHGARAVVSQAKHRDDRLSRWVTSISKRSHANVAAVALANKTARMAWAMLRNDSNYDPDFVNS

SEQ ID NO: 315443 - protein, 405 aa, unidentified
MDVIYPRCAGLDVHKQTVVACVRISGDGAPLQQVRTFETTTSGLLALADWLESFGVRHVAMEAAGVYWKPVWHVLEGHFELILANAAHVKNVPGRKTDVNDAMWLADLLAHGLIRASFVPPQAVQELRTLTRTRKQFVRERASHVQRIEKLLEDANIKITSLLSDITGKSGRAVLQALIDGQTDPERLVSCIGRVKASRGELIEALRGNASAHHRFMLRLHLGHIDALDQAIAAIEQEVGLGLEPFRQAAKLLSTMPGLSAVSANVVVAEIGIDMSRFASPAHLLSWACICPRNDESAGKRRSTRLRRGGKWLKTTLVQAAWSAIKVKGSHLQAQFHRLRARRGAKKAIIAVAASMLTAAWHMLRDGAEWHELGAAYFDRADATKTANRLIRNQQIGCQVTAVPA

SEQ ID NO: 315444 - protein, 425 aa, unidentified
MEQQNDDNRLQEFRQLKHEIRMSGEFLVVGMDIAKERHHAFFGTPTGNTLLRRLVFENTKEGFEDLCFQADTLKIRHALKKVVFGLEPTADYHKPLAEYLIRQGHVVVLVAGAAVKKNRELLDGRWDKNDTKDAANVADLITQGKCLFYDFPSSDLKELRNPLSLKRRLKKQEQGYKVRIRNHLIAQYFPEMDNYFGYGEGPAIVKWCLNPAELSNLPFEEFFRMVSSRNGGEKQRRRLWKIQKKAASSIGCEVTPSVSFEAKILLEELQQLHRMIQETDKKIAVTCNRFPEYTFLLSIPGFGPDISAKVLGAIGNPHRFDNERQVLKMAGLDLSADRSGKKSEVTPVISKKGKADLRYGLYQAAFIASTRNHRFMTYFTNKLKGRERERGILTNRRVKLSAKMLVIAWTLMKKKEMFNPDHIKE

SEQ ID NO: 315445 - protein, 370 aa, unidentified
MGKHSELFVAFDVAKTKHAVAIAEGGRTGEVRFLGDVENAPLPIERTIKRLADRYEKLHVCFEAGPTGYGLYRQVKALGHDCMVVAPALIPKRSGERIKTNRRDAVTLARLHRAGELTGVWAPDEAHEAVRDLVRAREAAADDLRRKRQQLLSFLLRHSRIYSGGGPWTLAHRRWLAGQKFEHAAQQIVFQEGIDAIEDALQRLRRLDKQLALIVPQWSMAPVVEAYQAMRGASFLVAVTFAAEIGDVRRFDTPRQLMSFLGLVPAENSTGDTIRRKGLTLAGNRRARRALVEAAWTYRYPARVSETLRARLEGLPKSVRDIAWKAQVRLCARYRRLSATGKKLPVVVAAIAREMAAFLWAIGREVEPAA

SEQ ID NO: 315446 - protein, 395 aa, unidentified
MDQAGRTLARARLSEGAAGMAKLHALIGEHAGVADGVDELEVRIGIETDHGPWVTALAAAGYVVFAVNPLQAARYRERHVVSGAKSDTGDGHILADMVRTDAHQLRPVADDTEEAQAVKIVARAHKTLIWERNRQADRLRYQLRDFFPGALDAYGGLGLDSADVLELLGKAPDPAAAAKLTTAQVSAALKRAHRRHVAGKTTMIRAALRAPQLAQPAQVTGASAAVVRALAAVIVTLNQQITALQGQVEAYFLAHPDAEIVLSQPGLGRILGARVPGEFGDDPARYASAKARKNYAATSPITRQSGKRKTVMARYVHNDRLRDALGRQAYSALTASPGARAYYDQLRARGIEHDPALRQLANRLVGILHGCLKTRTLYDEATAWPQNDRQYPPVA

SEQ ID NO: 315447 - protein, 408 aa, unidentified
MKQSYFLGLDTAKHKIRVALSDAREQLLFEQDLPASAAGLRELLARLEAESPERKRFVVLIEATGVLHLHWAAALTQAGYAVAVINPLMARRLYTVENSLRDNKTDSIDARGLCRIGAQHGEKLLAHYRFDLSPKQFALQRLQTVRKALRNALTNLKKTYQSVLELSFPELGTLLEVDGVGIRALLGQAPTSAAIARVRLSTLEKNWMLRPKAVALKALAADSIAEPELSEASAPALQAILQALAAMEAQLRNLEQQIETLATQNVDPKTKALVESMPGFGSTTAAKVLAYLPSAILRAGNNRQAASRLQAFMGNDPRLQESGQWKGQTKMSKRGVETLRTAFFQAAFNAAQHDPELKAFYQRKRSQGKTHHVALSHLMRILTRRLVAVLRSGKLYQSYLNPQLQNAA

SEQ ID NO: 315448 - protein, 359 aa, unidentified
MRNAEIHANSLLEVRRMYNAVGIDVSKGKSTVAVLQPGGTVIRKPFDVSHTSQNLNELADYLSSLDGTTKIVMECTGRYHEPMVKALSEAGLFISIVNPHLIKNFGNNSLRKVKSDPADARKIARYTLDNWTELRQYSGMDNTRTQLKTLNSQFSFFMKQKVAAKANLIALLDNTYPGVNKLFDSPTREDGSEKWVDYAYSFWHADCVRKIGLKAFTERYMSFCKKHHYIFQQDRPEKLFNASKELVAVFPKEKTYKLLIQQSIQQLNLASEHVERLRREMNELASTLPEYSTVMGIYGVGKTYGPQLIAEIGDVSRFTHREALTAFAGVDPGVDESGQHKSKSNRASKVGSARHCFRS

SEQ ID NO: 315449 - protein, 344 aa, unidentified
MEKDTLIAVDLATSVFEIAVSHEDGKVAKRRRLPRAAFLTFFATAPRATVIMEACASAHHWARKIQELGHEVVLLAPHQVRPYVHRNKTDRTDAKGLLEAYRNEDFHPVPVKTLAQQAITSMHRLRAGWIAARTAQANSLRGLLRELGWWLPQSIEKALPQFRALIADADSGLPDSLRPLLFSACDEIDALSERIRLAERQLEAVSEETPAVALVRSAPGVGLLTGTALVGVIGSPQRFSSGRRFASFIGITPREYSSGARRHLGRISKRGDAYLRMLLIHGARSVLCHAKQAKTHDHLRAWALGLERRSGHNKATVALANKLARIVWAVWKSGRPYDSRPQAA

SEQ ID NO: 315450 - protein, 309 aa, unidentified
MKQEVVYCGIDVAKEQLDVALGPKRWQVPNTKQGVGQLVKQLKAERSKVHAICEASGGYEKAIVIALQKSALAVSLVQANRVRQFARAAGVLAKTDQIDAAVLVHFGRAMHPPPSAAQSEQIARLRELDAQRRHLSRLLSAEQNRLAQLSCAELRSLSRSLISKVKKQIATIDARIATLIAQDQNLCVKAQKLTSIAGVGPRTAALLLAQMPELGSLNRAQAAALAGLAPFNRDSGSMRGKRAIFGGRRTVRTGLYMAAVTAARCNHILAPFYQRLCAAGKPPKVALTAVMRKLLLALNSALAPALNPA

SEQ ID NO: 315451 - protein, 367 aa, unidentified
MLYLGIDQHAKQLTISLRDEAGDIRLRRQVSTQPERCAEFFTKLNEKATAEGGYIAIVEVCGFNDWLLAILPQYGCAKTVLIQPTKKLKIKTDRRDAHALSELLWTNRDRMRDGLPITGARQVVLPTKHHAESQRITLLRKDAGRMRTKATNRIKHILRRHNLQWQMPTKTFPSVKAIAWLKTLSLPPVQRQEMDWQLEELERWTKRMNDLEVIIINQCQGDAMVDRIRTIPGCAHYSALSLVCRVGDPHRFPKGKSLAHYWGLTPGVNDSGEGTGRRGRITKAGSTMARWVLAQITLHCLRHDPVMKAWYKPIKNRRGSKIARVAVMRKLAVIIRNMMVHEQTYQECRDAMLNRRKRQLAANKPAA

SEQ ID NO: 315452 - protein, 435 aa, unidentified
MTSHCQSYIYKISGGYFLFKILKNNCCGLDVHKTWIYACIGITDSNKRTEYKQARFSSFTKGLNELCDWLAKYNCNDVCMESTGKYWIPVFNILEKNNIWVTLSHPKYTKPQKGNKTDRKDAKWICDLYMCGMVKPSFIPPADIRELRDLVRYRFKLTCMITGEKNRAHNSLTVSNLKLDDVFSDVFGKSSRSITEQILQHPGETFDVAPFVDGRCKTPIEEIQAAVDGAISTEQAVKLKQCLTHIDELEMHKAEIEQEIFRLSDKYESVLNLIRTVPGFDKNPLTAIQVLSEIGGDMSVFPTAKNLVSWAGCCPRNDQSNHKIKSTRISRAGSYFKPVLVQVANALIKSRKHPEFTTRYRRIKARRGHKKAIIAICRMILTAIWHILTDLKPYTPEGFLESRPVNKSKVLTTSQALNLMKQRGYIIKDDVVSVT

SEQ ID NO: 315453 - protein, 343 aa, unidentified
MGFYAGIDLHTRNSVVCVIDQKERKLVTETAPNDLPSILSLLEKVPRRPSVAIEATLNWYWLVDGLQEAGYKVKLAHTMGLYMITGAKVKTDRRDAFSLARLLRLDAIPEAYIYPKDTRPIRDVLRRRTRMVRLRAEAYVAIKRKFQQYGLPYCDKAIKRADEEELLQSFTHPGIRASLKMEIERIRFYSRELKTVEKYILSTVKNKPIFEHLQTIPGVGKILALTIYYEVGDIARFASAKQFCSYARVVPGMAQSGDVIRRGRGSKQGNPHLKWAFNQAAAISVRHYGYVRSFRQKHLARRRSKARRMISLSIVGHKLAIAAYHVLRDDVPFNKELMFGKAS

SEQ ID NO: 315454 - protein, 341 aa, unidentified
MEKYVGLDVSMEETSVCVLDGGGNIVFEGKTSSQPDALSKLLRAKASDAARIVLETGSLASWLWHELRGRNFPVICLDARHARAALSMRVNKTDRNDARGLAELARMGWYREANVKSMEGRYTHSLLAARAKLVDLRRDVENQMRGLLKGFGLPPGKGGIKALLEKIVVIMREAPHLRTLFNPMMLAHSALVTQVEFYDVQILKLAKGDETTRRLMTAPGVGPATALAFRSTIDDPNRFKSSNDVGAYLGLTSRRYQSGELDRTGRISKRGDRLTRLYLFEAASVLLSVVKRWSVLKAWGVRLAKRVGIKKAKTAVARKLAVILHCIWVDGTEFQWGKEKA

SEQ ID NO: 315455 - protein, 356 aa, unidentified
MNKVTANFNDQTIFVGLDVHKRSWNAALFLNDQYVRNIHQPPSPQVLYRYLSTNYPDASYVCAYESGKFGYWIHRQLCNRGIKCLVVNPADIPSTHKDEVSKTDPRDARGIAMALQCGQLRSIYIPTLQQEADRSLVRQRKKIWRDLIRCKNRIKAFLDYNGVPLPEKFNNSNWSRNFIEWLNNLTFDYNSTRTTLTYQVREAEMLRRELLSISNDIRKLMRSNEYKKLYYLLRTINGIGPLTAASLITEIGDMQRFPSFVELNSFIGLMPMEHSSGERELKGGLTVRKHRQLRSDLVECAWVAKRNDPALSLYYSNQLKKGKEPKLVIVKIARKLLSRIRHVWLTEQPYVAGVVK

SEQ ID NO: 315456 - protein, 449 aa, unidentified
MTTNNISLAVLDPLAAFVDVGSEQMHVSIAGGPPEVFGTFTTELHRLRDWLKERGAKSVAMEATGVYWLPLYGVLEAAGLKVSMVNGKQTRNLPGRKTDMKDCQWGATLHAHGLLQAGFVPPAQIRRLQDYLRLRGDHLSCAAACVQHQQKALERMNVKLHDVISSLVGDSGIRVIQAILAGEQNPERLLALCDTRIQKKKAERVKESLRGTWAQEHVFALRQAVENWQHYQRQIAACDQQIEMVLREISGPDEGGATEVKTKALKRGGVNAPQIEDLHHILFKLCGGKDLTVLPAHTDYSLLQLIGEVGTDLGRWPTEQHFTAWLGLAPGSHQSGKRKGSVRRKRNRAGRLFCMMARSLAQSKNIALGGFYRRMAARRGGLIANIALARKLAQLFWRVMVKGLAYAEAGLKAYEEQVLETKRRALSRLAKQLGRIVLPTLAELQTAQA

SEQ ID NO: 315457 - protein, 369 aa, unidentified
MGEYSELFVAFDVAKKKHAVAIAEGGRRGEIRFVGDIENSPATIERMIKKLADRYKRLHVCFEAGPTGYELYRQIRALGHDCMVVAPALIPKRAGDRVKTNRRDAITLARLHRAGELTAVWVPDATDEAIRELVRAREAAADDLRRKRQQLLSFLLRCGRIYSGGGHWTLAHRRWLARQAFEHAAQQIVFQEGIDAIEDAAQRLHRLEQQLTLIVPSWSMAPVVAAYQAMRGASFLVAVTFAAEIGDVRRFDTPRQLMSFLGLVPAESSTGDMVRRKGLTLAGNRRARRALVEAAWTYRHPARVSETLRARIEGLPKPVRDIAWKAQLRLCTRYRRLSAAGKKLPVVVAAIAREMAAFLWAIGREVTPV

SEQ ID NO: 315458 - protein, 307 aa, unidentified
MAIDRAGLSTVRQGIRLMHQWAEEAAEGSPLHFCMEATGVYSLSVAYQLYTYPDTALSVVNPAQINAYAKAQLKRTKTDQVDARVILSFAQSQRLPIWSPESKPLRQLYQLVVQADAIRADLRQWANRRHAQEYTPDVPEAVKKTQQAIVRSLTRQLAKVEEAIAILCRTDHELKEQVELLVTIAGIAHLSAVKVLAYGGNALTQRSRKELTAHAGLASCHHQSGTSVRGKSHLAKQGDLRLRTALYMPTLVGIVHNPVLKQSYQHLLQMGKPKMVALVACMRKLLLIIRSMLINKKSFNPEILPLT

SEQ ID NO: 315459 - protein, 437 aa, unidentified
MEEVTDEPLYRDRVCGIDIGKAQMAATIRVPSDKDPARRAAETRSFGTTRREVLALADWLRCWQVPAVVMEASGDYWKGPFYRLEAEGFECVLADAKQVKNLPGRPKHDPGDSRWLAACLERGAVTSCFVATPEFRIIRLHTRYRRDLTEERTREKQRAEKLLESAAIKLSSVVTDLHGVTGRDIMDHLIAGERSPKVLAQLARARARRKISELEEALEGAEFFTAEHAALLAAMLARIDRVNAEIARLSEVIETLLEPYEEQLQQAESMPGWGRRAAEDALAETGTDMTRFRTGAHLASWAGRTPLDNSSGKRKGKAKSKKGNRYLGGLLGETAIAAGKTQTREGARYRRLSRRRGKAKALVAVGNTQLKVYHALLSSPGTRYEDLGPDYYERRAEVSRQVRHHVGKLGALGFDVTLCRIPEPGPEPGGTGNSQTA

SEQ ID NO: 315460 - protein, 419 aa, unidentified
MSFKIIKNNCCGLDVHKTWIFACIGITDSNNRTEYKQARFSSFTKGLNELCDWLAKYNCNDVCMESTGKYWIPVFNILEQRSLWVTLSHPKYTKPMKGNKTDRKDAKWICDLYMCGMVKPSFIPPADIRELRDLVRYRFKLTCMITGEKNRAQNCLTVSNLKLDDVFSDVFGKSSRSITEQILQHPGETFDVAPFVNSRCKTPIVEIQAAIDGAISKEQAVKLRQCLDHIDELNKHISEVEQEILRLSDKYEVALNLIRTVPGFDKNPLTAIQVLSEIGGDMSVFPTAKHLVSWAGCCPRNDQSNQKIKSTRISRAGSYFKPILVQVANALIKSKKHSEFTNRYKRIKARRGHKKAIIAICRMILTAIWHILSDLKPYTPEGFLESRPVKEEKVLSTSQALNLLKQRGYIIKDEPLAVS

SEQ ID NO: 315461 - protein, 333 aa, unidentified
MGFEPEPSKEGSWTMAQNDLVVAGIDVAKDKVDACIRALSQRQTFPSTAQGRRQLISWLRKHKATKAVMEASGGYEREWAKALREKDVEVRIVDPKRVRSFARSAGRLAKNDTIDAEMIGWFAETFGEAKGQHHDAAREKLRQMVNARQGLLDIKTMLNNKGEQDLPEPVQRMHTRLLKKIIAELAALEVVIAAQVKATPHFAWLAEIIESVPGLAGTTSAGLIAAMPELGLVDGKVAAALLGAAPYDDDSGKRRGERQIKGGRRKVRNLFYMACLGAATRHNPVLKAFYDRLIARGKEKKVALVACMRKLIVILNTMIARGEKWDASRYAVS

SEQ ID NO: 315462 - protein, 337 aa, unidentified
MLYVGLDAHQKRSSLCILNQDGKVVKHEQVNGPWPVVVDRLRKLEQPFRLCYEASCGYGYLYDRIAKLPMASQVTVAHPGQLRLIFKSKRKFDRVDALKIGKLLYLDEVPRVHVPNLDVRGWRKLIEFRQTLLGRRTAVKNQIRAMLRGNAIPAARWQWSKKAIVALRQVELPTDAEKLAMDLAVQELSELTAKIKRVEKELAKIAAGHPGVTLLMTIPGVGIRTAEAFLAYVDDVRRFARGRQVGAYFGLVPRLDSSAGKDRYGHITGDGPPTVRKLLCEAAWIAVRRDPQVKARFERIAGDDPDRRKIAIVAIAHYLARVMAAMLRSGEVWRKPA

SEQ ID NO: 315463 - protein, 402 aa, unidentified
MGKFAGIDIAKREHWMCVTDGEGCLLMEPRAYANDSEGLSRMVGDLDLLGGDVAVGMESTGCYWRSCFRALAEGGYPVAVINPVRTCAERKSGNLGRAKTDRVDCLVVADTLRKQGLAPTAAPDAGAAQLRDLCRFRRTVSESMARAKIQAVALLDQVWPEYGRLFSDKFGGSSRAVLRRLASGDMDSDVLADDLRGASRSRFGAAKAGEVLASFRSTCGVPATASQLMQLRLLLDQVDFAESQLSEIDAEADVLLDAVAPTLPTVPGIGRATAAQIAAEVGDASRFRDAKALVAYAGLDPTRRQSGGFDPDRNRISKRGSAHLRRSLYIAAQASLRADCEFRDFYDRLRSRGYSHRYAVCAVARKMLCVCWALMRSGEEYSRDRHRAKEKAPEGASPVEAV

SEQ ID NO: 315464 - protein, 418 aa, unidentified
MIAAVIERCAGIDVGKKSLAVCVMTGAAKEDAMAEVRNFGTIRAELVRVREWLKSEGCTHVVMESTGVYWKPVLNILEDDPEYRPEVVLANARQVKGITGHKTDPNDARWLAHLLRHGMIRPSFIPPRFQRELRDLTRRRKQMVRAAAEERNRVQKVLEDANVKIGDVLSDVFGLSGQLMLEALVAGKPSALDVAQLARGNARKKIADLTAALEGHQLRDSHRFLITRAMRHMAFLADEIDTLDLEIAKSIGSPELSQPNELLQTIPGIRTQAAAAMLAEGGPNMHQFPGASHFSSWSGVAPGNNESAGKRKRAPTLRGNPHMKTALVESAWSASRTDGSEFQNRYQRLKPRIGHKRAIMAVAHALALRIHEVLESGIPYKKGRSSSSQASVKRLIRHHTRRLQHLHGWLKDFDALQP

SEQ ID NO: 315465 - protein, 342 aa, unidentified
MRAIGIDTHKGSLAACAVDELGGAVAEATFGNDPAGHRALGRWAGQVAPGARLGFEGSSTYGAAAARALEESGFEVREVPPHLSRRERGRTRRAGKSDPGDALAIARVTACEPDLPPIRRVDPTTELGLLLAARDDLLAEATRIRNRLHADLVVLVPGYGGRVANLVWERHLTTAGRALRGRPGVHAELARERLAELRRRHARIRDLAVRIGRLVAEHPLLGLPGVGPLTAAALVAESGDIGRFRSADAFAMLAGVAPIPASSGQVHRMRLNRGGNRQLNRALHVVAQVQARTFAPAREYVARKTAAGHSWREAIRALKRHIARVVFRLLLEGSGGRVLAAA

SEQ ID NO: 315466 - protein, 353 aa, unidentified
MVYAPKDYDIFIGIDVDQKSFSFTVKNHDTMNNSHKIPASPENLYQHIRNRYNNKRVICAYEVGVTGYYLHDYLTSKNIRCLMVPPPSIPKASNDRTKNNRLDSERISQHLKNGDMNPIRVPDYDCRELRQLLRSREEYVNMRKVTKQRIKSLLLFSHLHVLLKDTAQYWSYRHIKYLKELPCTPATRQRLDLLLKDLDYARAQTVIILKELKAFSEQNANLERNMHYLRSIPGIGFITAITILAGIGDIEQLRNPRELAAFTGLVPSEYSTGERISRGRITHLGNSILRSLLIEAAWVNITKDARLRQFYDRIRSKHHPQIGARKAIVAVARKLTLVIYRVLKEQREYIANI

SEQ ID NO: 315467 - protein, 260 aa, unidentified
MKITTIGIDLAKIQFQVHGVDERGNATLKKPLRRGQMVTFFANLPPCLIGMEACGSAHYWANKLQALGHTVKLMAPQFVKPYVKTNKNDAADAEAICEAVSRPNMRFVPIKSPEQQAVLALHRARQGFVKARTAQANQIRGLLAEHGIVIPRGIAYIGRHLPEIREDGENGLPDLFRQLIARLSDHLKELDRQVCELEAQIQAWHRESAASRKLAGIPGIGPLTASALVASIGDAGQFKNGRQLAAWLGLVPRQHSSGGK

SEQ ID NO: 315468 - protein, 379 aa, unidentified
MYKKLNSTGTLIQRTTTEAPQGHMYYIGLDVHKKTISYCVKDASGQVHQEGQIGATRWELDGWMKTLPQPWTVAMEATIFTGWIYDHLLPHAQQVKVAHPLMLRAIAAAKKKNDRIDAGKIADCLRCDFLPECHMASTAIRDRRRTLRYRHLLVRQMVQMKNRISGLLMETGVSHNKRRLHKVGYFRELLSSNAEVNESIRPLLRVSRDTIVRLQKTEYALVSSLQRDPLLAERIKRLRTVPGVGPITALTWALEMGEVSRFPSIREATSYCGLCGDEKSSADKVTRTPLSKQRNKHIQRVLVEAAKLAPRQDHDLALVYEREKQKGNANRATLAVARKMVAYLLAVDRRKSTGRWQAARLRLGPTLRRTSALVTEWSQ

SEQ ID NO: 315469 - protein, 345 aa, unidentified
MEPMYYIGLDVHKRTISYCVKDSGGKVYAEGSIPATRLDLDCWMKTLPQPWSAAMEATMFTGWIYDHLKPHAASLKVAHPLMLRVIAAAKKKNDRIDASKICDCLRCDFLPECYMASTAIRERRRTLRYRNLLVRQMVQMKNKTGMLLMEAGVSYNKQRLHKSGYFRELLATNPDINEGLASLLRLCRETMVRLQKTESALVRSLERDSLLMDRVERLMTIPAVGPITALTWALEVGDVQRFSSIKKAISYCGLCGAEKSSGSTIQRTPLSKQRNKHLQTTLIEAAKMAPRFSPALAMLYDKEKQKGNANRATLAVARKLVAYLMAVDRGQRNFQLVESTNCVAA

SEQ ID NO: 315470 - protein, 452 aa, unidentified
MPARKDELMHFNKLLQMLDGSSYLSVGLDVGADFTWMSIALPNGSFPWKPFKIIHHDPYSRELAVAKIKEAQELYSLKSRCFLESTGIYHIPLLCFLRDKGLDCSVINPIITKNSTNINIRKLHNDKFDSKKAALVGLNASLKTSIIPDEDIADLRNLVRDYYYFKDLQSSVVLKLNAELKVSFPAYLKVFSKVTTQSSLKLLGAYPLARDMLAAPGEELVGIIRSTARFGETYALSRYEAIPEAAKDAAIFGRALPSHAVRIRLYIESYQTYQKHLDTLLLALHEAVDRLHGTPVYDRICLLQSLRGVGFLSAVVLMAEMGDFDLFSSPKKLYAYFGLDPAVKQSGKLNGDKVHMSKRGSSLARRVLHMVALNNLKVDKGTKTPVNPVIYNYYTGKCANKKKNVAVGAVMHKICNIIFAMLRDNKPFEIIPPEVHCKQYVLNHTASVINAA

SEQ ID NO: 315471 - protein, 337 aa, unidentified
MKTLKQSIGIDVAKDALVCCIGNLEQTGGQTFSKTKSFTNDPEGFNQLLNWVGLSKCEDTVFIMEATGVYYENLAYWLDGRNEKVSVLLPNKVKHFAKSLNIKTKTDGVDAQLLSRLGLERSVTYWKMPSKLMREIKFLSREYREAKAKLVVIKNQLHAKEHSYGCPSSVEKRLKKQISLLEAQLLEIEAELRTTAMADSSLYDKIAKLNTIPGISFMTIISILAETNAFVLVENAKQLVSYSGLDIQHNQSGLKDGKTRISKKGNSFIRNALYMPALCASRYNPDMKVFYTRLTERKPAKKIGITAVARKLLILMYILWKNDTEFKPQLLTSNSLK

SEQ ID NO: 315472 - protein, 391 aa, unidentified
MPAARVGWLSNELSTGRLLDLGVARKRREQINPNQECPPRSTVYEKGIVMTMIGIDPHKASHTAVAVDDNEVVLDEVRVRASTVQAQRLREWAAGFEKREWAVESANGLGYLVAQQLVAAGETVFDVPPVLASRVRVLGSGRSQKNDPNDARSVAIAALRSDRLAQVRPDDHVRVLRLLAKRHRDMARLRNKHCTRLHSLLLELEPGGISSEITVNRANRLLERVIVDGEVTRHRVLIAGELVDDIARLDSALKASKKRIGIAVAASGTTLTDIVGIGPVCAAIIIGFTGDVTRFPTKGHFATYNATAPIEASSGDRPRHRLNPRGNRKLNHAIHIAAICQLRYPSEGRTYYDKKITEGKTSKEAVRALKRRISDRVYQHLIADIRRTSTS

SEQ ID NO: 315473 - protein, 427 aa, unidentified
MTRFTTDEFAAFIGLDWADTKHDICLQVAGSEKREFQVLEHRPEVIDAWATDLLQRFQGRLIAIALELNKGPIVEALRKYDGLVLFHINPMMLARYREAFTPSRAKDDPTDAELQLDLLLRHRDKLKPLAPQSPEMRALSQLVEHRRRLVADRVRITNRLTSALKTYFPQVLQWLPNKETQLFCDFLSQWPTLKAAQLARRSTLERFFRQHHVHGEQRINERLEAMKSATALTSDEGIIMPQALLVKALVSQLRVTLEALGNFDQAIAEQAQHHPDFALFEALPGAGAALAPRLLVAFGEQRERYGSAAEVQTYAGIAPVMERSGKKSWVHWRCQCPKFLRQTFVEWAAESIQFSFWARAYYQQQRDKGASHQAAVRGLAFKWIRIVFRCWQTGTPYNESTYLAALQHQGSPLIPNLAQSSKKGENT

SEQ ID NO: 315474 - protein, 342 aa, unidentified
MKKISVIGLDLAKNVFQVHGVDEDGKVVVRKSLKRSEVLRFFARQHRCLIGMEACGGAHYWAGALTRLGHTVRLMAPAFVKPYLKSNKNDRNDAEAICEAVQRPSMRFVAAKTPEQQAVLHLHHGRQLLVHQRVALNNHMRGILLEYGISLPAGARVVSQQLPALLEDAENALPPLTRHLLAELKAEHDQLVSRIEDLETQLKHWHRQCPVSQQLAGIPGVGILTATALAATVGEANNFKNGRQLAAYLGLVPRQASSGGKERLLGISKRGDKYVRTLLIHGARAVIHHLRRRLKAGRPGGHPWLEQVLQRCHVNEAAVALANKMARMAWALLAHNETYRAA

SEQ ID NO: 315475 - protein, 335 aa, unidentified
MEFKHYIGIDVSKKTLDFALCIEGKVVQQYQSENSKKGIAKIIKQLRTEPSFQIKTTLFCMEHTGIYNNHLINYLLSCKAPIWIENALQIKQSQGMTRGKTDQIDAKRIAEYAFLFRSKIQLYVPPRKEIMQLKALLAMRNRIVSSIKELAVPIAENKGFVSQEIKVMEEKLMKATIARLEKTQLDIEKQINKIILEDKSLKNQFNLIQSVKGVGPIIAVNMIIATDEFKRFESASQFACYSGVVPFDHSSGTSIRGKSKVSHLANKSMKTLLHLAAMSAVHAKGELQDYYNRKLQEGKNKMSVINAIRNKIIHRIFAVVKRNSPYLNIYQNSLA

SEQ ID NO: 315476 - protein, 399 aa, unidentified
MPKVYVGIDVAKFKHTCCAVSEKGEVLRESFDFGNDREGFDLLMKTMAALGGPGEVAVAMESTGHYHVLLWRFLASKGYAAEVKNPKVIARFKAATEISGAKTDRRDALLIARHAMTFGSSPSPLPSYALSRMKSLEREKYRLIRDRTSLYNRILAILDLTFPEFMGFLSAKSDAGRGALSSKTVRWLVSTHPSAAAMSAMKAATAERLRSMSRGSFSLVRFHELRELAKSSVGTSFPDEEAELRQLLGECDSIDARIDAIDAETAPLVDGLCPQIASVPGIGKATAAMIFAEVGGFVRFGSPDKLIKYAGLDVNVYQSGTVLKHGKMGKKGPPILRYALFLAAGKCRIHCPEIAEYYSSKVARGKHRVCALVCTARKILRMCWGMMKSGEFYSPRTAE

SEQ ID NO: 315477 - protein, 429 aa, unidentified
MTVCKLLRVRSAASTPGGSNEDGGNRRAQESFDGCCGGYKWPEEKPVRRRFVTLPSELQRFRIWLQEQGVEEAVMESTAQYWRSVWLELEPHMSLHLAQAFSNRAPRGRKHDFKDAERLVRRLMADELILSFVPKGEQRIWRSLTRMKVQLTRDRVRLQNQMECLLEEMRIKLSIVVSNLLGASGLRILHALAQGETDPKRLAELGDERLHCTEEQLVDALTGRVQPMHRGMLALQLQRLQWIDQQMAQLNSMIAQAMKSHQDAVIRLAEVPGLGVDSAQQIIAEVGAQASTFSSAGELTAWVGTCPGKEESAEQNHSSRSAKGNKYLRRVLNQAAHAAVAKKGSYFQVVFRRLMPRLGYKSAIWAIAHRLCRVVWKILHEGVRYIEQGREVGPREKKQRAQMLARALRKLGYEVTITPINQLAPKPAI

SEQ ID NO: 315478 - protein, 395 aa, unidentified
MKHTGYCRCPDGTDIKPFEFFNTGRGFQEFWDRVCQMKKTHELEEVVVGFESTGPYAEPLLHFLQKRDARLVQVNPMHTKKLKELQGNSPAKTDQKDPKVIADIIELGHALTVIIPEGAAAELRRLTQARERSIQRRSILLNQLQDLVFLVFPEFLEVMKDMTIKSAQYLLKNHPRPQDIAEEGIDALTQILKKVSRGRLGKERSEALYHAAGESMGIEVGQESIIFEIKEIISTIEGIDRFTAELENHMSNHLKQVPYSKSILSLKGIGDITAAGLIGEMGDFRKFTTISEVIKHAGLDLFEISSGKHKGKRRISKRGRPLLRKLLFFASINVVRKDGILHKQYQLHLQKGMPKIKALVAISRKLISVIFALVRNHSIYMDNYSKIKYQLKEAA

SEQ ID NO: 315479 - protein, 347 aa, unidentified
MRFYTKQHPFYCGIDLHTRTMYLCVLHQDGAILVHRNMPAGPEPFLKALAPSREDLVVCVACIFTWDWLADLCAREGMSFVLGHALSLKAMHGGKAKNDKIDAQKMAVLLRGGLLPQAYVYPADMRATRDLLRRRIPRMRKRAELLTHVQQTNSQYNLPEIGKKIAYKANRDGVAERFPDPAVQKSIEVDLALIDYYDQLLRELELAIVTTAKQHDANTLYLLQTVPGIGKILSLVLLYEMHDIARFPRVQDFVSYCRLVKCAKESAGKRYGTSGTKIGNAYLKWAFSEAAVLFLRNNPAGQKYLARLEKKHGKGKALTILAHKLARAVYYMLKRGVVFDPDTFLQS

SEQ ID NO: 315480 - protein, 359 aa, unidentified
MGSMLAGVVDFVVGVDTHRDTHTAAVVDARTGGVIDQITVPTDAFGYRRLRSFADQQAPERRVWAIEGTGSYGAGLTTSLLEHGEWVVEIDRPARPARRDGAKSDDLDAVRAAREALSREHLAAPRARGDREALRVLTAARQGAVVARTKAIGQLKALIVNAPQSLRDQLRRGTTDQQLQRCARLRTLPQHSIEHRATIRAIRGTARRALALEAEAAEYETELEQLVVAICPVLLAQPGVGTITAAQFLISWSRAGRIRSEAAFASLAGAAPIPASSGTVTRHRLNRSGDRQLNRALHTVALSRLRIHEPTKAYAARRQAEGKSPREIKRCLKRAIAREVFRLMNTHAAAVTGSLPMTA

SEQ ID NO: 315481 - protein, 312 aa, unidentified
MPTNPPNYVAIDIAKDSLQIQTDHAAWSVPHTDTGHRQLLERWQPLGPVQVLCEASGGYEQPLLRFLHQQGVPVSLVNPARVRAFARSEGQRAKTDPLDATMLLRFAHEKHPLPTPPPAPQQAALAAWLDRRAQLSEQLAREKNRLQKSPVLLHPGIRVLIAFIEDQLAAVDRQLHSVVQADATLRDRAAVLQSVTGIGAVTTWSLLAYLSEIAATDWHRNQLVALAGLAPWNRDSGKWKGKRSISGARAKVRRCLYMAAQSAAQHNPVIREYVQRLIARGKPYKCAIVAAMRKLLIHLQSLLKHHQNALAS

SEQ ID NO: 315482 - protein, 339 aa, unidentified
MDKIEACGIEVSARELVVALEKKGGLRRFANTPAGHRALLHMLTRGGKRVSVCLEATGLYGLDIALALSEQVGLEVMVANPRAVRHFAQAMMQRSKNDQLDALVLREFAARMPFKRWVRPKQNTLALWAIGRRLEALTALCTAEKNRRHATGLSQAIPASVRRDLARSLRFHQQAMKQLRQEALRCITADTQLQRHYQLLQSVSGIGETSAIQLLAELALLPEDRDVRQWVAYAGLDPREHSSGTSVRKYTRISKIGNRHLRHALYMPALVASRREPHLRGFYEHLLERGKKKRQALVAVARKLLHAIYGMFHSDQPYDGARVYHLSPPVVTLPAAQMT

SEQ ID NO: 315483 - protein, 327 aa, unidentified
MQAMRPNVAGVDVHKAILAITILTGDANKEPKVQQFECNTFSEDLMAMAIVLKDHGVTEVAMESTGVYWKPVYNVWSKMGIRCTVGNARTMRNVPGRKTDMNDSHWIAQLHRFGLIKASFIPEDKFQQLRLLSRHRTNLTDDLARIKNRVQRTLEDGNIKLGSVVSDVFGVAGVKVLRKLADGVTRADLLALEVTTNIKRKDEIKKSLSNCFSSNHIFLIKELMQQYDDIKARVLEVDRQLAMDVTPYVHLIEELRKIPGIDMTLAVGIIAEATNDVSNFADERKFAAWAGVAAGNNESAGKKKDQNVERARHTLENYLSKQLMEPN

SEQ ID NO: 315484 - protein, 366 aa, unidentified
MKKTSTVRVNGNMIFKGHKLTIGVDLGDRWSCYCVLDEAGEILLEQKVATTPEAMKQIFEKIPRGLIAMETGTHSPWISRLLRELGHQVLVAHAQKVQLITKSNRKDDRHDARTLARLARIDPELLGPVRHRSAKAQIHLTVIRARAELVKARTALVNTARGLVKSYGQRLPKCGTQQVNRELAAGLNAELREILEPLLKEIESLNERIQEYEVRMEKIAKESYPQVELLKQVKGVGTQIALTYILTLEDPHRFPKSREVGCFLGLRPGRRDSGESQPQMHISKEGDRYLRTMLVQGAHYILGPFGEDSDLRRWGLKLAARGGKSAKKRAVVAVARKLAVLLHRLWVSGEAYEPLRNSHQAMRAVA

SEQ ID NO: 315485 - protein, 461 aa, unidentified
MRKKRAASKRKESVQKKVDWKALEIVHPDAAGIDVGGSEHWVAISPDRDPEPVRRFGCFTADLREMAVWLVEKGVRSVAMQSTGVYWMPVLEVLEQHGLEVYLVNARHTKNVPGRKSDVQECQWLLKLHAFGLLNNSFQPTDEIRVARTLWRQRGNLVADASSTIQRMQKVLIEMNVQLSNVLSDISGVSGMCMIGAILEGERDPEVLMALVQPGVKATPQDILKSLEGNWRKELLFVLRQQVELYRMYQEKIQDCDQQLREHLESFGSVVDLQARPIGPKPKGKKGSKNAPQFDLRTELYRITGIDWAQVNGIDVLTAQTVIAECGADLSAFPSEKQYTSWLGLVPTNEQSGGKILRRRTRKVVNRAAAAFRNAATTLLRSESYLGAQYRRLRTRLGAPKAITAMARKLACLFYRLIKHGQQYVDKGNEYYETKYREQQIRALAQRAQKLGLELVIPKTA

SEQ ID NO: 315486 - protein, 358 aa, unidentified
MRIIGCDFHPGSQQVAIFDPETGEIAERRLRHDNGEAERFYRQLRAPALIGMEAIGNSLWFERLVEQLGHQLWIGDAAKIRASCVRKQKTDRRDAGHILRLLLEDRFPRIWVPSAAERDQRQLLLHRSKLVRMRTRVKTELQHLALNQGMQSKRHLWSARGRADFEKLPLEGWTRQRRADLLATLVLLEQQIEPLDQAVAEAAGRHAQARLLMTQPGVGPNTALAFVLTVGDVGRFPGSRQLSSYLGLIPSESSSGSRRRMGAISKQGNRFLRTLLVEAAQSAVQHDPGMRREYQHRCHAKAKGVAKVAAARKLAVRMYWMLRTGAPYPAILGSELHGGVHIEGSPSHPVAAVRRPVA

SEQ ID NO: 315487 - protein, 370 aa, unidentified
MSIKRILVNTIDTDLEYEVIGIDLAKNCVSAILLTTDGEIFGIDRLDYQELEKSAQELSPTIFAMEPCTEMNYMVQKLEDWGHHCIVISGKNVKDYVESHFSNQKTDLNDAQALAFLTKDTQLRTVKAKDPEQLKYASLTTLREQYVKQYRQTMVSLKGICQVWGLSISKGISGKARLKDMIENHAAFPAELRTALVGMVAHAQAVQKDLKSVTKILEELAKKDKACQLIQTVPGLGTICSCRLRATVGDIQRFKHPKDFPACYGLVPRSMATGHNEKKGKITHRGDKTMRSLMVQGAGIVINQATKGNLHSKQLTKWILKKQKEKMPWGKLVCAVAAKLLRIVRAILISGKPYNPKIAGVAKCSLPKAS

SEQ ID NO: 315488 - protein, 388 aa, unidentified
MIYVGIDIAKLNHFASAISSDGEELIKPFKFTNDADGFQLLSSHLDSLPDDSFIIGLESTAHYGDNLVRYLVNQGLKVCVINPIQTATLPKNNIRKTKTDKVDTHIIAKALMLQQSHRFVTADDINLMDLKALGRFRQKSLKQRTRLKIQLKAYVDETFTELQYFFKSGLHQKAVYALLKEAPSAKEVASMHLTHLAHLLEVASHGHFKKETASQLRVLARKSVGSPDSALSIQVVHAIEQIELLDSQIDHVEAEMTDIMKYLDSVIMSIPGIGYINGGMILGEIGDIHRFPGPKQLLAFAGLDPSVYQSGNFQAKRTRMSKRGSKVLRYALMNAAHNVVKNNSTFKAYYDAKMAEGRTHYNALGHCAGKLVRIIYKMLSDKVEFNLA

SEQ ID NO: 315489 - protein, 345 aa, unidentified
MKLTPVGIDIAKMVFQVHYVDEETGEIVNKPVKRAVFLEHFANRSSCLVGMEACGGAHHWARKLLKMGHQVKLMPGEFVKAFNIRNKNDAADARAIWLAVQQPSKAVAVKTEMQQAMLALHRMREQLVKFRTMQINGLRGLLTEYGEVTAKGRASLDKAIPEILARVAERLPAVLIDTLREQWNGLTNLDEQIAAIERRMREWKKDDRAVKAISEIPGVGLLTATAAVAMMGDAKAFRSGREFAAWAGLVPKQTGSGGKVNLHGISKRGDTYLRTLLIHGARSVLINAKAPGPWVEQMKQRRHPNVVTVALANKIARTIWAVLAHDRPYQKGYVSVKPALAVTTR

SEQ ID NO: 315490 - protein, 434 aa, unidentified
MVHGGNRPMRKNNNSSNGKKPDSAGKNKKAVKLEKGNTATTANRNIAKRDSNMRISSKQRFGVRSLLHKLEAAKKTPKRKAPEENVEYYIGIDLGDKRSCYCILDKNSNIVADGSLATTVAELELYFKAIPKSRIAIEVGTHSPWISPLLEDLGHIVYVANPRKIGGGKKSRRRKNDKLDAEALARQVKSDPRMLFPIQHRGQKARQALVLLRTRYALISTRTSLICTVRGLVKSDGQRLPRCSTVSFHKMERNYVPEALQEALEPLFQQIGLLTEQIKKYDKKVKRMCREAYPETELLRQVNGVGELVSLAFVLTVDNPKRFSKSRDVGAYMGLIPRQYDSGDSRPQMRITKTGDRMMRQLLTQSAQYILGPFGRDSDLRRHGLKIAARGGKNAKKRATVAVARKLAVLLHSLWVTGEVYEPLRNSEPQEEAA

SEQ ID NO: 315491 - protein, 355 aa, unidentified
MNDAKYIGLDVHQATISATVLDSTGKLVMESILETKAATILQFIHGLRGSLHVTFEEGTCAAWLHDLLKPHVTRVLVCNPRRNALLKVGNKSDRIDSRKLAELLRSNLLRSVYHEQTGVRTVKELARSYLTITKDLTRVMTRLKAIYRSWAIPCACQQVYAPRYRAEWLAKISEAGVRRRAELYYQQLDALRPLHQEARRELLAEGRKHKAMNLLRQIPSIGPIRAVLLLALIQTPHRFRTKRQLWSYCGLALETRNSGEYRMVHGQLKRSKKVVAIRGLNKNHNHDLKNIFKGAAIRAAAVAGPFQEFYAALLAKGMKPPMVRLTLARKIAAITLLVWKKGVLYDAEHLKQQAA

SEQ ID NO: 315492 - protein, 338 aa, unidentified
MIVIGLDVHKHSVTAVAVDEAGRPLAEALIPVGSDELPAWAAAFDSERLWAVEDCRQLTRWLERQLLGSGEQLVRVPPKLTVPERRGGRSRGKSDPIDALAIARAALREPDLSRPQPDERVYREIKLLVDHRDDLVDLRRRTQQRLRWHVFALDPTFVVPLRMLSRSSHLERVSRWLARQDQELQVQLARELVSRCRVLNREIAALDQQLEQRTREIAPALLELPGCAAVTAAKLLAEIGPIERFRSDAQLARHAGVAPLEASSGRTQRHRLDRGGNRQLNAALYRIAITQSRYHADACAYLDRKRAEGKSRREAIRCLKRLLVRVVYQTLRASPALT

SEQ ID NO: 315493 - protein, 441 aa, unidentified
MAKPKNKISVVNNSTAGIDIGSRKIFIGIADKPVVSFGTFTDDFISAVTYLKENNISSVAMEATGVYWISLYDILDQSGFDVVLVKADQAKNIPGRKTDVADCQWIQQLHSYGLLRSSFIPPQHIRTLRTFVRQRRTNLQLASDHIRRAHKSLELMNIKLQNVITQINGKSGLAVLQAIINGNHNPEKLALLCEDSILKKKKEAVTKSLKGNFSQENIFLLKQAVDVYLFYMNQVDDCDKQIEQHLSVITKDIPAPEKLNKPKPIRHHKPNIDDLHFKLMKLTGGKDPAQITGLTDSTLLQVISEVGTDLSRFPTEKHFTSWLGLAPNSHQSGLTNKKKKFKRHTSAGQIFRLAAQAIAQSKHLALTSFYHRIKARKGSLGAIKATARKIAVIFYNVMTKGIEFVEQGIKLYEQKIKERQMKYLQKQAKRFGLILTPQLQE

SEQ ID NO: 315494 - protein, 460 aa, unidentified
MSHGSGVSRGDRNRNARLSRLRAAVPTGNAIVGIDLADRKQMLVVTDHDSRVLARRTFRCKAWDLGAALDWAADRATRAGFAGVTVACEPTGHRWMVLAQLAAERSMSFVCVQPAASSWARKSEDLTTDKTDDKDAVLIARLTAQLRCYLPEPVDEANTTWTRLRHLGSRREELIEQHVAAVQTIRDLLECVWPAALETAKHPFRSTTFVAALTVVVGQGRGRDGGELDRTRRLGLARFERAVRAEVSRRGGVRPCLRIVRHLFAALEDTAGVVAHWPAVFERLEWTLADWDDARGKRADIEARMVSVLHELGLTTLVTSIDGLSPVGAAAILAQTGDLTRFTSARAVVKHAGLAPRERKSGTFTGRARVTGAGRPQLRAAAWRAVWGCLQTNRVYAARYRHLTGRETNRLTATQAQTAVAAAILRQLYAVVVHQQVWDPVVATHGTTTWKGESTSTAAA

SEQ ID NO: 315495 - protein, 373 aa, unidentified
MKNSTTKLFVGLDVHKESIAVAYAPDQRGAEIISLGSTGTRHCDIDKLLKKLLSHSRNLVFAYEAGPCGYWLYRLLTQKGHVCLVVAPSLIPKRPGDRVKTDRRDAIMLARTLRAGDLTTVYVPDVDDEAIRDLSRAREDAKRDLRAAKLRLKSFLLRQDIRFEGTANWGQKHLRWLGNVTCETPAQQFVFQEYVHAITERNERVERLETELRSQVDNWRLKPVVTAIQAMRGIQFITAATLIAELGDVTRFTNPKQLMGYLGLTPSEYSSGRKRKLGGITKAGNSHARRVLVEGAWSYRFPAKISRHLQYRLELVPKEIQAISWKAQVRLCKRFHRLTASGKHRNKVVVAIAREMAAFVWSIAMQTPIKDVK

SEQ ID NO: 315496 - protein, 341 aa, unidentified
MTLIAMDVHQNSSTIAALHPATGEIIIRKCLTDRNDIARKLADLPRPWTVAVESSRHSPPVCRWLEALGGDVKLVHPEKLSKIADLYAAKTDAKDAETMLMLLHLDCLPECYLAPEDVVELRDLCRGRNSLREITNKLCNLLRSSFARAGMMVNYTDLTGCGARALVPELIAQMGPLGGLMARMFWQLLELVEGAIAEVERHIGEQAHAHPVAAELCGDDHPGMREVLALALVAEIGEMERFASPAHLHSYAGLVPRTSESGDSRHEGSLPQRCNKHLRRVAVQIAQNAVRCRAPNPAKDTYERLREERGKGPNTAKIAAARKVLTEVFFTWRGIAAASAS

SEQ ID NO: 315497 - protein, 339 aa, unidentified
MAQVTTLGIDIAKNVVFVHGVDAHGHVVVTKRLARPKVLPFVAQLPPCLIGMEASGGAHYWAREFTQLGHTVKLMPPQFVKPYVQSQKNDPNDAAGICEAVERPRMRSVPVKSVPQQDMQALHRIRERQIKARTALLNQIRGLLMEYGIVIPQRASQVRHKVPYILEDAENGLTATAREWLQALAEELQALDQRIAATDQQIERLFVADEACQRLAQLAGIGPLTATALVAAVGDATDFKNGRQFAAWLGLVPRQHSTGGKTTLLGMTKRGNRYLRTLLIHGARAVLRVVDRKTDPRSRWLQGVKARRGKHCASVAQANKTARIAWALLAKGDHDRQAA

SEQ ID NO: 315498 - protein, 464 aa, unidentified
MREDIDWFVGFDWASQTHVVCLLDRNGRVTAERQVAHGGADLAELCDWLVAKSGAPPARIGVAIETPHGPIVEMLLERGFLVFAVNPKQLDRFRDRFTVAGAKDDRRDAHVLADSLRTDRRAFRPLAVDDAIVIELREWSRIADELTQERNRLGNRIRQQLWRYYPQMLQLGDDLTAENFLALWECAPTPAKAAKIDEASLARVLKAHRIRRFEAAEALRVLRQKPLQAAAGASEAAVAHIRVVAERARLINRQLKEAHRQLDALCARLEQPKESEAGQSSEQRDVAILRSLPGVGRINLATLLAEAAEPLRRRDYPVLRVLSGVAPVTRRSGKARFVLRRLACNRPPARRPLSLGARRHAGRSGQQEALRRPAPTRPQPWTRAANPGGSPAGRGLRHAREPDPVRPQPQSRAARRRLTIPGFDRNRHPFVPTCRRAERRAQRKSPRIPRLGIDDSSCPALCRA

SEQ ID NO: 315499 - protein, 413 aa, unidentified
MESIVCERIAGIDVHKKMLAVVVADAANPEAVLSARAWGTCRAELEALGDWLTEQSVKQVVMESTAQYWRPVWMALEGRYQLHLAQAQSNRGPRGRKSDFADAARLVRRLVAGELILSFVPDAEQRQWRMITRMMLQIRQQIVRLRNQMEGLLEQGQIKLSGVVSDLLGVSARQMLAALADGEADPARLAAFGTGKLRASQADLEAALAGRLTPVQQRMLRMQLDEVALLEKHLRQLEGELRQLLQPYQEVIERLSEVPGFQAKAAQEIITIVGPEATTFTSGPQLVSWAGACPGREESAGISKSSHCPKGNRSIRRLINQCAWAAVRTKGSSFQALFRRLVPRLGQAKAIWAVARHLLLVIWKVLHQKVRYLERGPRALNSQALRRRKQFLVGQLKALGFQVTLNDQPKEAR

SEQ ID NO: 315500 - protein, 455 aa, unidentified
MSKRSKKREPRGLPPVPVLESNAAGVDIGATEIYVAVPPDRDSQPVRRFSTFTQDLMAASDWLERCGITTVAMESTGVYWIPLFQMLEARGLKVCLVNARHVKNVPGRKSDVSDCQWLQYLHAVGLLRASFRPEQQVCAVRSLTRYRESLVEMAAVHLQHMQKALDQMNLQLHHVISDLSGTTGMAILDAVLAGERDPKKLARLRDPRIKADEATISRSLVGDYRREHLFTLRQSVTAYRQYQELMAGCDVEIERMLEEFSSAAEGGAGPLPPSAKHRHKPRRNELKFDLRGHLYRIFGVDLTAVPGINAQTAHTLLAEVGCDLSAFPNASAFASWMGLCPDNRVSGGKVLSARTRKVKNRLARALRLGAQSLFRSQSWLGQFYRRMRAKLGAPKAITAAAHKLARILFHLLTTNQPYDESVFAQQQIQNNQRMHRKLQQQAKSYGYQLVEITAP

SEQ ID NO: 315501 - protein, 318 aa, unidentified
MSTQTPSFAGIDVSKDHLDLALCQDQKSWRFDNDPEGIGQMAHLLEEHQPVLIVLEATGGYEQAAFHHLSSSFSVSIVNPRRVRAFARANGRLAKTDRIDAHNLAHFAQVVQPHPQPPSSEAQQQLAGMVARRRQLHRMITAEKNRLRNAHPILHDHLHDHIDWLQQALQELDASIKLHLESDPELKAKSDLLQSAPAVGMVTAASLLADLPELGNLDRKKIAALVGIAPMNRDSGRKSGRRRIMGGRAPLRAALYMAALSASRYNPAIQPFYARLVGNGKEKKVALTACMRKLLTMLNAMVRDNKSWNPAIPLQIQP

SEQ ID NO: 315502 - protein, 326 aa, unidentified
MTQIICGVDISSASLQASIGRSGAAANFTNNPDGIALLLAFCHTHQVQLVAMEATGGYERQAFALLSEHGLPVAVLNPRSVRQFAQSMGRLEKTDPIDAGMIAFFAEVKRARPTSLSGPGQRQLRGLVTRLRQLTELRTAQLNQQRLIADPRLQASFAELLSLLAHQIDGLARDIAALIAADPLWIELDRAFRTIKGVADRTVARIMAEIPEIGTLSNKAVSKLAGLAPLAQDSGRHQGKRTVRGGRASVREILFIVASVVGRYEHDFIAFRQRLLAAGKPPKVIRIAMAHKLLVRLNAKAREVRNTLAAANQTLCPVVVGAVGKP

SEQ ID NO: 315503 - protein, 335 aa, unidentified
MTVSNQAERVIGVDVSMSRLDIADSQGKIHKTISNTAAAIKKAIVQKLDDGDSVFVVCEATGGYEKDLVKTLQDAGIPVAIANPRQVRQFASAMGRLEKSDPIDAEVICQFGQTAELPAAPVKTAEQEARDAVVRRREQVLEMIGQENNRLQQESDPKMKKTIEQVLKTLKNLQKTLDAEISRFLAEEAKTNASVDVLMSVPGVGAVTTATLLSELPELGQLNRSEVAKLAGVAPIVHESGQSRGRRSVSGGRRPVRRVLYMASLVGIRRNPVLMEFHRRLVSRGKPQKVAIVACMRKLLTILNSMVRTKTRWRTKGEEKVVADQGPATTRAHGD

SEQ ID NO: 315504 - protein, 466 aa, unidentified
MQLRLGIDIACRAPHQASLADESGQFVFAGHRFRTHVSQLEELWSMLPTETKAADVTVIMEPTRNAWVALAAWFRRRGARVVLVPPEQSADLRTYYSKHTKTDRLDSRLLARLPLLHPEGLHEEHGLGPGHPMRRATRLRQSLVKRRSKILARLDALLEILGPGWLAALGSDLANKTPLRFLAAGYACPHTVRRLGRARLTRFIYRHSRGSWGQEMATQLLDAAEETLALWADELDFGELAEDIAVEARLALSLTEEIAALDERIAVQFQEADPQAILMSVPGVGAITGAQILGRLGDPARFRSLAGVRSFSGLVPSLDASGLMGLHGGPTKRGDALLREAIFIAADQARRIDPTLAARYHRLMVSCGKHHTSALCHVASALLTRIVACWRRGQPYVLRDVDGRSVSLAEAKRIVAERYSVPTELRRARLTNTAGARGWTGRRSQESQSAPSAGPSVGHATAAARG

SEQ ID NO: 315505 - protein, 310 aa, unidentified
MDASFVGIDVSKDRLDAFVHPLGQAFAVARNGEGLAQLVARLQALAPALIAVEATGGFETIVAATLAGAGLPIVVVNPAQVRHYAQALGRRAKTDPIDAFVIARFAEATRPMPRALPDETTRLLADLVARRRQIVEMMAAEGQRERRTVDKRLKKSIARLRKALEKELAELDAGIDDSIRGSPAWAETENLLASVPGVGPVVARTLIAELPELGTLDRRQIAALAGLAPWTRQSGQWKGKSFIGGGRKTVRSVLFIAAMVAARHNPTLKAFRDRLVTQGKPKLVALIATARKLLTILNAIVRDKQPWKTA

SEQ ID NO: 315506 - protein, 400 aa, unidentified
MDRNRIVAGLDVHKDSVFLCIMGHDEAIIFQKTYGTLTPELRQMCQDMVDRGVTEAAMESTAVYWTPVWDALCNSMELKLVNPYFIKQLPGRKSDVKDAQWIAECLLKNLIKGSFVPNLTVQDMRKLNRRIMDLNEDRTYNCNKLDAAMQRCGFKLSNYVSTIGSKSYQSVLNAIIDGQTDPEELIKLVHGRTINKHGRETIKAALTASFSSTDLIIFKQLKETIDMIDRQIEECQKELTALCEKHFPEQYNRLQTIPGVKERAATAIIAETGADMTAFASAENLVGWCGLKPRNDVSNGRYKSRKVTHGNKYLRQTLIEISWVASRTRNCFFSNFSYIQTTVKKKSKMKIQVAIARKVLVAVWHMLSKQQDFIDIYLKRLEERKQFEQQIRQFESTMAN

SEQ ID NO: 315507 - protein, 343 aa, unidentified
MYYVGLDVHKKTISYCVKDAAGCVLQEGKIGSSRRELDGLVKAMPQPRTIAMEATIFTGWIYDHLLPHAEAVKVAHPLMLRAISAAKRKNDRIDASKIADCLRCDFLPECHIAATEIRDRRRMLRYRNLVQRQTVQMKNRISGLLMETGVSYDKLRLHRKRYFNRLLSTGEEIQDSIRPLLQLCREQIDRSMRLDAALLRSLERDPLLAERLQRLRTIPGVGPITALTWALEVGDASRFHSIKQAISYCGLCGAEKSSADKVQRTPISKQRNKHIQRALVEAARLAPRFSMELAVLYERERERGNANRATLAVARKLVAYLLAVDRRKSDFIAGTELKRTAAA

SEQ ID NO: 315508 - protein, 354 aa, unidentified
MALTETDIVGGVDTHKDSHTAAALSKTGQLLGTAQFPATPDGYHDLLAWLRGFGRLVRVGVEGTGSYGAGLHDVLRRAGVEVREVVRPKRQVRRRRGKSDPVDAEAAARAVIAGDDLGTPKRQDGSVEAIRVLRLTRRSALKARTQAANQLHAVIQTAPSPLREQLRAVRLPELVKRVGRFRCAAPVTPMAAARFALRGLAARWTALDSELRGLDEQLAQLVQTVAAPLLAVHGVGIDTAGALLVAAGDNPERLASEASFAALCGVSPVDASSGRQHRHRLNRGGNRDANRALWVIAIVRMASDPTTQRYVQRRTHEGLSKKEILRCLKRYIARQLYRLLLGPIAAPTGASLAA

SEQ ID NO: 315509 - protein, 364 aa, unidentified
MDNSTHIGLDVHKDTIAVAILRPGTAECDELTIDNSPQAIRRLISRHPEPQALRVCYEAGPTGYDTHRLITSMDVACEVIAPALVPRRAGVRVKTDRLDARNLARLHRAGELTAIRVPSSAEEAIRDLVRAREDLKADRRLAQQRIRSFLLRHGRQHPKGMGSWTRPFEQWLSVQQFGEVAADAAFRHLLSAYSVRSSQLKMIDAEIAEIALREPLADPVARLGCLRGIATLSAVTMAAEVCDFRRFGSAESFMSFTGLVPSEHSSGASVRHGSITKTGNCHIRRVLVEAAWAYRYRPAVGKLLAARLEGQPPEVAAYSWAAQCRLHNTYRRLAARKGPHKAVVAVARELSGFAWGLMVDRIAV

SEQ ID NO: 315510 - protein, 363 aa, unidentified
MSNISTTTDRNKLTVGLDVGDRYTQICVLDENGEVMEEGRVATSPRAFQQRFAALPPARLILEAGSHSLWAHRLLGQLGHEVIVANPRMLRFIYGNDSKNDRADAGYLARVGRLDPDLLRPITHRSEESHAHLVLLRSREILVRSRTRLISHARGLVKPFGVKLPHCGAQVFATKVREHVPDILLPALGPVIDIISILTEQIGDLNDKIETLARESYKETALLAQVPGVGTLTSLAYVLTIEDPGRFSRARAVGSYLGLRPRQDESGTLKPQLRITKAGDSFLRHLLVECAHHILSANSQDTDLKRWGLKLAERGGKAAKKRAAVAVARKLSILLLRLWTTGEIYEPLRSTTRRGEPDPVSSS

SEQ ID NO: 315511 - protein, 354 aa, unidentified
MEHYTIGCDAHKRYSQISVMDSCARISKRVRIEHEPGALREYLAQYPAGTPVAVECVGNWYWIVDEIEAAGCQAQLTNAWKAKVMMGHVNKTDKLDADGLALLLYNGTLPRVWIPPGEVRDERELPRTRMALSKQRTAVKNRIHATLGKYGIRLEEATDIFSGKGLAALRKGMQGLPGKTHQCVQEELALLDEIQQHIDLLEERIRQQLKITPSMQLLKTLPGVGEILAMVIDREIGCVERFAKAENLASYAGTTPKVKSSGGKTYYGPMRKESNQYLKWAFVEAANVIVRCRHFPSWHTQHVVRLYERTAQHKGHAIAVGAVARHLAEAAYWVLTKHETYHEPLSKKNPPKQG

SEQ ID NO: 315512 - protein, 340 aa, unidentified
MNISVIGLDLAKSIFHLVGLDRHGKQGLKKKLRRTQMLPYFANLKPCTVAMEACASSHYWARELRKLGHQVKLLPAQHVKPYVRGNKNDYNDALGIAEASRVPQMREVAVKSIEQQSIQALHRLRRSAVGDRTALCNQVRGLLAEFGITLNQGVATLRKAIPCLLEDAENGLHALFRDALSLKYEPLCQLDEWVKNLSDTIQKEANVHPEMKLLQSIPGYGPILSSTFYSVIGDGKGFRKGRDASASIGVVPRQHSTGGKNVLLGISKKGDKYLRSLMVHGARSLIKHAHKKEDALSVWVTALIERRGKNKATVALANKLTRIGWAVVRTGKPYKENYAV

SEQ ID NO: 315513 - protein, 346 aa, unidentified
MTYIGIDLHREFFVAHVENRDGEKLLSQKYPNSLESVGELTGRFPNSKVVVEATRNWMWFVRAVRAGGCNITMAHPFRTKAIAAAKIKTDAIDAATLCQLLRANLIPESYIASDSEVDDRELSRGRVNMVHDRTLLKNRIKAILGKENLTFPGSDLFGKKGRIWLNGQCLSQGKELMVENYLNLMDGVEERLKKVDGAIKQKGGNNPRANLLTTIPGIGVTTAFLLASEIGSIDRFANSKKFASYFGLTPRLSQSGNHAYYGRITKVGNPYVRWALVQTAQRWVRMHKNSRVWFDRLSYRAGKKKAIVSLARKLAVVVYSVLKYKRPFSLNFVVQKVSPAILPESS

SEQ ID NO: 315514 - protein, 375 aa, unidentified
MKEKLRFLGLDVHAETIAVAVAEPDGEVRSLGTIPNRAESIRKLIKKLGPAGKLRACYEAGPTGYVVYWQLAELGVECEVVAPTLVPVKAGDRVKTDRRDAEKLASCYRSGDLTAVWVPDEGSEALRDLVRAREAAKQDQTRARHRLSKFLLRSGQRAPTGVRPWTRPYLIWVAQLRFTQIAQESTRQDYLHEVEHMRERVARLEQAIMEAVKLASPALQQVINDLQALRGIADISAVTIASELGQVSRFGSARQLMGYCGVVPSEDSSGKRTRRGSITKTGNAHLRRIVVEAAWSYRRPPGIWYGLRRRQESISEEAKEIAWKAQHRLHKRYLKLGAAGKDQRKIVTAVARELLGFIWAIGTRAETISRQQVAA

SEQ ID NO: 315515 - protein, 308 aa, unidentified
MSYKIAGIDVHKKGLMVVVIDATTPEEKPERRRFATMPSDLRRLLIWLREQGVEEAVMESTAQYWRSVWLELEPHMRLHLAQAFSNRAPRGRKHDFKDAERLVRRRMANELILSFVPGGEQRTWRNLTRMKLQLTRDRVRLQNQMECLLEEMRIKLSIVVSNLLGASGMRILQALAKGETDPKQLAQLGDERLQCTEEQLVDALTGRAQPLHREMLALQLERLQLIDTQMAKLNGMIAQAMKPHQEAVMRLAEVPGLGVDSAQQIIAEVGQQASTFPSAAELTSWVGTCPGKDESAETEPQQSLRQRQ

SEQ ID NO: 315516 - protein, 438 aa, unidentified
MSNNVIFNLDELFISVGIDVGADFSWMSIALPNQQFVGKPYKILHNNINSLTTAVSKIKEAEELYSLESRIFLESTGIYHYPLFCYLRDKGFNCSVINPIITKNSTNMNIRKVHNDRFDSKKAALVGLKPDLKVSLMPSDLALNCRNLCREYYDLMDNRCAYVNKLQGELRMAFPQYLGIFSKVTINTSLTLLETYTSPSAFLEADKQEIIDIIKSTARFGLTYAQNKYTAIIQAANEANEFGYIIDSNIKRIRLYIGFIRKYDEEIDRILDAMHELIDSNEDTDFVKQIHLIETFKGAGFLSAISLMGEIGDFSAFSKPKQLFAYFGLDPAVKQSGKFEGTKIQMSKRGSAIARRVIHTLTLQSISTSRTGEAKNPVLHDYYLKKCEAKPKLVAMGAVSHKVCNMIFAILRDNKPFEIISPEEHIKQYNAAKCDIAA

SEQ ID NO: 315517 - protein, 368 aa, unidentified
MFICNRIEHDELGCRIQYTIIQKISRHALTGCKWKRLLELIEEVRARVSRETGRAVEVVSCYEAGYDGFWLHRKLEAHGIRNYVIDPASLQVDRRARRVKTDRSDTDRLLRSLMAYLRGEPKVWSVVRVPSVAEEDARRLHRERDRLVSERVQHVNRIKGLCALQGIYDYNPLRPQAMARLEQLRTAQGGAFPPRLKSEIMRGLQRLEMVVEMIATLEAERNAIVENEASTHLNAKKIQTLHKLKAIGPEFAAVLVGEIFHRDFNNRRQVASYVGLAPSPFQSGNVAHDQGISKAGNRKGRTTGIELAWMWLRYQPESDLSVWYRARVGATKGRIRRIAIVALARKLLVALWRYLETGLVPRGAVLKG

SEQ ID NO: 315518 - protein, 408 aa, unidentified
MLNAVGIDVSKGRSTVAVLQPGGVVIHKPFDVPHKSSDLRDLARYLESLDGETRVVMESTGRYHEPIRNALSKAGLFVSTVNPHLIRNYGNNTLRKVKTDSADAKKIARYTLDNWVSLREYSVMDTTRTELKTLNSQFAFFMKQKTAAKTNLIALLDMTYPGVNKLFTSPVRPDGSEKWVDYANSFWHVDCVLDSGQKVFAERYQSFCKRHGYDYQSDRPEKLYAQAKELVPTVPKDPVYKEMIQDSIAQLNLVSKHVEELLRKMDELASSLPEYPTVRSMYGVGPSLGPQIIAEIGDISRFNRREALTAYAGVDPGKNDSGEVVHKSGHASKCGSARLRKALFQVMEAMLQLGPRDDDPVSQFLFKKKAEGKPYLVYMTAGANKFLRVYYGKVKECIRNLPSSDSED

SEQ ID NO: 315519 - protein, 392 aa, unidentified
MRAAADRADAPTAIQTDLRAIFVSLELSRSTWLITSLSPSGGEKMSKHSVPAGDIAGLLRRFAQLKEKARARTGRDFPIIVIQETGLDGFWIHRMLQSEGIESHVVDAASILTSRRGRRAKTDRIDGETLVRTLMAFKRGEPRVCSMARAPTPQEEDRRRVCRERRTLVGERVTHVNRIKGLLFAQGVFGYQPLRKGRREQLEELRTGDGRPLPVHLMAQIVRELDRLEVVLEQLKTVEAERNALLKPATGAAASPPAMLLELKGIGPETAAVLWSEGLFRQFDNRRQVAAYAGLAPTPWQSGSIDHEQGVSKAGNPRLRTTMVELAWLWLQNQPASALSLWFHERVRRLGGRMRKTTVVALARKLLIALWRYTTAGVVIEGAVMKSAPATI

SEQ ID NO: 315520 - protein, 424 aa, unidentified
MKVTYQTCCGVDVHKSFLVATIVKTTGGIEPSYQKKRFSTFNSSILEFKQWLLDNDCHDVCMESTGKYWVPVFNLLEDEINVVIANPKWVKAVKGNKDDTKDSKWIGDLFRLGLVKGSYIPCKIVRILREYTRYRYKLVSCRSSEKNRYQNTLTVCNVALDSVVSDIFGKSSMSIIDYLLEQSGTSINHEEIASKLLRSLKSKEDAVIESVEGYQMTDAPKYRVRLVRAHMDYITAEINDVDKMIENMIFSNPDFENAVQFLCTIPSVKRDSAITIISEIGTDMSQFGGSKRLCCWAGLTPGSNESAGKKKSVRITRAGVYLKPALVQCAHAAVKSDKSPYYKKKYESLVKRRGKKRAIIAIARMILTAIYQMLSTGEQWNPSDLYKIDMPVALVEKQKAKAIKQAKKLLQREGILPPDEPLAS

SEQ ID NO: 315521 - protein, 407 aa, unidentified
MAHEMSERDRIGSKHDVYLGFDVGKSFHWACALKEGEAVVDRPVTNRRDDVRDAIGEAMRHAGDPGVLVTVDQRNNIGSLVVREARSMGCDVAYLPGHAESEARKMYPRLAKNDRFDAWVIAHTSQASPQALLPVPDSRATRLLGSQRRHCVKLATQARNRLHAVLLEGDPELEAACDLSLPWLVGLLSELGGANGVAGCTRRRYNSLCRRLGAPQDDADELRKLAERSVEQGFHPAGEDDCVRWLAADVLRADAEAARLKSEASRMLADDECYRCLLTIPGIGPVCAEALVSLVDVSLFKSHDQLASLCGLAPADSSSGTSIDHATAPRSGNKELKNLLIFTVNSLVGTDNYFGRYYQRVFEGSRGDAKVRRKRALKAVARKRLKVIFAVMRDLVPYDASRWEPAA

SEQ ID NO: 315522 - protein, 376 aa, unidentified
MNRIIYVGMDVHKDTYSLCSFDSKQNYVFSELTVKAETSSVLSYLKNVEKHFVNDDVLFVCGYEAGPTGFSLCRDLQKKDISCVVMAPSSLATSPDAKKRKTDKIDARQLALHLAHNSYKAVHVITPEMEAIKELTRTRASALKAQKRAKQNLLSFLLRKGMVYPFGGRARYWTQQFFSWLKTLEFSNPVERYSFEEYLSEVNHQISRIKRLDDKIAALAEDPLIKDDVKKLCCFSGISTLTAVSFISEIGDFNRFQKAVYFSNYLGLCPGIHKSGLSSQSLGITKTGNKNLRRLLIESAQSMSHSQICGKKSLRLLARQKNMDPLIVAYADKAVERIKRKRSSMIFRGVHINKATTAAAREMACFIWGMMTNNIS

SEQ ID NO: 315523 - protein, 343 aa, unidentified
MQIAVLGIDLGKNTCSVVGLDTAGRVIVRRRLRRESVIKFAAGLAPCTVAMEACCGAHHLGRILRSQGHEVRLMSPEYVRPYVKAQKNDDRDAEAIAEAATRPTMRFVELKSEEQLDMQTLHRARDRLVGERTALINQLRAVLLERGIVVPHGRRKLEQHLAAMLDEGEGLPLSPRVRALVADMRAEWRELDRRIGAFDDEFAARARSDEAARRLATIPGIGVLNATALLAAIGTGEAFRRGRDLAAWLGLVPRQASTGGRAKLLGISKRGNKYLRKLLIHGARSVLRPLSRSATPLGAWLRGLLARAHVNTAVVALANKLARIAWAVLSRTRTFNAGAVMVA

SEQ ID NO: 315524 - protein, 400 aa, unidentified
MTATRKQHSTRQTKGRVLYLAFELGWNEWKLAFATGPTDNPRLRSIGGRNTEAVLQEIAKAKIRFGLEANAVVHSCYEAGRDGFWLHRFLESQGIVNQVVDSSSIEVKRRGRRRKTDRLDAGKLLSMLIRWHQGEKDVWSIVQAPSVADEDRRQLHRDLLELKAERTQHTNRIKGLLAGCGLALPPIDGRFPEVLAQLRCWDGQAVPPELQQRLRREHERWQLVDRQIKDLENERARRIRNSEDKVVGKVRQLLRLRGIGANSAWLYVMEFFGWRRIRNRKQLAALAGLTPTPYDSGDSQREQGISKAGNRRLRTMAVEIAWCWLHYQPGSTLSQWYQERFAKGSSRQRRIGIVALARKLLVALWRFLEIGEVPAGAETVTWKKGLLVGPQEIALSLALT

SEQ ID NO: 315525 - protein, 357 aa, unidentified
MEYGAIDLHKKESQIRIVTESGEIIDQRILTTRDRFTHVFWGRPRMRILIEASTESEWVAQHLEELGHEVVIADPNYSAMYGHRSRRIKTDRRDVAALTEACHQGTYRLTHRRSARQHEVQCRLNVRKEITQARTRAISVARAITRSAGLRIPSGKAETFATRLFGLELSPAMKATLSPLRNIIDVCDDELAAADEKFEAMVAGDPMVKRLTTLPGIGPITATAFVAALDTVSRFERVGQVTSYLGLVPHEYSSGEKQRRGRIVRSAHPHLQSLLVQAAWRLSRSKDPRTESFRTWAQAVARRRGKKVAMVALARRLARTLFAMWRDEADYQPRRIGTRSAQPVADATAKTGAGAPM

SEQ ID NO: 315526 - protein, 340 aa, unidentified
MKFTPFGVDIAKHLMQIHFVDEYTGEVIDRQLRRQDFLTFFSNRESCLIGMEACGGAHYWARELRKLGHEVRLLQARFVRAFRMGNKNDVQDARAIWQAVQQPGKSVAVKNEEQQAILSLHRMRYQLVKFRTAQINALHGLLLEFGETVHKGRASLDKAMPEVLERLREKLAPFLLSLLEEQYHRLNEIDEQIEQVEKQLIAWAKQNADCQRIMKIPGVGVLIATAAIATMGDPRAFRSGREFSAYLGLVPKQTGTGGRIKLLGISKRGDTYLRTLFIHGARVATLTTKTPLPWVTELKKRRPACVAIVGMANKLARTVWALVAHQRDYQKDYVSVRPLN

SEQ ID NO: 315527 - protein, 443 aa, unidentified
MDESEVEETVEAEEVLARVAAIDIAKASGMVCLRVPAKVAGRRTQQVWNVQATSNEILALADRLVAAGVQRVVMEATGVYWKPFFYLLESRGLQCWLVNARDVKNVPGRPKTDKLDAVWLCKLNERGMLRASFVPPKPVRQLRDLTRARTVLTEDRTRIRQRVGALLEDAQIKISSFITDLFGVTGRRIMDALVAGQHDPHRLADLADARIRAPRRDLVEALTGRFEEHHAFLLRAWLETETHLTAEIDALTARISTVLKDTEDPRGPDGSGGAHLEQLVERLDEIPGIGERTAQILLAEIGWDMSVFPTPDHLASWAKLTPRTLQSGGKHRAGPTGKGNPWLKGALGEAAMSAARTKDSFFAARYKRLVKRRGHNKALVAVARSLLIVVWHLINDPDARYADLGGDWHERHLDPERKTLRLLRELRALGHDVTLTPLPQTAA

SEQ ID NO: 315528 - protein, 458 aa, unidentified
MRTIGIELAVASAHKAIVADDQGHYITPLLTVSARAGDLDNLLARARRGAASPELQAVMEPTGMAWFPVAGYLVCQQVPVYLVSGQQVKDFRRFLKKHAKSDRVDARILAKLPQVNPEGIHRLRLPDAATLACQRACREMDRLTSQITAISNRLGAIDGFAWPGLHDLVFPDHLSPPARWFREHWYNPHTVLAAGAETIRQQWLHITTDTEETGDWAAPLFELAHQVVLLYGNDATAVDFAGLQVEVSRQQAELAFLEAEHRTVHLKAVHPLYRQIHPSRHLETIKGVGEDSAAVYASLIGDAHRFASTELFRGWTGMVPDSKQSGGSESKGLHITKAGPDLIKKYAYLDADVARQWDPQIAAIYYDQMVRKGKHHVQAVCTCATHLLDRVFAVLRDGRPYQCRDVDGSVVDWREARQIVTERYTVPQDVRRRTTKGTRRATADRRAERTQERESSPH

SEQ ID NO: 315529 - protein, 460 aa, unidentified
MNRKKSADKQKESVQKKDWKALEIVHPDAAGIDVGGSEHWVAVSPDRDPEPVRRFGCFTADLHEMGQWLVQKGVRSVAMQSTGVYWMPVFEVLEQHGLEVYLVNAQHTKNVPGRKSDVQECQWLLKLHAFGLLNNSFQPTDEIRVARTLWRQRGNLVAEASSVLQRMQKALTEMNMQLSNVLSDLSGVSGMKIIGAILEGERNPWKLASLVQPGVKATPEDIAKSLEGNWREELLFVLRQQVELYRIYQEKINDCDLQLRKHLESLGSKRDLKTQPIGPKPKGKKGRRNAPQFDLRTELYRITGIDWTQINGIDVLTAQTVMAEAGADLSAFPSEKQFASWLGLCPTNEQSGGKILNRRTRKVVNRATVALRNAASTLLRSQSYLGAQYRRLRTRLGAPKAITAMARKLACLFYRLIKHGQPYVDKGTEYYEARYREQQIRSLANRAQKLGLQLVIPTTA

SEQ ID NO: 315530 - protein, 368 aa, unidentified
MGQKSSKLYVGMDVHKESIDIAVAEEGGEVRHHGQIAGDMNALWRAVRKLESSGRELVFVYEAGPCGFGIYRGLTGRGHTCWVVAPSNTPRRVRDRIKTDRRDSLKLAGLARAGELTPIYVPDVRDEAMRDLVRTREDAVMMQRQARQRLAALLLRNDVRYAGKTAWTAAHRRWIADLRLPQSAQRLAFEEYVQAVEEASARVQRLSQCIEQELAHWHWLPVVGALQACRGIQLIHAVRLVAELGDLSRFSHPRQLMGYLGLIPGEDSSGEHRHQGAITKAGNSSARRALVEAAWAYQYSAKVSALIARRQAEVPKAALDIAWKAQVRLCARFRRLAARGVNRNKIVVAIARELAGFVWAIAQQVKPI

SEQ ID NO: 315531 - protein, 326 aa, unidentified
MNPQGGVASEVARLNVGIDVSKQFLDACWGTREERFGNDAPGWDGLITKLRQADVDLVVIEATGGYERGLLCALQGAGIDVARVNPRQTRDFAKSMGVLAKTDRVDARVLRDFADVVARHKERHKYITLASTPEREQLAAMMVRRRQLVDMQVAEHNRLDLANARAARSIRSVLKTLEKQLADMDRDVDDHLNRHFKQQSKLLDSVKGVGPVTILTLTSCLPELGRLDRRAIAKLVGVAPLADDSGHRKGPRRTWGGRAEVRAVVYMATLTATSHNPVIKAFYQRLLAAGKLKKVALVACMRKMLTILNAMLRDQSAWNPLRHVQS

SEQ ID NO: 315532 - protein, 343 aa, unidentified
MQVVTTIGLDIAKSVFQVHGVDAAGQVLIRRQLKRRAVLAFFQKLPVCLVGIEACASSHYWSRELQALGHSVRLMPPAYVKPYVKRQKNDMADAEAICEAVARANMRFVPTKTPEQQSCLMLHRTRHLFIRQQTAVINSIRAHLAEFGIVAPVGRKGVTELLHIVADPSDKRVPEVARVCLAALGNQLLSLKEQIVEFDRMIMVWHRSNETSKRLHYIPGVGPMLATALVASVADPRTFRSGRNFSAWIGLVPKQHSSGGKDRLGSISKQGDRYLRSLFVAGALAVIRYAKIHGTKHRPWLTALLARRPTKVAAIALANKLARMAWAMMAKGDRYRQPVALAA

SEQ ID NO: 315533 - protein, 356 aa, unidentified
MIVIGADTHKSSHTLVAVDSVTGRRVGVCTVASTTAGALDALSWARRVCGGADRVWAVEDCRHVSGRLERLLISAGEAVVRVAPRLMAGARSSGRERGKSDPIDATAVARAAIREGVEQLPVARLEGAELDVRLLLDHHDDLVKARSQSQQRLRWHLHDLYDDLSIPAGALDRTVWLDRVLGRLRRSPQTTRVRIARDLVCEIRGLTRRIRELEQEIRLLVCELCPQLVAMPGCGPLTAAKLLAEVAGADRFKSDAKLARAAGVAPVPASSGRQDRHRLDRGGNRQLNLALHRLAVNAARHDPTTAAYLARKQAQGMSRMEALRCLKRHLVRRVHKLLTQPAHDQARAPETALALT

SEQ ID NO: 315534 - protein, 345 aa, unidentified
MKQYAGIDVSLEYSSVCVVDADGRIVREAKILSEPDALIAWFGAHGVAMERIGLEARPLSQWLYAGMVKAGLFVELIETRHVRAAFKTMPVKTDKKDARGIAQLMRLGWFRPVHCKSLAAQEVRALLTARKLVQGKLHDIEMSIRGILRGFGLKVGPTTRCTYAGRIRALIAGHSTLEAIATALLKVRDALVQEFAGFERKLRAIARQDDNALRLMTTPGVGVLVALTFVAAVDAPERFRSSRAVGPHFGLTPKKYQSGETDHSGRISKVGDGSVRTALYEAAHVILTRPVKGSDLKGWALAVARRAGPKKARVALARKLAVVLHCMLRDRTSFIAHKGAPTPAA

SEQ ID NO: 315535 - protein, 365 aa, unidentified
MLLGSELVFPTPYMETTKMASSLNQHWCVGVDLHKDTLTACVFCGCCGEVSFQKIPCKCRRQIAAYFTALPRPQTVAIESVGFYRWLWEMLEPIVEQLVLADATQARALAGAVLKTDREDALNIAQLLASGRLPTCYAPPLEVQWLRDLTRQRNSFSRQHARILHRVKSIMNANNRPGPARMRSDGLVRYLKAQGPKLPARHVDMLWQCVDALTLTERQMAHMERAIGEVVGRDSFQEVNGILTSFPGVALVTAATVIAEIGDFKRFTDGKAIGRYAGLNPRVFASGGKQRIGHIAKTGSPDLRWILQQAAWTAIRTDDAVRRVFLRIAKRSGRKAAAVAVARKLLTWMHSAVTKGEPYRTRVAA

SEQ ID NO: 315536 - protein, 367 aa, unidentified
MFTDTVVGLDVHAQSITAAILSPSDDRPEVITLPADLMKVRRLFRRLAQTGPVRSCYEASGAGFVLQRVLADDGFHCDVIAPSLIPRRPGDRRKTDRLDAVMLARLYRSGHLIPVHVPREEHEALRRLLRLRTTYHRYATATMHRISGILRNHGHIYTQGKSAWTKKHRAWLDALRLSLEGPLQTALAIELEHLEYLETQYRAMDTELERWAQSPQFRPGVEALCTLRGVKTLTALTVLCEIDDIRRFASPRRLMAYFGLVPSEHSSGDKERRGSITKAGNIHVRRLLVEAAWNNHHRTSAGLILNRRRQGQPPDIVAIALKAQHRLHKKFWRLDQRKHRHVAITAVARELCGFIWAILTALPQPTD

SEQ ID NO: 315537 - protein, 342 aa, unidentified
MKHYCGIDLGKKSSHFHIVDGERQTVTAGKFANNVDAIRKVFAGRERLKIVVEASGKAFWMADRLTDLGHEVVVVDPGRTKAIGAARIKHDKLDARVLAELCQAGLLAAVDVPSQEQRLARLPFTSRDTLVRARAQTMNSVQSILDGEGEELPRVWAGSFSQVVRSVTPRMPAPMVPIVERLLRGVEELSKLIDECDQEIEVVAESDPDIKLLRTVPGVGPLTAAGFVHIIRDPSRFKSSRLVAAYLGLVPSLYASGQTFIKGGITKHGNAHLRWLLHIAAGALLRTIRDTALKRWALNLSARIGRKKAKSAIARKLATVLWAVWRRRAPFEARLPLPPPAE

SEQ ID NO: 315538 - protein, 382 aa, unidentified
MIIERPERMEARRIFGLDLSKKTFTGCMLDLVDPRPRPPVFDGRMTGDGWLKLCGRLGKDDYVVMEGGTSSAYMARFLKRHSEAKVFLLNPCKLHIIFESMNKTDRNDAIRIAKYLRDTNPESWCLIPITSEDEASMRSIVSSQIFMKETRTKLINKLHAIFNHNGVSYLKKSDLKEQSGRYELAYNLLPTEIAKSDATLVCGQIDSIEMACNSYEEMCRQILLSHPKEALAWLSLPGVGLLTASACVAYIGDGRRFSTASQIRNYVGLVPRIDQSGMKEHIYGVNHFGCMPVRRNIVQAAWAVGMIGTGNTLTEKWNGYVARGKKGQRAAVAIANDLVTIGWTLLKKQQLYNGFGDYEYLKRKLRQLKLMAIDSSMYEELK

SEQ ID NO: 315539 - protein, 334 aa, unidentified
MTTSPERFVGIDVSKDTLDVHIRPDEIDRQFANSNEGISSLLGCLKNLNPTLVVIEATGGYETAVAALSVAAIPLSLVNPKRTRDFAKAIGRLAKTDKIDARTLAEFAEKVRPTVRPLPDADTLKLQALLTRRSQLMGMRTMEKNRLGTIKDRTIRRSIEAVLRTLEKEIERADRDLDKAIQECPVWAAKDELLQSIPGIGPVVSRTLLAEMAELGTFSREEAAALAGVAPFNRDSGTHKGKRMIAGGRAAVRNMLYMGSHAAKQGNALLRAFADRLEAAGKAPKVIRIAVARKLLIIANAVLRDQPPWKLKAAFKRYDDRTQYLFYRCRRKTP

SEQ ID NO: 315540 - protein, 350 aa, unidentified
MIIGVDYHPSFQQIAFLIEETGEYEERQLNHTDGEAERFYRDLQRRGISVRIGMEATGYSRWFERLLAELGFELWIGDPAEIAAKRVKKRKTDREDARLLLKLMLEDRFPRIWVPSPENRDLRQLLWHRHRLVQMRTRIMNQLQALAMNEGKRWKKKLWNEQGRAQLEKLPLGFWASRRRRELLELLDRMNPTIEELTAAAAQEARKRPEALRLMTHPGVGPLTALTYVLIIGTPTRFQCGKQIGTYVGMIPSEDSSGGKQRLGHISRQGSSLLRFLLVEAAQMAARINPEWRRRYMHLAMRRNKSIAKVALGRRLAVRLYWMWRNGCGYSPSLEFGSYAGQLGYGHGVK

SEQ ID NO: 315541 - protein, 350 aa, unidentified
MQQIVKQVCGIDVAQDELAVALGRVYNDLSPEVYAYKSFKNNTKGFELLLKWVKKLVTEGIDVHYVMEATGVYHEKLAYYLYLHAPSLSIVLPNKISNYFRTLDVKTVTDKTASQAITLFGLERKLDSWLPPDPVFKQMRQLVRERDQHIQTRTVTKNQLHAEQAEMFPLKNTIARFEKQITLLNKQIGEVVSEINELIKSSEKIAAAVELLASIPGVGLLTAATVLAETNGFDHIRNKRQLASYAGLDVKEKQSGTSVKGKPKISKRGNKYLRKAMHMPALAAIRHNERFKGVFARLVGKHGIKMKAAVAVQRKLLEMMYTLYKKQEKYDCNYLQKQEQHTDAEAAIKK

SEQ ID NO: 315542 - protein, 342 aa, unidentified
MKQYVGLDVSQRETAVCVVNETGQVIFEGKAKSNPGVLTDLLSKHAPHAERIGFETGAMASWLWHELRRVELPVVCIDARHAHAALSVRMNKSDQNDARGLAELVRVGWYREVKVKSEESQKIRAILVARSRLVSMRRDIENQVRSLIKECGLLFSRAIGQQFRNQVSELLGVDHLLLSVISPLLSIHENVCQQQGKFDNEVRRLAKLDETTRRLMTVPGVGVVTALTFRHTIDDPSRFRSASTVGAYLGLTPRRSQSGETDTNGKISRWGDRLLRTYLFEAATVLLYRTKKWSSLKAWGMKLAKRIGMKKAKVAIARKIAVILHCIWVDGTSFDWGQPKPI

SEQ ID NO: 315543 - protein, 394 aa, unidentified
MRFVGIDVASEQHMVASVDEASSVVLRATPFTEDAEGYDKLFDRLGAAADTLVAMEATGHYWKNLFAALVAHGFAVALLNPLRTHRFAGEELQRTQTDAIDAVGIARFAAQKRPAPTRLPDRALEELRELVRFRDRLVQDFGDRVRQLHRLVDLGFPEFTRYVRDLGGALATAILQTYPTAAAFAGLAPRRLAALRYDGQHRVGDELAQALLTAAPRSVGQHHGEAYRIQVRYTCEDLDLLRRRLRTLERDIERLLEAHEVGRLLTTIDGIGPQTSARLIATFGDFTGFRSGAAVASYVGVIPALRQSGKRTWTRAALTSLGAADLRAKLWMPVLVAVRKNPWLRAYYQRLIARGKLPKVALVAAMRKLLHAVYSVAIHRRPFVPQIAAPESRP

SEQ ID NO: 315544 - protein, 341 aa, unidentified
MAAYVPIDLHRHRSVVMHMAADGEVLGWTRLANDPERLVTEVLKAGEAPEVAIEATYGWYWAVDALQAAGANVHLVAPSKLTAFENRRVKNDQRDCQVLGDLMRAGMLPEAWISTPEVREWRELVRYRAKLVGLRSGLKAQAHAVLAKHGMAVPMSDLFGVGGRQLLAHLCATDTRFHSAYGRRIESLVVLVDAVTIEIDELTLSISDVFRDHAGYHAIQQLPGIGPVLAAVFVAEIGDVHRFETPAHLASWCGLTPRHRESDTTVRRGPITKQGCKLVRWAAIEAAQKLRRDSWLHDQRERLAERRNNRPIAKTAIARKLVTLAYYGLRDGHIRCLERAA

SEQ ID NO: 315545 - protein, 336 aa, unidentified
MKHYAGLDVSVKETSVCIVDETGRICRETKVPSHPDDLAQVLHDPAWRLERIGLEAGPLSQWLFSGLAEAGLPIVCIETRHTKAFLKAQVNKSDRNDARGIAQMMRVNLFRPVHVKTLTSQKRRALLTARKLLQEKAIAFENDIRGLLRNFGLKVGIVGAAKFDIRIRELLDCLPDLAEIIEPLLASRRKLREEFERLHRKLLSIVRDDGVCRRLMTIPGVGPVVALAYASTIDVPARFRNSKAVGASLGLTPVLHQSGESNRIGRVSLCGDGMMRTLLYEAAQVMLTNVHVKWSWLKAWAMNIAKRRGGRKAIVALARRLGVIMHRIWSDGTVFR

SEQ ID NO: 315546 - protein, 378 aa, unidentified
MKRILKIGMDVHTTNYTLCAMEPIIGEDDRVFATIKVTPDYKNILLFIENLKTKLGLNDEYDIQCGYEAGCLGYSLYKQLTAAGVKCVILAPTTMLTPQGVRIKTDMRDAYMIAQCLSYGGYHAVYIPTEADDSVKEYLRMRNDHKLALKKIKQQINAFCIRHGFCYDGTKWTQAHLKWLKKLEITNQLYRETLDEYMASYEEQEAKIERYDKRIEEIAEQTKYHDKVKKLECFLGIKTHTALSLIVETGDFERFAKGNQYASYLGLAPGENSSSDSIHRLGITKAGNSHLRQLLIEASGGICKGAVGHKSKDLRARQNGNTAEVIAYADKANTRLRSRYYKFIRHGKKRNVAVAAIARELACFVWGMMTDNIEMKAV

SEQ ID NO: 315547 - protein, 404 aa, unidentified
MYNAVGIDVSKGKSTVAVLQPGGTVIRKPFDVSHTSQNLNELADYLSSLDGTAKIVMECTGRYHEPMVKALSEAGLFVSIVNSHLIKNFGNNSLRKVKSDPADARKIARYTLDNWTELRQYSGMDNTRTQLKTLNSQFSFFMKQKVAAKANLIALLDNTYPGVNKLFDSPTREDGSEKWVDYAYSFWHADCVRKIGLKAFTERYKSFCKKHHYIFQQDKPEKLFNASKELVAVFPKEKTYKLLIQQSIQQLNLASEHVERLRREMNELASTLPEYSTVMGIYGVGKTYGPQLIAEIGDVSRFTHREALTAFAGVDPGVDESGQHKSKSNRASKVGSARLRKTLFQIMTTLLQNAPEADPVYRFLDKKRSQGKPYYVYMTAGANKFLRIYYGKVKECLRNLEQTE

SEQ ID NO: 315548 - protein, 339 aa, unidentified
MKLYSAIDLHSNNSVLVVMDEADKTVYERRLPNQLPMILAELAPYKKKIQAIAVESTYNWYWLVDGLMDAGYEVKLVNTAAVKVYEGLKYTGDEHDARHLAHLLRLDVLPTGHIHPKEERAVRDLLRKRGQLVRYRTMQILSIQATISRNNGHGISTGEIRKLDDATIDRLCEGDVARALAIKSNLVMLRCLDAQIAEVEALALQRAKLRPEFKKLLTVDGIWNILGMTIMYEAGDMDRFAKVGHFASYARCVGSSRWSNGKKKGEGNRKNGNKYLAWAFIEAAHYAVRYNERIRSFYQRKQAKTNKIVAAKAVAHKLARACYHVLKDQKPFDETRAFA

SEQ ID NO: 315549 - protein, 428 aa, unidentified
MIKDRVPCRKFYLGGAIMDKIYDKCCGIDVHKKLIVACFRCGRKQEVREFGATTRELLELADWLKEGGCEMVAMESTASYWKPLFNILESSDLKAMVVNARHMKAVPGRKTDMKDAEWIADLLQHGLLQPSFIPDKDQRELRELVGYRKSLVGERTRELNRLQKMLEGANIKLSGTVSDINGKSARSILEYLLTGQSIDGAKYDEMYEKKVIAHNLKATKEQIIDDLNGVMSPLQRRMMKELLAHLDELNAHIKNLDDEIDNFMKPEEKQASQAIQDVTGIGNTSAQAIISVIGTDMERFPTDKHISSWAGLCPGDNESAKKRKSGKTRKGNALLRTTLITCAHAAVKNKQSYFYAQFMRISAHRGPKRAYVAVAHSMLIAIYHILKDGVIFKDLGADYYNQFNKERKINAYLKKLKALGWESPVVAA

SEQ ID NO: 315550 - protein, 363 aa, unidentified
MIVIGTDTHKKTHTAAAVFAGTGRLAGELTASARKPGFGELLTWGRGIDPERIWALEDCRHVSGSFERFLVASGERVVRVPPKLMGESRRGERTRGKSDPIDALAIARAALREGPETLPGAHLDEAALELKLLLDHREDLVRARADDQQRLRWHLHDLWPEFELPAGCLDRIVWLDRVARKLSRAEQSARVRVSRELVRAIRDRAKRASELEREIGAMVRAQAPQLLELPGCGPLTAAKLLAETAGVARFASDAKLARLAGVAPIPASSGNRTRLRLDRGGNRQLNCAVHRIAVTQSRVHAPAKEFLARKRAEGKSTREALRCLKRHLIRRVWRLLNDSEIDRSVKSTDSQRGSLSPQIAVAA

SEQ ID NO: 315551 - protein, 457 aa, unidentified
MQDASDSQTRELEGLPVIRRQVAGIDLGSERHWVCAPKVDGNGREVTSFGATTSELVRMAEWFQARHVECVAMESTGVYWIAPHEILEAKGFEVLLVDTRQIARVPGHNKKTDPTDCEWIQRLHSCGLLAASFRPKEDICMLRTLVRDKATLVAESGDWVRRMQKSLDQMNVRVHRAVSDLDGVTGMAIIRAIVEGERDPRKLAQLRDWRCRKSEDQIAEQLGGHWRKDHLFSLQQSLKMYDAIQDRIAAYDQEILRKLAEMGKGMPAGGSVPPVKNPQKARAIQKRGEEVMRQALYRMSGVDLTQIDAIGVETVQIVLSEYGPDLSRFPTENQFVSHITLAPKVPKSGGKPLKKKKRNSASTRVAAALRMAALSLRRSSTALGAYYRNVARRIGADVAVFATARKLATLIYRLLRWGKPYVDEGEEAFERRYQQARIKSLEARAKSLGYQLTPTAA

SEQ ID NO: 315552 - protein, 398 aa, unidentified
MDQDRFDVFVGLDVGKEHHHATALNSAGRRLHDKALPQDEAALREVFDKLTVHGSVLVIVDQPATIGALPVTVARAMGIEVAYLPGLAMRRIADLHPGNAKTDARDAFIIAEAGRTMPHALRRVGGDDDLIADLAVIVGFDDDLASEVNRVSNRIRGMLTQIHPALERAIGANIGHPAVLALLAKFAGPTGLAAAGRRRLTTTTKPLAPRMHTRLVDAIIKALTEQTVVVPGTRAAELVLPQLAAQLQGLLAQRAAAAKQVEEALDAHPLSQLLMSMPGVGIRTTARLLLDIGDGSAFATAGHLAAYAGLAPVTRRSGSSIRGEHPSRGGNKHLKRALFLSAFAALHDPDSRAYYDRKRAAGKKHNAALICLARRRVDVLHAMLRNGTYYQAKPAAAA

SEQ ID NO: 315553 - protein, 319 aa, unidentified
MSSELVYVGLDVAKATLDVALRPSGESWQTANDDAGVADLVARLRALTPTLIVCEATGGFERPAVAACAAVGLPIVVANPRQVRDFARSTGQLAKTDALDAAILALFAERVRPTPRPLPSDAAQLLDALLTRRRQLLEMLVAEKNRLGFAPRPLHRGIRQHIRWLERQLDDVTGELAALIEASPVWQAKSDLLQSVPGIGPIVSAVLLGELPELGALSHKQIATLAGVAPLARDSGTLRGKRMVWGGRGGVRTALYLAALSGRRWNPQLRVFYERLRAAGKPKKVALIACARKLLTILNAMVRDQARWAIPTSGIQYSC

SEQ ID NO: 315554 - protein, 387 aa, unidentified
MPQPNDLSRSLVALDQNSTVIAVVELSQSSWLVAGVLPGIERQPRKKLEPSPERLLAVLHRWRDEAVKAGRTITRIAVAFEAGRDGFWLARWLEARGVEAHVIHPSSVAVSREHRRAKTDRLDTELLKRGFLGWLRGERGHCSMARVPTIGEEDAKRPNRERNCLVGERTRTVNRIKSTLARLGIRNFKPTLRKAADRLATVRTPEGMPLPPNTLAELQRDMARLGLVISQIREIEEARQKRLEQQHETGPHAMVRLLARIVGVGVETADMLVHEVLTRPMRDRRAVARYAGLTGSPDESGAQRREQGLARAGNARVRRGMIQLAWRFLMFQKDSALALWYRARTADSRIGTRKTMIVALARKLIIALWRLVTTGEALEGVVLRPAS

SEQ ID NO: 315555 - protein, 357 aa, unidentified
MTTYYIGADVHSNSTELAIERNKRIMARRKVSTTIAAISGVLDSLRGQKHLAIEEGPMAGWLYRNLSNKVDTLTICDPRRNKLIDSDGDKDDKIDAAKLACLLRGGYLRAVYHSDDDHRIELKHWVSLYQDRIRDAVRNINKLRARCRMQGISIPRAVIRDPSERSRWLSSIKHPVLAKQLNLLWIGYDATVQQVAIAKRQLSTLGKKYDIIKLWGKLNGIGLIRATTLFAYLDTPWRFKKKNKLWKYCGVGLVRTASGTDKKGRPKPARLRLPWAVNRTLKNAVLGAAASAINQKDNPFRDYYERMVADGIMPSNARHAVARKLLTVMWAMFKTNSRFDESLCREPDIEKVTALSR

SEQ ID NO: 315556 - protein, 414 aa, unidentified
MFAVGVDVSNGRSMVAVLGARRSVVVQPHEVPHTADGFAELAARLHALDGEDRIVMEHTGRYYESFAMSMYRAGFFVSAVNPLAIKGYQEGISVRKVKTDKADALKIAQFAIDKWEILPHYTPMDTIRYDLKTLHRQFQLSSKTKTALNNNLIALLEQSYPGANRYFDSPVRPDGSQKWVDFVDTFWHVDCVARVSRKAFVERYQKWCKRHGYNFSEAKAVEIHEDARQRFPLVPKSDTCKLMVREAVAQLNAVSRTVETYRAEMDRLASQLPEYETVMVMTGVGKSMGPQLIAEIGDLRRFAHQKSLVGFAGTDPIKDDSGDKVSDSKPSSKRGSPYLRRTLFVIMTILLQLQPPDDPVYRFLDKKRSEGKPYYVYMTAGMTKFLRIYYGKVRDCLKEKGLWEQPNVDEVNPV

SEQ ID NO: 315557 - protein, 345 aa, unidentified
MKVSTVGIDLAKNVFQLHGVNELGKTVFKKQLRRDQMAEFFVNLPGCLIGMEACGGSHYWARKLQGFGHTVKLMAPHFVKPYVKTNKNDAADAEAICEAVARPNMRFVPIKDVEQQSVLALHTVRQGFVKARTAQANQIRGLLTEYGLIVPQGIWHIAKRVPELIEDASNELPGAFRLLIQRLLDHLKELDTQVDELELQIVKWHRQSSASSKLAQVPGIGPITASALVAALGDAKNFDNGRQVSAWLGLVPRQHSSGGKQNLLGISKRGDSYLRSLLIHGARSVIYNGKDKTNPTCKWINGIVSRRNSNVAAVALANKNARIVWALLTHDREFRPDYTREPVGV

SEQ ID NO: 315558 - protein, 362 aa, unidentified
MSKDNKKRISLGNESESFIKYSVGNDISKEKFDSCISLIDNQQQVSIIATRSFSNSPSGFKSFEMWVSQKCKRDIPIVFLMEATGVYYEQFAWFLHKAKKCVSVVLPSRAKKYLQSLGFKSKNDKIDAKGLSQMGAQQRIEEWCPPTSEILQLRSITRHRQALQETRTRLNNQLEGHRYAEHVNNEVVSHLEQLIETIDNQIKQTEKMVKEAVKKDDNMYRKINNITQIKGVGVVTAATVIAETGGFHMIKNQRQLVSYAGYDIVENQSGNRVGKTKISKKGNSRIRRILHMPSFSVVKYGELQFVNLNQRVFERTKIKMKGYVAVQRKLLILIYTLWRKDEIYNVEHPEMQSRSLSFRMAS

SEQ ID NO: 315559 - protein, 409 aa, unidentified
MSSVEDRVIIGMDPHKRSVTIEVMAGDETVLGGGRFATDRDGFSRCWPARRRGRTGCGRSRDAAVRLLGCGDEVVDVPPKLTARTRVFATGQDRKTDATDAHSVALVGTRMAGLRPVVNDEQLAVLRILVDRRRSLGEEHTRMVSQLHQLLLELIPGGAKKDLSAAQAKALLAKVRPRDIAGKTRRRVAAELIGDLERIYQRKKAANKELTELVAETGTTLMGLHGIGPSGAARLLVEVGDITRFPDRAHFASWNGTAPIDASSGDQVRHRLSRAGNRQINRVLHMMATVQLRNQTQGRAYYDRKKLDGKTSMEAMRCVKRRLSDIVYRHMVNDAITHVVTGPGGQRGTATDSSAAGSHPNAGTSEKPLPGPATSQGTPPATSGPDPCSPRSRRPVPAPGRSRSQARFA

SEQ ID NO: 315560 - protein, 310 aa, unidentified
MDRIIVGIDVSKDRLDVAVRPSGEAFAVSRDAAGVEQLVARLRKLSPHLVALEATGGFETVVAAALGAAGLPVVVVNPAQVRAFAKALGQRAKTDPIDAGVIAHFAEATNLEPRPLPDEQTRLLADLVGRRRQIVAMIGAERQRQQRVTAPRPRKSIARLIKALEKELASLDADIDDAVQGSPAWRAKEELLTSVPGVGPVITRTLVAELPELGQLGHKQITALVGLAPFTRQSGKWRGKSCIGGGRTAVRAAIFMGAMVAKKHNPVLKAFFDRLVAAGKPKLVALIAVARKLLIILNAIVRDNRPWQTA

SEQ ID NO: 315561 - protein, 353 aa, unidentified
MDNGSRYVGLDVHRDTISVAVCDSRGKLMLERVIPTSAAAVLELLELLRGKLHVAFEEGTSAQWLVGLLQPRVAQVLVCDPRKNDRRGSKNDRIDARELADLLRCGRLSPVFHQDCGLTSLQQLARTYLVLTKDQTRVMNRIKAIYRSWAIPCAGQSCYSSKQRQTFLSHLPHAAVRSRAQIYYQQMDSLVALRQRVRQQLLREGRKQPALRLLRQIPYIGPLRATLLVVFIQSPHRFRTKRQLWAYCGLGIETHDSGEYRFRQGQLERKRQPTVMGLNRNHHHLLKYILKSVAARCCSGSGPLRDFAQTLLDQGMRPEMVRLTVARKIAAIILVLWKKGVSFDAHYLKSQAA

SEQ ID NO: 315562 - protein, 354 aa, unidentified
MPKTASAQIAVIGVDIGKNSFHVVGHDKRGSIVLRQKWSRGQIEARLANLPPCLIGMEACVGAHHLARKLSALGHDARLMPAKYVRPYAKGQKNDFNDADAIAEAVQRPTMKFVATKTADQFDLQALHRVRERLVSQRTGIINQIRAFMLERGIAVRQGIRFLRAELPIILAARTDVLSPRMLRVIEDLVGDWRRLDGRIENLSCEIETIARQDAGCDRLMSVPGIGPIISSAVVAAIGSGDVFSKGRDFAAWLGLVPKQISTGDRTILGKISKRGNRYLRVLFVQAAWVVLVKPQSWERHGLKSWIEAAKKRLHHNVLAIALANKLARIAWAVLAKGRGFEATRTVNGSTQST

SEQ ID NO: 315563 - protein, 423 aa, unidentified
MMKLKYSICCGLDVHKNVIVATIVTTNKDGISEYLQKSFSTINSDIQRFHNWLIENNCYHVCMESTGKYWIPIFNYLENDIDVCLTHPKYVKAIKGKKTDKKDSKWIADLYKFDLVRCSFIPPKDFRQLRELSRYRFKLVCMKSSEKNRIQNCMTISNVGIASVLSDPFGKTATEIISYLLEHTADSMDEKAVRKLIKKGAKSKSDEIIEAIKGYTIETDQAKKLELARGHLEYLDDMIAQTEVELYVRIKPYYEFVEFVSTMPGMTELSSTIVLAETGVDMDIFDDAKHLCSWCGLSPANNESAGKKKSVRIAKAGDYLKPMMVQCALAAIKSKKQPYFAIKYGRIKKRRGHKKAIIAIARMMMVCIYHMVSEKKPFTPTDYEELMDPQNHVESVVLNENNVFAYLESLGYDSSKLVKRNDN

SEQ ID NO: 315564 - protein, 383 aa, unidentified
MKKTQETLRIKDSIKEAILYIAFELSNSKWKLAFSDGSKIRYKAITAGNLAQLQVEMELAKQKFKITEDIRVVSCYEAGRDGFWIHRYLESRGIENLVVDSASLEVNRRKRRAKTDRIDAGQLLRMLMRYWGGEKQVWSVVRVPSEQDEDARHLHRSLENLKSERTRHRNRIKGLLVQQGIKVSNPSQKKFLEVLEKVRTWNGQAVAPGLKSQVVREYERLQVVEDQIKAWEKEKKERLKNPDTVSLQKVAKLASLYGIGSVSSWTFVMEFFGWRQFKNRREVGALAGLTPTPYDSGKSLREQGISKAGNQRVRALAVEIAWAWLRFQPQSKLSQWYMKRFGGGGKRMRRIGIVAVARRLLIDLWRYLEYDKIPEGARLKSSA

SEQ ID NO: 315565 - protein, 410 aa, unidentified
MSSQIKFEQVIERGCGLDVHQKTIVATVRGIDVEIGTRTFGTFTSQIEELQVWLNSLSITHIAMESTGVYWKPVYNILEEDFKIILVNARHIKNVPGHKTDKKDSEWIAKLLLSGLLKGSFVPAEWIRELRDLCRYKRKLIAQRVAQRNRVHKILEDANIKLASVVSDVFGVSGTLILDALIQKQDDPEYLANLAKGSLRKKMEDLKLSLRGRLTDHHRFMLSTLRDSIDSINAQIRHIEARIESYAAELQQEVDLLQTIPGVGKETAMNILAETGNDMEVFPDHKHLASWAGVSPGNNESAGKKKSTRITHGNKYLKTALVEAAWAASHTKETYLNRKYGAVAARRGSKKALIAVAHKILTALYYILKNKEAYLEPDHTAYQEKRKQAQIKKSLERLRGLGVQVDIRPN

SEQ ID NO: 315566 - protein, 418 aa, unidentified
MDAIANNIAGIDIHKSMLAVVVRQQVGDTITYIKRAFGTTKSEIEHLAAWLQHHEVAEAVMESTAQYWRPIWNGLECHFQLHLTHPLKTRAPRGRKRDFRDAQRLADRWHSKDLEESYIPRAEQREWRWLTRSRLQMKRKMTVMRNHVEGLLEQGGIKLTAVVTDIQGVSGWAMLERIANGETDVDALLNEARGRLGKKKPQLREALLGNLAPVYRLILKQTMDQIRLLRNQVEEINAALAEAMKDYVTVLVRLTKIPGIDLYAAQELLAEIGPTASAFPSASHFASWIGVCPGSQESAGVNYSPRSAKGNRYLRRLLCQIAWAAVHAKDTFFNSLFHRLKPKIEGKGAAWAVAHRVAKIVWLVLHNGVDYEEKGPTPTDPRKQAKKFKRLVRTLTSQGFDVRALLDTELAAVDVLGR

SEQ ID NO: 315567 - protein, 388 aa, unidentified
MPPTNAPRAQRVPHTERHDATLHASLELSQATWLVTSLSPGSEKMSKHSTAGGDGSALLALLARLRTRAEQSTGGPVAIVVIQEAGLDGFWVHRLLQANSINSHVVDPASIAVPRRRRRAKTDAIDGETLLRTLLAWQRGEPRVCAMVVPPSPEQEDRRRVSRERAILLQERVRHVNRIKGLLAGQGITGYDPLHKDRRTRLGELTTGDGQALPLRLKAELLREIALIELVLRQIAEVEAERDAAVEPDADAKPSPVALLARLKAVGPQIAAVLYLEGLYRHFTNRREVAAYAGLVPTPWRSGTIDREQGISKAGNRRLRHIMIELAWLWVRHQPDSALSRWFRARVGAERGRVRRIAIVALARKLLIALWRYVTHGEVPEGAVLKAA

SEQ ID NO: 315568 - protein, 439 aa, unidentified
MARKRKPKRKSVWGLPILQPDAAGVDIGAHEIYVAVPADRDPQPVRCFTTFTRDLHALADWLQECRIRSVAMESTGVYWIPLFQILEARAMEVCLVNARYVKNVPGRKSDVSDCQWLQYLHSVGLLRASFRPSQEVCQVRSLLRHRESLVQMAAVHIQHMQKAFDQMNVQIHHVISDLTGKTGIAIIEAILAGERDPEKLAQLRDPHIRVSSQVVVQSLVGDYRREHLFTLRQSLAAYRHYHALMTACDQEIKACLGEFDSQIDCRQHPLPPARDSHRKPRGNEMHFDLRGELYRILGVDLTQVPGLNALTVHTLLAEIGPDLSAFPSGGAFASWLGLCPDNRISGGQILSVRTRPVKSRVSLALRQAAQSLHRSQSYSGVYYRRLRAKLGAPKAITAAAHKLARIVFHLLTTRQAYEESVFAEQEAAYRIRSEFLRSA

SEQ ID NO: 315569 - protein, 412 aa, unidentified
MNVIHPRCCGLDVHQKTVAACVQVCREDGKKHKEVRTFGTWTQDLQRLADGLSEQGVTHVAMEATGVYWKPVWAVLAGQFELLLVNAQHIKAVPGRKTDVKDSEWIAELLQHGLLRGSFVPPLEIQDLRELTRYRAQLTQERSAVANRIQKLLEGANIKLGSVASDVMGASGQQRLRAIIEGETDAERLAQVARKRMRSKIPKLCLALEGKVREHHRDMLRRLMRHCSFLEDEIASLDEEIRSRMRPFEQAVALWQTIPGINELTAWNVAAEIGVNLDQFPSPQQWASWAGLCPGNNESAGKRRSGQTRYGAPWLKRALCQAAWAASHTRNTYFSAQYRRLAARRGKKRAIIAVAHSLLIVIYCIRKQNRTYQELGGNHFDQIHAERHKRYFVKKLAALGFQVNLLPVEQAA

SEQ ID NO: 315570 - protein, 370 aa, unidentified
MNITHAVAGIDPHKRTATVAVVDVLGVLVISLSFAVTESGVAELLALLKSTCLNIDRIGVEGSGGLGRPVMLALAAAGYDVREVQANRTADRRRRRRRAKTDAEDAEAIARETLADPDLPPAGKDAAPSPASNELDVVRDWRESLVLQRVRLLTEAEPVLLSLPLALREQLPSTSRVLASLNRLTELENVDAGLSAGDRLKLDRLAASRADIVAISARIKDLDAQIPALLKALGCTMTAIHGIGVVTAMTLLTEIGDPHRFSTEARFARWCGVAPVAMSSGEGDGPPRNHRLDLGGNRRVNSVLHIVHVTQARCHPEAQAYMTRRAAENKSKRAARRAHKRQLANVIIRRMWNDADNLARANSTPSSAAA

SEQ ID NO: 315571 - protein, 359 aa, unidentified
MSKYITIGMDLGNKKHTVCALGQDGKVLWRRDVENSPEALTPFFKENAGATVAMETGLCCRWISALAKSCGCEVLVGNARKLAAIWKSKQKNDEKDALLIAELARTSTLLFHPVELRDDERHEMVQIIELRAVAVSQRTQAVNSVRGLCKARGVFIKKCDASCFHKVAGEAIPAGMAWKFKPMLRHLKEIVATVKRYDAMLEKYARAHFKEEVELLQTIPSVGPVTSCAFVAHISDPRRFGSARDAGAYFGLTPGQDQSGDRDAPKRITKTGSTLMRHLLVTAANYILRESSPDTALKRHGERICERGGKVARRKAKTAVARKLAVTMLAMLKSGKPYDDVLAAKKAATVAPTVTGLIA

SEQ ID NO: 315572 - protein, 354 aa, unidentified
MTVYIGVDFHPYEQSIAYASDEDGEIGYRRFLHSDKQSIKAFYRKFGGEAVIGVEATGCLWWFEKMLASCGQKLEIGNPRMIRRAALSRHKNDFRDAETILDLLMRGAFPSIVPRCEESREVLDLLHYRQTLVQKRTSIANQLQAVARSKGLAKFRMPAVKGRKKLLDEPATDVETLLMTSRLLLYDEITVQMKALEARLVQLAESDERAKLLMTHPGIGVNNALALVHTLGDVRRFRRKEEVVAFVGLDPLEKSSGEKKRMGQISKRGSRLARHLLGQAAQACRDHRIRTFYSQVSRRRGRPKAKVAAARKLLINCYVMLRDGINYEEFQRRGEVGLCEGSGEVKRKLQSLEA

SEQ ID NO: 315573 - protein, 467 aa, unidentified
MKIKKKSKIKNNKLPLHLQHININAAGIDIGSESHFVAVPEGRDKESVREFSSFTCDLHNIASWLKKCKVDTIAMESTGVYWIPLYDHLESEGFEVKLVNARHVKNVSGRKTDVLDCQWLQQLHTYGLLTGAFRPSEDICVMRSLHRHRSNLVRFVSSHVLHMQKALSLMNLRLHNVISDITGVTGMRIIHAIVGGERDPLKLAEFRDVRCKNDYQTIVKSLEGNYRSEHVFALKQALELYEYYQTKISECDQEIEKTLQTFKRVIDIKENPLEGKRKTAGKNQPKFDVRSLLYEKSGVDLTRIDGINESSALTILSEIGFSVAPWKTSKHFASWLGLSPGNKISGGKSISSKTKLCANKVAAALRLAATNLWRSQTALGAYYRRMSSRIGKPGAVTATAHKLARLVYSMLKNGTEYVDKGVEHYEMQYKQRIIKNMKNRAKQFGLKLVEAADAAGTDIAVPSTILI

SEQ ID NO: 315574 - protein, 341 aa, unidentified
MNVTTIGIDLAKTVFSIHGTNQHGKVVVRKRLNRPKLLAFFAQLPPCLIGMEACSGAHYWARQLTKLGHDARIIAPRFVAPYRKSSKNDDNDAEAICEAVSRPSMRFVPIKTEDQQAVLCLHRIRRGLTKERTAQINQIRGLLAEFGLIMPQGRYHARHRIPEILEDAENGLPMLARRLLNNINQRILQLDEEILAYDREIEAMARRDEQAKRLMAIPGIGPQTATAILASAPDPRQFKSGRHFAAWLGLVPRQYSTGGKPRLGRITKRGDKYLRTLLIHGTRAVIAKLADKNDRLSGWAKELVERRGYKRAAVALAAKNARIIWALLMNKTEFKTQPVEG

SEQ ID NO: 315575 - protein, 413 aa, unidentified
MLKIVYPICCGMDVHKSFLIACIATTNNQGVTTYTSKRFSTFTGDLRRCGVWLAEHNCKDVCMESTGKYWIPIYNILEPTCNIVLAHPKYVKAIRGKKTDKKDAKWIADIFKHDLVAGSFIPPADIRQLRDLVRYRWKLTNFVTGEKNRAQNCLTVSNIKLDDVFSDVFGKAATAITTRLLENPTEPITDVSAFRTKGMNATDEEVLAAVDGELCAEQAEKLRIIRSHMVNLDLCKANLESLILSLAEKYLPQLNLVMTVPGIQSFAAIGIISEIGVDMSVFPTSKHLCSWAGLTPQNNESAGKKKTTRIGRAGAYIKPLLVQCALCAIRKKSNPEIRRRYENLKKRRGHKKAIIAIARMLLTAIYNILKKNEPYNPELYAHINTPPKQRTVSVEEAIFILQRQGYLVTPSAT

SEQ ID NO: 315576 - protein, 342 aa, unidentified
MQITTIGLDIAKNVFQVHGIDAKEKVVVRKQLRRDKVMGFFKALSPCLIGMEACATAHYWARELTKLGHEVRLMPPKDVKAYLKRNKNDAADAAAICEAVGRPTMRFVRVKSEEQQGQLMQHRTRDLLMRQRTQLINALRGHLAEFGIVAAKGDAGLKELLAIVADDRDERLPSDARASVIVLAAQLEAAQTMLRSLDKRIMKQHRANEASRRLESIPGIGIIGASAIAATVSDPMVFRSGRDFAAWIGLVPRQDSTGGKQKLGPISKQGDRYLRRIIIIGAHAVLRRAKENPHKYPWLTQLLARRPFKVVAVALANKMARTAWALLAHGDTYRAPELVAAA

SEQ ID NO: 315577 - protein, 339 aa, unidentified
MELYSAIDLHSNNSHVAIIDDQQNRVFYRKLANDPKVIVNAFAPYRERLKGIVIESTFNWYWLADLLIEKGYPVHLANPCGIQKYSGLKHADDKHDAFWLAQMLALDILPEGYIYPKEDRPLRDLLRKRSQLVRVRTSLVLSLQNMVMRNHGIKIRSNDLKKLTQDPVAELFKDQQELALAGKASKETIDFLTRQIQRIETAARNKAILKESFSKLLTLPGVGDILGMTILLETGPIERFKAVGHYVSYCRKVPSRWTSNGKTKGKGNTKNGNRYLSWAFSEASDHARQTHGPSRDFYNRKLNQTNPSVAHNALAHKLARAGYYIMRDHVEFEEAKMFR

SEQ ID NO: 315578 - protein, 388 aa, unidentified
MFFLGIDIGKNTHVASLLDEKAKIIFKAYSFANTLDAAEALLVKLEPYKDSLEIGMEATGHYWLSLYSFLAEHKFIVHVLNPIQTDGWRKGIEIRKRKTDVIDSVLIADLIRYGNFLETSLADEDILSLRNLSRFRVYLVNSVSDLKRKAIAVLDQIFPEYASVFSNVFGQTSKELLKSLSLPSDYENLSATKIEEVLSNITQKKKASKTISTLSDKAGRSFGISFCKDSFAFQLKLIIEQICFIEEQIASVELEIDQLMSKLGTNIKTIPGVGSVIGAVILGEIGDIERFDNPSKLVAYAGLDASVSQSGEYEASSGKLSKRGSPYLRKALYMAAQRAEFCDPVFHAYYEKKRNEGKHHLVATNAVARKLCHTIYAILKKGVPYEVQ

SEQ ID NO: 315579 - protein, 475 aa, unidentified
MNVKGTKKKNQVVTANIFEQQELLKKAEVIKESLTASTWRELETNGKFDKNEKLSFISDDMLILGCDVGSETHYMRAIDTRGRELSKSVYSFNNDSEGFRSAKEWAVQIAAEHNKSQNVLGLEPTGHYWFCLATWMISNGISVVQVNPYAVKQTKEVEDNSQMKDDRKDPKLIANLVKDGSFGMPYLPEKLYAELRRLSMFRDQLNEDRIRTINRMHREMKIYFPEYKDALGKVDGAFSLELLRQAPFPDDLISLGEDGIRKIWHDARLRGRGYSRAGEILQYAKVSVGIKDGAIAGKAAVKWFVQKILELDAELAVIENQINQKCQEIPHAGNILEISGIGENILSGILAEMGDISRFDDVKEIQKLSGLGLVACSSGKHKGETRISHRGRKRLRYWLFQAAKSAVAHAEEFKELHIYYTTRADNPLKKMQSLIVIACKLLRIIYTILKKGIVYDPKKMLMDIRRMEKKEAIVA

SEQ ID NO: 315580 - protein, 345 aa, unidentified
MEHVAIDLGSKESQICVRAADGTILTEQKVGTRSLGKYLAKRPPSRVVLEACAEAFAVAEAARAAGHEPVVVPATLAPSLGVGDRGIKTDRRDSRNLSETSCRMARLPSVHVPTAESRRRKSMAGTREALIQVRTKLINTVRGWARTQGLGVIRSGSPATFSHRVNEHVAAQGQERPEFVKRVLVSIDELSVQIKAADEELEALANSDQTCRLLMTAPGIGPTASVRFVAAVDEVGRFPDAHKLESYLGLTPGENSSSTRKRRTGVTKAGAVMLRWALVQSAWVARRYYKTDPIVLWSLEIEKRRGRVVAVMALARKLAGVLFAMWRDAKPYECKHMTRALAPAA

SEQ ID NO: 315581 - protein, 486 aa, unidentified
MLAPLVEGHCQRSAPPGIGEVPEAATGRCARAPLRAPAYEHPQRYLIFAEPATTPPPPRAATEREEEEELLGMEEQTTSAGIDWAKDEHALCVVEEASGRVLLQRRFTHQEGAIEKLCRTLVGMGVERVAIERPEGVLVERVLEAGIVVIAIHPNQLKASRPRFRASGARSKSDAFDAFCLAELARTDHHRFRALVPDSEETKALKVLTRAREDLVGTRVALANQLRSELEAFWAGAAILFSEIDSSISLAFLERYPSPKDALRLGEKRLEGFLSKNRYSGGKSALELLERIRKAPKGRAGKAEIEARREAVLALVGTLKVLLERIKVLEEKIARAVRAHPDGQIFLSLFVSPNTTLTAATLVAEIGDQRGRYPTNEALAAAAGMSPVAVESGRRKVAVFRRACDKRLRRAVAILAESTRHHNRWAKEIYRRARQRGCDPAHAIRILGRAWVRVIFRMWQDGLPYDPARHGGLRRLRSAEGLTQGV

SEQ ID NO: 315582 - protein, 341 aa, unidentified
MKNKSFIGIDISKNVIDASIFCEGAPIKDFPHAVFNNSHKGFGEMCTWLKKNHVVLSNCLFGMEFTGSYSMELEKFLNARKYQFCMLSTHVVKHYPMGPKDKSDKIDSAKIADFLYRYDGTECVKPYKMPDKTMQRLKALMNERKFLVEQRTCFMNRRQLCTTKEDTQLYDGYIKKLNHDIENIELEEQKLLATDDSLLATYKNLLTIPGIGFVNAMNVIVITRNFTAFETARQYASYVGVAPHSHTSGTSVRWRPRPSARCDGQAKADLSMAATVAVQYDAELQSFYNRKLGGKQDSDTKRKALNAVKFKLVLRMFAIGKQNRKWEPLDSKSSNEKLAIS

SEQ ID NO: 315583 - protein, 340 aa, unidentified
MGDITTIGLDLAKNVFQVHAVDVAGSVVLRKRLRRGQVLTFFAGLPPCLIGLEACATAHHWARELIALGHEPRLMSPSYVKAYVKRNKHDVADAEAICEAVRRPSMRFVPLKTAEQQSALMMHRARDLLIRQRTMLVNALRGHLAEFGFVEAQGLHKVARLIAIVMDEMDGRVPDIARQVLKVIVSQIEDIQTRIAGLETQVLAWHKSNPVSQRLATIPGIGPIIATAIAATVVDPNIFRSGREFAAWLGLVPRQNSTGGKARLGGISKRGDSYLRRLLVNSAHTVLLCSKAAKADPWLRSLLSRKPRLVVAVALANKTARVAWAIMSRSDIYRHATVAA

SEQ ID NO: 315584 - protein, 385 aa, unidentified
MQKLNDLSRSPSPLDPDGTLIAVIELSLSSWLVAGIVPGVERQPLKKLAVDESALLKLLHRWREEAAKAGHRIKRIAVAFEAGRDGFWLARWLSARDIEAHVIHASSVAVSREHRRAKTDRLDTELLKRSFLGWLRGERDHCKMVAIPTTQDEDAKRPNREHESLVGEQSRIVNRMKATLIRFGIRGFNPKLKKAAERLDSLRTPEGEPIPPNTLAELRRDMARRQLVSDQLRQIEHARLERLQQAPGDGPHAMVRLLARVIGVGVETADMLVQEVLSRSMRDRRAVARYAGLTGSPDESGRKRREKGLTRSGNARVRRGMIQLAWRFLMFQKDSTLAQWFRARTESARGTRKTMIVALARKLLIALWRLVREGVVPDGVVLRPA

SEQ ID NO: 315585 - protein, 345 aa, unidentified
MSEFYEGRQFVGMDLHRRRSVLVRMTEFGEHLETVRILNDRDSLAEVMSRAGESPEVVLEATYGWYWAVDALAELGATVHLAHPLGVKAFSYRRVKNDQRDAFDLADLLRMGRLPHAWIAPPATRELRELVRHRAKLVAMRSQCKAHVHAVLAKGGIWVPMTDLFGVEGNLLLDKVTMPAPYRERIASLRRFIEGFDAEIDLFTGLVQRRLAHDAGYTAIQQIPGIGPVLAAVFVAEIGDVHRFAGPAQLTCWAGLTPSHHESDTTVHRGRITKQGSRLVRWAAIESVKILPGTSRIGAIREQVAHRRGNRNIGAVAAARRQLELVFYGLRDHHVRALHRSPRAA

SEQ ID NO: 315586 - protein, 418 aa, unidentified
MQTELSQYTAVIGIDWADKKHDVCVQDMATGKRRASQVRHRAEDLDEWARSLHRRFDGPIAIAVELSKGPIINVLQKYDFFVIYPIDPSKLANHRKTFTTSGAKDDPTDAEFALDLLSKHTEHFKPLQPQGVGMRTLMTLVEHRRQLMNDRVRITNRLRNALKQYYPQPLEWFDHIDTVLFCDFIRRWPSLPQARRARRATIERFFREHNMNRKPLLERRIKAIKSAMPLTTDDAVIVPHRLRALALVAQLEVTLECIKQYDAEIASLAPQHPDYELFSPLPGAGPVHTPRLMVAFGEQRERFNNAAEVQKYGGLAPVTKRSGQSTWIHWRWQCPTFLRQTFIEWAAQTVNKSYWAGLYYRQQRAKGCSHQAAVRALAFKWIRILYRCWKTRTPYDESRYLRALQERGSPLLKTAEAA

SEQ ID NO: 315587 - protein, 305 aa, unidentified
MISVGCDVGKKNFNVFLEGKNYEFENEKKGIGEFVRLCKKHVIARVVLEPTGGYERKLLKSLHDSDIPVSVVNPKYVRNFAGIEKDLAKTDKIDAKVLSEYGETVRPKLYEPKEPYRCELETLTNRRGNLVQMKREEKQRLEKKPGKRILKSINQLLKHLEKQIAELDCEIEKLIKENACAKAEVLQSEKGIGPQTTAVLIASLPELGHLNNRQIAKLVGAAPMAKDSGTKSGKRFVRGGRERVRTALYMASISAVKSNDKVKDFYKRLRDKGMPVKAAILAVERKLLVILNSKMRLFYEGKDYF

SEQ ID NO: 315588 - protein, 311 aa, unidentified
MRPYVGIDVSRAELVVAVRPSQQTARYANSAAGHQQLISRVQAVAPLRIVVEGTGGYERQVVMSLQEAGLPVVVVNPRQVRDFAKGIGKLAKTDPIDAGVLAHYAQVVESAEPVRLSANERALQDLVGRRRQLRDMRTAELNRRDHLSEWTRPSWERMMVFLQEELVTIEAEIAAVMRHDALLHQKATQLQTVPGIGPIVSATVLGRLPEIGRVSNKAITALSGLAPYTIHSGTARERAMIRGGRSDVRSALYMATMTAKRWNPVIRDFYDHLLAAHKPHKVVMIACARKLLVILNAMVRDGTSWNAEVAN

SEQ ID NO: 315589 - protein, 490 aa, unidentified
MNDLKLHRVIGLDLGVASQHSAVVLDGTGRVAARRRVSSTAASLGELERVALTGAAEGTTLIVVIEPTGPMWLPIAVYFGRRGHTVVRVSSAKAADLRRFLSRHAKSNGIDAETLARMPMVAPSGLHPVELSGADRASLDRRVRTVARLTREIGQRKVRIRALAQTAIPTIGAALGDDLNRTDLAVLERYAHPRALLAAGPARLTRLVHTESRGKLGAAKVEALRTAARQALELWAGDTAIALSDLAEEIATEIRLLRLTETERARHEQARDAAHAQVDPAGLATSLPGLGPVGSTQLLAAMGRPGRFRSAAAFKAFTGLAPKASETGNTDRKSQPMSKAGNRALRTQLIQSANTARQLDPQLAAIYHAQMTERGANHLKALCVVAARLAERAWLTLSRGEPYTIRDLQDRPVTPAEARTLIDEQFTVPAAVRRRRRSKKQAGRAPQHCTMQEKSQPTAGHEATRPSTTITSTPAAVNPDPTEVLTALPT

SEQ ID NO: 315590 - protein, 470 aa, unidentified
MKDKREKSIRMRIVHPNAAGIDVGSRSHYVSIGQGLDDIREFGVYSSDLIELVDWLLENKIDTVALESTGDYWQNLFTELNKANIKTYLVNGKYTKNPNKKKTDVLDCQHIQKLHSLGLLNASFLPDESTENLRTYCRHRLGLIDRKATANRRIQKFLKLLNLRLDIVVKDITGLTGMKIIRSIISGETDPQVLAKHRHYNCRKSEEEIAKALVSNGREDYLYCLRKEVKIFDFLSEEISELDERIGQVISNHIDSMEDVIDEAPSEKKHKRLNKNSLRTIDLNIASYQYFGGVDLLEIPGVSYSTVLTLMSEIGPEGLSKFPSSKHFTSWLRLAPNNKVSGGRVMSSKVQKGSNRLKIALRNAEYSITKLKGSPLHNFYKKIAFKKGGRKAITATARKLAVIIWNMITKKVSYQAKEKYLFLDQKRQQLAVLRKKLIKLGLDPNQHDVFSRPEYRERWLKKQLGDQGIK

SEQ ID NO: 315591 - protein, 413 aa, unidentified
MDVLHPRCCGLDVHKSSISACILLREAGRVQKPQRRFGAMTQELQGLAEWLRQFGVSQVAMESSGVYWKPVWNILEGQFTVVLANAQHIKNVPGRKTDQKDAEWIAQLLQYGLLRPSYVPCEIIRDLRDLTRMRASLSQEASRISSRIQKVLEDANVKLASVATNVLGKSGRAMLEDIISGEDDPEHLASLALGHLRVKIPQLRLALEGKIRSHHRFLLRRLVDQIQFVEHEIALLDERLEEIAQRRPGLAQAVARWDTIPGIDRVAGWALLAEIGDNMAQFPTAEHLASWAALCPGNHESAGKRLRGTTRQGSPWLCRMACQCAWAAARTKNTYLSSQFRRLAARRGKKRAIIAVAHTIIVIGYHLQKNQSNYEDLGGNYFDRIHSDGLKRYLVKRLQQLGHKVTLEPMQAA

SEQ ID NO: 315592 - protein, 410 aa, unidentified
MKVAGIDVHKKVLMVVVVDASRPEEKPARRRFVTMPSELHRLLTWLREQGVEEAVMESTAQYWRSVWLELEPHMRLHLAQAFSNRAPRGRKHDFKDAERLVRRLIADELILSFVPSGEQRSWRSLTRMKLQLTRDRVRLQNQIECLLEEMRIKLSIVVSNLLGASGLRILHALAHGETDPKRLAQLGGERLQCTEEQLVDALTGRAQPVHGAMLALQLERLQLIDQQMERLNSMIAAAMKPQQDAVMRLAEVPGLGVDSAQQIIAEVGAQAGTFASAAELTSWVGTCPGKEESAEQNRSSRSAKGNKYMRRVLNQAAHAAAAKKGSHFQIVFRRLLPRLGYQSAIWAVAHRLCRVVWKILHEGVRFIEKGAEVHPREKKKRAQMLARALRKLGYEVTITPLNQLVPKPAV

SEQ ID NO: 315593 - protein, 413 aa, unidentified
MQTLLECGCGLDVHQATVVAYVLVICRTGTVQKQLRTFGTTTRELLQLRAWLISQGCAHVAMESTGVYWKPVYAVLEGVELEIIVANAQQIKKVPGHKTDVKDAEWIADLLCHGLLRPSFVPPYPIRELRDLTRYRRKLVESRTAERNRLLKLLESANIKLSSVATDVFGRSGRLMLDALIEAKASLPEMAELAKGRMRSKIPQLELALEGKLQEHHRFLLRLQRSRLDAVEQDLAILEQHIREKLEPYAAQFALLKQIPGIDLTLAEVMIAELGVDMSVFQSASQLASWAGVCPGNNESAGKRKTSRVPKDNVYLKTALVEAAHAATRAKGTYLRDKFYRLKARRGYKRALVAIAHKILVSIYHMLSQSTAYNDLGDLYLDKLNNHQVTRNLVHRLERLGYAVTLTPKQSAA

SEQ ID NO: 315594 - protein, 392 aa, unidentified
MFFVGIDIGKNNHVASMMDESGKVVFKAFSFPNTSDGGHALFSKLASYSPSSDDFEIGMEATGHYWLSVYSFLFEKKFLLHVINPIQTDGWRRGTEIRKRKNDIIDSVLIADLIRYGQFVETRLADEDLFSLRSLTRFRTYLVESISDLKRKVVCVLDQVFPEYQSIFSDIFGKTSKEILLQFSSPIDFESVSSQTLAELLAKLSRKQVGPAKAAQLKAAASCSFGVTFAKSSFTFQLKALIEQISFIEKQVKETETEIAGIMEKLESPITTITGIGNITGAAIISEIGDISKFDSPRKLVAFAGLDATVTQSGEFEAAHNVMSKRGSPYLRKAIFQAALVAAFKDPVLSAYYQKKRAEGKHHLTCIGAVARKMCNIIYAVVKNNQPYVPKA

SEQ ID NO: 315595 - protein, 426 aa, unidentified
MDQVVERPAALDVHKEQVTACVRVPGEGGERREEVREFKTTVRSLLGLRDWLSESGVTHVAMEATGVYWWPVWAILEDGFELLLCNAAHVKNLPGRKSDVGDSQWLCRLLECGLLRSSFVPPKPVRELRELTRRRRTLVRDRSQETNRLHKALEATGIKLDCVATDILGVSGRSMLDRLLAGERDPAVLAGLAKGRLRVKNAALVEAFEGVRFGSQNALLIGGILRHIDFLDAEIAALGDAIETHLAAAREDDTPPFEPAVWLLCSIDGIQARTAEMLLGEFGTDTTRFPSDAHFASWAAQCPGNHKSAGKRQSGRTRKGPKWLDGALHDAAMAAIWVKDGHFARKYRRIKARSGHKIAIGAVKHAILIAIYHMLKNGELYHPPIVHPDAERKQRERATQRLLAQLERLGHTVTLQTATAEAAVAP

SEQ ID NO: 315596 - protein, 414 aa, unidentified
MDVLHERCAGLDISKKDAKACVRTPSTKRRGSFTTDTTTWGSTTNAVLALRDHLLAAQVTLVVIESTSDYWKPFYYVLAEGLDVILVNARQVKNLPGRKTDVLDAAWLGQLGAHGLVRPSFVPPEPVRELRDLTRARTTATRERGRVVQRLEKLLEDTGIKLSAIASDIMGVSGRAMLEALIGGEGDPQVLADLAKRKLRNKIPELTEALTGRFRAHHAFLTRLHLDHYDQLTTMIDQLTGRIEEAMAPFRGVLDLLDTIPGINQPTAEVIIAETGGDMTRFASAKHLASWAAVCPGHHESAGRTKNTKVRPGNLYLKGALGLAAFGAVRTKDTYLQARYKRLTARRGPLRALVAVEHSIITAIWHILTDNVAYQELGGTYFTQRDPERATRRAINQLNQLGYTVTLNPRENAA

SEQ ID NO: 315597 - protein, 387 aa, unidentified
MAQVNDLSRSLTAFDLISTLVVVVEMSKASWLVSGAVPGVERQPLKKLEPDATALLRLIERWRNEAVRAGRPISRIALAYEAGRDGFWLARWLIARGIEAHVIHSASVAVSRERKRAKTDRLDAAMLMRVFLGWLRGERGHCGMVAIPTMEEEDARRPSRERESLINERSRITNRMKSALARLGVRGFKPHLRKAPERLAGLRTAEGTGLPANIIEEFRRDMARLALVREQINSIEKTRAERLKRAPDTGPHAMVRLLARVIGIGIETADMLVREILSRKLRDRRAVARYAGLTGSPDESGLKRREKGLAKAGNARVRRGLIQLAWRFLMFQKDSALARWYRTRTEGPSGARKTTMIVALARKLLIALWRLVTTGEVPDGVELRPAG

SEQ ID NO: 315598 - protein, 331 aa, unidentified
MLINTYVGIDVSKLTLDVFIRESKLHKQVKNNLSGFNSLLKWLETTLQSLDTVLVCFEHTGLYSLPLALFLEERNMHYSMISPLEIKRSMGITRGKNDLIDSKRIAEFAFRFKDKVSETKLPAKDIRKVHSLLTLRDKLVTNMKGYAMTYNETLRTMRKEDFPELFSTYENMVASLKAEIKKVENAIKTILKNNLQLWTSYKLVTSVKGIGFIVASYLIVYTYNFTRFDTWRKFACYSGIAPFDYQSGTSVRGKTQVSSIANKQIKTMLHLASICAIHTDAELREYYHRRQTEGKTKMAVINIIRNKLVSRVFAVIKRGTPFVDIKKYAMS

SEQ ID NO: 315599 - protein, 338 aa, unidentified
MTIEILSIDIAKNVFQLHGVNQAGRPILRRRTMRDQLLPLVAQIPSCTIAIEACTGAFYWQRKFEELGHQVRIISPQYVKPFVRRQKNDGNDAEAICTAARQAHMRFVPKKTIEQQDIQALHRARQRMVNHRTAVVSQIRGLLLDRGFAFPKSITRARRMIPEILADIDNELTALAREAIGELHDLFMDLDRRIASFDKKIDRVFRSNEACQRIAKIKGVGPKTATALIAAIGDGSEFKNGRHLSAWVGLVPRQHSSGDRTVLLGISKRGSQHLRSLLVHGARAVVRTAARKTDPFNTWVNQLHQRRGFNRATVAVANKNARIIWAVLRSGECYHAAG

SEQ ID NO: 315600 - protein, 322 aa, unidentified
MSQPNPLCVGIDVSKATLDIAASSDVAQFTVSNDSDGFNAIITGLRRHSVALVLMEATGGLEVAVACSLQAEGFEVAVVNPRQARDFARAMGYLAKTDRIDARVLTQMAEVINRHPERKRFIRALPDAERQALAAMVVRRRQLIAMLVAERNRLYPSHPQNKKSINTIIKALEDELARLEKDMNSHIRNHFKEIAERLSSIKGVGTMTVSAMLAEIPELGTLSRREISALIGVAPVNRDSGTMRGRRTIFGGRAGVRSALYMAALVATRFNPVIKTFYVRLLAAGKAKKVALVACMRKLLTILNAMLRKNEEWDESYHHVAP

SEQ ID NO: 315601 - protein, 342 aa, unidentified
MGRVTTIGLNIAKSVFQVHGIDAACEVVLRRRVMRARLLAFFAKLAPCLIGIEECATSHYWARELRKLGHDVRLMPPSYVKPYVKRQKNDTADAEAICEAVTRPTMRFVEAKTPQQQSVMVMHRTRLLLMRHRIQLSNAIRGHMAEFGLVAPVGRLGLLALIDTLHDETDDRVPAEARHCLQMMAAQLRLVNAQILENDRRIRTSARATDVGRRLMGIPGVGPVLASAFVASVPDPAMFKSGRNLAAWIGLVPRQNSSGGKERLGGITKQGNRYLRQLLFVGAIAVIRYAERHGTRRPWLVRLMGRRPTRVAATALANKTARIIWAIMTNGQTYREPQLRPA

SEQ ID NO: 315602 - protein, 355 aa, unidentified
MHHTQYDPARVCVVGIDLAKDHCDAVGFNERRAPVFEWPRISYPELMNRLAQLPPAAVLMEACNGAHDKARRIADLGHDARLVNAADVKAVRNTRHKNDRRDARYIATLFFLPDIKYVQVKTSAQQDRLLLIREYKGYQRIRIELGNRIHSALEQYGIPTRQGMQRLACHLTEYLDERAEKITPALRETVQRLLESWKRALADEEAAKRRLEAQAARDADAKRLMTIPGIGAVIALYMQAHIGNPHRFKNSRQAAASIGLVPRQYSTGGRDTLLHISKRGPTALRSALIQGAGSVYIWSEKLKGALGAWVCKLKDSRKKYGVIICAIASKLARICWRILRDRTVYQPNWQAAHSV

SEQ ID NO: 315603 - protein, 339 aa, unidentified
MSRYVGVDLHKNMFVASFYDADVGEHQLGKFGLKDIPKFKRQLKKTDILGVECTTNTRYFVEQIEQTVDSVKVVNPSQFRVISRSVKKTDENDARVIAEFLSKDMIPEVRLKDKRLSELSSLAHTRDKLVKLRTALKNKIHNILSAYGIVLKKEQLSSDKALDKVLDFRVSETARIELEVMVAQIKNLNEGIKKLDSELEDRGKDLPGHKNITSIKGIGNKSGTVLLCAIGNINDFESEKKLASYFGIVPRVSNSNETMHQGRITKHGNKLARTTLVQCTLVAIRYSPYLRAFYDRIKAKKGSGKAIIATSKKLLGIIYQTLKNNWVFEDFPNFVLKSA

SEQ ID NO: 315604 - protein, 366 aa, unidentified
MEHIAIDLGSKESQVCIRGADGQILEERRITTRPATLRHYLERRPASRVIVEAGAEAFWVAELAQEVGHEVRVVPSTLAPALGVGERGLKNDRRDAAVLSAASCRVELPSAHIRSQQSRALQSRLGLRDAAVRARTGLLNVIHAHLRTTGERVRSGASRTLVNRVRERLGERAAMLEAVFASIESLNVSIAAMSKTLSAEAKHDELAERLQSVPGVGPFTALRFIATVDRVSRFRDASSVTSYFGVVPSEHSSGEQQHRGSITKAGSAAMRALLVQAAWAALRCRRSDPMLQWARRITQRRGKKVAVVALARKIARILFALWRDGSRYNAPRAAVAALQNTAPPRCMAPEGPQRPRLRIIALDAST

SEQ ID NO: 315605 - protein, 345 aa, unidentified
MKIIGCDLHTRYQQIAMLDSDTGEVEERRLEHQNGEARAFYAALTGPVRVGIEATGSTPWFERMLRELGHELWIGDAGRMRAMVVRKQKTDTRDAAHALDLLVTNRFPRIWMPSVEERDLRQLVWHRQKLVGMRSAVKNQLHALAMGQGVCRRKQLFTAKGRQELEGLALGPWASYRRQELLQLLDQLEQSLAKLDQAVEQQANREPLAVRLMTHPGVGPVTSLAFVLTIGPADRFPGSRQVVSYLGLNPQEHSSGGRQRLGAISKQGNPMLRWLLVEAGHTAARFDPQLRRLYQRLKFRRGAAVAKVATARKLAVRMYWMLRNPTDYAQLVRMQGSPRGSLVGN

SEQ ID NO: 315606 - protein, 339 aa, unidentified
MCRFVGVDLHKDMFVVSFYDADAGEHQLESFKLEKISAFKKRLKKTDVLGVECTTNTRYFVEQIKGSVSSVKVVNPSQFKVISKSVKKTDENDARVIAEFLSKDMIPEVVLKDKRLSELSSMAHTRDKFVKLRTSLKNKIHNILNSYGIVLKKEQLSSDRALDKILDFRVSDTARIELEVMIAQIKNLNEGIRKLDSELEGRGKDLPGHENITSIKGIGDKSGTILLCAIGDVNNFEDEKKLASYFGIVPRVSNSNETVHQGRITKQGNKLARTTLVQCTLIAIRYSPYLRTFYNRIKARKGSGKAIIATSKKLLAIIYQTLKNNWVFDDFPNFVLKSA

SEQ ID NO: 315607 - protein, 365 aa, unidentified
MWEAPVKFQRTSVGLDVHARSVVACGLDGQTGEVFERRLTPDHGEILEWIRSLPGPAAVVYEAGPTGFGLARFLIAAGIDTVVGAPSKLQRPSGDRVKTDARDARHLARLLHLNEISAVSVPSVEQEAARDLVRAREECRGDLMAVRHRLSKFLLRQGIVYYGGEAWNKKHELWLQTHRFDTPGLQLAFDAPFDAMLATVDRRDRLDAAITAMAADSAFTPVVTRLGCVRGISTLTAFGLATEIGDWHRLSGRSIGAYLGLVPTEYSSGSTRVQGGVTKTGNSHARRLLIEAAWHHRAPYRPGRHLRRRWETASAAARARGQAANRRLHARWVRFDDRKKRSVVANAAIARELAGWCWSLAVLED

SEQ ID NO: 315608 - protein, 381 aa, unidentified
MTTAATHNEQSPTTAATLFVAFELSEKTWKLGFTIGHGQKPRERTVAARHQARLLQEVAQAKKRFGLPETAPVVSCYEAGREGFWLHRFLQAQEITNYVVDSSSIEVNRRKRRAKSDGLDVRKLLSMLIRYEYGEREVWRVVHVPSVEAEDQRHLHRDLETLKHERASTTTRIKGLLSSQGIRLTSLHKFPEQLDALRLWDGSPIPSGLRRRLLRVYAHHEFLSQQITELEAERRALLESSQDASIEKVRQLMHLKGIGINGSWLLIMEFFGWRDFTNRREVGGLAGFTPTPYQSGESAREQGITKAGNRHVRWMTTELAWSWLRYQPESALSCWFRERFGGGGKRLRRIGIVAVARKLLIALWRFLKTGVLPEGAVLKEA

SEQ ID NO: 315609 - protein, 320 aa, unidentified
MLSFCGIDVSKDRLDVMVLPDEYSSSVPNDPAGWAILVEQLRGFSITAIGIEASGGYERGAVRSLQAAGMPVRQVNPFKLRQFAKASGVLAKNDPLDARMIASFVGIMPTRPAQRTMPAAEQLVEMLAVRRQLSAEKTAAENASRLLEDLMLQRLSRRRIARLAADIELLDKRLVEIVATDATLAHRYRLLTSMPGVGPVLACTLIALLPELGGMSRKQVAALVGVAPYAFESGTLKGRRCIWGGRANVRQVLYMAAMSASNWNPALKLFHDRLKGAGKLPKVVIVAVMRKMITTLNAMVRDDIAWADRLSGRHSVTTAR

SEQ ID NO: 315610 - protein, 338 aa, unidentified
MIGVDLAKSVFQIHAASMTGQLKFRKKLSRQNFPKFMADQPPAVVVMEACGSAHYWAREMVRLGHEVKLIAPHYVRPFVKRQKNDAADAEAIVIAAQRPEMRFVEPKSAEQQGRAILFRARERLVHQRTELVNALRAYLYEYGHVVPQGIHQIKRIETILEEPHSDLPGLMREECRDLLDQIAALTTRIEAKTVKVKALSTKREMTRRLQTMPGVGPLTALAIEAFAPPMENFRCGRDFAAWLGLVPRQFSSGGKERLGRMSKAGQADIRRLLIIGAMSRLNWRGRKSLPEKSWLARMIARKPRMLVAIALANKMARTIWAMLTKKEDYRVPVQAKAA

SEQ ID NO: 315611 - protein, 415 aa, unidentified
MMEQRNKVCGVDIHKRFLIATILSRDGTKIQKRYSTDIDDLFGFRDWVLENNCDCVAIESTGVYWYPVNAVLENKIELILANARQIKHTPGRKTDSIDSEWIAEVALNNLIYPSRIFPKEERDLRRLTRTRESLVKMRSQIKNQVHQGLESCSIKLSSVLSDNFGKSGRHILDGLIKGENIDRIIEEIPSKRVKNNEDKIRAAIRTGLDETQIFLIQSHLNTIDSLTKKLDEIDSEIKDKISGRKKDLQIAMSVPGIGFTAAATILAEIGNYRDFSTSDKLASWCGIVPNVYQSADKLITGSITKQGSKHIRWMLVQVAQAALKKRESRFRRFFLRIKARKGHNVAVVALARKILCILYHLLMNQEMYQEDGVTKSRQSKIDWSSARIDKMSLQTMIEIIAKAGYEVKKIKGQGG

SEQ ID NO: 315612 - protein, 355 aa, unidentified
MNSEKYIGLDVHQATISVAVMDCRGKVVMESILETKAATLLEFLAGLRGTLSVTFEEGTWAAWLYDLLKPHVQKLVVCNPRKTALLKDGNKNDRIDARKLAELLRLDNLKPVYHGETGVRMLRELARSYLTLVKDLTRVMNRLKAMYRSWAIPCAGRDVYYTRHRAEWLSKIREAGVRRRAEHLYQQLDMLQHLRQQARRELLAESRKHAITAKLRQIPSFGPIRAALAVALIQTPHRFRTKRQLWAYSGLALETRTSGEYCYVRGQLRRSKKQVSIRGLNKDHNHDLKGLFKAAATRASVQPGPFQDFYQRSLAKGIKPTMVRLTLARKIAAITLTLWKKGENFDVEKLKSQAA

SEQ ID NO: 315613 - protein, 351 aa, unidentified
MTDPILAIDLGKYKSVACLYHPATAEAEFRTLDTSRAELTRLFARARPAVVVIEACTLSGWVHDLCGELGVPCRVANTAAEAWKYKHAKRKTDRDDALRLAQLAALGQLPEVVVPAKRVREWRALIAHRQALVGQRVAAQNRVRAVLVGQGLPAPRGAKAWTAAGLAGMAQFARPLAQCGPDELWRGLLDLALTAYRQAEELAAVAEARLDAIGTADARVRLLDTMPGLGPRTAEAVVAHLGDPKRFRTGKQVAAYGGLVPRQYQSGEDDRRGRITKRGPAVLRKLLVQCAWAMLRYNRWARAVFDRLSRGRARRKQAVVALARKVLVRCWAMLRDGAAWRGEPEPVVVAA

SEQ ID NO: 315614 - protein, 429 aa, unidentified
MDDVDDADLVVERVAALDLGKAGLEACVRVPNPQRPGRRMQELRGYATTTAQLLAMVGWLRHWHVQRVVMESTSTYWKGVYYLLEAEGFDAWLVNAREVKNVPGRAKTDRADAVWLAKVAERGMCRPSLVQPPEIRRLRDLTRYRRALVQDRTREQQRVEKLLEDAQIKISAVLSNLHGVTGRAMMDALIAGERDPRTLAGLAKASARKKTDRLEEALRGFFTEHHATILQMMLDNSDRISAQIAALDARIEEAIGPFSRPAARLADIPGVSTVAAAELIAEIGVDMTRFPSAAHLVSWAKFCPQIHQSAGKSTSKGRAKGNPWLAGTLGRIAFVNSRTDTFLGARYRRLARRRGKQKALVATGNSVLTVIYHLLSDPDARFCDLGPGYYESRINKHRRARDLATQLQALTGQHIAIRDGKAVITDTAA

SEQ ID NO: 315615 - protein, 318 aa, unidentified
MTQDLFIGIDVSKATLDIAVSPGEHAWSVDNTEAGIEELIARLRHFGTPKIVLMEATGGFERRPLVMLGAAGLPVTAINPRNVRDFAKSIGLLAKTDRVDAKALAFFAEKIQPPCRPLPDAQTRALQDIIVRRRQMVDMLTAERNRLAIVENPKVKRELLQHIAWLKKRIHIADYDLDQAIKDSPAWQPKSDLLKTVPGVGPVTTSTLLALLPELGTLTNKQVAALAGLAPFNRDSGTIRGRRCIWGGRASVRNVLYMATLAATRFNPTIRAFYQHLCKLGKLRKVALVAAMRKLLTILNAMVRDQTPWRSNNPEISS

SEQ ID NO: 315616 - protein, 399 aa, unidentified
MNGTQACIAIDVSKGISHVCAYVSKDSMVQKPIEILHDREGFKMLDDLYHRLNTGEGSPPIFIYETTGIYHRPLKRYLKDKQYPQTEVSPLLAAKHRKNSGIRVPKSDKADPKSLARLFYDVEMPLYSNSNEMYYELLQLDRNYQALTKLLVTCKVHFKEKLDILFPRFEEHFGNAYLTYFLNLLEAYPHPELIHRKRCDAIKRRLIEDGLQSSRAQHIVVELKDYCQNCISGTSAESVDTQILKWFIQQIRFYTNERNRIIEQMTSIAKELLLFEQLKSVPGIGPLLSVRLIAELGDLSRFRNVRQLTAYAGLDPLVYQSGKNDGNHLSISKKGNRYLRSLLYQVICISANVKTDHPIKEYVQKKKQTHPVKSARIAGCAKLLRIIYSLYHSGEVYTI

SEQ ID NO: 315617 - protein, 346 aa, unidentified
MKNLKYGIGVDIAAQKFDGCISVINEEQKTTILSTGSFENSSKGFMLMLKWVDKHCKEVLPTIFLMEATGIYYEHLAWFLYERDKSVVVILANKAKKYKESLGLKSKTDSIDAKGLAQMVCEQYLKPWKPTSKAIYQLRLHTRQVERISSHITQFKAQLHALEHCMYRDLVIEKMTKANIALLEKQKLKLEKQIQSIVDADSALKERFEKVCKIKGLGTMTLAVIIAETDGFALIQNHSQLVSYAGYDVVENQSGNRVGKTKISKKGNSHIRRALHMPALNMVRYEQTPFVQLFGRILERSKIKMKGYTAVQKKLLVLIYTLWNKNEEYDPKYHLKTAGVLQEALV

SEQ ID NO: 315618 - protein, 457 aa, unidentified
MSRKSKRTRGIEEAHPFSSLSQVNLHAAGVDIGAIEIVACVAGDENTQIVKAFGNYTVDLQTLAQWMKDHQVKTVAMESTGVYWIPLFEELERQGFECLLISSRSLRRVAGRKSDISDAQWIQTLHSYGLLEGSFRPQAELVALRTLLRHRNQLVEHRSPHVQHMQKALLQMNVQLSQAVSDITGVTGQTIIRSILAGVRDPQTLAALREPGCKKSEEEIGKALTGTWREEHLFILKQSVAMYDFYTQQIHVCDDEIERLYGMTRPDWEAGEVQPLSWRKRNSHSKNIPHNSEAIRKHLKRISGVDLSVVDGFGVSLAQTVIMEVGTDMNKFPDEKHFCSWLGLAPKHEISGGKVLKNNTLKTKNRAGQAFRMAANSVKQADCVFGVMYRRLRARLGPAQATVATAHTLARVVYRMLKFQVEYEPLSVNQYQKHYEEQQIKYMRKKAAKFGFRLVPA

SEQ ID NO: 315619 - protein, 355 aa, unidentified
MLYLGIDQHARQITISLRDEHGDVLQARQVSTQPDKIHAFFQQLTRERLHKDEQFVAVLEVCGFNDWLIRMLKDYRCHKVILIQPDERKKRKTDRRDAAALSELLWVNRDRLLHGKPVRGLRQIDMASSTDQENRRLTTLRKEAGQARTRLVNKIKHMVRRHNLQWEMPTKRLPSKSAIAWLKQLVLPEIDRLEMDQLLADLEQIQQRLKELEGVIAKRCGVSKEAVLLSSIPGVAHFTATSLACRVGRVERFPRSHSLANYWGLTPGCRNSGENNQRLGSITKAGSAMARWLLAQVTHKVLRKDARLREWFKRLKRRRGASIARVAVMRKLATIIWHMLSKEKSYAECRAHVAA

SEQ ID NO: 315620 - protein, 344 aa, unidentified
MSYFAGLDVSLRSVSICVIDADGKIALERTVPFEVEDVIACLRSVDGTIEQVGFEAGVMSQHLYHGLVAADFKTICMEARQVAAALSAMRNKTDKNDARGIAQVLRSGWFSEVHIKSRDSHYHRTLLTSRKTVLRKCIDLEQEVRGLMRVFGVRLPTPLSHHKFEQTVLPIIEADEQIAYALMPMVDAWRSLYSSFLELDRRVKSTARKDPVCLLLMTAPGVGPMTALAFKAAIDDPARFKSSRIVGAHFGLTPRRFQSGEKDQTGHISRAGDADVRAALYSAANSLLMRTKTPSHLKTWGMRLVRTRGRRRATVALARKLAIILHRMWADGTEFRLTGMEVQT

SEQ ID NO: 315621 - protein, 362 aa, unidentified
MNQEETSRRFYTTQHPFYCGIDLHARMMSVCILAQSGEILVHRTMKTDPETFLKAIAPYRQGMVVAVECLCTWDWLADLCADAGIPFVLGHALSMQAIHGGKAKNDQIDSHKIAALLRGGMLPQAYVYPAKMRATRDVLRRRMPLAHKRADLLAHVQNTHSPYTLPAMGTKIASKANREGVAERCADAAVQKSIAVDLALITSDDALRRDGELPIVTTAKHHDAHTLYLLQTVPGIGTILRLVLLYAIHDVHRVPRVQEFVSSCRLVQCARASAGTRYGTSGATLGHAHLTWAFAAAAVLFLRDHPAAQKYLARVEKKHDTGHALTILAQKLARAVSDMLKRPGAFDTEKFFQRYTIREGSG

SEQ ID NO: 315622 - protein, 372 aa, unidentified
MFYLAIDQHLKQLSVNLRDEEGNVVWRRQVSTKWDKVRTFFDNLRTGCASGGGFVAILEVCGFNDWLLKMLRQYGCREIVLVQPETRDKQKTDRRDANALGELLWVNRHRLLSGKTIQKVKRVTIPNEQQAADRQLTELRRKTVDGRTRVINRVHRLLAKHNLHQECPTKGMKTKRARKWLAQLELSTIDRVELNQLLAAWSMYDEQLEELDQHIRARQAEDETAQVLATIPGASAFASLALSCRIAGGIEQFARGSSLSNFWGLTPGCRNSGQNNKRLGSITKAGSRLARRILGHLVLHVLREDAWMRNWYQRIKRRRGTKIARVAVMRRLTTIIWHMVKYNEPYCKGGPPHVQRQHRVMQTLREEMTQQA

SEQ ID NO: 315623 - protein, 358 aa, unidentified
MREYIAFDSHKHYTLMERQDAQTGRAVQQRLEHQRGALCAGLRECEPGSAVAVEATGNWYWIVGEIEAAGLHPLLVHPRKAKLMMGMINKTDQLDVHGLNRLQQNGTLPTVWIPPADLRDLRELTRTRLVLVASRTRIKNRLLATLAKHGLAIQASDHFGVGARQQWAALLPLLPPQTRFVTEQLLSQVDFWEQQIQQQGQRLELLLAITPAMQRLKTLPGIGTILAASIALEIGDITRFATGEHLASYAGATPRVHSSGDKTRYGRLRADVNRYLKWAYVEAANAVVLQQRRWSQRHVVRLYRRIADRRGHPKAIGAVARHLAEASFGVLRRNEDYREPTTQTNLGDPKPAAARLGA

SEQ ID NO: 315624 - protein, 365 aa, unidentified
MKILAIDLGKYKSVACNYVTATGTARFATVVTHANEFDRLLSQESPDLVVIETCSIAGWVHDLCCQRGVKCQVANPSSEAWKWKNVKRKTDRDDALKLAQLAALEQLPTVYVPAPETRQRRALLKYRQSLITRRVAIQNHLRAIAQRQGILLDRGSRAWTAAGFEVIQQIAKPLEQCSADELWRGEAALELQALEAVTKLLREVERKLEAFAASDESVKLLRSIPGVGRCTAEVVVAYLDNPQRFENGRQVSAYAGLVPKQFQSGETDRQGRISRRGPSLLRKVLVEAGWILLRYNPWAQRLMLRLSRGQGHAESKRSWRWRENCWCVAGPCCGTARNGANRRQPRPPRSINHTRQSYVQKNLSA

SEQ ID NO: 315625 - protein, 348 aa, unidentified
MNNNITIGMDLGDKFHIAVVFDSDGNELEIAKVINTKTGIRKFFKQYKSAIVAIEAGTHSPWISRLLIEMGLSVYVGNPRKLRYIWDSIDKSDARDARMLGMVCRLEPRLLHPIHHRSSQAQADMTTIKSRDILVKSRTLLINHIRGIVKANGERLPKCSAASFANKCVSFIPKELWISMAPLFEMIIQLNQQIKELDNIIKQLSEEKYPETKLLSQVTGVGPITALSYILYIEDPARFSKSRQVGPFLGLTPRRDQSGEMDKQLSITKAGNTYLRQLLVGCAHYIMGPFGPESSLRLHGLAIAARGCKNAKKRAVVAVARKLAVLLHRLWVSGDTYQPFYCRNKKVA

SEQ ID NO: 315626 - protein, 342 aa, unidentified
MKITTVGLDLAKNIFQVHAETADGQVVFNRALRRGQVLAFFERLEPCLVGMEACATSHYWAREISKYGHEVRLMPPTYVKAYVKRGKSDAGDAAAICEAVTRPTMRFVAIKTVEQQALLSQHRARQLLIGQRTQLANMIRSLIGEFGYTVRRGVNHVTSFAIEARDGTLTSLPDCVRATIALLCQQFLDLHAQIARLDKMIFAASHQDKRVRLLQTIPGVGPITASAIVATIGEPQRFKSGRDLAAWIGLTPLNKSSGGKERLGRITKMGDRYLRRLLVTGMTARIGHARRQPGCADPWVIRLLERKPTRLATIAMANKTARIIWAVLTRQEPYRAPQAKAA

SEQ ID NO: 315627 - protein, 341 aa, unidentified
MKNKSFIGIDISKNVIDVSIFCEETPIKDFSHDVFNNSRKGFGEMCTWLKKNHVVLSNCLFGMEFTGSYSMELEKFLNARNYQFCMLSTHVVKHYPMGPKDKSDKIDSAKIADFLYRYNGTECVKPYNMSDKTMQRLKALMNERRFLVEQRTCFMNRRQLCTTKEDTQLYDGYIKKLSHDIENIELEEQKLLATDDSLLSTYKNLLTIPGIGFVNAINVIVITRNFTAFETARQYASYVGVAPHFRTSGTSVKWRPRPSARCDGQAKADLSMAATVVVQYDAELQSFYNRKLGGKQDSDTKRKALNAVKFKLVLRMFAIGKQNRKWEPLDSKSSNEKLAIS

SEQ ID NO: 315628 - protein, 353 aa, unidentified
MKQVRTLSFAGQNIYCGIDVHKKGWSVCIRDESFELKTFSQPPDPVVLADFLRRNYPQANYHAVYEAGFSGYWAQRDLSRQGVNCLITHAADVPTSDKDRQQKTDKVDCRKLALSLSNKQVEGIYIPSEDQVDCRGILRTRQQLVNDQTRYKNRILSWLNFYGLNIPEGYKKSSHFSHKFISWLEQIELKSRARTSLMLKLNTLKLIRGQLLQANRYVRQLAKDQYERQVDLLRSIPGIGLINAMTFLTELGEIKRFNMDSLCNYVGLTPNIYSSDQTVRMKGITHRCNHVLREALMESAWCAVRNDPALLMAYKQYVNRMHYNKAIIKVAKKLLSRIRFVLLNQARYVQGVV

SEQ ID NO: 315629 - protein, 424 aa, unidentified
MKFKMQNKQNQLIERISVKHLVVGVDIAQQLHVARAVNFRGIVVGDPLTFKNNEEGFASLLKWIKNLQRLNNLDEAIVGMEPTGHYWINLSKWLSNQDIEVVTVNPHLVKKNKENRDNTQSKSDKKDALVIADMVKNGYYSEVRYASESFEKLRVLMSNRDVVVKRFVSSINQLNRWVDIVFPELRQVFKDIKAKGAIATLRLFPTPMELETMQPHDVITGWKSIMKRQPGLKKAMLLLQVARRSVGTRQALDAYKFHLEQLLEEYDLAITQLERVEKQVTEELNKIPFAKKLLTIKGISEISLAGILGEAGDLSNFSHGNSLLRHAGLHLAEASSGKWKGQIVISKRGRSRLRRFLFLATMSLVANNPEFKALHTHNVKVKKMKKMKSIMKIIGKLARVFVGISRRNESYSADKLKPLSTMAA

SEQ ID NO: 315630 - protein, 342 aa, unidentified
MSKVVKNFIGVDISKKSIDVAVIVDSNRSEIKYQKFTKGKSSYEKMVRWLKKLKVGMDEQTVFCMEYTGLYNRGLLGFLSQQKALIWVEMAIQIKRSLGMQRGKNDKVDAMRIAAFAYKNREEIKVWESVDETMYKLKDLLCQRERIIETKKRLEVPLKELEEEDLKEEAKELAKFQQPAIQGVEKSLSNIEKAIKEIIAGDEKLQKLFKRISSVTGVGKVIAWYVIAFTNGFKRLTTGKQLACYCGVVPFEHTSGTSVKGKPRVSGMANKKLKTLLHMGALAAVTYDGELKGYYERKLKEGKNKMSVLGAVRNKLILRIVAVVREEREFKARDKKDVKKVA

SEQ ID NO: 315631 - protein, 432 aa, unidentified
MDQIVERPGALDVHKASVTACVRVPGHEGGRVQEVREFKTTVRGLLGLRDWLAGHGVTTVAMEATGVYWKPLFAILEDDFELLLCNAAHVKNVPGRKTDVGDAQWLCRLLECGLLKASFVPPKTVRELRELTRRRKTLVRDRQREAGRLHKTLEDTGIKLDCVATDILGVSGRAMLKALIDGTRDPAVLAELARGRLRAKLPDLREALEGRFTTQHALLVGGILRHIDFLDAEIDALGTAIEAHIDAQSKQAREAKQAGEDTGAENPFDSAVQIACSLDGIQQRTAENLIGEFGTDMSRFATDKHFVSWAAQCPGNHESAGKRRSGRSRKGPEHLNRALNDAAMGAIRVKDGHFARKYRRVKARSCHGVALGAVKHAILIALYHMLKTGELYKPPTPNPDAERRARERATKRLLAQLEGLGHTVTLQGAAAA

SEQ ID NO: 315632 - protein, 405 aa, unidentified
MYNAVGIDVSKGKSTVAVLQPGGTVVRKPFDVTHSSCELKSLTDYILTLDGETKAVMECTGRYHEPILRALSDAGIFVSAVNPHLIKNFGNNTIRKVKSDPADSKKIARYTLDNWAELREYSSMDTTRAQLKTLNAQMAFFTKQKVAAKTNLISLLDMTYPGVNDLFDTPSRDDGSEKWVDYAASFWHVDCVRKIGLKAFTERYQAFCKRHGYNFQKSKPEELFNASKELVAVFPKEQEYKDMIQMSIRQLNVISANVEHTRQEMNRLASTLPEYSTVMAMRGVGATFGPQLIAEIGDISRFNHREALTAFAGVDPGVDESGKFKSKSNNASKCGPSRLRKTLFLIMSSLIQTKPIDDPVYRFLDKKRSEGKPYHVYMTAGANKFLRIYYGKVKECLRTQSETKN

SEQ ID NO: 315633 - protein, 424 aa, unidentified
MSKKNSSPAGLQALYARVCGLDLHKKLIVACVRVLNTKDGTVQSTLRKFGTMTPDLIELRQWLTEQKVTHVAMESTGIYWQPVFNLFEGHFKLLLVNAQHLKKVPGRKTDMKDAEWIAQLLQCGLLKASFVPDRQQRELRDLTRQQTKLVQQRNAVDNRIQKVLETANIKLGSVASDVLGVSGRKMIEGLIAGEKDVTALAELAQRQLRGKIPELQRALEGELTDHHRFLLRQLLEQYDFLEKKIASVSERLGAVAPSSFRAAVEQLDAIAGVGERGAQALLAETGTDMSRFPTHKHFASWAGQCPGNHESAGKRRSGKTPAANRHIDAVLTEMAHAAERTKNSYFKSQYHRLAGRRGKKRATGAVKHSLLVTVYFMLRDNKPYKDLGVDYFNKLNPQQRIRYHVRKLQELGQEVELSPMADAA

SEQ ID NO: 315634 - protein, 483 aa, unidentified
MMTVSNKSRESTSPTRRRSGSRKGRRGLCLEDRPVHNPNAAGIDVGAREIFVAVPAGRDEQPVRVFNTFTEDLEQMAKWLVGCGIATVAMESTGVYWIPLYEILERHHLELCLTDARHMKNVPGRRTDWHECQWIQYLHSVGLLRAAFRPPEQVCAVRTLMRHRGQLVEMASQHVQHMHKALTQMNLQIHHVLTDITGQTGLAIVDSILCGERDPDVLAGLRDPRVKASPETVRKSLVGTWRMEHLFTLKQSRELYRAYQTEVAACDQQIEQLLGQFSPRVDPTERPLPPDRKKRQPRKRSRKGEPAKPTTDLDLRTEAYKLFGVDVTQIPGIAVALALALFTELGRDLSKWPTSSEFASWLGLCTDNDKTGGRVVFSRARRGKHRAGQLFRLAAYSLHSASGPLGDYLRRMKTKLGPRAATTATAHKIAVIFYTIVRNQVEYDETIWAARDAARAQRLEAKLRRQAKGLGYQLIPIPEQPAA

SEQ ID NO: 315635 - protein, 342 aa, unidentified
MQITTIGLDIAKNVFQVHGIDAKEKVVVRKQLRRNKVMGFFKALSPCLIGMEACATAHYWARELTKLGHEVRLMPPKDVKAYLKRNKNDAADAAAICEAVRRPTMRFVRVKSEEQQGQLMQHRTRDLLMRQRTQLINALRGHLAEFGIIAAKGDAGLKELLAIVADDRDERLPSDARASVIVLAAQLEAAQTMLRSLDKRIMKQHRANEASRRLESIPGIGIIGASAIAATVSDPMVFRSGRDFAAWIGLVPRQDSTGGKQKLGPISKQGDRYLRRIIIIGAHAVLRRAKENPHKYPWLTQLLARRPFKVVAVALANKMARTAWALLAHGDTYRAPELVAAA

SEQ ID NO: 315636 - protein, 370 aa, unidentified
MLDTTTFIGLDVHARSIKAVSLDVMTGEVRAATFGYDAGAVAGWVRSVDPRARCVYESGVTGFDLQKRLSGLGVDCVVGAVSKMIKPSADRRRKNDRNDAEFLARMLSVGNVVEVWVPDDECEAARDLTRALEDARDDLSRSKQRLSKFLLRHGLAFDERTPTGRRKGNWTRAHWSWIESIRFAEGADNEALAYYVDAVRRAAEDKARLEGLVEAETRKPRWRRRVDSLRCLKGVDTATAADLVFEAGEFSRFRNARSFAAWVGLTPSEHSSGESDRRGAITKAGNKHLRKALVEAAWHYLTCSARPKEPARGQAPDPGARRHAAKGVRRLVERRGTLLARGVHNNKANVATARELACWVRAVGLMAEEA

SEQ ID NO: 315637 - protein, 355 aa, unidentified
MMVVGVDPHKETHTAVAVDELGRKKAQLTVRARRDGHREVIGWARDVAPAGRVWAVEDVRHVAGGLIRELLAAGEMVVFVPPKLMAGVRRGGRERGKSDPIDALAIARAALREDAHLPAARLDEQVLEVRRLVDHREDLVAERTRVINRLRWMVHDLAPELAPAPRALASARGRGALEAGLRALPDSAGRRIALSQLARITALTAETGQAERELASLVRRLVPVLLQVAGVGVITAAKILGEIGDIRRFRSLPAFARHNGTAPIPASSGTGKDGPHRLNRAGNRQLNAALHRIAIVQARCHDGARALLARRGETAHETRKASLRVLKRHLSDVVYRALAADAWRLDDPRSASSLT

SEQ ID NO: 315638 - protein, 403 aa, unidentified
MNMNAIGIDVSKGKSMVAILRPYGEIVSSPFEIKHTSSNIQSLIAQIRSIEGESRIVMEHTGRYYEPLARELSLAGLFVTAVNPKLIKDFGAHSLRKVKSDKADSVKIARYTLDSWTELKQYSLMDELRNQLKTMNRQFGFYMKHKTAMKNNLIGILDQTYPCVNTFFDSPAREDGSQKWVDFATTYWHVDCVRKLSLNAFVDHYQKWCKRRKYNFSKDKAEEIYGAAKELVPVLPKDDLTKLIVKQAIEQLNTASKTVEELRTLMNETASKLPEYPVVMEMKGVGPSLGPQLMAEIGDVTRFTHKGAITAFAGVDPGVNESGTYEQKSVPISKRGSSSLRKTLFQVMDCLVKTKPQDDPVYAFIDKKRAQGKPYYVYMTAGANKFLRIYYGRVKEYLMSLPE

SEQ ID NO: 315639 - protein, 337 aa, unidentified
MNYSGIDLHSNNSVVSVIDETDRVVAEKRLPNDLAKILAFLAPWQAELAGVVVESTYNWYWLVDGLQAAGFVVHLANTTAIKKYERLKHSGDETDARYLAHLLRLGILPTGTILPAKHREVRDLARKRMQLVRSRTTHILAVENITARQCGTRITSNQVKQLDQTAVDQLHLPDDVALAVRANVAVIMTLSAQIAIVEKRLQEKVVPHADYALLTTVPGIGQTLATVIVLETGTIERFASAGNFASYARCVDSQRMSNGKKKGEGNTRNGNPYLSWAFIEAANFSMRFSTEARQFYERKKARTNPVVARKALAHKLARACFHMLKERKPFDVTRCFA

SEQ ID NO: 315640 - protein, 361 aa, unidentified
MTDVSSERPKITAGLDLGDKYSYLCMIDQQSGEVIEEGRLRTTPEALRRRFASESSLRIAIETGTHSPWASRVLEELGHEILVANARKLRLIYANKRKTDEVDAENLARLARLDPKLLYPVAHRGEDSQAHMAIIRSRQALVGCRTQLVNHVRGAVKSFGMRLPKCPARSFHKRAQEHIPEALSPALEPVLGQIASLTERIRDYERQLEEISKKRYPETELLRQVEGVGPLTALTFVLTLEDPHRFEKSRSVGAYLGLVPAKDQSGDRDPQRRISKEGDEMLRRLLVGSAHYILGPFGSDSDLRRHGEKIASRGGKNAKKRAAVAVARKLAVLLHRLWISGELYDPLYNTHRRQKHQEEAA

SEQ ID NO: 315641 - protein, 342 aa, unidentified
MYYIGLDAHKKTISYCIKDASGQVHREGKIGATRYELDSWMKTLPRPRSIAMEATIFTGWIYDRLLPQAEQVKVAHPLMLRVIATAKKKNDRVDAAKIADCLRCDFLPECHMASTEIRDRRRTLGYRHLLVRQRVQMKNRISGLLMETGVSHNKQRLHKVGYFRELLATNEEVNESIRPLLRLSRETIVRLQKTEYALVSSLARDPVLADRIKRLRTVPGVGPITALTWALEMGDVSRFRSIRQAISYCGLCGDEKSSGDKVMRTPLSKQRNKHIQRVLVEAAKLAPRPDHELARIYETEKQKGNANRATLAVARKMVAYLLAVDRGAREFVPAEEYKIAVA

SEQ ID NO: 315642 - protein, 400 aa, unidentified
MHLWAGIDAGKAHHHCFVIDADGNRLLSQRVPNDEPALLQLLAAVLKLADGNEVVWATDLNHGGPALLIALLVGHGQDILYIPGRTVHHASKIYRGDGKTDAKDAAVIADQARMRRDLQPLRAGDEISTGLRILTARRADKSADRVRAINRLQAQLLEYFPALERAYDYSRSKAALLLLTKHRTPDGIRRAGQARIHAWLKKQGARSSAAVAAAAVEAAKSQYTTVPAQHMGEGIVAALAREILALNEELAELDALISEKVAEHRHTEVLLSMPGFGPVLAAEFLGATGGDLTVFQTADRFAGVVGLAPAPRDSGRITGNHHRPRRYDRRLLRVFYLSGLSALKSCPASRGYYDRKRVEGKSHIQAMLSLARRRLNVLWAMLRDGTTYTRVPLPAARIAT

SEQ ID NO: 315643 - protein, 388 aa, unidentified
MTQALGALPTPTVPDYERTLILAIELSSTSWVLAAQIPGLPGVKAKRSIEPTPEALMAAIEDYRARAVKAGRNVERVITVYEAGWSGFWLARWLAQYGIETHVIQPSSVPVDRRARRAKSDGIDAELLLRTLLAWLRGEPRVCSMVPVPAEADEDARRGMREREELLAERVGLVNRIGAILATLGVGEYNPIRRDRRQRLDELRTAIGGSLPTHARAKIVRMLDRLELLLTQIAELEKSRDAVLEEENPDRAASMIQQLAKFRGVGVQSATVLVREGFVREFANGKALGSYAGLTSTPYNSGGIEREQGIGKAGNARLRNLMVELAWLWQRYQPNSAQVGWFRERVGGTGRRMRKVMVVALARKLLIALWRFATQGVVPEGAVMKPAT

SEQ ID NO: 315644 - protein, 341 aa, unidentified
MSKLTTIGLDLAKNVFHVVGCDARGKRVLRKRLRRTQVLGYFSQLPPCRVGMEACAGAHYWGREIEALGHEVRLIPAQHVKPLVQGNKNDYNDALAIAEALGRPGLRFVGLKSTAQQDIQALHRLRSRCVAERTALCNQLRGLLAEYGIVLPQGVASLRRGIPELLEDAGNGLSELFRRLLAERYRQLQALEGHLATYTRELERHNAASGASQRLQTIPGYGPVLASAFHATVGDGAAYRRGRDVAAAVGLVPRQHSSGGRDRLLGISKRGDRYLRSLLVHGARAVVSRAAGKTDPLSLWINRLRERRGFNRTVVALANKLARIGWAVLAHNTTYQAQRAA

SEQ ID NO: 315645 - protein, 372 aa, unidentified
MAVMIGVDPHKASHTAAAIGPAEEPLGQVRIQACASQVQQLVAWAAAWPERTWAVEGATGLGGLLARQLVAAGERVLDVQPKLAARVRLLEAGNTNKNDANDARSVAVAALRSAARREVVADGHAAVLKVWSKRYRDLGRARTQAACRLHALLADLVPGGFAGEITAGQAAGLLARITPADPAARARCELAAEFLADLRYLDTQIRGTRDRITAAVRASSTTLTEIFGVGPVIAAAIVGAVGEVSRFADRNRFAAYNGTAPVEVSSGGRKIHRLSLRGNRRLNHAIHMAAITQIRYQHSPGRAYFDRKIAEGKTGKEALRALKRQLSDAIYARLVADAARRGATTQAEGPGGQSGNGSVSSAAGSHPGRRLF

SEQ ID NO: 315646 - protein, 411 aa, unidentified
MEILTQCACGLDVHQATVVACLLSILNNGKVKKQMRTLGTKTRELVELRNWLQSEGCTHVAMESTGVYWKPVYAILEEGPFELTVANAQHIKHVPGRKTDVKDAEWIADLQLHGLLKPSFVPPKPIRQLRDLTRYRRKLVEARSAERNRLLKVLETANIKLSSVASDVFGVSGLLMLEKLAEGKAEPAEMAQLAKGRLREKIAELEPALEGRMEEHHRYLLKLQLRRLRDLDQDLKELDARIQDKLQPYRQEMDLLMGIPGVDWGGAAVIIAELGPDMKGFPSAAQVSCWAGLAPGNHQSAGKRRQARVTKGNIHLKTALVEAAHAASRAKGTYLRDKFYRVKARRGAKRAAVTVAHKILVAVYHMLSKKVPYKDLGEVYLDKLNQHQLTRNLVRRLERLGYCVTVQPQAA

SEQ ID NO: 315647 - protein, 417 aa, unidentified
MMRVGIDAHKKSCTTCVFQDTDVLSSSPSETFVFKTSRQGVVEFMEKIPGGAMVAIESSTTGKAISKLLSGKYEVHMIAPPERKPSIKTNKRDAERIIKEDMLGYVRRSYIPSQQMEELRLIVSKQMDVGGKISAVKNQIHALLERNLLQSEFEELSDIFGVEGLERLGSLELPKHEKLTLAMHLEELKLYASQHRQIETEIAKTAEADVDCKNLMSHPGIASFVAVAIKARTGDASRFPTKKQFCSYAGVVPKADNTGEHVSEHNRVKHGDDVLKYALTCGVNAAVHANADSAVKRFYLKHLAKGKSPQDAEVAAARKLACIVWKILTSKQRYVEEDRYLTARKMRRLSQTARRPLKHATNPEDVSTLTASLKSETDVLERYPEEMHVMSMRERSRSKHNPSRIKGASEAGGAVTN

SEQ ID NO: 315648 - protein, 370 aa, unidentified
MKKSVLHVGLDVDDRAFHGAGFDSEKQTFYEFKCKPTFGALSERLEIFGDNGYEVRLCYEATYIGYGLCRDLRASGIHCDIVAPSLIPEQRSKRVKTDRVDSRKLAELYAKELLTPITIPDKTDEQVRQLIRSRGFVVDQRRRLKVHILSLCRFNGIDYRRQTKTEGHYWTKQHLTWLNSETSKHPEVTKKIFERLLYQIVQLNNEIKALNEIIEEQALKERYQKKCQALSAFKGIDTLSAMTLVTEIGDVRRFSHPKKLVSYSGMDIIEYSSGGKEKKFGITKMGNRKIRTVLVEACQSVTLGTIVGKILRNRRKEIPPEIVDIAERCQQRLWKKKSRMSHSCKHSNKIKMACAREMVGFIWEALVAVG

SEQ ID NO: 315649 - protein, 350 aa, unidentified
MYDSKDIVLGVDYHDNNLKIRWFNAGTGEERLMSRPTSRRSILALVGQADREAREVGGEVVWIMESTTGWARVKALRGRQARVLLANVLQMPLPPKAYRRKTDKIDTGRLLREYLAGTLPLAHPTRPWYRRVRRLASCREDRVRRRTALRNWMNRYLAHETWVSRTGLGSQKGIVRLKGFVRQLGAANPDALVWRLKLAELEALAGQLDEVESAMLEIWEAWPMAQWVDEIRGIGPTAAVSILAHIGSVDRFRDAEALVSYAGLAPGIRQSDGRTQDLHIGGGGTDKKLRHYLIEASVWARQLPRYQPTDQRVLARRGKKVARIVVARMRLRSLYKMLRHNIRFNQVQAA

SEQ ID NO: 315650 - protein, 435 aa, unidentified
MSNYYHLPVVGIDVAANFSVVTALKPNGDIYIKNIKILHSLVGFTQLLTLIQKIEKEFNVKSKVFCESTGIYHLTLFHFLKNHRIDISVINPLITNSNKNSNIRKVKNDKLDSLSIARICKFDDVKVSSYTSEEFLHLKFLVREYYKILDLRANSKKTFSNNLYIHYPGFNKAFSDNTGKTALSFIATYPTPGDFLNASKLKVINLLKKSSRKGAKWAATKYNTIFDIAYSANQIGVNSALFGTKVKRFIENYTFYSNQISNIFNDIISYIDNASFGENFKINIQLLKSFKGIGDISAITLLTEMGSINNFSKASQLVAFFGVDPSVNQSGNFNGDRNKMSKRGTAIGRRALYSIALASIRKTRNKVPMNQVLYQYYHENLKSKKKKVRLVAVMNKLLRYIFSVLKNQEPYVVRNPKIHKRMFLEVNSKLHKKTA

SEQ ID NO: 315651 - protein, 403 aa, unidentified
MNAVGIDVSKGKSMVTILRPFGEIVSSPFEIKHTSSDIHSLIKLIHSIEGESRVVMEHTGRYYEALAHQLSAADLFVSAVNPKLVKDFNNDSLRKIKSDKADSVKIARYALDKWQSLEPYSITDELRAQLKVMNRQFHFYVKHKTAMKNNLIGLIDQTYPNANTYFNSPTRSDGSQKWVDFVSTYWHVDCIRKMSLNAFVEHYQNWCKRKKYAFNKSKAEEIYTKTKELVPVFPKNEITKHIIRQAVDQLNSTSVTVETIRTLMNETASKLPEYSIVMQFKGIGPSLGPQLMAEIGDVTRFTHKGALTAFAGVDPGVNESGSYAQKSVPTSKRGSSNLRKTLFQVMDVLIKTMPQDDPVYQFMDRKRTQGKPYYVYMTAGANKFLRIYYGRVKEYLSVLPDPS

SEQ ID NO: 315652 - protein, 369 aa, unidentified
MADYREAFVGIDVAKLKNAIAIAEAGREGEVRFFGEVDASATSMRRIIGRIASRFDYVHFCYEAGPTGYGLYRLIRSLGHECTVVAPSSIPRKPGDRVKTNRRDAISLARLLRAGELTAVWVPDEGHESIRDLVRARAGAVETLRIHRQQVSAFMLKHGRSYPRKKSWTMRYLRWLQEQRFDHPAHQIALQEMVEAVRVSKERVERLERVIEEFVPAWSLAPIVWALQTLRGVDLIVAVTFVTEVGDASRFESPRQLMGYLGLVPGERSTGETVRRGGITKAGNGRVRHMLVESAWTYRHPPKVGKAKLYRLEQASPKVREIAWKAQSRLTARYRMLSARGKRTTVVCTAIARELVGFMWAVAREARVT

SEQ ID NO: 315653 - protein, 419 aa, unidentified
MSFKILKFKCCGLDVHKTWIYACIGITDSNNRTEYKQARFSSFTKGLNELCDWLAKYNCTDVCMESTGKYWIPVFNILEQHNLWVTLSHPKYTKPMKGNKTDRKDAKWICDLYMCGMVKPSFIPPADIRELRDLVRYRYKLTCMITGEKNRAQNCLTVSNLKLDDVFSDVFGKSSRSITEQILQHPGEKFDVAPFVHGRCKTPIEEIQAAVDGAISKEQAVKLRQCLDHIDELNKHISELEQEILRLSDKYEAALNLIRTVPGFDKNPMTAVQILSEIGGDMSVFPTAKHLVSWAGCCPRNDQSNQKIKSTRISRAGSYFKPVLVQVANALIKSKKHSEFTNRYKRIKARRGHKKAIIAICRMILTAIWHILTDLKPYTPEGFLESHPVKEGKVLSSSQALNFFKQRGYIIKDEPLSVS

SEQ ID NO: 315654 - protein, 372 aa, unidentified
MCGRPSPRCPLSRLTARLVNGLRLSDYSNWAPHTWKLELMHVAVGQPTQEVKETPMNSVGLDVHKTRCVACVKTQEGAIVEEFAFQNTPHGHEELITHLKAYPQVQVAIESTGNLWIPIYNRLENEQIHTILTNPKKTRLIAEAKIKTDKLDARILADLLRANLLSASYVPPPEIRMQRSIIRERARLAQLRTIIKNRIHTLLDKHAYKSPYTDISGKHSLEWLSKLELPAGDRILLDINLEQLNSLNKSIDRLTETIAISAIENPEVKLLMGFTGIDYYSAMLLINEIGPIARFPSPKKLVSYAGLAPSTHQSGNHTTHGPITKEGNSHIRWILIKAAHQAARHDPRLSQFYLRIMKRRGHNRAVVVVAHH

SEQ ID NO: 315655 - protein, 357 aa, unidentified
MESQEVKYVGVDCGKKSIEVVRINSENPLERRQFSTTESGINNLLQWLTLNDIVGLEAGSQSFRIAKSILNKGVQVIVLNPGNLATIYQSLKKTDKEDPLKIARLIQRFPIEELPVVPIPNDEEEDNRRLRTEQENWTRQLTQSKNRLHSLFTQAGLTHITKKHLRTKANREISVALLPSRYQKEAERILKVLDLVEQNLKLIEKEIQEALKKNKAYVQTIMSMPGIGMITSLAIMSYMGDCKRFSSAKQAAYYAGLVPRVDISGDTVRYGRIINRGCHSIRRVIVQAAWSLVRCQHGGKVKEFYQRLYLKKGAKKSIIATSRKMIEVLYVMIRTGKLFDSMPENILNRKLTQYGLM

SEQ ID NO: 315656 - protein, 407 aa, unidentified
MICVGIDVSKRKSTVCFMAPGDKIIRRPFDVKHTKEELQPLVDEIRVQAKYDEIKVVMESTGVYHLSIAYFLQQNGIFVSVVNALKVANFNKAENFRHTKTDSIDSSNIARYGIAYWAKLPQFDLNGDKYFLLKRLCDAYLNFSEERSRILLQLQSQLEQTMPGIFDLFGGFDINSGKDKLLDFLERYCHIEDIIAKSEAEFVASYREWAKEKGYRSNESKAATIYAQAKNGIPSIPNNPIVRETIMWYVGLLRRADEALMASLTRMEDIAKDLPEYELVGEMGGVGRVTRVALIAQIGDVRRFKNKHSLICFAGLTPSIHESGKFRASQNHIVKKGPARLRKVLYQVMMSLVMHKIPKDDAVYRFIKKKEAEGKYKKVAKVAGMAKFLRIYYGRVMHLYRDLGLAA

SEQ ID NO: 315657 - protein, 339 aa, unidentified
MDHVAIDLGSRKSQICVRSSDGQIVEEKRWETWELDRYLAARPKSRVVVETCGEAFGIAEVAKKLGHEVRVVPATLVRTLGVGARRTKTDQRDARVLSEVSCRVDLPSVHIPTAESRERKTICGMRDALVGARTKMVNTVRGWMRGHGRRLALRTTETFAERVRASYGEQLPSYVERQLAAVDALTTEIKKAEKDLQSRAEADETCQRLMTVPGVGPVTSIRFVAALDDVGRFANAHQVESYLGLVPGESSSSEREQKLSITKAGPTALRWVLVQAAWVLRTRCKLPGAVPLQLWAHRVELRRGKRTATVALARKLAGILYAIWRDGTVYDGARGAKML

SEQ ID NO: 315658 - protein, 333 aa, unidentified
MDTETGDYGEQRLEHSEGAEEFYRDLAAQGKKVRVGMEASGHARWFERLLAELNCELWIGDATEIARKRERKQKTDRQDAQHILQLLMENRFPKIWVPSGENRDLRQRLWHRHRMVQMRTRIMNQLQAVALNEGLRCKKRLWRQHGREQLESFRLAPWASRRREDLLQLLDRLNPTITDLTQVIEQEVEKCPEARRLRTHPGVGALTALAFVLIIGRAERFQCGKQIAAYLGLVPLEDSSGNRRRLGHITKQGSSMLRFLLVEAAQVTARSIPEWRNKYFHLAMRRGRKIAKVAMARRLAIALYWMWRKGWNYEQSRKFGSHAGKLGTGDGVQ

SEQ ID NO: 315659 - protein, 377 aa, unidentified
MKNVRFVGLDVHAETIAVAVAEQDGEVRSLGVIPNRSESVRRLIGKLGKPERLRVCYEAGPTGYALHWQLSELGVHCDVVAPTLVPVKAGDRVKTDRRDAEKLARCYRAGDLTAVWVPDPAHEALRDLVRARLAAKRDQVRAQHRLSKFLLRQGRRAPEGIRTWTGKHMAWIKQQCFEQPAQEATLLDYLHEVEHAGERIGRLERAIDTAIEAMPQNQRAVVAGLQCLRGVAKITAVTVMSELGQLSRFARARQLMGYAGIASREHSSGQRVCRGSISKAGNAHLRRLVVEAAWAYRHRPHVGVPLAARQSEQSEAVKAIAWRAQHRLYGRYRALLGRGKSKQKVITAVARELLGFIWAIGCEIERPQQQPSLRRAA

SEQ ID NO: 315660 - protein, 485 aa, unidentified
MKQTKSSPCARAIPAHGGQLSRKERRELARQVQSEQVTLQIVHSNAAGIDVGKNTHYVAVPPDRDAESVRYFDSCTDGLQQMVAWLKKCGITSVALQSTGVYWIALYDLLQEADFEVYLVNARYTKSLPGRKSDVQESQWLMKLHTYGLLPNSFRPPQEIRWLRSYWRQRQNHVRSAASCIHRMDKVLTEMNVRLSSAVTDLSGATGLAIIQAIVDGERDPHELAAYRDPRVKATQEEIARQLHGNWQADLLFRLKQELQGYRFYQTLIAECDQELAQLLRAFPDRSAGVALPEETRKNRRKKKRGNSPQFDLRQLLYLMSGVDLARIDGIDVITAMTVVAEAGYDMSPWPTADHFVSWLRLAPDNRISGDKIIGKGRTPTQNRLSQALKMAASSLKASKTYLGAQFRRLRARRGPAIAVKAMAAKLARLVYNMLRHGMEYVDRGTEFYEQQQRERRLHALTKNAAQLGFQLVPTELSLAGTGTI

SEQ ID NO: 315661 - protein, 327 aa, unidentified
MMFIGIDISKEKIDLSWLRDQLTNKIKTKVFKNKHQDFLAIEKWLLNTTKSAANELVITLEPTGVYHEALMYFLHEQGFNIILANPGKAKKYADALNIIHKTDKSDATMLAHYGCAKHAVVSYWQPDALEIRELKALIRRLDALESNRQREANRLEASEFSNVSARVCQSIKVTIAFLDDEIKQLKSDIDNHIDNEPDLKRNRKLLESIPGIGPVLSRELTYLFAAKKFNKAKEAAAYCGLIPRHNESGTLKGRTSISKLGPARIRCKLYMAAIVAGQWNKTIKRHKLTLINNGKTPMQAVCANMRKLIHICFGVIKNQEAFKLQES

SEQ ID NO: 315662 - protein, 362 aa, unidentified
MVYLGVDLHRKISHVVALDEAGSTILSRRFEHSPDAFRRVFGELGPEPITVAFEATYGWGWFADLLADAGIEAHMAHPLATKAIGAGRVKNDAVDAATLAHLLRTNLLPEAWIAPPEVRELRRLVRMRASLVRIRTRLKCQVHALCADAGVSVPVSDLFGRKGRATLETLALPPRSASRLAANLRLIDDLVREIVAADREIVAAFKGDDRVRRLLPIPGIGILTAATIVAEVWDVGRFPSADHLASWAGLTPTERSSADHVRRGHISKQGSRWLRWAMVEAAARIGSSRSARLHRFADPIAERRGTKIARVALARRILTLAFYALRDERGCRDYPPLPRPSRRPVTARSLCVMASPDGRCTD

SEQ ID NO: 315663 - protein, 428 aa, unidentified
MNQVDRIRLEEFRQFRKEIRGSTEYLIVGMDVAKDQHVAFFGTATGKTLFRRLVFDNNIEGFEKLLVQVEALKVQHVLGKVVFGLEPTANYHKPLGEHLIRCGHKVVLVSGVAVKENRKSLDGRWDKNDDKDAANVADLVSQGKCLFYEYAAMAVRDLRDLLSLKRRLKRQEQGMRVRIRNGLLAKYFPELDRYYERSESGSLGIVRWGLDPSVIAGLEYGQFVQRVAPGKRRLCQESRLQAIWKLAVDSIGCEVGSVVEFEAQVMVEGLKQIREVIQATEEKIEEICSPFPEYSCLRSIPGFGPDVSSKVLGAIGDPFRFQNGQQVLKLAGLDLNAERSGKTSGAAVPVISKKGKADLRYALYQAAFIASTKNQGFMVYYTHKLRGREREPGIKTKMRVKLAAKLLIIAWTLMKKKEPFNPDYLKLE

SEQ ID NO: 315664 - protein, 390 aa, unidentified
MRYFIGIDVAKFKHTACVIDTYGIVLVESFDFTNDIIGFQSLLKNIKPFLKKKHLVGMEDTGHYGDNLRNFLLEKQYKVVMLNPIVTSHIRKASNKAKNDRIDCFVIANTMMNPNFYRDQHVQSIDYTTVRQLTRMHHTHTEEINRYKCQLQKSIDIVFPEFNSLLNTKYSKTYLEILDTYHSAHTIANTDIRLLRNTLKNVGVGRSVSISAEQLKKAAKESIGQHNLAIEMDIPFLISLIRRLTSILGEIDKKIEEFSHQLNSPILDISGISHFSAMSIISELGDITYFSSEKKLIKFAGVNPCVYESGTYSMTHTRLEKKGSKYLRKTLYQIIDVVIRFNPIFQAFYQKKISQGKSYRCAQGHCIRKLLRVIYKILSTGERFNPEKLK

SEQ ID NO: 315665 - protein, 359 aa, unidentified
MRYVGIDYHKRYSVLCATDERGQELKQRRISGNSATGFAQFFSELGEESKVVMEACWNWGWLYDLLAKIDGIDEVMLAHPYKTRLIAEAQIKTDRLDAQMLAELLRGDLIAQSHAPSAATRARKHLLRQRLFWVRLRTMLRNRMHAILDRQQGLERPQLKNFFSRRGQTWLEEVQLPCAEDQPLLTQDLEVAELLEEKIKQLDRSIGQSQSEEEKLLESIPGIGPLFSSVIATEIDGVGRFNSATKLAAYAGVVPTTHASGGRVFNGRLLWQCNKWLRWALIEASWSAIQFSGYFGSIYRCARARGKNKNIAITMVAHRMIKIIWLLLTERRPYTETLPDRSEDGMTVVVRRKVLGLAS

SEQ ID NO: 315666 - protein, 337 aa, unidentified
MNKSQACGIEVSAQELVAVWIDSKGKAVLRRFVNTAAGHKQLLHALTRGSERVSACMEATGVYGLDLALFLSAQEQVRVMVANPRAVRHFAQAMMKRSKNDVIDAGVLCEFVQRMPFVEWKRPSEKTLALWAISRRLGALTKQHAAEKNRLHAASVAISLPAAVRKSVQRMLRLIEREIKALRQEALALIAGQERIQRRYRQLRSVTGIGEVSALALLAELLLLPEDRDVRQWVAFAGLDPRQYSSGTSLRKHTRISKIGNRHLRHALFMPALVASRRDPHLRGFYQALLARGVKKKPAVVAVARKLLHAIYGMFKSDSFYNGAKIFHAPTLSPACF

SEQ ID NO: 315667 - protein, 351 aa, unidentified
MIVIGADVHKRKHTFVAVDEVGRWLGEKTVRATTEGHIAAIMWAREQFGTDLKWGIEDCRNMSARLERDLIGADQKVVRVPTKLMAQTRKSARRRGKSDPIDAESVARAVLREPDLPVASHDETSRELKLLTDRRDVLVAQRTSAINRLRWHVHELDPERGPAPRALKSVTHQQALAAWLHTQPGLVAEMARAELADVTRLTTEINALQKRLSDSADEVAPTLLGIDGCAQLTAAKIVGEAAGIKRFKSADAFACHAGVAPIPAWSGASAGQMRLSRSGNRQLNAALHRIAITQIRMQNSEGHAYYQRLIAAGKTKAAARRCLKRRIARRVHRALLTDHQTRNQALQPAAA

SEQ ID NO: 315668 - protein, 416 aa, unidentified
MTDAPESTYERYLAADIHKHYLVVGGVNIHQEVVLVPRRVDYEHWEGWMKANLKASDAIVIEATTNAWHIHDQVEPYVGRAVVAHPGLVNLIAYAKVKTDKRDVLKLARLLVADLIPEVWVPPQEVRDLRALLAHRRHMIKRRTMLQNRLHSVIHRYNLMPPTGDLLAESHQDWWQQTPLSAVEHLRIRQDLQTLRHLEPQIAECDAILEKISGQALWQNQVVFLLQIPGFGLLTVMTVLAAVGDVHRFPTAKHLVGYAGLGAGVHISGETHHTGRITKQGRKDLRTALVEAAWSVVRWDPDWQARFDRLAKRRGKRKAIVAIARKLLIVVWHVLTKQVAYRQANPEKVAYKLFRWTWKLNENQRLGLQARQFVRYHLLNLNIGHDLDAIHHGGKKRTLPPPNEVIDLIQTSLVPD

SEQ ID NO: 315669 - protein, 422 aa, unidentified
MKIVYPTCCGVDVHKSFLVATIIKTDGLEPKYSKKRFSTYNNDILKFKKWLIDNECYDVCMESTGKYWVPVYNLLEDKIRVVVASPKWVAAVKGNKDDAKDSKWIGDLFRLGIVPGSFIPPKPIRILREYTRYRYKLTSCKSSEKNRFQNCFTVCNIALDSVVSDMFGVSASLITDYLIQTDNFDPEHVKSLLKKKLKAKADEVIESIEGYQMAAAQKERMVMVRSHLEYVSEAIKKIDEKLNELVAPYEPQIALLQTIPGIDRQSAITIISEIGADMSQFDGSKRFCCWAGLTPSNNQSAGKKKSVRITRAGIYIKPALVQVAHAAVKAKDSPYYKNKYERISKRRGKKRAIIAVARMILTAVYNMLKTGEVWNPSDLCKVDMPPVLSEQQKRKAVKNAFKLLIAQGIIDPALVPADLVVA

SEQ ID NO: 315670 - protein, 455 aa, unidentified
MAKKREKRECRAVVLEPDAAGIDIGAEEIFVAVPPDRDEESVRMCSTFTWDLHALADWLVQCRIRTVAMESPGVYWIPLFQILEARGLEVYLVNARYWKRVPGRKSDVSDCQWIQYLHSVGLMRASFRPTMDIYAVCSHWGHRGSLLQMASEHILHMQKSLSEMSLQIHHILSDITGASGQAILDAILAGERNPVQLAQLCNCPVKSPREKAAKALEGDYRPEHMFTLKQSLDGYRYYQKLIAELDREIQRLMQTLPSAVETGQEIPRRTNHSAFQRQGNDPAFDLRGQLYRITGVDLTDIPGVSAVTAQVILTEIGPDLRRFRNASAFASWLGLCPENRVSGGKVLSCKTRKVKSRAALALRLGANSLCRAKGYFGEFFRRMRAKLGTAQAITATAHKIARVMYHVLLTKEPYAETVFHRSDEYAQRRAEMRLRKQAALLGFQIIPVPADSAAT

SEQ ID NO: 315671 - protein, 435 aa, unidentified
MPRNTTEPALTSAGTAGSTDTEPVRWGGVDWSWSEHAVCIIDDAGAAIERFTVPHTAPGLAKLVTLLRRHQITGVAIERGDGPVVAALLDAGLAVFVIASRQVTALRSRYGTAGNKDDRFDAYLLADVLRTDRHRLTPLSGDTDATIALRMLIRARHDLVKARVAAHNQLRAHLQLAHPGVVGLFHQLDGKISLAFLDRFPTPRHARWLSEKRLAAWLNAAHYTRANTRTPAQLFGHLRHAPAGLPDGPAADAAESITREQVTLLRSLRERIDALETHIAAALDAHADATMFTSLPRSGTVRAATLLAEIGDVRARFPTDDALAAAAGIAPSTRASGRAHYVTFRRGCNHRLRQAIVDFADGSRAAHPWAQDTYARARARGLNHAHAVRVLARAWLRIIWRCWNDHTPYEQARHLAAVAARHPQTATPEPTPMAS

SEQ ID NO: 315672 - protein, 412 aa, unidentified
MDLFAERCAGIDIGKADLKACIRTPGPRGGRRSETRTFATTTAGVLALQGWLTDRQVRLVGMESTGVYWKPIFYPLEDHFECWLINPQHIKKVPGRKSDVSDAEWIARLVETGLVRASFVPPRQIRALRDLTRYRTSLLRERTREVQRLHSTLEDAGIKLAIVATDIMGKSGRDMITSLIAGQRDPHVLADLARRQMRTKIPALTEALDGRFTDHHALLCRMMLNRIDGVDATVAALDEQIAAATECFAETINRLIAIPGVARRTAEVIVAETGADMSRFPTAADLASWAGMCPGNNESAGKHFTGRTRQGNPWLRGVLGTAAAAASHTQGTYLRERYHRIAKRRGTKRALVAVGHSILQASWHIMHDQVDYVDLGADHYIRLGDPARRASRLVQQLRQLGYPVVLPDRAVA

SEQ ID NO: 315673 - protein, 334 aa, unidentified
MTFELLAIDLGKSSFHLHSIASDGAILSRKVSRSKLAETVNALAPKTIAMEACASAHHWGRQFKDNGREVLLINPRFVKPFVRGSKNDAVDAAAIYEAATRPTMRFVPVKSTTQQDLQSLHRVRERMIIQRTSLINHARGLLAEYGIVLPQGPWRFASQAPAAVESADLSDLGRELFLELLDQLTDVNDRIAKIDRKISEICREREDCRRLSELPGVGPIIATALVASVEDGRHFKSGRELAAWIGLVPRQYSTGGKPRLGGIGRRANHYLRRQMIHGARAVISRLASHDDRRSQWLKELASRRGYNKAIVALANKTARIAWALLTRQERYAAQ

SEQ ID NO: 315674 - protein, 349 aa, unidentified
MRYFQPAADTRFYAGVDLHARTLFLVVLDHTAQTRYARNLPANSESFRKAIVPFRQGLVVGCECMHCWYWLADACRDDHIPFALGHAWGMKAVHGCKTKCDRQDAEAIARLLKGGNFPLAYAYPKERRGLRDLLRARLRLVRQRAELYGHVHTARRQLNLPPVSNDVKYKSKRADILSDIDDACVRRRVEADLSLLEPLDSTIRRLEKDIEVAARQHYPTELAVLQSTPGVGIIIALTVLLEIDTIARFDTRQQFCSYARLCGARQESAGKKVGTGNAKQGNAWLKWAFSEAAVLGAQKSERIGKYLDKLSSRMGKAKALSALAHKLGRAFYHMLHKKEVFNIDQFLRH

SEQ ID NO: 315675 - protein, 445 aa, unidentified
MSNGSGLSRGDRNRNARLARLRELVPLGNAIVGIDLADDKQAAVVTDHDSRVIARRRVSARAWELGGLLDWAVVAAAGAGFASVTVACEPTGHRWRVLDQLAVERGLALVCVQPLLVYRAREGEDLTWDKSDPKDAVIIARLAAGLRCYEPERADAVWARLRHLGARRSALIADATAEVNQVRDLLECAWLAVLAAAGVPFRSATWRAALAVTLDRCAGDLARVRRLGPARFESAVRRELPRWGAQRPCLRIIRAVFAALADPAGVRVHRPGALERARLVLGDWRETRARLADVEARMVAVLDDLGLTGLVTTIAGLTPAGAAAILAETGDPARFTSPRALVKHAGLCPRDNASGGYQGKTSISGRGRPALRVAAWRAVWAALPNNPVMAARFAYLTNRDHNRLARQQARTACAAALLRWIHVVITRRIAWDPAIAGRTPPCRAA

SEQ ID NO: 315676 - protein, 421 aa, unidentified
MRAVALDVHRDFCEVAIVAEGRLRSAGRIATRPETLELFARSLDAGDWVALEVTGNAWAIARILEAHVARVIVVSPNDTGIRQARAKTDRLDARTLAKLLWAGELDGVWAPDERVRVMRRRLARRAQLVRARSRAKNEIHAVLMRCLADRPPASDLFGVKGRRWLADQQLTVCERETVDSGLRQVDFLDSEIAQVDQLIAADALGWPEVKRLMTVPGVNVTVAATFMAAVGDIRRFGDRRKLTAYLGLDPKVRQSGVGPANHGHISKQGSNSARHALVEACWSTVRQPGPIAAFYARIKAKRGHSVAIVASARKLACLFWCLLTRGEDYAFAQPSLTTKKMRRLELAAGAPRRQGARNVWSTNQAMRGAERELALQAQRAYERTVADWQAATPAKVGASAAPGHASQGSSKDQIARQTTSP

SEQ ID NO: 315677 - protein, 342 aa, unidentified
MQISTIGLDLAKHVFQVHGIDAEETIVVRKQLRRNQVVAFFEKLPPCLVGIEACASAHHWARELQKLGHTVRLMPASDVKAYVKRNKNDAADAAAICEAVRRPTVRSVAVKTPQQQARLMQRRTRELLIRQRTQLINALRSHMGELGFAVAQGRDGLRELLAIVRDETDRRLPDDARASLSVLAAQLMACAAQIADLEKRIHAQHRASEASRRLEAIPGIGIVGATAITATLTDPTAFRTGRDFAAWVGLVPREDSTGGKRRLGPISKKGDRYLRRILIAGALAVLRHARAHPEKHPWLVQLLARKPAKVAAVALANKMARIAWALLAKGETYRAPAFAARV

SEQ ID NO: 315678 - protein, 432 aa, unidentified
MEKIRENASGIDIGAKKVFVSIEGQEVRYFFTFTEDFEKLRDYLCEHKIRTVAMEATGVYWNILYEILEESGIDVWLVDGRQTKQVPGRKTDVKDCQWIQQLHSYGLLNRCFVAEADIKELRTYQRLREDHIRSASMHINHMQKALTEMNIRLTEVLSQIHGVSGIAIIEAILKGERNKEKLLKLCDRRIIKNKKDDVLKSLNGRYTKHGLFALQQAFDSYLFYQHQIEQCDQMLSEVIEKIGKGKPDQNPQGTRKPIRHNKPDINDLGGSLLKIFDGKDATALSGITDYSWMQLLCETGTDLSRWPSEKHYTSWLGLAPGQHSSGKMKRTKRKKGHPQAGQIFRQIAQSLITSKHIALGAFGRRLRARKGSQIAIKSVARKLAILYWRIMVKGMAFVEEGIKKYEEQLLVQKHKSLERLAKDLNVQIASNV

SEQ ID NO: 315679 - protein, 317 aa, unidentified
MTEKLKVVGIDVSKARLDVCVLPEGAASSETNDEAGIVALVEAFRRLGPDLVVMEATGGYESEAAMAISAAGLRLAVVNPRQVRDFAKATGLLAKTDAIDARAIAQFGVAIDPQVTAVPHEDAQELQAMMVRRGQLIAMRTQEKNRLALAFGTMRKPIKEHITWLDRAIEGLDIDLTHKLRTSPAWKAKEDLLRSFKGIGPVSARTMLADLPELGSLNRKKIAALVGVAPFNCDSGAFRGQRHIWGGRARVRTALYMAAVAAIRTNPVIRAFYEHLTTSGKPRKVAIVACMRKMLTILNAMAKTQTRWHPPAANQPA

SEQ ID NO: 315680 - protein, 437 aa, unidentified
MDEVTDEPLYRDRVCGIDIGKAQMVATIRVPSDKDPARRAAETRCFGTTKREVLALADWLRCWQVPAVVMEATGDYWKGPFYRLEAEGFECILADAKQVKHLPGRPKHDPGDSKWLAACFERGAVTSCFVATEEFRLIRLHTRYRKDLTEERTREKQRAEKLLESAAIKLSSVVTDLHGVTGRDIMDHLIAGERSPRALAQLARGRARRKISQLEAALEGAEFFTPAHAALLAAMLARIDRVNAEIARLTGVIETLLEPCEEQLQQAESMPGWGRRAAQDAVAETGVDMTRFPTGGHLASWAGRTPLDNSSGKRQGKAKAKKGNRYLSGLLGETAVAAGKTQTREGARYRRLSRRRGKAKAQVALGNTQLKVYHKLLSSPGTRYTDLGPDYYERQASTRRQIAHHVGKLGALGFEVTLCRIPEPDPGPGPADSTQAA

SEQ ID NO: 315681 - protein, 457 aa, unidentified
MMAREVGAVLEPQEIQDEEHEQILERVAAVDVAKASGMVCMRVPDPARPGRRHNLVWQVDATMNAVLELADHLVGERVQKVTLESTSDYWRLWYYLLEAAGLDVQLVRAADLRRAPGRPKTDKLDCIWQAKCTEKGLLRPSFVPPAEIRVLRDYTRMRIDLTRERTRHYSRLEKLLEDALIKVSAVASSIDTLSVRDMVAALIAGERDPIVLAGLARGRMKIKHDKLVEALTGRFDAHHGELARMLLDQIDGLTTQIDKLTVRIEELIAAIPEAQGVDPDGTTGPGAGLTAGSPVLPAADRLDEITGIGRDAAQVIIAEIGLDMSRFPTPGHLVSWARLTPLTMQSGAVTRGGKTGKGNPYLKGVLGSAVAAAGRTDTFLGQRYRRLARRRGKLKALVAVARSILVIAWHLLSARDARFHDLGSDYYTSRIDKNRKTRSHVRQLEALGYSVALTPAA

SEQ ID NO: 315682 - protein, 401 aa, unidentified
MAAQRDTAWVGIDVGKTHHWACVVDAEGKALLSVKVANDEAEIEALLAKTGSLAMQLIWAVDIIGAPSALLLALLARAGQSVRYASGRVVAAMSAAYAGEGKTDAKDAYVIAETARLRRDLSVIDTGTDLVRKLAVLTGHREDLIADRVRMINRLRDLMTSVFPSLERAFDYSSHKGALVLLTSYATPDRIRRVGQTRLTGWLRNRNVRGAADVAARATAAAKAQTVVLPGQDMTASIVTELATGILALDDRLKVLDAQIQMTFDEHPHARIIQSMPGFGPFLGASLLVGANDLRAFPSAGHLAAAAGLVPVPNDSGRRTGNLHRPLRYSRRLRHVFYLSAQTSMMRAGPNRDYYLKKRAQGATHSQAVIALARRRIDVLWALLRENRTWTAAPPALAQAA

SEQ ID NO: 315683 - protein, 378 aa, unidentified
MVVMGIDCGQLQHRYCVVDEAGRVVAEGGFEEKRSSLQELRQRMEGYGRVRVVMEASGSYWQNLRAECAEWGWEALAVNPQRAAQFARLESPRHKTDKADARALARLGLGDVQGSFGSGPAVTLAHALAGAIEERARVQNRLHSLLVVANPAIVWCRWKLNAPRTLAVLKAYPTSLQLCRARGLARVRFGTRGVVGRRAAEALQEASREALCGAVNEAHGAQVGFLVEQINRWSGEIVRLERELERRLPEAKRLCSVLGVGKRTALIVYACVPFAQLRSAKQAAAFAGLHPHLFQSGQHSYARLSKRGDAVVRTALYRAALPAVVHNPRLAEFYQRLRDRDKTPKQALCAVAHKLIRICFALVKTQTTFSLTYAPDLP

SEQ ID NO: 315684 - protein, 450 aa, unidentified
MAKPKRRKHRKLDRSLPEMRPNAGGIDLGATEIFVGVPADRDSDSVRSFPTFTEDLHQLADWLQRCRVDTVAMESTGVYWIPLFQILQARGIEVHLVNAQHVHHVPGRKSDVLDCQWLQYLHSVGLLRASFRPEQAVCEIRSLMRHRENLVEMSCVHVLHMHKSLDQMNLQIHHVISDITGVTGLAIVDAIVAGKTNPKELAKLRDHRIKASIETVTKSLVGDYRPEHIFTLKQSLTAYRYYQQFIADCDHEIQQRIEAFDSKDQGPTAPADATSTETSKESGFNLHSHLERIFGVDLTLMPGFECLRIQTILSELGADLSKFPTDDRFCSWLNLCPKDGSSAGRRIRAPRIKTKNRVAQTFRLAAQSLHNNQSYLGDYYRSQRARYGAPKAIKNTAHKLARIFYRLVTTRQPYDETVLAKLEMHNQKRRLHKLQSLAKQMGYSLVEAHA

SEQ ID NO: 315685 - protein, 344 aa, unidentified
MAQVTTAQVTTVGIDIAKNVVCIHGVDAHGHVVVKKRLARQKVLPFLTQLPPCLIGMEASGGAHYWAREFTQLGHTVKLMSPQFVKPYVQSQKNDPNDAAGICEAVERPRMRGVPVKSITQQDVQALHRIRERQIKARTALINQIRGLLMEYGIVIPQRASQVRHKLPLVLEDAENGLTATAREWLHALAEELQALDQRIAATDQQIERVFEADEACQRLAQLPGIGPLTATALVAAVGDATEFKNGRQFAAWLGLVPRQHSTGGKTTLLGMTKRGNCYLRTLLIHGARAVLRVVDRKTDARSRWLQGVKARRGMNCASVAQANKTARVAWALLAKGDRYRHAA

SEQ ID NO: 315686 - protein, 406 aa, unidentified
MTAVMIGVDPHKATHTAVVIGPAEEPLGELRVRASAGQAEKLVAWAADWPERTWAVEGAAGLGRLLAQQLVAAGERVLDVQPKLASRVRLLQAGDTNKNDPNDALPVAVAALRSKTARPVMAEDYPAVLKVWSKRHRDLARLRNQVACRLHAVLCDLVPGGHPKEISAAQAARILEQASPSGAVDQARAELAAEFPGDMRRLDAQLRDTRKKLAAAVRASGTTLTEVFGVGPVIAGTIIGDIADVSRFPGRDHFASCNGTAPAGVSSGNRKVHRLSLRGNRRINHAIHMAAITQIRHKHSDGRAYYDKKIAEGKTHKEALRSLKRRISDAIYARLLADARRAGQRPARAREGNRGTTLTPARPAHTPNAGSSDKPLPDPGTTIRPGTRAATPSPSKPTSKKTLTTT

SEQ ID NO: 315687 - protein, 414 aa, unidentified
MRVVYTHCAGLDVHKRTVVACCLTPDPQGGWRHETRTFPTMTVDLLALADWLRERDVTHIALESTGEYWRPVFNILEAEFEMLLVNAAHVKNVPGRKTDVRDAQWLAELLQHGLLRASFIPPVPVRELRDLVRHRSNFVRERATLTNRVQKVLEAANIKLASVATDVCGVSGRRMLEAIIAGDADPAAMAELARGRLRTKRDELAKALEGRVRPHHRFVLSELLCQIDSFDETITRFDEQIGEACRPFACAVERLDTIPGVGRETAEMIVSEIGVDMTRFPSANHLAAWAGVAPGKHESGGKRLSGRTRKGNQALRKGLVCAAHAAAHTKNTFLAAQYQRLARRRGRKRAVVAVAHSILVIAYHLLAREEEYRELGGDYFDRQRPEATVKRLTHRLEKLGYQVTLQKGEEAIAA

SEQ ID NO: 315688 - protein, 346 aa, unidentified
MEIIGLDLHKRETQLCRRSPDGRISDERIPTTRAGFTTTLGGIAPARILLEASTESEWVAAHLEQLGHTVIVADPNFAPMYATHSRRIKTDRRDARALMDACGLGAYRPAYRLSAARWHVRNELAVRDALVQTRTRWIALCRTRVRALGLRVPSGASHTFAARVAVLDLATQAPTLGAELAPLVALLPAVDAQIAASDARLATLAAADPIITRLATAPSVGLITAAGVVAALDDITRFPSAHAVAAYLGVVPREYSSAERHHRGGITKAGNARARWLLVEAGWRLLRSRATDAAVLRAWGQGVAARRGKRVAAVALARRLAGVLYAMWRDERDYDATRLRRSHPRA

SEQ ID NO: 315689 - protein, 446 aa, unidentified
MATRTVGIDVAIRGPHVAIILDEQGRPLGTPIRFRLSAAALDELVTKIRAGLQADDTVMVVLEPTGMAWFPLARRLTQAGCTVIRVKGQRVKALRRYLSEYAKTDVTDAQVLGRMLAFGRRGLLPLYVPAAKQQALNRLTKQRARYQDAISSIRRRLLDLIRWAQPTLEPVLPSIGTSVSLAVLEHYFNPAQLQALGARRLTEFIGRHVGGNHPAHGPFVEELARGLLAAAADAVALFGADGVDFELLPLEVRQEIQLLRHHRELLVELDRAIEQLYRELHPVEALRTLPGIGDTLGPALLGVLHTASRFGAQRRLRGFCGLFPRRQESGGVAHPGQPITQDGNNRIKRNLMLAADVARTVDPELAAVYYRCMVEKGHHHRQALCAVATRLVNRIHAVLRDGRPYELRDLDGHPITVSAAKQLIQTHLRVPDVIRRTRKKAPVAAA

SEQ ID NO: 315690 - protein, 436 aa, unidentified
MSYSIAGIDVHKKMLAVATADVETAGEYQFQERKFGANPSDLRAMAEWLVEQGVEEVVMESTAQYWRPVWHALEQHWQPERRKREGAGKMAGTLHLAQAQSNRARHGRKNDFEDAQRLVKRLVAQELVLSFVPNAEQRLWRTVSHRKYQLTRDKVRVRNQMEGLLEETNIKLTSLVSDLFGVSGRRMLRGIADGESDPAVLAALADHRLRATPEQLRDALGACAQLHPVYRQLVEMFLGSLKQMEEQIETLDKQIAKLLEPYQDAVQRLAEVPGLGVDSAQQIIAQVGPAAVAFPCAKSLASWVGVCPGRDESAGESKSNRSPKGNRALRRVLNQAAHAAIRYRGSIFELTFRRLLPRLGYQQAAWAIAHRLCNLIWILLHKGDRYREMGPEVRAKSQKARVSRMIRELRKLGYQVDSMQLAAGSARWAREAASTR

SEQ ID NO: 315691 - protein, 348 aa, unidentified
MKHYVGLDVSQEETHICVIDEDDRKIWQGKCLSTPETIGKLIKEHAPDAAKIGLETGNLSTYLWHGLNDMGLPVICIDAYHAHGVLKLRMNKTDKNDAHGLAQIMRSGWFKAVKVKSFASHEIRALYRARSSLVSMRSDVVNQIRGCLRIFGIFIKGIAGVGFEKRVQEIIDEGGTLAAPLQAQLTVLQTIKKEIDELDELVLDHSWACPSCRALMTIPGVGPMTAAHFVLAVDDVERFNKSKSVAAYFGLTPKRYQSGDMDFNGRISKRGNRIVRHHLYEAANILMTRVKKPSALQEWGLRIAKRSGMKKARVAVARKLSVIMHQMLLTGECFVPYPEPNYGVPVHA

SEQ ID NO: 315692 - protein, 417 aa, unidentified
MKPIDEGGIGVWVGLDWADEEHAYGLRMSGSSEIETGEVKQTPEALASWINELRQRSGGGWVAIAVEQSRGALLYALMDYDFVLIYPINPKSLSSYRKAFYPSGSKDDPRDADLVLDFLLKHRERIRLWQPQSPEVRCLRLLCEQRRKLVDLRAELTNQWTANLKNYFPQALKWAGPLKGNKACDFLNRWPSLQSLQRARPSTIRRFFKSHRGGGSEQLQLQLEEIKQARALTGDTAIVTACSLLTQSLAGQILQLNDSIQRFDAKIEELFNHHPDHFIFSSLPGSGKALGPRLLTTFGEDRDRFECAGEVQTVSGIAPLLRTSGKSRIVSYRWACPKFVRQGVHEFAALSRHWCPWTQAYYQMQISQGKDHHVAVRSLAFKWLRIIYRCWKNRVPYDDAIYMDSLKANNAPLLAFL

SEQ ID NO: 315693 - protein, 272 aa, unidentified
MSERRIIGVDVAKGKVDVYDLQSKKSKTLALAQYPAWVEKLAQDKPDLVILEASGGYERQLVGHLAAAELPVAIVNPGRVRHFCQAIGYQAKTDEMDARGLALYAEAVNVQAQKLPDQATLDLRALLERRRQMVAIKAAETNRLEQAYLPRVKKSLKKSIQFYEKQIAALEAEIGDIVRDVPEWRDAEDLLTTVPGVGEVTARTLLAEIPDLGQLDRQQIASLAGLAPFNDDSGKRQGKRHIRGGRSEVRRVLYMATMTAAIVVKNEYITPI

SEQ ID NO: 315694 - protein, 426 aa, unidentified
MAKAQHTPDARILLGIDISKNRHEVLIAVPAKTRRRRMTVLNTADDYHRLIEILGSFGLPVTIGFEATGNYHRALMFALGAAGFELKLVSSVALARTREALHNSWDKNDPKDAQVILHMLQIGAVQIFHDPLVAGTSDIQELSKTCEMVARAKTELWHRILTHYLPLYFPEADRFHRSSRGDWFLAFLEAFPSPHMISAMDKDDFIAAAWPVIGRRVSKAALLADIYETSKTSVGLPVAPDSDAIRMFRLVLAQGRSLIQQRNAIEARAADLLGDHPDYQLLRSIPGIGPVNALAVLAEAGDLRRFRHHRQFLKFCGMDLATMQSGQFRGRSRISKYGNARLRRTLWIAGQAAVLKPANSFRDKFERYIAQDRHNPDLRRKAYTAIAAKMGRTIHAVIKSGEPYRPFLEGASPGGRTSFTSGRGGA

SEQ ID NO: 315695 - protein, 318 aa, unidentified
MAQNDLVVVGIDVSKDKVDACIRSLSLRQTFLIPQGHRKLVAWLRKHQVDKAVMEASGGYERAWAKVLREAGIEVRIVDPKRVRSFALSAGRLAKNDAIDAEMIAWFAETFSEAPSQKHDAAHEELRTLVKARLSLIDARIRLVSQGEHAAPGLVQKAHARILKSLAGEIAKLEAAICAKIKSMPDFAERTEIIESVPGFAETSSANLVAGMPELGQVSGEIAAALIGIAPYDDDSGKHRGERHIKGGRRWVRNAIYMPCVGAATQNNPVLKAYYQRLIAKGKEPKVAIIACMRKLIVILNTMIARRQKWDPSRYAVN

SEQ ID NO: 315696 - protein, 348 aa, unidentified
MAHFVGLDVSVKETSVCVVDDTGKVLCERKVSTEPDDIAVLLTSVGGDYVRVGIEAGPLSQWLVNGLSDAGLPVICVETRHMKALLQAQQINKSDRNDARGIAQMMRVGLFKPVHVKTLAAQEQRMLLTSRKLVQRKLIDIESDMRGTLRNFGLKVGVVSVIGYEARIRHLVEGLPRLAAIVEPLLTVRRVMRQQFAVLHKMLLDTVRHDPVCKRLMTAPGVGAVVALTYRATVDQPQRFVHSRAVGAHVGLTPRRHQSGEIDFDGGISKSGDAMLRTMLYEAAQVLLAQSRHWSWLKAWGMKVAQRRGMRRAIVAVARRLAVVLHRMWTDGTDFRWGSEPGTAVAVA

SEQ ID NO: 315697 - protein, 349 aa, unidentified
MRHIGVDLHKTNFVVCVLEADDTTRTETYPLSADGLARFTQQLGAEDEVAVEATQNMYFFYDRVRPAVARVAVVDTYRFQVIARSKKKTDKADAAALARFLKLDWLPEVVVPSAPVRALRQLLEARETLVATRTKLKNMAHAVFSRNGVCLTRAAFASQVSRARLAKREDLPAHDLLIWRVALRQIEELNQEIATLEAEIIARGKTLKGLRRLLQVHGLNLLSAISLLVEIGDITQFETSKQLVSYAGLATSTKQSNETTRHGKITRQGRKRLRTTVIQAVLAMVNRTQTPLMEFYQKKKQEKGAGKAICATARKLLTIIFVVLKKELDYWYLEDRLYNRKLRALEAAA

SEQ ID NO: 315698 - protein, 387 aa, unidentified
MLYVGIDVSADKFHVAIYYPDSKSFKLLSFPQSRHGFDNFKSVLLALNDGLYIALEATGSYSHNLFSFLESLDFNVLLLHPYAVKNILRAFSKSKTDSIDAKNIALSVYLLDGNLKSSYTLPDNILSLRKLVRFRASLTKSMSNLQKQLRDVLRYNMPEILNFFTMLSSNVLISLLSNYPSRKQILSHEKEVIKLLASFKNWSEGKARSLIHELKHSIAASDPYDSEAIIISSIALQMKEIKEQIEKVNKQIDKILSDIPQNPISTIPGVGKVTQATIISEVGDINRFETKQEFVSYIGLDPVIKQSGKSYHRCGISKKGKKMLRCIFYNLAIRVLRLVPKYRRKYNELVKRGKHPKVAITAIARKLAELVFILWKRNIPFDPCLAT

SEQ ID NO: 315699 - protein, 415 aa, unidentified
MALKIVYKICCGIDVHKTFVVACIASTNDKGITSYESHRFSTYTSGLKTLLQWLLDRNCKDVCMESTGKYWIPVYNILESDCSIVLAHPKYVKAIRGKKTDKKDAKWIADLFKHDLVAGSFMPPADIRQLRDLMRYRFKLTCFKSSEKNRLQNCLTVSNIQLGNVVSDTFGKSAQAILDKLLENPADTSFDLEPLVYKSLKKKLPELRDAIDGYITTEQAGKLKVIKAHYENLESRKAELEELILALAAPYQQELTILQTAPGISSPFTAIGIISEIGTNMEAFPSAKHLCSWAGLTPTNNESAGKKKSVRVSKAGCYIKPLLVQCANAVVKSTKHPEMRNRYLRLKKRRGHKKAIIAIARMLLTALYHMLKNGENYNAELYQKSDLLPVDREITVEQALMIARNQGYKIKSATA

SEQ ID NO: 315700 - protein, 336 aa, unidentified
MSLYSAIDLHSDNNFIVIIDNNDSILFQRRLPNDLGTVLSVLEPYKGGLQGVAVESTFNWYWLVDGLIEAGYTTRLVNTAKVKQYSGLKHTEDRYDAYWLAHLMRLGILPTGYIYPREQRAVRDLLRKRRQLVNHRTIHVLSIQNQYWRNTGIKLKGDYIKRSNDYLGEFEDSNIQLALVSNYEIMQALDEQIRRIETSVKQQVKLRPEYELLLSVDGIGYILALTIMLETGEISRFKEVGNYASYCHCVESKHTSNSKKKGAGNEKNGNKYLAWAYIEAANFAKRFSAKAKRFHQRKKAKTSNVVATKALAHKLARACYYIIRDQVPFDENKTFG

SEQ ID NO: 315701 - protein, 347 aa, unidentified
MKKVVKQVLGIDVAQDELVCCFGKMHDDFTPELISHKTFVNSLKGFESLLTWVGKLSDASVSVRYVMEATGIYHEKFAYFLNDQGLDLSIILPNKISNYARTLDVKTVTDKTASEAIALFGLERKLDNWEPPKGVYKKLQQLSRERGQLMDEQTVIKNQLHAESKEARPHENSKQRSNKRLALIKKQIQDIQEEVEELINTNDEVKEIVILLRSIPGIGKITAATILGETNGFNLIRNKRQLTSYAGLDVKEKQSGTSVRGKATISKKGNKQLRKAMHLPALTAIRSDDRFKAIFIRLVSKHGVKMKAVVAVQRKLLEMTFTMFKSKTTFDKNYFKGAEEMVEQGAE

SEQ ID NO: 315702 - protein, 370 aa, unidentified
MQIVRSFVGMDVHKETISISVAEDGRNGPVRFIGVIPNQPDDIAKMAKRLSKHGDLDFCYEAGGCGYNIYRQLTALGHSCTVAATSLIPRKPGERIKTDRRDSQKLAILHRSGDLTKVWVPDATHEALRDLVRARVDASMHLMRARQQLLAFLLRHGRSYPTGKHWTQRHRSWLAGQTFQQEVHRIVFQDYVETVWTAQERRDALIERIGAMTASWSLGPLVEALRGLRGIDLLSAATFICTTGDLSRFESPRMLMGYLGLVPSEHSSGGSIRRGGITKTGNREARRMLIEAAWSYRYPARVAKEKAEILVRLPKNIRDIAWKAQTRLCSRYRTMIARGKKPTVVVTALARELAGFIWAIGQEMRTPMTT

SEQ ID NO: 315703 - protein, 313 aa, unidentified
MTDLYVGVDVSKEYLDVATSDGTSLRVSNDEAGHQQLVVRFSAPAPTLVLMEATGGLERAIAAQLSAAGVALRIINARHVRHFAKATGLLAKTDRLDAEALVRFAQTLKPEPRPIAPEQTVALQALIVRRRQLVEMLGMERNRLRTAHRGVRKSLQASIRWLEKRLAEVDGDIDGALRECGAWREKVELLESVPGIARVISVSLLASLPELGELNRHQISALAGVAPFNRDSGNWRGRRSIYGGRPLVRSALYMAALVGARHNPVLKAFYQRLRQAGKPGKVALTACMRKLLVILNTMLKTGQPWRTNLLAAT

SEQ ID NO: 315704 - protein, 318 aa, unidentified
MTHKTPSINVGVDVAKQKLDVSFDGQNTVSFENNLTGFKLLLKALENKSGARVVMEATGGYEKPLVHFLQGQGVAVSVVNAKRVRDYAKALGRLAKNDNIDAQVIRLFADAVNPKTLQTASDTQQSLDALAHRREQLVKQRAMEKQHLETVGNKEAVRSIKRNIAFLDKEIERIEQAIKALINSDPALTEKLSRLSAVKGIGDITALTLLADLPELGQLTNKEISALVGVAPFCRDSGALKGKRTTWGGREQVRSMLYMAVLSAVKYNPPIKVFYNRLLTNGKTKKVALVAAMRKLLITLNSMLRNNTDWDPEHGKLA

SEQ ID NO: 315705 - protein, 346 aa, unidentified
MRYSTTVGVDLAKNVIQISVISGRGKELSNRSLTRTKFAEFLGKQKPSLVAFESCASAHYWARAAKRHGHEARIIPAKAVAPFRQGHKTDSNDALAVAEAARRPNIKEAPMKTAEQQGLQAIQRSRELLIGECTALSNHLRGILLEFGVAIPQGFASLLRALPEILEDGDNELPDLYRPTLHRMHQRLLELREDIEAMTREVDILVKQHPVCKRLTAIEGIGPIGALSLYAVMGSGKAFTKSREFSAYLGLTPRQYSSGGKTNIVGISKKVGNRRLRSILIQGARAYVYRMKEPRSLKDRWLKDLIERAGPNRAAVALANKNVRTAWAMVTQGTEYQRRLQLEMAA

SEQ ID NO: 315706 - protein, 400 aa, unidentified
MNAVGIDVSKGKSTVAVLRPFGEVVASPFDVIHNDNDLKQLVKLIRSLPGESKVVMEYTGTYFEPIAQFLHNNGIFVSVVNALLVHDYGGNSLRKVKTDKKDALKLASYALDRWTELDEYVPADEQRKTLKLLNRQYNQSIKIQTTMKNNLISLTDSVFPGINRLFTSLERQSDGHEKWVDFLHAFPHKDCVAKLYLSAFKAKYKSWCSRNKYRYSESKAEKIHSYAKSVIAVLPLNESVKLIVTQVVSQLNTILETAFSIRTEMDRIASSLPEYDTVMSMFGVGKVYGPQLIAEIGDTRRFRNRRAITAFAGLDAPPYQSGQLDVSSRHISKRGSAALRKVLFQITEIFILSKPENEPVYQFIIKKRSEGKHYYSYRIAAANKFLRIYYAKVNQVLNAM

SEQ ID NO: 315707 - protein, 376 aa, unidentified
MENDSTLYVGLDVHKDSITVAYAIEMGEVELFGKIGTMQIDVDRLCKKLQPKARQICFVYEAGPCGYGLYRRLVDKGFDCMVCAPSLIPRKPGDRVKTDRRDAIKLVRSLRAGDLSAVHVPTVEDEAFRDLARAWSAAREDLKAARCRLKSFLLAHGVHYLGRPNWGPTHRRWLSTFSFDSAWQQLAFNEHRRSIEDRLAQCERLELALREAVTNWRFYPVVLALQAMRGINFTSAIGLVSELGDLTRFEHPRQLMAWIGVTPSEHSSGGKRRLGSITKTGNSYARKLLVESAWSYRHPARVSIDIQRRHEGLPKPIIDRAWDAQLRLCRRYRKLVARGKTAHVAIIAVARELAAFIWDVGRLGMTLAAPYSEQAA

SEQ ID NO: 315708 - protein, 371 aa, unidentified
MKQYSTFVGMDVHKNSIEIAIAQQGRNGEVRSYGKIDGTLAALDKVVRKLVSKGNHLHFVYEAGPCGYQIYRHLTARGYDCTVVAPSRVPKKSGDRIKNDRRDARKLARLHRAGELTAVYVPDAEDEAIRDLTRAREDAKIDHKKAKQRLLAFLLRSGFRYSGGSPWSKVHMRWLSDIKMPHASQQIVLQEYIDTIAECSQRVERLTEQIRQLLHQWRMFPVVKALQSLRGVSLIVSATTVAEVGDLKRFENPSELMSYLGLVPSEHSSGEKTKRGSITKAGNGHVRRVLVEAAWAYRLRAKVSRVILKRQEGLPKKVREISWKAQVRLCSRYRILWAKGKPKQVIVTAIARELCAFMWAIANEIEVSATT

SEQ ID NO: 315709 - protein, 427 aa, unidentified
MNNVTYQPTLCVGADVHLDEIVLRAVDKALGHEVVDRFRVTNNLPGAQRAAATIAAAATELGYTRVEIACEATGMLWIPFHRYLSTAPSLQPFELELVCFNPKLVAKFKDGLVLRSPKDDDRDAFDIAARLRFGELPISYVPSDFWQGLRRLTRYRYRLSKAMSREKMRFQSHAFLKCSDWKRVKVFSDIFGATSVALLTEFTVAELQEMTHDQLVDLITHRGHGRFTDPTATARAVREALRTSYPIDPRMDEMVTAALAAGWDHIRYLKRSMKRLDQLIARAIDLVPNPIITIKGLGAVITAGILAEIVDVLRFSEEKHLAQYMGLTWRKVSSGGFVSENTRLTKVGNVYLRYYFVLGANLLRQNNLEYKAYYWRKYQEVSKYQHKRALVLTARKLVRLVHALLTKNEPYVRPRTTSQDQEDDRLQ

SEQ ID NO: 315710 - protein, 370 aa, unidentified
MKKYSEAFIGFDTAKKKHAVAIAEDGRNGEIRYLGEIDSSPATVEKVIGKLAERYAKLHVCYEAGPTGYGLYRQVKALGHECAVVAPSLIPRKSGERIKTNRRDAVTLARSLRAGDLTSVWVPDAIHEAVRDLSRAREAAGEDVRKKRQQLLSFLLRHGRIFSGRKHWSLAHRRWLAEQKFEHPAQQIVFQDAIDAIEDGAARLRRLEEQLLAIAPSWSMAPVVAAYQAMRGVSFIVAVTFVAEIGDVRRFDSPRQLMAFLGLIPSERSTGETVRRGGLTLAGNRRARRVLVEGAWTYRYPARVSETLRPRLEGLPKAVRDIAWKAQIRLCARYRRLTAAGKKTPVVIAAIAREMAAFLWAIAHQIEPLT

SEQ ID NO: 315711 - protein, 469 aa, unidentified
MVKAYYKEVSPERIQQAMIMEEKEHGNYNLLRLVSVGNKNTLTGGVTAMHRKNDNRQVEKRQRITDATLVIGMDIGCEFNAMCLMSKEGTILGRYPKIYNSRKGFDYFHGIVESMKEKYGFTDVLIGMEPTGHYWRKIAYFAMDKQYEVRFIRTTALKHQRELDESSSAKNDIRDAYTIANIAREGKYIDTVIEDNIFRQLRTLAHTREKIQRISTGAKHALKGMLEDYFPELKHIFWSMKAKGLWALLEHYPFPEDVLKTDIDTVTELIAQSTRRKIQAHEKALQIYKAAQHSIGLQRVGDADRFRVAAYLSEIRHSETQLKEIEAQMEALLKKIPLAEYILSMPGIGTLTCGVFLGELGNPCNFTNPKQIVKYAGYDPKEHDSGQRTGRRIISKKGRWLLRKYLYFMAMRVVHRSPFLKDYYENKQKTMTKKEALCAVVIKLIKVIFALLRDKRTFTEKQSCLKQAA

SEQ ID NO: 315712 - protein, 345 aa, unidentified
MNKLKASSTDLAFCGIDVSAATVSVAVIKPDQHLAEREFSNTASGHRSLLTWLGQCGVVVRILLEATGVYSLDLTLALDAAAHCEVAVLNPKLVNRFAQTLVRNKTDSADAVVLAEYSRRMPFTAWSRPSVEQLQLRALGRYIESLAADLTGVKNRLHAAERSTGMPRAVLHDLKQAQAALVRRLARMRQQARKLVEADKLLARRFDLLRNMPGIAETSALSILCELVMLPPEMTVRQWVAMSGLDPSHRESGTSVHKPARISRAGNRHLRRALYMPALSAARHDPHLRAFYRALRERHKTALQALVAVARKMLHAIYGIFKSEKPYDGQRLFPQLQLEVKSIAG

SEQ ID NO: 315713 - protein, 343 aa, unidentified
MQTVTTIGFDIAKSVFQVHGIDAAGEVVIRRQLKRRQVIAFLQVLPSCLVGMEACASSPYWSRELQALGHSVRLMPAAYVKPYVKRQKNDATDAEAICEAVTRPNMRFVTTKTPEQQSGLVLHRTRHLVVRQQTAVINSIRSHLAEFGIVAPIGRNGVEELLNVVADASDKRLPDIARACVAALGAQLRMLKTQILEFDRMIRAWHRSSEMSMRLDHCPGVGPALATALIATVADPKAFRSGRNFSAWIGIVPRQHSSGGKDRLGSISKRGDRYLRGLFVAGALAVIRYAKVHGTKHRPWLTALLARRPTKVAAIALANKIARMAWAMMAKGERYKEPVALAA

SEQ ID NO: 315714 - protein, 430 aa, unidentified
MTLREPTPADAVLVAIDVSKQRNDVLIEVPGQPRRRRLVVVNTRAEHDRFVDILQGFGRPVIAGFEATGNYHRPLAFRLLEADIALRLVSSVALARTREALHNGWDKNDPKDAQVILHMLKIGATQTYLDPIRAGINDIQELSKTHEIVSKAKTELWHRLLTHYLPLYFPEIARFAGNSRSDWFLAFLEQFPTHGSITAHSKDAFIEAAWATVGRKVSKARLLGDIYETAQASIGLPVAMDSAATAMFRMVIAEGRNLIRQRDAIEKHAHAALGENADYQRLRQIPGIGPIHAMTILAEAGDLRRFRHHRQFLKFCGLDLATHQSGQFRGLTKLSKFGNARLRRTFWMAAQVAIRQRDNSFRAKFERYIAKDRDNADLRRKALTAVTAKMARTAHAVIKCGTDYRPFIEGPMPSGRTSIRMGREGASATL

SEQ ID NO: 315715 - protein, 338 aa, unidentified
MKLYGGIDLHSNNSVIVILDEKDKAVYKKKHNNDLLEILSCLLPFREKLQGLVVESTYNWYWLVDGLMESGFKVHLANTAAIKQYEGLKYTDDKSDARWLAHVLRLGLLPEGYICPKEERSVRDLLRKRSQLVRQKTANVLSIINLFTRNTGEAINVKQVKKLTEAELKSRFGDDSLVLAVVSNLEVFRCLETQIKLLEKAILDQVKLRKQFIQLKTVDGIGDILALTIMLETGEIGRFPKAGNFASYCRCVGSKKISNGKKKGKGNTKNGNKYLAWAFVEAAVLAIRYNEKIKRFYQRKKDRTNSVIAIKAVAHKLARACYYILRDKVAFDTARAFG

SEQ ID NO: 315716 - protein, 381 aa, unidentified
MDTAARDQQCSSEPVLFMAMELSASKWKLGFTVGLGQKPRERTIDGGDLEALSEAVARAKRRFRLAEDARVVSCYEAGRDGFWIDRYLRGQGIENVVIDPASVEGNRRRKKRKTDRLDLGKLLRCLVRWHGGEEKVWAVVRPPSEEAEDARQFHRELEVLKGERTRHVARIKSLLVSQGIQVKRVSTDFVTELEAARTWDGSPVPPQLRDRLVRELARLQVLRQQICELEGQRREAIRKVTDRRMQQIRHLMRLRGIGENGAWLLVMELFGWREFRNRGEVGSIAGLTPTPWASGDEDREQGIDKAGNRRVRAMMIELAWCWLRYQPRSELSMWFEQRFGGGSKRSRRIGIVALARRLLVALWHFLRDGWVPKGAVLTAPG

SEQ ID NO: 315717 - protein, 411 aa, unidentified
MQVLHERCAALDVHKKTVVVTVMITQMDGRVQEQTRTFLTMTADLLALDDWLQSQHIQVIAMESTGVFWRPVFNLLEEGREVILVNAQHIKAVPGRKTDVKDSQWLADLLRHGLLKASFIPPKPVRELRDLMRYRKTIVRERADEVNRLQKVLETANIKLASVATDVLGKSGRAMLDAILSGQDDPEILADLARGRLRAKLPDLRKALDGRIRPHHEVLLVRILAHIDFLEESLTELLVEMEQYLDPFEEAMVLVQSLVGINEVAAASIIAEIGTDMTRFASDKHLASWAGVCPGNKQSGGKRLSGKTTKGNPYLRAILFEVAWAITHTKDNSLSAFYHRMARRRGKPKAIVALVHKVLVILYHILRTKKPYADRGAEYFDEHDRARIERHHIHRLEQLGYAVTLIPKEVA

SEQ ID NO: 315718 - protein, 310 aa, unidentified
MSTLPSSVLSIDISKDILDTDAWPKPWRHRLGNDAKGIAAIVAEVRRRQAFVIFEATSVYDRALMQGLDAAGIGYHRANPRKARDFARASGFLAKTDRMDAAMLAQYGRSVVLRPCEPVAPERQALRALIDRREQLATMRKQERTRRHQICDASICAEVSENIAHLTRQIQSYEKQIRAHLKAHPELLKSVQLLSSAPGVALITAASLVAFLPELGRRSARAISALVGVAPLAKDSGRMRGQRRIWGGRRSVRSLLFLAARHAEKNAAFAPFAQRLKGKNKPTKKVRIAVARKLLIVLNTMLSEQRSFYA

SEQ ID NO: 315719 - protein, 392 aa, unidentified
MEAGTSQPHSPTAIRTDLAAIFVSLELSRSTWPITSLSPGNGEKMSKHSVVGGDVTALLGRFTQLQEKVRSRTGNQVPIVSIQEAGLDGFWIDRVLKANGIERYVVDPASIATSRRRRRAKTDKLDGEALVRALLAFKRGEPRVCAMVNAPSPEEEDRRRLCRERKVLIAERVKHVNRIKGLLFGQGISGYEPLRKNRRKQLDELHTGDGRPLPTHLKTQISRELDRLELLLEQITAVENERDTLLAAQKNSVAATLIPTGAMLCEVKGIGLEFAAVLWTEGLFRHFDNRRQVAAYAGLAPTPWQSGTIDHEQGVSKAGNPRLRTTMIQLSWLWLRHQPQSALSQWFTARVQSSGGRAKKSAIVALARKLLVALWKYVIAGVVIEGAVLKTA

SEQ ID NO: 315720 - protein, 416 aa, unidentified
MNGKSPGTLARFIGIDLHKHYLVVGGVNAGQEVVLPPRRVNLGSWLKWAEANLMPTDAVVLEATTNAWEIYDQVAPLVGRAVVANPVQVKWIASARVKTDRVDVGRLACLLAAGLVPEVWVPPVEVRELRSLLAHRRRLVKMQAMIRNRLHSMVHRHNLTLPKGEAFSHEHRGWWLGLEISRTENLRIRQDLATMDHLEPQIAEIDSELHRLSTCAPWADQVPYLLQLPGFGLTTTMTLLAAIGDITRFENARKLVGYSGLGAGVHASGQTHHSGRITKQGRAELRWALVEAAWVAVFHHAHWKHEFDRLSRRMSPKKAIVAVAHKLLVVVWHVLAKRTADTEANAEMVASKLIGWSGRLGEEGRGGLTTRRFVRYHLMKLKLGEDLKGVRQGRTTRLLASPEEMLTLRPELTSVR

SEQ ID NO: 315721 - protein, 350 aa, unidentified
MMIIGVDFHPEFQQIALVDKDTGEFQEKRVAHREEAEKFYRDLAAAGQQVRVGMEASGHARWFERLLAELNFELWVGDAAKIRTQRVRKQKTDRQDARLILQLLLEDRFPQIWVPSWENRDLRQLLWHRHRMVQARTRIMNQLQAVALNEGLRCKKKLWRAQGREQLESFRLAPWASLRRCDLLELLDRLNPTIAELSQAIEREVEKCPEAQRLMTYPGVGPLTALAFVLIIGDAERFQCGKQVASYLGLVPLEDSSGNRRRLGHITKQGSSMMRFLLVEAAQVTARSLPQWRSKYVHLMMRRGRKTAKVALARRLAVHLYWMMRQGWDYPQWIKFGSHVGQPGNRHGVQ

SEQ ID NO: 315722 - protein, 411 aa, unidentified
MEVVHARCAGLDVSKKDAKVCVRVAGSGRRKTVETVTTWGSMTNQVLALREHLIAEGVTCAVMEATGDYWKPFYYLLEDAGFEVMLVNARHVKNVPGRKTDVADATWLAQLGAHGLVRASFVPPEPIRELRDLTRARTAITRERGREVQRLEKLLEDAGIKLSSVASDIMGVSGRLMLQALISGQTDPPVLADLAKRRLRSKIPALTEALTGRFTAHHAFLAGVHLDLIDQHTTAINDITARIEVVIEPFQGFRDLVCTIPGIGPLTADVIVAETGADMTRFPTAGHLASWAGTTPGHNESAGRVKSTKTRPGNPYLQGALGAAAMTCSQNPGTYLGARYRRIASRRGPMKANVAIQHSMLIAIWHIARTGALYDDPGADYFTRLHPERAKNRALHQLEAMGYHVTLGHAG

SEQ ID NO: 315723 - protein, 394 aa, unidentified
MKLVGIDVGKNSHHFCVMGKETGEFNVTPTSFSNNKEGFDFLINSLKPYSKKSILIGMEDTGHYHVALLKFLLSNGYTVALINPKTTDLTRKMEGGITKNNKLDTITICDVLDTPERKKQYRITKVDRFDLYEQRQLTRHHHNLKEELNVYCNRLQKSIDLVFPEFNTLFSSKYSIVYMNLLKTFGSAEAIASTDIRTIRKCFEIKDRGNRISLTPEKLKECAKNSIGISSEVETIQIKHLVSQITLIKEQIAEIDKKIEEFSITNNSPILSIPGISHFSGTSILAELGDIGNYSKPSQIIKFAGVAPYHYESSQYNAQHTGITKKGSKYLRKTLYQIILTVINNNPVFKKYYRLKISQGKGHRCAQGHCIRKLLRIIYHLLETGQSFDPALLR

SEQ ID NO: 315724 - protein, 301 aa, unidentified
MTIIGIDVSKKDLVGVRINRAGKEVQNYKFENNSDTISTFLSDITQKHKHVVIACESTSYFHRSLALACIKQDIPFRLINPITTKQFVKVTVRGRKTDMSDALIIAKLALHGEGRYMLKEDFSFNKSISRTASKLSEMERSIGNMINRLSTVEDEEKDEVSDILKTCRETLETSTNKLRKHLHKQTDSTLQKILTSIPGVGPTIADILIAEIGNIDRFHSGKALVAFAGIDPRVKQSGQSLKRNTRITKRGSPHLRHVLYFATVVAQLHCKEFREHFLKKTDISYLCSVEEENTIYYKIIE

SEQ ID NO: 315725 - protein, 371 aa, unidentified
MKKNSIVKQSPKRAADKTPKPSAMGMDLGDKISRYCALGAEGEIASEGAVATTRKAMREKFSGMARCRIAIEVGTHSAWVSRLLTGLGFEAIVANARQVQLITANSRKSDRVDARLLARLARVDPQLLRPIRHRSEAAQADLRTIRIRAVLVETRTKLINAARGFAKSDGSRLPSCDAASMDLEKMEALPAELQHGLRPLLEQVESLTAQIHQLDAVLEQIARTKYPETKLLTQVSGVGTLIALTFVLTVEDRDRFSRSREVGCYVGLRPRQSDSGQRQPQLAITKEGDRYLRQLLVQGAHCILSRRGPDTDLKRWGLRLSERGGANAKKRALVAVARKLAVLLHRLWSSAEVYQPLGYRAKPRSKHPIAA

SEQ ID NO: 315726 - protein, 438 aa, unidentified
MSNKVIFNLDELFISVGIDVGADFSWMSIALPNQQFVGKPYKILHNSIDSLTTAVSKIKEAEELYSLESRIFLESTGIYHYPLFCYLRDKGFNCSVINPIITKNSTNINIRKVHNDRFDSKKAALVGLKPDLKVSLMPSDLALNCRNLCREYYDLMDNRSAYVNKLQGELRMAFPQYLGIFSKVTINTSLTLLETYTSPSAFLKADKQEIIDIIKSTARFGLTYAQNKYNAIIQAATDANQFGYIIDSNIKRIRLYISFIRKYDEEINNILESLHELVDANEDADFVKQIHLIETFKGAGFLSAVSIMGEIGDFSAFSKPKQLFAYFGLDPAVKQSGKFEGTKVQMSKRGSAIARLVIHTLTLQSISISRNGEAKNPVLREYYLKKCDSKPKLVAMGAVSHKVCNMIFAILRDNKPFKIIAPQEHIKQYNSAKCDIAA

SEQ ID NO: 315727 - protein, 311 aa, unidentified
MATSSETYIGIDVSKERLDVAVLGEERGWRVDNTQEAIAKLVQQMQEICPELIVVEATGGYQRAVVEGLFHAGLCVAVVNPARVRQFARACGLLAKTDKLDAQVLAVFGQRVQPKPYTGKSETEKHLGALLVRRKQVEEMLKAEQNRLRTVSSSLRGSVERSIAFLKEEKKILDEQIQQFLAEQEAWQEQMEILKSTPGVGMVTTATLLAELPELGKMDRKKIAALVGVAPMNYDSGKKRGYRKTKGGRTNVRSVLYMSTLVATRYNPLIRTQYQHLLKRGKEKKVALTACMRKFLTILNAMMRDQQPFRM

SEQ ID NO: 315728 - protein, 361 aa, unidentified
MKKLSTVRGRESKIFNEHNLTIGLDLGDRSSYYCVLDEASKVIQEANVGTNKKAMAMVFGSMGRCRIGMEVGTHSPWVSRLLLALGHEVVVANPRQVKLISTSSRKDDRVDAQTLARLARVDPQLLRPIQHRSAKAQGDLMVIRVRAALVEARTGLINTARGLAKSLGERLPICDSDQMGVEQTESLPTQLQQVVSLTEKIKEMDRRVEQIAREDYPETELLQQVKGVGPLIALTFVLTLEDKTRFAKSRDVGCYVGLRPRRGDSGESQPQLRITKEGDAYLRKMLVQGAHYILGYRGPDTDLRRWGLKLAARGGKRAKKAAVVAVARKLGVLLHRLWVTGEVYEPLRNAHTQPQVKKAAA

SEQ ID NO: 315729 - protein, 403 aa, unidentified
MNNVAGIDVSKGKSMVSVLRPFGEVVAKPFSIGHTGSELKELADYLKSLDGETRVVMEHTGRYYEPVARFLHDEGVFVSAVNPKLIKDYGNNTLRKVKTDKADSRKIARYGIDNWAELRQHTPMDTIRMQLKTLNRQQSLYTKTKTMMKNNLIALLDQTYPGVNALFDSPVREDGSQKWVDFATTFWHVDCVRNMSLTAFAERYRKWCKRHGYNFSQSKAVEVHAGAQDLIAMLPRDALTKTMVRQAIDALNAVSASLERLKAEMCTLAAQLPEYPVVMAMHGVGDSLGPQLMAELGDVTRFTHRNAITAFAGVDPGADQSGTHEAKSTRVSKSGPPELRRALFLVMDCLLKTQPQDDPVYRFMDKKRAEGKPYLVYMTAGANKFLRIYYGRVKEYLASLEGN

SEQ ID NO: 315730 - protein, 351 aa, unidentified
MNGVDEADLVVGVDTHLDTHTAAICDARGRVVSQLQVPATTAGYVQLLAWARSAAGDRPVAWAVEGTRHYGLGLARHLAAQGEHVSEIDCSRHIGKRRAGKSDPIDAVRAARELLARPAPAQMRADGDREALRLLMIDRDNAVQSCKTARTALAAVLVTAPAELREQIRPLPRERRAKACAALTCPDATDRQTRVLHQTLIRLGQRIAALADVAADPEAQITAIVEDMAPGLVAAEYGLGYLSAAQILLSWSHAGRIRSEQAFAMLSGTAPVPVSSGRTDRHRLNRLGDRQLNRAIHTIAVTRMRCHQPTQAYVQRRRAEGKTDREIRRCIKRYLARHLYRALSHGILSST

SEQ ID NO: 315731 - protein, 360 aa, unidentified
MLKYSLGIDVSKNDIHACLSVIDTRQQVKVKASSKFTNKKDGFKDLLSWISRHKKEPDIPMVAIMEATGVYYEACALFLFKAGLDVAVVLPNKAKKYLQSLGLKTKNDKIDAAGLARMGAEQCLELWQPMGDFFYTLRALTRHHQSLQEMKTNINNQLHADEHSIYSSKEVIKQLKKLIVTIEKQLEETKKHIHSHLYSDDEVAEKINHITDIKGLGYMTVATVLGETNGFALFKSIPQLISYAGYDVVENQSGNHRGKTRISKKGNSHIRRAMHMPAFNMIKYNTGNFKPFFERIFERNHQKMKAYVAVQKKLLVLIYTLWKKTEAYKPNTKVNTSGNEDTAPSFALTRQGQLNEVAPA

SEQ ID NO: 315732 - protein, 355 aa, unidentified
MMIIGVDYHPSFQQIAFLIEETGEYDEQRLNHEGGEAERFYRELKRKGIRVRVGMEATGYSRWFERLLAELDFDLWIGDPAEIEAKRVKKRKTDREDAKLLLRLMREDRFPRIWVPSPENRDLRQLLWHRHRMVQMRTRIMNQLQALAMNEGKRWKSKLFSQKRAEFEKLALGPWASRRRRELLELLDRLNPSIEELTKAVEQEVNKRPEALRLMTHPGVGPITALAYVLIIGTPERFARGKQIGTYVGMIPIEESSGDKQRLGHISKQGSSLLRYLLVEAAQAATRFNPHWRRRYIHLAMRRHRSIAKVAMGRRLGVRLYWMWRNGCDYSPSFEFGSYAGQLGRGGMVGSSTPR

SEQ ID NO: 315733 - protein, 343 aa, unidentified
MQTVTTVGLDIAKSVFQVHCVDAVDQVVIRRQLKRRYVLAFFQKLPPCLIGIEACASSHYWSRELQALGHTVRLMPAAYVKPYVKRQKNDATDAEAICEAVTRANMRFVETKTPEQQSCLMLHRTRHLLIRQQTAVINAIRAHLAEFGIVAPVGRLGVEALLGVVADPKDKRVPEVARACLAALGAQLRVLKKQILEFDRMINAWHRSNEISKRLDEIPGVGPALATALVASVANPRAFRSGRDFSAWIGLVPKQHSSGGKDKLGSISKQGDRYLRGLFTAGALAVIRYAKIHGTKHRPWLAALLARRPTKVAAIALANKLARMAWAMMAKGESYKEPVALAA

SEQ ID NO: 315734 - protein, 429 aa, unidentified
MNYTQNKKIAQVTDATMVVGIDIGSQMHYARAFDNRGRELTKRVFSFKNDLEGFNSFYLLTETLRRGNDKADVMIGCEPTGHYWFAFAKYVQNHQMKLVMVNPFSVKRIKELDDNSPKKTDSKDPKTIAKRVVDGRYSIPYMPEGVYAEIRDLVYSRDRIVKQCNISANRIQRWLAIHFPEYLGLYTRFDATSGLAVLEKAPLPKDVIALGVEGIRKIWHDKKMCGRGVTEDRTKTLVEVAHNSVGLDGGPGTKSELYMLLEEHHLWTSQIEAVNKVLEETIQEVRYVEKLLAMKGVGSITIAGFIAEVGDIRRFKSPKQIQKYAGLELVENSSGKHKGKTRISKRGRRKLRKILYQVMVPLIAGNQEFRTIYDYYVTRVKNPLKRRQAMIAVSCKLIRVFYAVLTQGVDYDRFKMLSDIHHESELIIA

SEQ ID NO: 315735 - protein, 352 aa, unidentified
MTVKCMAGIDLHSNNLFCAIVDMDGKRVFEKRLPCDLESVLQALKPFKKRLEKIVVESTYNWYWLVDGLQDHGYTVVLANPAAMEQYNGLKHADDKSDGFFLAEMARLNILPTGNICDRAIRPVRDLLRRRMGLVHQRTSLILSLKSLHTRMTGRDLETGRLKALGPQDAEKLFAHPADQLITRLDLHLVKQLGRSIREIETRILGEAKRMPRYQVLQTMPGVGKILGLTIMLETVDPKRFAGPGHYASYCRCVDSRRLSNGKKKGENNSKCGNKYLAWAFVEAAQYARRHDLACRKFHDRKSAQANGIVATKALACKLAKAAWHMMSRHTPYDGGRMFPNVKMNNLNKLNP

SEQ ID NO: 315736 - protein, 370 aa, unidentified
MGKSTPLFIGLDVHKDSIAVAHAQGQSADPPVFLGEIGTRQTDLDKLLRRLLAKTPALVFAYEAGPTGYGVHRYLTGQGVECQVIAPSLIPKKPGDKVKTDRRNAVDLARLLRSGDLTRVYVPTVEDEALRDLCRARDAARLTLKNAKLRLKAFLLRLGLHYVGRADWNAAHLRYLAKVVCPTPAQQIVFQESVRAVDEQVARLQRLEAELLERAPAWRLYPVVQALQALRGVQWLVAITVVAELGDLTRFDSPRQLSAFVGLIPSEYSSGTARRQGGITKAGNGRARRALIEAAWAYRHPAKVSQHIQTRIDALPKPIQDIGWKAQVRLCKRFRRLTARGKHPNVAVTAIARELIAFMWAIAKEVAVTG

SEQ ID NO: 315737 - protein, 436 aa, unidentified
MEEVTDEPLYRDRVCGIDIGKAEMHATIRVPSDKDPARRASETRSFATTRRGVLALADWLRSWQVPAVVMEATSTYWMGPFFRLEAEGFECVLADARQVKNLPGRPKRDPSDSSWLAQCFERGAVRPCFVATKEFRVIRLHTRYRRDLINERSREKNRAEKLLETAAIKLSSVITDLHGVTGRDIMEHLIAGERDPKDLAQLARTRARAKITELQHALEGAEFFTGHHARLLKTMLERIDQIDAQISDLTAVIEELLAPYEEQLAQAESMPGWGRRSAEDAVTETGVDMTRFATAGHLVSWAGRAPLDHQSGKRKGQARHKKGNTYLGGVLGETAVCAGRTQTREGARYRKLARSRGKNKACVAVGNTQLKVYHQLLSNPGMRYQDLGPDYYERRAQNRRKIGYHVRELEALGLEVTLCRIPGPDPGPGQAATPPA

SEQ ID NO: 315738 - protein, 360 aa, unidentified
MFTERTSVGLDVHARSVAAAAIDGVTGELFQTKLPPGNDRILAWVRGLPGPVAVAYEAGPTGFGLYRSMTAAGVRCVIAAPSKLQRPSGDRVKTDARDAVHLARLLRLDEITPVAVPTADQESARDLVRAREDCRGDLMRARHRLSKLLLRHGIVYDDGAAWTTKHDRWLSQQRLSGLASQAAFDAEYETVLQVKARRDRLDRAIEQLAADSEFTPLVRRLGCLRGVSTLTAFGLAVEVGDWTRFTGNSIGSFVGLVPSEFSSGQSRAQGPITKTGNGHARRLLVEAAWHHRPRYHVGAVMRGRWEQAPVAARERGDLGNRRLHERWVRFLERRKRPTIANIAIARELAGWCWSLAVMDT

SEQ ID NO: 315739 - protein, 357 aa, unidentified
MNIKGRKIDFSKQELFIGIDVHKKSWTVTIRIPSTVLKTYSMRPSSKELNKHMEKYYPHGNYHSVYEAGFSGFWLHRELTELGFDNIIVSPSDIPTSSKERLTKTDKVDSRKLARELSNGALKGIYIPNIMEENLRGLSRQRYQQARKLARVKNQIKSYLNCCGCELPENSELQHWSKRFISHLQNIKFENEIGKEKLEFYLDELEIIKKRKLQLLNSLKKHLKEKSKYNLVELLLTVPGIGFITATTFLTEIIDIYRFPNSDKLASYLGLVPAIQSSGETEKVLGLSFQYNKYLRQLLVEASWIAVRNDPALTLVFNKYLVRMSKQKAIIRIARKLLNRIFYVLKNKHNYVHSVVA

SEQ ID NO: 315740 - protein, 461 aa, unidentified
MKNKSSSKAKKHSKQKVAIDQNWQLINPDAAGIDVGSREHWAAIPPSRSGQTVRCFGATTPELEALGNWLKEAKVSSVAMEATGVYWIAVFQVLERMGFKVLLVNSRQVKNVSGRKSYVLDCQWIQRLHTYGLLGGSFRPADPYCVVRSYLRYRDELVSARSTQIQHMQKALLQMNVQLSHVISDISGQSGLAIIGAIVAGERNPLVLAGKASQRIKSSRDKVARALIGDYRPEHLFVLQMAYSLYETYQTKIAECDQAMIEELNKLPDRVDVQAKPLPPRTEGKKIDQALRQRLYQKMGVDLTAIEGIGAKVVLTMLTEVGPDLSAFPSEKHFTSWLGLCPDNRISGGKVLSSRTRRVVNRFSDALRLAATSLECSQSALGAYYRRMKGRLGAAEGVTAAAHKLARLIYRLIKHGEEYVRLGLEQYEQKNKNRKLRSLQNIAATLGLQLVPVQAQTEGVS

SEQ ID NO: 315741 - protein, 362 aa, unidentified
MAEVRSWAGLDVHAAKVIAVTVDSHSGELRAHRLPGDTSRVVAFCAGLPEPAMVAYEAGPTGFGLARALAAAGTECIVAAPGKIERPAQDRVKTDRRDAERLVRLLMIGGLHPVRVPTGQEEALRDLVRAREDVRGDLMRARHRMGKLLLRHGVRYDGAGDNWTQRHRGWLGHVELPDRGAQVTLLDYLGAIDALVVRRDALEQAITELVPGSPWAITVARLRCLRGIDTLSAVGLCAEIGDWERFRRPAQLMSFLGLVPSENSTGEQRRQGSITKSGSRHGRRLLVEAAWHYRRPPARSTALRRRQQGQPAHIIALAWKTQQRLHRTWRRLDTERGKRRTLVAVATARELAGFCWALATAD

SEQ ID NO: 315742 - protein, 416 aa, unidentified
MKLFVGIDVSSEKLDVCFLTDDNQLSILSEISVANDIEGASFIRETILEFNDSYHFDQIVIGMESTSMYSFHPSMFFHEDEKLKKLNTLVTIENPFRVKQFSRMFDEDKTDRNDALRIADFLRIQRFTTSPIKEEKYMALQRLTRTRYQLIKQLIRTKQHFLENLTYKCNTLAREMRDESTSLFSATLISLMTEDFTLDELAELPLEAFCDLLQEKGKGRFKQPEKIAKAIQRAITMSYRLGALAQESINVVLSVLVREIRALEKNIKELDKAIEQVIVVIPEYQCLTSIPGVGKVYAAGLIAEIGQIERFEDQTKLAKYAGLSWKVNQSGNYQSQNTPLTKQGNRYFRYYLVEAANSVKNYLPEYKAFYQSKYKEVPKHQHKRALVLTARKFTRLVDTLLRKHQLYTPPRSVIEK

SEQ ID NO: 315743 - protein, 460 aa, unidentified
MYGPLTVAALTSTRIRFVVPVAISAGDHSHVVRVKEESMLAESHDEEQIIARVAALDIAKAELVCCVRVPSPAGGKRRLQEVTTHSTMTQALTELANRLVEMGVQRVVMEATSSYWKPVFYLLEAHGLDPWLVNARDVKHLPGRPKTDVLDAVWLCKVAERQMLRPSFVPPWPIRRLRDLTRYRTDLVAARTAEKNRVEKLLEDACIKLSVVASDIFGVSGRAMLAALVAGERDPKVLAQLARARMRGKIDRLEQAFDGHFADHHRFLLSRMLSRIEGLDADIAAIDAQIEAQLAPFAEAAAHLDEIPGIGSVAAAAIIAEIGVDMSRFPTAGHLCSWAKFAPGINSSAGKTKRSASSGHGNPYLARVLGEAAVGTTKTNTFLAARYRRIARRRGQPRAVVAVGRSILVIIWHLLHDPDARYQDLGADHYNRHVDPSAKKRSHIRQLEALGYTVTLTPAA

SEQ ID NO: 315744 - protein, 402 aa, unidentified
MNAVGIDVSKGKSMVAIMRPFGEIVSAPFEIKHTASDINSLVELINSVEGESRIVMEHTGRYYEVLAHQLSKANLFVSAINPKLIKDFDNDSLRKVKSDKADAVKIARYALDKWQNLKQYNVMDELRNQLKTMNRQFGFYMKHKTAMKNNLIGILDQTYPGVNTYFDSPARSDGSQKWVDFASTYWHVDCVRKMSLNAFIDHYQNWCKRKKYNFSQSKAEEIYGKAKELVPVLSKDAITKLIIKQAVDQLNSASTTVESLRTLMNETASKLPEYPVVMAMKGVGTSLGPQLMAEIGDVSRFTHKSAITAFAGVDPGVNESGSYEQKSVPTSKRGSSDLRKTLFQVMDVLIKTHPQDDPVYQFLDKKRAQGKPYYVYMTAGANKFLRIYYGRVKEYLSSLPES

SEQ ID NO: 315745 - protein, 344 aa, unidentified
MAKTPIAVLGIDLGKNSCSVAGLDINGAVVLRRKMTRETLVAFTSKLPACIVAMEACCGAHFLGRTFAAQGHTVRLMSPEYVQPYVKSQKTDDRDAEAIAEAATRPTMRLVTLKSEAQLDLQVLHRARERLVTARTRLTNQLRAVLLERGVILPKRRAPLRHRLHELMAGEPPISPRVVRLLQDLREEWASLDERISAYDDELAALTRGDPQARQLATIPGIGVINATALLAAVGDGSAFAKGRDLAAWLGLTPRQHSTGGKTKLLGISKRGNKYLRTQLIHGARAALTHFVKTPTRIGAWIRQLLVRAHPNVVVVALAAKLARIVWAVLRHGRTFEHQGCAVS

SEQ ID NO: 315746 - protein, 350 aa, unidentified
MIIIGCDFHSRFQQIAMLDPQTGEVIERRLEHENGEARKFYAGLATPARVGMEATGYAQWFERMLAEQGHQLWVGDAAEIRAAMVRKQKTDSRDACHILDLLLKGKFPQIWIPSTEERDVRQLLRHRYKLVCLRTSLKNQLHAMAMGHGICRKKKLWTAVGRKELQGLSLGPWASRRRQQLLDLLDQLEPVMEELDRAVIQEAEKCPAAVRLITQPGVGPVTALAFVLTIGPVERFQKSRKLVSYLGLNPSEESSGGRQRLGAISKQGNSMLRFLLVEAAQTASIYDPELRRDYHRLKFRRGSGVAKVAIARKLAVRLYWKLREAAQPVPPAPMQGSPAHSVVGESLSSF

SEQ ID NO: 315747 - protein, 349 aa, unidentified
MLIIGCDYHPSFQQIAWVDTESGECGEQRLAHSGGEAERYYHGLNGHRVRVGIEATGHARWFEQLLAELKYELWVGDPARIRAMRVRKQKTDRQDAQLLLKLLVEERFPRVWVPSAENRDLRQLLWHRHRLVQMRTRVMNQLQAIALNEGVRRKKGLWSQRGREQLESLTLANWATRRRKDLLDLLDRLNPKIEELSEAIEQEAVQRPEVKGLMTHPGVGPLTALAFVLIIGSPERFRGGKQIGSYLGLAPGEDSSADHQRLGHISKQGNALLRFLLVEAAQAVVRFDPEWRRHFLHLAMRRHRAIAKVAMARKLAVGLYWMWRKEWDYRQMAQFGSHVGQPVTGHGVL

SEQ ID NO: 315748 - protein, 339 aa, unidentified
MNITTVGLDLAKNVFHVVCLNEHNKEVKKRMLRRNHVRQFFAQLPACTVAMEACATSHYWGRELIALGHNVKLIPPQHVKPMVLGNKNDYNDACAIAETVNRPKITFVAVKTTEEHDMQAIHRMRAQCIRDRTALSNSTRGLLGEYGISFSKGLAVLRRKIPELLEDADNGLSLRFRNLLARRYGQLVEIDEHIAFYTKELELLSKQDDACERLQTIPGFGPIVASAFRSAIGDGRAYVRGRHAAASLGLVPRQYSSGGKDVLLGISKRGDRYLRKLLVHGARTVVLHAANRDDPLSRWINLIRERRGYNRAAVAMANKMARMGWAILRHNTSYEPTLA

SEQ ID NO: 315749 - protein, 323 aa, unidentified
MGVDVSKLTLDICCAEKKLYIKIDNGSKGFSLFKKWCKTNGINLEKTLVVMEYTGGYEYRFMQFCESIAVSYCRIPGLEIKQSMGMTRGKSDQADAFRIGQYGEEKGKRLKPSKPLDNRILRLKQLLSFRKRLVREKAGLEGTLKERKHMYAIRKTDTISHIAAAKIKANKKYIIQLEQEIMEVIKSDEPMLLNYRIISSIKGIGPINAWMTIAYTENFTSFTDARKYAVFVGVIPFEHTSGTSIKGRKRVSHLAHKGLKSELNQAAKTAITHDPEIRTYAERKLKSKAYPLVLNNVKFKLILRMFSLVKRGENYVENYRKAA

SEQ ID NO: 315750 - protein, 323 aa, unidentified
MNKSTKFYGIDISKDVFDVTDQKEVHYQFTNDIKGFKKFKKILDENSHCVMEATGYYHYKLAYFLQENEVLVSVENPLSVKRFIQMKLSKIKTDKSDSKMICKYAESVDLRIWEGESKNQQECLQMTRSLSIYKKQSTMLKNKIHGEEVLGVPSNFVLRSLKRSLKHLQKEMKLIEEKLLELVKKENQELLTLLESIPGIGRKTSVMLLVLTDGFNRFQSASELCSYAGLTPMIRSSGSSVNGRPRISKIGNQKLRNLLFLCSFNACKYNQACKSLYDRIVAKGKSKKLALIAVCNKLLKQAFAIAKSRLPYDPTYRSTLSVN

SEQ ID NO: 315751 - protein, 358 aa, unidentified
MNYIGCDCHISTLDCAVVNERGHETKKQKMNTSVKGLMAFVKSIPKPRKIIIEEGTLASWLLEVCTAYGEELIITDPKINRWIGRAGQKNDEIDASKLAQLARGGYIKEIHHPIGNRRRFRELVMSYHDTVKSQTRIKNKLKAKFRQNGIKCSGETVYSVKYREEWQKRLPQEKVVEVMVVGLWQQLDQVHEVQEELLNHIRKQSRQYSEIKRFKHIPGIGTVHAATISAIVETPHRFANKKKLWMYAGLGLAEKASGEKVYSRNLTRSYNRLLKSALKQAAEAAISARDNQFRRQYLRLTLEKGIPSHRAKLTVARSILATAYGTWKSGENYDPHIDKRRAESDNMQVRAYHLVRNG

SEQ ID NO: 315752 - protein, 390 aa, unidentified
MYIVGIDIGKNNHEATIIDETGVIIGKSIKFTNSHSGANKLIEQVTKNIGDNDVVFGLEATGHYWLSLYSFLLEKGYVINVINPIQSDSFRNLYIRQTKNDTKDSFIIAEVIRFGRFTTTQLADEKILSLRQLCRFRLSLVDSVSELKCRIITVLDQVFPEYEKLFSDTWGISSKKLLEKYQTPEEILALDTSKLAEFLKEHSRGQLGFAKAEKIQEAAKNTFGIKFAQDAFKFQLKQLIKQVLFIEDQIKDLDSEIEIYYNQFDSHLESIPGIGKVTAAIILSEIGDITRFKSAKALVAYAGIDPTVKQSGQFLSNNNKMSKRGSPYLRRALFLCASTCTLHESPLNDYYTKKRNEGKHHLTAVGAVAHKLTHIIYAILRNNMDYEPMS

SEQ ID NO: 315753 - protein, 678 aa, unidentified
MARRQTVRPDIVALPLLPHETLYVGVDVGKFGHIAGFLSRTLLARHERFEGCPTLAFDQSREGFRAFVDRLRELVPIEQVTVLLEHTGHDHSLLEQYLLDLDITVYRIHVQERPKGMVKTDKRDALSLANRLYTQLDLGAQVEDKMQLVRRALPPTKAASQLKGLIQHRYELSHQCTQLRNKLTAICDELFPELVQIFRDPNREVALAYREKFPTPYAIATASMAALRELRSRSFPSEAQFLKFQQLARETIGIKNVDRQQGLLIEQALLIKELRIVQEHLELLQTAIADVVTNCREGQILLSIPPIGPIQAATIIATVGNIANFEKACELKSYFGWAPKRSQTGVSFDRTKLASRGVRPMKQTLFLMAARATTLDCEWARIYQRLLPRLATYDERTKDYRGKLRVIGRIAGVKSQLFRTPSGNYFCRFLNGDLRCFLLKLSVVVGLGSTIALDLHQIQNDGVMNDAIYGSHRGHRVFEDVVPLAKDQIRRNDHGFAFIALRQEGEEHFHLIAVLLHIANVIKNDAGKFIEPSQFLGESQIAFGSQQPLHQVRGWCPQHRMPLQNQFIAQRCGDVTFPNAWQARCHDIGGRAKKASRLQALNLKLELGWQALQIKSAEGLVWGKGRSTQESCGTPLHAQLLLVLAQFQQIGFVREALFGGFERQIGKHGSHAAQVQAL

SEQ ID NO: 315754 - protein, 338 aa, unidentified
MTVVTVGLDIAKQIFQAHGVDRTGRVVLRKRLKRTEVATFFAGVEPCLIGLEASGGAHYWFRVLSRLGHTVRLIAPQFVKPYVKSQKNDANDAEAICEAVSRPSMRFVPAKRVEQQDLQCLHRVRSRLIGCRTQLVNQIRGLLAEYGIVLPQHIAQLRRHLPALLEDDGNELTISTRHLFHSLYEEMVELETKITCADQRIERAFRENAECQRIAAVEGIGPVTATAVVAAISDGHAFRNGRQFAAWLGLVPRQHSSGGKSRLLGISKRGDPYLRTLLVHGARSVVYRAKAKTDCRSRWINDKQHRLGTARACVALANKNARILWSLIAKQQVYRPAV

SEQ ID NO: 315755 - protein, 411 aa, unidentified
MQRVIGMDIHRTFAEAVFWEAGRLRSGGRIDMTRSGLEGFGRSLSKEDEVVVEATGNAMAAVRVLSPYVARVIVANPLQVKAIAHAHVKTDRIDAGVLASLRAAGFLPEVWLPDADTELRRRLVARRNQVVRHRTRIKNEVHSILQAHLIPPCPHADLFGRLGRSWLGRQELPVDERAAIDRHLRELDRLGEDLEFLDREIAERVIDDPSVKRLLTITGVNINVATGLVAAIGDIRRFSSPQKLVSYVGLNPRVRQSGLGLAQHGRISKRGRSHARAMLVEAAWAASKAPGPLRSFFLRIRARRGHQVAAVAVARKLAVLCWHLLTKDTDYQWARPALVAHKIRAMQLQAGQLEKKGNKRGAAYAYNIKELRNREIDVARHAEQAYEQFVSRWQPRGPGKRRTGAANEERR

SEQ ID NO: 315756 - protein, 313 aa, unidentified
MKKTICGVDVSKAKLDVCIEPGHRFASFDNDTAGIAGLAAFCREHAVELVVMEASGGYERRPFVGLWERGISCALTNPRHVRRYADAMGILEKTDRIDSSVIARFADAKNLAPTPLPSQAQQRLKALVARLRQVTDDLTVQKQRRASLLDNTEMRESIDEVIALLKRQSRKLEGEIASMIDDDPLWAKLGETWREVKGVAGRTVARLHAELPEIGILSNKAIAKLTGLAPIANDSGKRKGKRPTRGGREGVRSILFLVAATAARYDKSLADFRNRLVAAGKEKMVIRIALARKLLVRLNAKARDARTAYANAT

SEQ ID NO: 315757 - protein, 340 aa, unidentified
MKKVSTIGLDLAKNVFQAHGADASGAVIFRKKLRRAQVLEFFATQPACTVAMEACGGSHFWGREIGKFGHRVRLIPPAYVKPFVKRQKNDAADAEAICEAAQRPTMRFVAVKSEAAQGAAVVFRTRDMLVRQRTQIINALRGHLAEFGLIVAQGPAHVAKLIMAVQDPKQPLPEAARPILCVLVDMLGLLDQRIKLLDIAIARRAKEDEVARRLMSIPGVGPVIATAVAALAPPAETFKRGRDFAAWLGLTPLQHSTGGKQRLGATSKMGERTLRRLLIIGASSVVRWAARKGAPAGSWLASMIARKPAMLVRVALANKMARVIWALMAKGGTYRAPVVA

SEQ ID NO: 315758 - protein, 417 aa, unidentified
MMLFIGDDWAEDHHDIEVEDEAGKRLARARLPEGLAGIAELHALVAKHGPASWTDLPAEQVAGQVVVGIETDRGPWVQALLAAGYQVFAINPMSSSRYRERHSTSGAKSDAGDAHVLAEIVRVDRHHHRQIAGDTELAGAVKLLARAHQTAIWERTRHILRLRSTLLQFFPAAVEAFPDLAGKDSLILLGRAPSPTRAAKLTRSQVVSALRAARRHHVEDKADALLTLLRSGSLQQPPTVAAAFAAIVSSQVVVISALSAQIEQLQAVVAENFDQHPAAEIYLSQPGLGQVLAARVLGEFGDDPLRFADARARKNYSGQSPITRASGKKTVVLARFAKNNRLGDALHFQAMSSMKASTGARAYYDAMRARKIGHHAALRQLANRLVGILHGCLKTATKYDENTAWHAHQPADQPIAA

SEQ ID NO: 315759 - protein, 409 aa, unidentified
MELTPIYKRVIGLDVHQAQISACAIIEQADGSVVLERREFGGFKRDRKALAEWARSIGPEVVVMESTGIYWKSPFAALEAVGIVAWVVNARHVKAVPGRKTDVADAQWLATLARAGLLRASFIAKADLRSLRHIARQRQKLGGMLASEKNRIHKLLTDAGIRLGVVVSDLHGQSARAMVKALIAGKSVPEVLALASNRLRASRETIFEALQAEEMTPAHRFVLAEIMEHIEELERRMARFDAELLRALRAADYEAPLQLLQTLPGIDLMGAAMLLVEIGADMSVFGSAQRLASWVGMCPGNNESAGKRKSGRIRKGNAWVRRLLCEFAQAAGRSRCALKDKFQALNVRKGHKRSIVALGHKMLRTIYAMLSKKTHYVDKTVDYEALMVARNAPRWLQMLVKHGYVPAPA

SEQ ID NO: 315760 - protein, 349 aa, unidentified
MYYVGADLHKEQTWFYIMDENGIKIDSKSISNSPDSLKSYFATIPTPFTLAVEATYNWYFFIDMAEQFAQTAYLANSYELKAFAKRHKKTDKIDARLIADILRKGFLPTVFIPDQSIRSLKELLHYRINLVRDRCRNIFRLKNTLDKLGADSSGDFTTKKRLWEIPVDSFAERCHYIISGYIGRIVALNQHIHNMKTYLKNELLEDKEIQNLITIDGLDYFSAALIKSEIVDINRFASFNRLCAYAGLAPRVSQSGDKEAHHGALMANRRKNLQWILLETVFHFIKATPERQARYEELKGRKGANTAKVIMARQYLKIIYHVLKEQRPYYREEVKRPKDFCQIQSVAAA

SEQ ID NO: 315761 - protein, 343 aa, unidentified
MEVYVGLDVSLKETSICVVDGSGKIVSEGTVLSEPSALAEFLRAQAGSAKRIGLETGPTTTWLWHELRALGLPVICIDARHAKAALSLQINKSDRNDAVGLARIMQCGWYKEVQVKSLPCHEVRAVLNSRAQLVKITRDLENQIRGLLKNHGLVIGKAGGNIFRRWAEELVGEHRLLHEAVRPLLAVHEAVRREIAGLTRKLLGLARNNDASRRLMTVPGIGPINALAFCAAIDEPSRFRRSRSVGAYFGLTPRRYASGEIDWTGRISKYGDAMVRTYLFEAAGVLLTRVPQWCKLKAWGHRLWKRIGFKKAKIAVARKLAVILHRMWRDGTDFIWSTKEAVA

SEQ ID NO: 315762 - protein, 340 aa, unidentified
MTHYIGLDAHSKTCTAVVTNAKGKILKKSVFATTEKDLKAFVDSVASPKMLAFEEMNIAHWLYVLLKNRVDEVQVAHAAHLPKQRGAKTDYIDAVRLATELRNGKITNVFHSDSPLFELRILVKAHQDVTQDVVKAMNRYKSFLRSKGKFISGKSIYNDEETPTSFEKENDKFVAVNMFEQIRSLKEIKKSYEEKLAAIAKKWPKIKSLCAIPGISHIRATMIMAIVCSGERFPNKHKFWAYCCLVRHIEISDDKIYGSRKAKGSLDLKSVFMGAVLSVLQGESSLRKYYDRLRSKGVSDRNARMAVARKIAAIALMTVKTGVPFDNHHDEKRSRIDNTN

SEQ ID NO: 315763 - protein, 451 aa, unidentified
MLEETQDTEEIIGRVAALDIGKAELVCCVRVPSAQGSGKRAQEVRTYQTMTRSLLVLADRLGELGVTRVVMEATSDYWKSPFYLLEAHGFDVWLVNAKDVKHLPGRPKTDKLDAVWLAKVAERQMLRPSFVPPPPIRRLRDLTRYRADLVAARTAEKNRVEKLLEDAQIKLSVVASDIFGVSGRDMLAALIAGERDPKALAQLARRRLRAKLSLLEEAFYGHFSDHHAFLLQTMLARIDQATADIATVEAHIDAEIAPFAQAADRLDEITGVGRAAAQVIIAEIGVDMGRFATPGQLVSWARFAPGVKESAGKKKGKATTGHGNPYLARVLGEAAAAAGKTNTFLGERYRRIARRRGTKKAIVAVGRSILIIIWHLLSDPDARFHDLGPGFYDTRIDADRRKRNHVRQLEALGYKVLSPDRHTSTHCLDPAPPGAAACLLTVDFRISITRG

SEQ ID NO: 315764 - protein, 407 aa, unidentified
MNTAVGIDVSKGRSVVAAMRPFGEVALPPREFFHTSEGLSALSEALRLIDGNTRVILEATGRYHEPVVMALQEAGFFVSAVNPKLIKDFGNNSLRKVKTDKADAVKIARYGLEYWEEMREYTETDTTRQQLKLFSRQYNLHMKTVVSLQNNLISLLDSVFPGINELFTSPVREDGRQKWVDFVCTFYHRDCVSSVSIAAFSERYRKWCKRKGYNFSTAKATEIYTTSRNMVVTMPKDALTKALITSAAGQLVAATATLATLKAEFVRLAATLPEYEVVRSMYGVGEVTGVQLMAEIGDVRRFANRGALIAFAGVDPGVNESGKHSSQSVRTTKRGSPHLRRTLFQIVSTHLKQSPLDEPVYQFLDRKRAEGKPYLVYMTAAANKFLRIYHAKVRDHLNALEQVDSNT

SEQ ID NO: 315765 - protein, 349 aa, unidentified
MEYVGFDLGKVNSQICVLTEDGELVEKRLKTERETLAQFFGRRFGQVCVLIEASTESEWVARCLEELGCQVVVADPNFAPMYATRSKKVKTDRRDARALCEACRLGAYRAAHRISDEARATKNLLAVREQLVLTRSRYISFAKSLLRGEGLRLNSVDADRLSRKLEAMELPAVLRQTLTPLIAAMKTLDEQIKITDKELERLAADNETVKRLQTVPGVGVVTAASFAAVIDNVERFETAKQVRMYLGLVPSENSSGERQQRGRLTKTGNRRLRYLLVEAAWSLLRSKKADTAKLQKWTQAIAGRRGKQIAVVALARKLAGILYAMWRDGTEFGIVGQESQLMMTSSQQL

SEQ ID NO: 315766 - protein, 356 aa, unidentified
MVECTKRLSGLTIGLDLGDRHTVGCVLSCEGAILETFRMATTPAATRRTMEGFESSRVVLEVGTHSPWMSRVIEGAGHELIIANPRRVRLIAENDSKTDEVDAELLARLARVDPELLKPIVHRGEQAQRDRVLLLARDGLVRSRTQLINQVRGFAKSLGHRMPSSSTEAFPRRVRERFAEEVFPGQSAMLELIDRLTKEIAAMDREAERLCEERYPETGAMRQVKGVGALTSLAFVLTVEDPGRFANSRSVGAYVGLRPRSRQSGEQQPQLRITKAGDALLRRYLVTAAQYILGPFGPDTDLRRFGLKLAERGGKAAKKRAVVAVARKLAVLLHRLWITGEEYEPSGYGQLERKAA

SEQ ID NO: 315767 - protein, 403 aa, unidentified
MAATCTQHSTKTPPAAPVPVPQPVLYLAFDLGWNSWSLAFATAPADHPRLRKLAARDLSGLLHEISKAKERFGLPADTRVVSCFEAGRDGFWLHHYLTAQGIHNSVVDAGSIELARRRRRKTDRLDASKLLDKLRRWHQGEKTVWSVVQVPSAAEEDRRQLHRDLLDMKAERTQHINRIRSLLALCGLAVAEVTADLPAQLAELRTWNGQTLPAELHQRLLREHQRWQCVERQIQELEKERARRIQETEDEPVRMVRQLLGVRGLGLNSAWLYVFELFGWRRIRNRRQLGALVGLTPTPHSSGDLEQELGISKAGNRRLRTMAVEIAWCWLRYQPASALSRWYQRRWGDGNRRQRRIGIVALARKLLVALWRYLETGEAPEGATLVAWQSKRRSHRKALPALV

SEQ ID NO: 315768 - protein, 366 aa, unidentified
MKERQTLTRYVGIDLGKRTYEMAVVGKGGKVTKSNGKTYPSARQGLYNKLRPGDKVALEACSLAFIMAKEIEAAVRCKVYVLNPGRLSIIYKSMKKTDKEDALKLAHILEDFSEDRLPVVAVPSDKEMERRKILANYRRSDQNRTRNINLLHALFVSQGITTIKKTDLETGESRKEAIQILTGMERDEAEYLVKCLVLIEERKEKLDRMINEEAADDEEMQRLQEVPGVGPKVSFAFVSHVGAARFENASQLSNYLGLVPMVYMSGDTVRYGPITKRGNSYVRAMLVQAAWSMVRAKKGGKLKEMFEYMTVEKSKGKKKAIVAVARRIAELLYLLMRDEVRYESRPFISPEKKKEAEKIAQLALSA

SEQ ID NO: 315769 - protein, 341 aa, unidentified
MEQATTIGLDIAKHVFQVHGADGAGHVLFRKRVTRGKLLGFLAAQAPCVVAMEACAGAHYWAREIGKLGHRVRLIAPAYVKPFIRRQKNDAADAEGTCEAAQRPSMRFVPVKTEEQQANGIVFRARDLLVRQRTQCVNALRGHLMEYGYVFPKGITHVETLVAVVEDLQSSLPDSVRAILKLLVDTFTALEAQIAVLDAEIKQRSKSDPTARRLMTIPGVGPIASTAIIALVPVAEGFAAGRDFAAWLGLTPLQKSTGGKQKLGAVSKRGERTIRRLLIIGASAVVQQASRRGAPKGSWLAQMLARKPKMLVTVALANKMARTVWALLVKGGSYRIPAVAA

SEQ ID NO: 315770 - protein, 422 aa, unidentified
MTPDQKRAFAATFPVHVGVDTSKTFHVLVARGPDGTRTRPHRVAVSRAGFDAADAHLRVLFQDVAAGQMLVGLEFAGHHGFTYAHHLARQGYAVVNVLPAHTKRTKEVEDNSPLKSDAKDAGVICKLVGDGTFVRFPFLQSPFVELKLLTTHRHRLTVEETRYKNRLQGLLDLAWPEFLGQFSTLRKQTPRTLLERWPLPQDLLAAHKSTVRAAARRVSRGHIVGDAIDRLLAAARTTIGLPQAAPERRLEIQYLLVRWALVRTQIADLEARIAALVATCPQAHVLTTLPELSAVCAATVVAELGTPDDFDHYRQVLKLAGMNLVSKSSGLAEERRARKWQSKRGRPMLRRQLFLLAGRWCQARGLYREEYLALVARNGGLRTKAVCSIARKLVPLILAVLKSQEPFDLGRWRANRRRPDVA

SEQ ID NO: 315771 - protein, 400 aa, unidentified
MRAVFGIDVSKTSSEVAILVNGEKVHGYTILNDAIGFNRLLGDLKTVHNPEIIFEATGVYSRCLQAFLEECGYAYTRLNPLEAKKQLDSLRVRKTDKIDAEKLAKSQLVHNRKPTYVQEEVYQHLRDLSRFYQNMTEDLVRTKNRLHKVLQVTFPELETLLSTPTGEQYWNLVMAFPCKEFVLSLSQSNLCEIIRQSTSKRISEKRIAYLTDKLIKLAKQSFCAVKNTSPMLEEVRYYAQELLRLSERRQVVLNDMVALAQPLPEYDILRSIPGIAETTATSIIGELGDIRRFQSSNQINAFIGIDLRHYESGNFLAKEHITKRGNPYARKILFKCIHNIASASHTNPCHIADFYEKRKRQSTIASTKPHTIASIHRLIRTMDYLITHNKLYDYSLTQNR

SEQ ID NO: 315772 - protein, 317 aa, unidentified
MKNVTQSYVGVDVSKKKLDIHIYPNNETFCVDNTKKGIEKISKRLKIINVAKVMLEASGGYERLAVTTLSRNYNTYLVNPKRVRDFRKASGKKAKTDPVDASLIAKFAANDCSENIMPLNEKDVLLSDLFKRKQELKKMLSAEKNRLEKKSNKAIEREIDVHIRFLKRRIKKIDTEIKNIIKSVESYKRKKEIIESMPGVGNETAQGIISDLPEAGEIDGKSLASLVGLAPQTNESGQFVGHAKIGKGRSEPRKLLYMAALSAIKHNPVLKSFYNRLREKGKPFKVAIVAIMRKMIVILNTMLRKNEMWRLEPDMSK

SEQ ID NO: 315773 - protein, 378 aa, unidentified
MYRILKIGMDVHTTNYTLCAVEPILGEEENVLAQIQIEPDYKMVIQFINRLKERLGVTDKECDILCGYEAGCLGYSLYHQLTNAGVKCVILAPTTMMTEKGKRIKTDKRDARLIAKCLCHGGYHAVYIPTADDNAIKEYIRMRDDHKIALKQKKQQMNALCIRYGCIYEGNNWTQAHLQWMRKLKLPELIRETLDEYLATYDELTAKSERYDKRIQELADQSEYQEKVKNLECFLGIKTHTALSLIVETGDFARFRKGNVYAAYLGLAPGEHSSSDDCNRLGISKAGNSHLRCLLIEASRGICKGVIGQKSKALRARQIGNSAEVIAYADKANVRLRRKYYKLIHRGKKRNVAVAAVARELACFVWGMMTDNIHGNAA

SEQ ID NO: 315774 - protein, 347 aa, unidentified
MRFYTNLHPYYCGIDLHARLLYVCIIDDKGEILVHKKISDSPEALLTLLTPYIGNIVVGVECMHCWYWVSDFCLENNIDFVLGHALYMKAIHGGKTKNDKIDSFKIAKLLRGGNFPIAYTYPNTMRATRDLLRRRTKIVRHGAMLKGHVVNTNSQYNLPATELNLKNISARQALRERFDDPIVQRNIDMDMAILDFYAKELAQVEWFVEKQAKNHNPVYLELLKSVPGIGKILSLTILYEIGDVLRFESVQKFASYSRLVKCKAESAGKTYGTQGNKIGNAHLKWAFSEAAVLYLRGNDKARAYLNQLQKRMSKAKALSALAHKLGRCVYFMLKNKTVFDEERFLKG

SEQ ID NO: 315775 - protein, 354 aa, unidentified
MSQELNSAVAVIGIDIGKNSFHIVGHDQRGAIVLRQKWSRGQVETRLANLPPCLIGMEACVGAHHLSRKLQMFGHDARLMPAKYVRPYSKGQKNDFRDAEAIAEAVQRPTMKFVATKSAEQLDLQALHRVRERLIGQRTGIINQIRAFLLERGVAVRQGPRFLRAALPGILATRTDVLSPRMLRIIENLAGDWRRLDERIDGLSGEIEALARQDQACTRLMTVPGIGPIISSAMVAAIGTGEAFSKGRDFGAWLGLVPKQISTGDRTILGSISRRGNRYLRVLFVQAAWVVLVRLKQWERYGLKSWIEAAKKRLHHNVLAVALANKLARIAWAVLNKGRAFECVKRDAMASRPA

SEQ ID NO: 315776 - protein, 352 aa, unidentified
MNQNIILSTDYHDENCVIRWLDESTGQEQIHKITTCAKGLSALVARAEAIAKPRGGHVVWIQESTTGWARVEALLGRRVKFHLANVVQMPLPPKGKRRKTDKIDTARIQREYRNGALPLAHRPPAWWRQVRRLVALRENLVNRRTALRNWINRYFAHETWQERTGFWSQKGRTRLQKLAAAAPRWDRLVLETKLAELDQLVCQVETVAAAMHEVFKQWPQAQRLDKIAGIGVIAATSIVARIGPINRFASAEQLIAYAGLAPGVQQSDGTRRHGRIGGGGTDGHLRHYLIEATVWARHIPRYRATYERTCQRRGARIGRLMVARMMLRSIWRILRKGETFDPALPAGVGKKN

SEQ ID NO: 315777 - protein, 353 aa, unidentified
MMNTQRKDWTGQTLYAGIDVHKAKWVITVRTKEIQLKTFVTGADKEALLKSFRHLFTGATIEAVYEAGSFGYHLAEYLNANGIKTIIVAPHTIPTAPGQFVKTDVIDSRKLASELAKSSLSSIYLHHTEDLYDRSLLRKRRQLVKRRVQLQHQIASDLRFFGLESQVDIKSYWSRWLITDLKEMEFSNEYYQEAFRMLVDDYVTVRAQIYTLDRLLVTVANTDKYRKQVELLRTIPGFGRLAALTFLVEIGDIKRFPSAEKFASYLGLTPSEYSSGEHIRKGSLTGMGHTMLRAVLIQIAWQSIRRDPVLLMKFQHLCLGKSKCQAIIPIAKSLANRLRRVLLFNEPYVIGVA

SEQ ID NO: 315778 - protein, 450 aa, unidentified
MERRQPQIKNWEGLKVIHPNAAGLDIGSEEIWAAVAPALTPAAVRQFGTFTPDLHALADWLATCGVDTVAMESTGVYWIPVYEILEARGLQVYVVNARHLKNVPGRKSDIQDCQWIQGLHSVGLLRGSFRPEGEIVALRAYLRHRATLIEYRGAHIQHMQKALQQMNVQLTQVIADITGVTGLAIIRAIVAGERNPQQLATLRQHGCKRSEETIAKALTGNYRLEHLFALQQALALYDFYTEQLRACDVEIERQFVNLKPIDDDLPPLPPTTKTDSHSKNGPAYDARTLLYQLTGIDLVAITGLNASTVQTIIAEIGRNVNAFPTEKHFSSWVGVAPHNDISGGKRLRSRTLKTNNRAGQAFRIAAQSVAKSPDSAFGAYYRRMKARLGAKQAIVATAHKIARTFYFVLKHRVPFHDLGGEEYERLANERERKNLQKRAAKLGMVLVPAT

SEQ ID NO: 315779 - protein, 342 aa, unidentified
MQITTIGLDIAKNVFQVHGIDGAEKVVVRKQLRRSQVLAFFKALPPCLIGLEACATAHYWARDLTKLGHQVRLMPAKDVKAYVKRNKNDAADAEAICEAVRRPTMRFVQIKSAEQQGRLMLHRTRDLLMRQRTQVINALRAHLAELGTTSAQGREGLKELLKIVASDADERLPADAHASLVVLAAELQAMQTLIGSIEKRIVTQHRENKASKRLLTIPGIGIIGATAIADTVTDPKAFRSGRDFAAWIGLVPRQDSTGGKQKLGPISKQGDRYLRRILVVGAHSVLRRAKLNPQKHPWLTQLLARRPFKVVAVALANKMARMAWALLAKGGAYRAPALAATA

SEQ ID NO: 315780 - protein, 357 aa, unidentified
MKKQTEQILRNEKIFIGLEDSKKTWKLCVRSGDMIVAETTMPAQYEALRNYLNNKFPECQIQVIYEAGFGGFELHDQLVADGWECVVTPPHTVTEEKCQRKKNDRIDCRRLAKNLENGDYHECFVPDKELREDRQISRTYGQVNEDIKRTCNRIRRMLEFHGLDKDLPAGIWTSAMYTRVKKHLGELELSNSLRFSFNMMFRELEHLRQMKKDILLQLGELAKSNRYKESVELLMSAPGIGKLTAIRLVLEWGDISRFGRKEDFASFLGMVPSDYSSGEQEHQGHITKQGNRDVRSWLIECSWVAIRFDPVLLDKFRRVLRHCGNKKKAIVAVARKLALRLRRILLSREQYVIGVVE

SEQ ID NO: 315781 - protein, 371 aa, unidentified
MRYIGLDVHAETIAVAVAEPDGEVRSLGAISNEPGAIRRLVRKLGGVEGLRICYEAGPCGYVLYWQLTALGAACEVIAPTLVPERAGDRVKTDRRDAMKLARSYRSGDLTPVWVPDAAHEALRDVVRAREAAKKDQLRARHRLGKFLLRRGRRRPEGMSAWGTRHLAWIKTQHFEHGAQEATLLDYLTEVEHVGARIERLERSIETAAEHAPEKMRRVIAGLQALRGVAKIASITVVSEVGDLTRFRRPRQLMGYSGAVSREYSSGDRTHRGAITKTGNAHLRRVAVESAWSYTKRPSMYRTLQQRQQGLSEEVKAIAWKAQHRLCSRYWRLVSRGKPKQQAVTAVARELLGFMWAIAVQCEKESLATTQR

SEQ ID NO: 315782 - protein, 345 aa, unidentified
MQVITIGLDLAKNVFQVHGVDAAGTAVIRKALRRAHVLPFFEELPPCLIGAEACSSANYWARELMKLGHTVKLMPPSYVKPYVKRGKTDAADAEAICEAVRRPTMRFVAVKSPDQQAVLMLHRVRALLMRQRTMAVNALRGHLAEFGIVSGQGAKNLRELIERILAEGPDRLEFPRLARIALDPLIMQLNDLQTRVRAIEIELLAWHRTSAASRRLETIPGVGFITATAIAATVTDPTHFKSSRQFAAWLGLTPKQNSSGGKERLGGISKMGDRYLRTLLVVGATSVMRYARGKAAVSAVWINRLLAKKPARLVSVALANKTARIAWALLIKQEDYRAPKMSAAA

SEQ ID NO: 315783 - protein, 420 aa, unidentified
MQIQLMEESFMYNAVGIDASKFKSTVTVIQPAGVVIRKPFDVLHTSSELNTLVAYLKSLEGETRAVIECTGRYHEPVVKSLEDAGIFISAVNPKLIKGQKQNSLRKVKSDPADARKIARYALDNWAELRQYSSMDTIREQLKTLNSQFDFFMKQKVAAKANLISLLDNTYPGVNKLFDSPAREDGSEKWVDYAYSFWHVDCVRKIGLKAFTERYEAFCKKHHYNFQKGKPAELFEAAKQLVAVFPKEKSYKLLIHQSIQQLNLASEHIEILRREMNQLASTLPEYDTVMSIYGVGETYGPQLIAEIGDVSRFTHREAITAFAGVDPGVNESGQFRQRSNRASKNGSTRLRKTLFQIMTTYLQNKPVNEPVYQFLDRKRAEGKPYLVYMTAGANKFLRIYYGKVKECLRNLEQNSLPPEES

SEQ ID NO: 315784 - protein, 358 aa, unidentified
MQAQVKTLDFTGQNIYAGIDVHKNNWKVSIYTDELFHKTFTQPPKPDILYNYLTKRFPNGTFYSVYEAGFCGFWIHDQLQSLGINSVVVNPADVPTKDKEKKYKNDRVDSHKLARQLRNGDLEAIYIHERCVLEDRNLVRTRHTLSKELTRNKNRIKSLLYFYGIEIPEEYCKGSSYWSKRFFKWLETLELTRPSGKECLQVLLEHCKEIRQKLLRVTREIRKISQEEYYNKRVNILRSIHGIGLTTAMVILTEIDNIHRFNSQDKLASYVGITNTSHSSGDKDVHGEMINRGNKFLKSAIIESAWMAARRDPALHMVFIRLTKRMDKNKAIVRIARKLLNRISYVLKNVVPYKDGIV

SEQ ID NO: 315785 - protein, 344 aa, unidentified
MEHYAGLDVSLELTSVCIVDEAGHIVRETKVPSDPEDLVRYFGALEQPITRVALEAGPLSQWIHAGLTEAGFEAVLLETRHVKAALSAMSVKTDRRDARGIAQLLRLGWYRPVHVKSASAQEVRALLTARKLIQAKLLDIECGMRGVLRGFGLKVGPISRGRFEMRILELVDGHAMLETVIGSMLSARTALQHEFKHLHRALLALVRDDPVCRQLMSVPGVGAIVAITFKSGVDDPSRFRHSRDVGPHFGLTPRKYQSGELDVTGRITKVGDRMVRTALYEAASVMLTRTVRFSSLKAWAMAVAKRRGTRKARVALARKLGVILHRMWVDGTSFRWSKEETAIA

SEQ ID NO: 315786 - protein, 354 aa, unidentified
MQIQKQELWVGIDVSMKSFHAALDFPMLFSNQQKIPVSDLPNREFKLTSAGVRSFLNWIQLQQSDFFAQYSDEEQDNLPVAFLMEATGLSSTTLKKMLYASVPDAKVIVANPEPIKAFRISLNIKNKTDKSDAQVIARYGRERSPDPKPEMSAEMAKLRELARTRLFLKDQRTAIDNHHDNIDSSLPKRMCTAVVKAINKEIDGLDREIEKIVSDTPEIKHEVEIMTSMPGIGIGTAVVLLCELGSLKNYPTRQKITAVCGLNPAKKQSGTSVNSTRLSKKGSPVVRRFLYMCSKTAVPRIPLLQDLYNRLLARGNTRMQARCAVMRKMLLILRGMVIADKEFDKNYKNISKSA

SEQ ID NO: 315787 - protein, 421 aa, unidentified
MNSQNKESFTAYIGLDWADTKHDVCIQGAGSRKREFNCIQHQVDDIDQWVLALHKRFGGPIAIAVELAKGPIVYALQKYDFLVIFPIHPLTLAKYRQAFSPSGAKDDPTDAEFALDLLLHHPDYFNPLQPQSVVMRMLTSLVEQRRKFVGDKTRIINRLGDTLKQYYPQALDWFPRGVDTVLFCDFITRWPTLKQVKRARKNTLICFFHEHRLRRTQVLDRRLKAIRAATPLTLDEAVIAPHRLQALVLVDQLRVLLHSIKTYDDEIREVANRHPDLALFQSFPGTGPALTPRLMVAFGEQRDRFDNAAEVQKFSGVAPVLERSGKKTWVHWRWHCSKFLRQTFVEWAAQTINKSYWAGAYYRQQRAKGCKRQVALRALAFKWIRIVYHCWQTNTPYDESVYLKALERRGSPLLKSMDANA

SEQ ID NO: 315788 - protein, 404 aa, unidentified
MEATPTFAGIDWSWQHHALCIVDDDGERVEEATVPHTRPGLAKITTLLRRRGVRRVGIERGDGPVVEHLMRDGFEVVVISSRQVKSLRVRYGSAGNKDDRFDAFVLADALRTDAGRWAVVQPDSEETVALRMLVRARHDLIDHRIAVHNQLLAVLQHNFPGAIGLFSQLDIPISLSFLRRFPTEAKAAWLSELRMAHWLKANGYCGRQTASDLVNHLREAATGRVRGPAAEASELLVTMLVDLLTELRHQQELLEVRIKEALLAHRDGPIFQSLPRAGVVRAATLLAEIGDCRARFPEPASLAAAAGVAPSTRQSGKHLNVAYRRGCNKNLRAALVDWAQDTPRANAWARDTYDRARARGCRHPHAARILAQGWTRILWRCWHDEVPYNPDLHGRLNKLLQEAA

SEQ ID NO: 315789 - protein, 407 aa, unidentified
MATPSQVSVWIGLDVGKGEHFADVLDDDGERLFARAVANDQADLESLLDRAARHGIPGLVIDQPGSIAQLALAVAARRGTPVAYVPGLVMRRAADLYPGEAKTDRRDAYVLADTGRTRRRQVHWLDAGSDELLASLRVLNGYDIDLAADVTRLASRLRDSLTAIAPALERAVGERLHQAGVRDLLMDYPTLTALRAAGQPRIEKAIRTRSPRIAAKVTAAVTRAVAAQDLTVPAEAAAGRVIADLARELDRVSARRDALAAEIEEAFLAHPFGELLATMPGIGPRTGARILAEIGDGSAFATGSKLAAYAGLAPVARQSGTSLNAAARSQRGNHRLKNAMFLAAFASLRDPASKAFYDRKKAEGKRHNAALICLARRRCDVILAMLRTGQPYQPARTAQPTALADAA

SEQ ID NO: 315790 - protein, 311 aa, unidentified
MVTTIGIDPHKATHTAVAIDESETVLGELTVPADRYQTTRLMDWAGQLNGNGRIWAVEAAGGLGYLLSQQLVVSGEEVIDVPPVLASRVRVLSSGHSDKNDPNDARSVAIAALRQPGLARVLREDHVQVLRILAKRHLELTGLRTQAVCRLHSVLVQLRPGGIPARVSPNRASQLLRNMRTLDYVGEQRRAHARTHLADIRRLDRDIKANKTLIKRAVTVSDTTVTDVYGVGPIVAAFLIGYTGNPARFATPDHYAAYNGTAPIEYSSGGKTRHRLSLRGNRKLNHAIHMAAVTQIRFDTPGRRTTLRSPR

SEQ ID NO: 315791 - protein, 413 aa, unidentified
MLKIVYPICCGMDVHKSFLVACIASTNNQGVTTYVSKRFSTFTGDLRKCSAWLASYNCKDVCMESTGKYWIPIYNILESTCNIVLAHPKYVKAIRGKKTDKKDAKWIADIFKHDLVSGSFIPPADIRQLRDLVRYRFKLTNFTTGEKNRAQNCLTVSNIKLDDVFSDVFGKAATAITTRLLEAPSEKLTDVSAFRTRGMKATDEQILAAVDGEMCVEQAEKLRIIRSHMDGLELCKANLESLILSIAQKYLSQLELVMTVPGIQSFSAIGIISEIGVDMSVFPTSKHLCSWAGLTPQNNESAGKKKTTRISRAGVYIKPLLVQCALCAIRKKSNPEIRRRYENLKKRRGHKKAIIAIARMLLTAIYNILKKNEPYNPELYAHINTPPKQRTVSMEEAIFILQRQGYLVTPSAT

SEQ ID NO: 315792 - protein, 352 aa, unidentified
MAQVQSRKGQVMQIALLGIDLGKNSCSVAGIDASGEVLLRRRLHRNSIPKLAARFPGCIIAMEACCGAHHLGRVLRKQGHVVRLLSPEYVRPYVKAQKNDDRDAEAIAEAATRPTMRFVALKSEEQLDLQSLHRARDRLVGERTALINQLRAILLERGITIPQGRQKLESMLPQLIETSGDLLSDRIRRLLEEMWQELGDLTRRITSFDDEFTAFARNDASCQRLESIPGIGSLNATAFVAAIDEAQAFARGRDLAAWLGLVPRQMTTGGKPRLLGISKRGNAYLRRMLIHGARAAMPHLARTQTATGSWLRRLIARAHPNVVVVALAAKMARIIWAVLQKRVAFEHAAAAL

SEQ ID NO: 315793 - protein, 321 aa, unidentified
MPKLPIPQRWIGLDIHKAYFVAVGVNAEKQTVFGPRKILNEQLEDWITKHLLLTDAVVMEMTTNTYLFYDTLVTHVGSVIAVHPPNVLLVTGVKVKTDKKAALTLAQLHAASLLTGVWIPPEEVRELCAVIAQRAKMVRLATQAKNRLNALLHKTHRKRPVQPFKPEQRSWWESLPLSTIEMYIVASDLETLAFAEKQIKAIEEVLRQEAAKEERVPLLTQLPGVAMLTALTILAAIGPIERFEDASHLVGYAGLGASVHDSGQMHATGHITKAGRRDLRGAMVDAANAAVRHHPYWKKEFERLEYRLGRSKAIVAIAPMV

SEQ ID NO: 315794 - protein, 452 aa, unidentified
MSRTREPFSGTIPCCHPCGEHAEQSLYDARFSRQDRKELAMEVVYECCCGLDVHAKTVVACLVTKGRKEIRTFATMTEELLQLGDWLRSAGCTHVAIESTGVYWKPVFNILESLLTVILVNARHIKAVPGRKTDVRDCEWLADLLRHGLLKASFIPPLEIRELRELVRYRQTLVTEHTAVANRIQKLIESANIKLGQVASDVLGLSGRLMLRALAEGEQDVTQLAELAQGKLKSKKAELRRALAGRFTQVQRWVLAELLTRVEELEAALTRVETRIGEEVAVCADPFVPQAVELLESIPGVGERTAQTIVAEIGVDMSRFPSAKHLASWAGVCPGNHESAGKRKSGQPTQGNKSLRTILVEAAWAATNAKGTFLRAKYQRLVKRMPKQKALGAIAHRLLVMSYHLLSRRVPYAELGSAPLDPQQVERQRRRLVEQLATLGVQVTIQEGAMAT

SEQ ID NO: 315795 - protein, 326 aa, unidentified
MSKEHGLLPALGIDVSKSYFHVELGLNEKRRNRKFANSPEGFAELSVWLGKQKAPQVHACLEATGPYSEELALYLHQQRQLVSVVNPVQIKAFGKSELLRNKDDQPDAGLIRRFCEKQRPPAWTPPAAEQRQLQALTRHLEGLIQTRQQQLNRLESARSKEVVKSLRKLVQYLDKEIAQTENQIKAQLAGNPELKQQSELLESITGLGERTISTLLGEINFKQYRTARQVAAHAGLTPQNDRSGTLHGKTRLSKIGNARVRKALFMPALVAKRHNPIVRSFCARLAANGKSKMAIIGAAMRKLIHIAFGVLKSGQPFDPKHELEIA

SEQ ID NO: 315796 - protein, 348 aa, unidentified
MKGAVHMQITTIGLDIAKNVFQVHGIDAKEKVVARKQLRRSQVLTFFKALPPCLIGMEACATAHYWARELTKLGHEVRLMPAKDVKAYVKRNKNDAADAEAICEAVRRPTMRFVRIKSAEQQGQLMQHRTRDVLIRQRTQIINALRAHLAELGLVAAQGDAGVNELRAIVTDEQDTRLPIDARASVIVLAAQLEALESVIGAIEKRIKMQHRSSEASQRVEAIPGIGVIGASAIVATVADPTIFRSGRDFAAWIGLVPRQDSTGGKQKLGPISKQGDRYLRRILVVGAIAVLRRAQENPGKYPWLTQLLARRPFKVVAVALANKMARMAWALLAHGGTYRAPELAETA

SEQ ID NO: 315797 - protein, 343 aa, unidentified
MQAITTIGLDIAKSVFQVHGVDAGGQPVIRRQLKRRHVLTFFQKLPPCLVGIEACASSHYWSRELQALGHTVRLMPPAYVKPYVKRQKNDATDAEAICEAVARPNMRFVATKTPEQQSGLMLHRTRHLFIRQQTAVINAIRAHLAEFGIVAPVGRNGVEQLLGIVADPNDKRLPEVARVCIAALGTQLRVLKAQVLNFDRQIMAWHRSNETSKRLDEIPGVGPVLATALVASVADPKAFRSGRDFSAWIGLVPKQNSSGGKDRLGSISKQGDRYLRGLFTAGALAVIRYAKIHGTKHRPWLTALLARRPTKVVAIALANKLARMAWAMMAKGERYKQPVALAA

SEQ ID NO: 315798 - protein, 385 aa, unidentified
MPTYAFVGLDVSQADAHVCFLLADGFEPQPRWSIPNTQPGAEALSATVARLCAHHQIDQLRIGVEATGLLWWHLACALREAPALAPYAPQIYALNPQLVHTFRANFGALPKSDHADAFLIAERVRYGRQLPAPYQLDARYAALQRLTRFRCHLVQNLAREKSYFLSFLFLTFSTYGQVAPFGDPFGATSCAVLEEFTTDELAAQSLSDLAAYLQTHGHGRFADPLALAVTLQRAARDSYRLDRVLAEPLRLVLGTTLASIRTLQQQLKALDKTIAQELAGLPQTLSSVPGLGPVWTAGLIAELGDIGRFDDDGAIAQYAGLTWETYQSGGFTADDTALTKRGNSYLRYYLVEAANSVRTHCEEYQSTMRRKPPRPPAMRINVRWC

SEQ ID NO: 315799 - protein, 422 aa, unidentified
MLEQTRDEQEIIERVAALDIGKAELVCCVRVPDPGGGRRRVQEVTTYSTMTRSLQVMVDRLTDLGVTRVVMEATSSYWKPPFYLLEAHGFETWLVNAKDVKHLPGRPKTDRLDAVWLCKVAERQMLRPSFVPPIPIRRLRDLTRYRMSLVSDQGAEKNRVEKLLEDAQLKLSVVASDIFGMSGRDMMAALIAGERSPQALAQLARSRMRGKIPQLEEAFVGQFTDHHGYLLTKMLARIDALSVDIADLDTKIEARLAPFADTVARLDEIPGVGAVTAAVIIAEVGLDMTRFPTPAHLSSWARFAPGVKESAGRKKGTGSTGHGDRYLARVLGEAAVAASRTNTFLGERYRRIARRRGKKKAIVAVGRSILLIVWSLLSDPETRYYDLGPGFYDSRINPERKKRNHIRQLEALGYKVTVEPAA

SEQ ID NO: 315800 - protein, 407 aa, unidentified
MDVQYNLAGIDVHKRMLAVVVTNARDPELQFECRRFGTTLSELRHLLAWLQERSVQEVVMESTAQYWRPVWLALEGYCRLHLAQARSNRGPRGRKTDFRDAQRAVSRLLSGDLILSYVPEAEQRSWRTLTRTKYQLTRDRIRLQSQLESLLEECQIKLSSVVSDLLGASGQRILRALARGETDLVRLAELGDKRLRASAAELKDALSGVPQPIHRQLLTLYLARLDLIESQMEKLDRLIVEAMAAHQHAIVRLAELPGLGIDSAQQIIAEIGPQAAAFPSAAQLASWVGVCPGRQESAGVSSSDRSAKGNRSMRRLLNQLAHAAVRKEDCQLQIVFRRLSSRLGYAKAVWAIAHRLCRLIWKVLHEGVSYVEYGPTPTPLALKRRRQRLVTQLKKLGYQVQLLPATP

SEQ ID NO: 315801 - protein, 458 aa, unidentified
MKSRQRHRTKGIEEAHPFAGMSRVNKDAAGIDIGAVEIVACVAGDESTQIVKAFGNYTVDLQNIGKWLKGHNVKTVAMESTGVYWIPLFEELERQGFECLLVSSRSLRRVPGKKSDIQDAQWIQTLHSYGLLESSFRPQGDLVGLRTLLRHRGQLVDHRSPHIQHIQKALLQMNIQLSQAVSDITGQTGQAILRAIVGGERDPEKLAALRDRNCKKSEEEIAKALTGTWGGEYLFILKQSLELYDYYTGQIEACDAEIERMYALTRPDWEGGELQPLSTRKRNSHSKNAPPNQEEIRQHLKRISGVDLSVVDGFGVSVAQMVIMECGTDMSKFPSEKHFCSWLGVAPKHEISGAKVLRNRTLKTKNRAGQAFRMAAQSVKRSDCVFGSFYRRLRSRLDKSQATVATAHMIARVVYRMLKYKVEYETIDIEEYEAKYQEQQVKYLKKKAAKLGFQLIPA

SEQ ID NO: 315802 - protein, 424 aa, unidentified
MLRIIHPICCGIDVHNKFVVATIAKTDQKGVTTYQTKEFKTFNYDLERLRDWLLKNECNQVCMESTGKYWIPVFNYLENSCTITLANPKYVKALSGKKTDKKDSRWIADLFKHDLVPGSYIPPKEIRMIRELCRYENKLVSNRSSEKNRIQNSLTVSNLALANVVSDAFGKTASRIIEYVVNCDVFDPEYCKTLIDGRIKASHDDVIKSILGYNLVPSQASKIKLSQAHLNFIDDSILKLNETLFELTKPYESQIKILTSMVGVNEKSAIKIISEIGTDMSVFNSAKHLCSWVGLTPQNNESAGKKKSSKISRAGVYIKPLLVQCANAAIKSTKNPYFRDKFLKIKKRRGHKKAIIAIARMMLTCIYHMLSKGEMFAPSDVNYSDMPPAVFEKRRQKMIQSAIVLLQKQGFQISKTTDNELSVS

SEQ ID NO: 315803 - protein, 343 aa, unidentified
MGEVSTIGLDIAKSVFQVHGVDAAGQVVIRRQLKRRYVLAFFERLPPCLVGIEACASSHHWSRELKVLGHTVKLMPPAYVKPYVKRQKNDATDAEAICEAVTRSTMRFVATKTPEQQSCLTLHRTRHLFIRQQTAVINVIRAHLAEFGIVAPVGRKGVEALLDVVANPTDKRVPVIARACLAALGAQLRRLKEQILEFDRMIVTWHRSQETSKRLDAIPGVGPVLATALVASIADPKAFRSGRNFSAWIGLVPKQHSSGGKDRLGSISKQGDRYLRSLFVAGALAVIRYAKIHGTEHRPWLTALLARRPSKVAAIALANKIARMVWVLMARGERYKEPIALAA

SEQ ID NO: 315804 - protein, 403 aa, unidentified
MQERTAGLDLASEEHRLVVVEGDGKEREQQRIPHSEEGIVALIRCLRTSNVSRVAIEQPNGLVVDRLLDAGIAVVPVHPNQLAAARGRYRTGGKSDSFDAYVLAELARTDMHRLRPLEPDSDETKALRALTRAREDLVEQRVALANQLRAQLDAFWPGARQIFFDVDSPIALAFLERYPSPTDAHGLGEKRLAGFLARNGYSGRRSPTQLLERIRSAPQPRLGETEREARRAVVLALVAALKPLVEQIRLLTSEIAGALRAHNDGNIFLSLFRDPKSVVTAAELLAEIGDNRARHPASASLEAIAGQAPVAVQSGKKKVACFRWACNKNLRDAVGVLADSSRHHNPWAADIYQRARARGHDHPHAIRILGRAWLRVIWRLWQDHTTYDPNRHGSLKRVLTTEG

SEQ ID NO: 315805 - protein, 344 aa, unidentified
MTITTIGIDLAKNVFQVHGVDKRGHVVLRKLVRRDQLAAFMVNLPPCLVGMEACGSAHHWARKFQDFGHTVRLMSPQFVKPYVKSNKNDAADAEAICEAVTRPNMRFVPIKSVEQQAVLSMHRVRQGFVTARTAQANQIRGLLAEFGIVLPKGISAVRNQLMGRIDQAADRLPGVFLELMRRLHEHFAALDRQVSELEGQIKQWHRNCELSQRLEKIPGVGPITATALVTSIADARSFKNGRQLAAWLGLVPRQHSSGGKPTLLGISKRGDVYLRTLLIHGARAAILAATRHAKSNPWLSNLLGRRNPNIAAVALANKNARTIWALLAHDREFRADYVPRLAIS

SEQ ID NO: 315806 - protein, 335 aa, unidentified
MKETSICIVDQTGKICREVKVTSHPDDLIAVLKDPAWNMERIGLEAGPLSQWLFEGLARAGLPVICIETRHTKAFLKAQPSKSDRNDARGIAQMMRVHLYRAVHVKTLTSQKRRALLTARKLLQDKAIAIENDLRGLLRNFGLKVGVVGSAKFEARIRELVEGTLNLVEIVEPLLDARRNLREHFATLHRKLLMIARDDEVCPLLMTIPGVGPVVAVAYTATIDIPQRFKNSKAVGPILGLTPVLNQSGESHRVGRVSLCGDGMMRTLLYDAAQVLLNRVAKWSWLKAWAMSVAKRRGLQKAMVALARRLAVIMHRMWSDGTEFCWSREKLPAGA

SEQ ID NO: 315807 - protein, 414 aa, unidentified
MFAVGVDVSNGRSTVAVLQSKTKVILKPFEVPHTPEALGRLVDKLSSLDGETRVIMEHTGRYYESIAMFLDSAGFFVSALNPLLFKNYEEGISVHPVKTDKADAVRIAKFGLDKWDLLRQYEPMDTIRYQLKTLNTQFQLASKSKTAFTNNLIALLEQNYPGIRKHFPSPARPDGSQKWVDYVGTFWHLDCVRKLSQNAFTERYFKFCRKHDYNFSEEKAAELYRHAQSTIALVPKSDISKLMVKEAVSQLNSVSRTLETYRSEMNRLASQLPEYQTVMGMYGVGPSMGPQLMAEIGDIRRFPQKNSIIAFAGIDPKKEDSGDKVSTTGKSTKRGSPHLRKTLFVIMDILIQLKPADDPVYQFLDKKRSEGKPYYVYMTAGGTKFLRIYYGKVRDCLIEKGLWDKPLIESGKSD

SEQ ID NO: 315808 - protein, 314 aa, unidentified
MSNKVVMGIDVSKSRLDCFGLPLEQAWSCDNGPGGIEQLVCRVRELGCELALMEATGGYETQAATALAAAGLRVAVVNPRQVRHFAKAMNKLAKTDRIDARVLTEFALSINPQVRPLPDEGTRELSDLLARRSQLVTMRTQEKNRMLQAAPALRAGIKTHIKWLDVEITKLEVDLTAKLRASEAWCDKRDLLLSVPGVGSTTTLALLAELPELGQLNRQRIAALVGVAPLNDDSGKRQGRRFTWGGRAAIRSVLYMAALSAMRHNPVIRVFYQRLRANGKPFKVAIVACMRKLLTILNAMVKQNKSWQPTSQLA

SEQ ID NO: 315809 - protein, 393 aa, unidentified
MICVGIDVAKDKHDCFILNSEGEVLADVFTIPNNAEGFDRLLQTIRRCARPEDKMKVGLEATGHYSYNILGFLLNEGLPTYLINPLHTNLYRKSLSLRKTKTDRIDARTIAAMLMSDVDLKPYTDTAYHNEELKSLTRYRFDKVCERAKLKQSVSRLVTILFPELEKLVPTLHMASVYALLSEFPGAKQVAGAHLTHLKAVLYDASRGRYGRDMATTLREAARCSVGSVMPAKSLELQHTIRLIRELDAEIEDIETAIQSMMDEIQSPITTIPGIGVRMGAMILAEIGDFSRFDSPDKILAYAGMSPSTYQSGQLSLSGTYSHMEKRGSRYLRYALYNATKYVCLWNPTFAAYLAKKRAEGKHYNVALSHAAKKLVRLIYAIEKSQKPYCSAA

SEQ ID NO: 315810 - protein, 417 aa, unidentified
MWNKATKVKCSVEDSITNSPLEVFTMTVVIGIDVAKDKHDCFILNSMGVILEDVFTIPNTLEGFNLMLSKIRTHTTPQDKIKVGLEATGHYSYNLLGFLLNNGLTTYVLNPLQTNLYRKSLTLRKTKTDRVDARMIASMLLSDVGLKPYTDTAYHNEELKSLTRYRLDKVQNRAKLKSSVSRLVCILFPELEKLVSTLHMASIYALLEEFPGAKQIANANLTHLKNLLATASKGHYGREKAVEIRDTARASIGSHMPAKSLELRHTIHLIRELDREINDIEAEIQKIMDELDSPITTIPGVGLQMGAMILAEVGNFYNFDSPDKVLAYAGLSPSTYQSGQLKNCYPHMEKRGSRYLRYALFNAAKYVCIWNPTFAAYLAKKRSEGKHYFVAISHAAKKLVRLIFALERSGQSYRQTA

SEQ ID NO: 315811 - protein, 397 aa, unidentified
MYIVGIDIAKRKHEAAVIDGEGTVIIKPFSFTNNCSGYNRLLAMLAKAKLPLDEVSFAMEATGHYWLALFTRLQKEGFRVQVINPVQTNSIRSFYIRQAKTDPRDALLIAEVIRFGHFSESTLHPENIYELRELCRGRHAIVSMQADVKRKVVALLDQVFPEYETAFTNMFSDTSMAILQTCPTPKELSEMPLEELCHLIEVSSRKRFRMAKAQELQALARGSFGFAMAGDVFSTMIRLYAKHLDFLKQQVREMDRKIAEIMDTLDTPITTITGIGPTLGAYILSEIGDISRFSSAAKLAAYAGIDPTMRQSGEYNGVRNRMSKRGSPYLRHAIWLAASSAVLHDPALKFYFQKKRDEGKPYMASVGHACRKMVSIIYAVMRDNKAYTPHIPNEISA

SEQ ID NO: 315812 - protein, 343 aa, unidentified
MNEYDGSQVVGIDLHRQRSVIVRQTAEGEQLSAVRIVNDPVALGLQIEKAGTNPEVVLEATYGWYWAVDALQAAGASVHLAHPLGVKGFRYRRVKNDVRDARDLADLLRMHRLPEAWIAPPPTRELRELVRYRAKLVALRSGLKAQVHSVLAKAGVLIPVSDLFGVEGRGRLTKVPLGVAYAQRVISLLELIDVLDAHERRFFDQIAAELRGHPCYRAIQALPGVGPTLGAVFVAEIGDVHRFADPSHLCSWAGLTPKHRESDTVVHRGHITKQGSKLVRWAAVEAIQRQPADSKISVDRKRIEARRGRNIAKVAAARKLLTLVYYGLRDGHIRALAHHKAAA

SEQ ID NO: 315813 - protein, 360 aa, unidentified
MSFRKVGVDLGLCGPHHISVADEAGHLIRPSLHVETSASEFDRLYAHALEGAPAGTRLKIIFEPTALIWLPFAIYSRAKDHLIYRVKTQQLHDLREFYRRYRKNDRLDSKAGAKMPDETLDELYLPPRDYMALDRTTQQHEKLTEHLQREKARLESLIEGLMPGVTKAFGEPFCQAARVIYEHLANPFAIQQLGCDGLKQFINQHCREQIKANKLAAIWRCAQNACELYQYGHDVVDFEQFGREIKRYYQHLVAIENLLADVEPEIQLYYQRVHPSRNIETIYGIGEKLGPVFVAIVKEPNRFRSHTQIKSFIGMIPKLDDSSGSSKKGLAITKAGPPRARANATAGDCGARSPCSRSSW

SEQ ID NO: 315814 - protein, 340 aa, unidentified
MKHIGMDLHSTTTEACVRNGKGEIVLRRRIETTRAGLEKFVAGIPGPKRVAVEECQMADWVTRVLKPHVDEVIRCQPQFNKLISESEDKCDKTDSESISELLYLNRLKRVHHPELAYRILRETVRAYWIASRELTRAKNRLKGFFLFNGLHETGDKIYSVRNRSRRLKKLEKAGGHVELGQLLYERVDHCRQLKAKHIRLARKSAKPMKDLVRLLMTMPAIGAIYAYTLVAYLEDGRRLPNKRKLWRYAGVSLRNHESRGIGRRHASCSGSRLVKHVAMSAAATIASHHGNNALSELREKDIRSNVDPEQAQRNLARKILAIVQHLLRSKQEYSDERVRV

SEQ ID NO: 315815 - protein, 351 aa, unidentified
MIYIGIDVAKDKHDCFITNSDGEVLFKAFTISNNLDGFNELYQKIESVMEDTTKVKVGLEATGHYSYNLLGYLIDKGLPTYVINPLHTNLYRKSLSLRQTKTDKVDARTIASMLMSDVNLKSYSDTFYHNEELKSLTRYRFDKVKERAKLKTSVSRLVCILFPELEKLVPTLHIASVYALLSEFPSAKHVATAHLTRLTNLLSESSKGRYGKDTAITFRDAARASIGSNMPAKSLELKHTIKLIQELTAEIDEIENEIKIIMDEINSPILSIPGINYRMGAMIIAEIGDFNRFDSPDKILAYAGFSPSTYQSGQLDGAYAHMEKRGSRYLRYALYNATKYVCHIAILPVND

SEQ ID NO: 315816 - protein, 315 aa, unidentified
MIVGIDISKDSFDASWIKSGKGVSKKYDYTELGMKSFLSDTPKNAQFLMEATGVYHTHLALRLFESKRRVSVCNPLVIKRYSQMKLIRAKTDKADARLIRQFGEENNPSVWSPNSEEINELKQAHGWLNDQIQERTRLLNRREAHHHQARKSAFVEKQMRMQLKSLNQQIKDCEKHLEVVVKKHFADLYSRLMRIPAIGPKTALELIIITGGFSRFEDIKSLSAYIGVSPTNHESGTSIKGKGCIARMGNGRMRQLLYLCSWTAKKCNPSCRELSNRMTEKGKPTKVINIAVAHKLLRQAFAVAVNDVEYSANYA

SEQ ID NO: 315817 - protein, 344 aa, unidentified
MDKSITVIGLDLAKSVFQVHGVNAEGEVVVRRKLSRSRVLAYFNQLEPCLVGMEACATAHYWGRELRALGHDVKLMPPQFVKPYLKSQKNDMRDAEAICEAVTRPTMRFVPIKTPDQQALLALHGVRDHWVRLSTRLINTLRGYLAEFGIVAARGRMGVEAILDTLADDQDDRIPDLARECLMPLANELRHVKRQILETDRKIMRAHRSSDMCQSLETIPGVGPVIATRVVAEVPDPRIFKSGRAFSAWVGLVPKQHSSGGRDRMGRITKTGNPELRRLLVAGAMSMIIRAKQLGFTRHPWLSRLLERKPMMVVAIAMANKIGRMIWALMVKGEKFNPAKLMPA

SEQ ID NO: 315818 - protein, 361 aa, unidentified
MFTERTSVGLDVHARSVVAAAIDGVTGEVFRARLTPGNDDVIGWVRSLPGPSAAVYEAGPTGFGLARAFMTAGIRCEVAAPSKIQRPAGDRVKTDARDAMLLARLLRLDDIVSVTVPSVAREAARDLVRAREDVRGDLMRARHRVSKLLLRQGIVYYGGHAWTGTHLVWLRNQHFDAPGLQLAFDAEHEAVLQAEARRDRLDKAIVAMAADSEYTPVVHRLGCLRGVATLTAFGLAVEVGDWDRLTGSTIGACLGLVPTESSSGQSRSQGSITKTGNTHARRLLVEAAWQHLKPYRTPGATMRARWELAPAAARARGHAGNQRLHQRWLHFAERKKKPVIANVAIARELAGWCWSLAVMDA

SEQ ID NO: 315819 - protein, 411 aa, unidentified
MTRTYVGCDSHQNSHTLVFLNCFQEKIGEITIGSAPSEFDKFIKQAKKYLLPNTVFTFGFEDCSSYGRAFVKFLVDKGHQVKHVDASLVAIERGQVLHKTDSYDAECAARVLINKFDKLPNANPEDKYWILSGLVTRRASITKINIMTKNSLHGLLAQNYPHYKKFFSRLSSNSALAFYEAYPAPHHLENVTVDELAQFLKQISKGQLSKSKAELILKAIKSDKVPTTEYQDTRDFTVLSLIRQVKNNLNELNAIDEQIEKLLKQFDYPLTTMKGIDTLTSAKLIAEIGDINRFRNASSLAKYAGVSPVTYASGMSALQMANARGNRKLNEIFYQIALSCITPRTKDKIVINPIFYKYYHKKISEGKTKPQAIKCIQRRLVNIIYNMMKHKRPYDNPENGYLIDEHNDKSI

SEQ ID NO: 315820 - protein, 415 aa, unidentified
MCYMLKIVYPVCCGLDVHRSFIFACVASTDEKGITSYKQQRFSSFTKGLKELADWLMFNHCSDVCMESTGKYWIPVYNILEQSCKIVLAHPKYVKAIRGKKTDKKDAKWIADIFKHDLVSGSFIPPLDIRQLRDLMRYRTKLTNFNTGEKNRAQNCLTVSNIQLASVVSDVFGKSASAITEHLLNNPNDKDFDFKPLLQKSLKSKAEDIGLAIDGNITPEQAEKMKIILSHMKSISLCKSNLDSVILGIAEKYTPQIKLISTVPPIKNPLSAIAIISEIGVDMDVFKTAKHLCSWAGLTPQNNESAGKKKSVRISRAGAYLKPLSVQIANAAVKSNKHLEFKNRYQSIKKRRGHKRAIIAIARMLLTAIYQILKKNEPYNAELYKKSDAIPINRDISVEQAIFILQRQGYQISKA

SEQ ID NO: 315821 - protein, 354 aa, unidentified
MNIGLPYKGFSQGNHFNKLKYKVMRIKQTIGIDISKLTFDVRIHSNQMFHQFENTNKGFKKLIKWVNVNNSFLKDETIFIFEHTGIYSYLLSVFLTEQQLSFALVPGLEIKRSLGIARGKDDKIDATKIALYGYRLRDEIKFYEMPCEDIINLKRLLSLRDRLVKQRAGYKSSLKELSRVLTLKNNKVLLETQEKMIRYLTKQINIIEQNLDSIINSNDTLKNIFKLVTSVKCVGRQTALFIIAYTESFTKFKTWRQFASYCGTAPFPNSSGTSLRGNTQVSHLANKKIKSLLDLCAKAAIQYNPEMKAFYKRRVTEGKNKMSTINIIRNKLLSRIFAVVNRETPYVDFMKYAA

SEQ ID NO: 315822 - protein, 354 aa, unidentified
MKKMQHYIVKDNRIFVGLEDSKRTWKLCVRCDGMIVNEVSMPTEYENLQNYFMNRYPGCTVKVVYEAGFQGFWLHDCLVEDGFECIVTPPNKVVQEKSNRVKTDKIDAQRLAKNLEQNDCKSCHVPDRELREDRQISRTIDQVQKDIVRTKNRIRKYLDFHGLNGGMPPGKWGPGDYERARSMELDSVLQISFTAYFKLLDEQTKLRRHLLKELQLLCKKERYRESVTIKKNCPGVGWLSAIRFTLEWGDMSRFPTRKRFASFTGLTSSEFSTGDTVHRGRIVRQSSERVRSWLIQCAWRAIKIDPVLLTKYRTVMKNTGNNKKKAIVAVARKLALRMRAMELNKEDYSIGVIE

SEQ ID NO: 315823 - protein, 365 aa, unidentified
MKYVGIDLHKKTIVLCVVDKERKVLERKRFACLDVKGITAYFRNLGAFAFVVEATAAYEWLVQLLEPLAEDWVLAHPGKMRVIAETAKKTDKLDAQTLAEFLALGMIPKAYRPTARQREHRKLVRYRVQCRQRVSKLKCQIRYLAATYNADHRDLFQADHLEELRQRKDLTAADGFILAQRLLDYDQAQEGVAAAKKELQQFAKNSPAAEQQQRDILRSAPGVGTVISEVVLAELGDVERFGSLKAATAYAGLVPAKRESAGKGKDLGITKKGSRLLRWAMVEAAWIAVAHSARWSGIYQALKRRRGAKRAIVAVARRLLAVLVSMLKHETKYRPSLAELKDREAQAERRQKRRAAKTAQEAATV

SEQ ID NO: 315824 - protein, 457 aa, unidentified
MSKRRSKAKAKNIKVPKLPPQLQHMNLNAAGIDIGSERHLVAVPEGRDTLSVREFGTFTTDLETLATWLQQCGVTSVAMESTGVYWIPLFELLERHGFEVKLVDARHVKNVSGRKSDVLDCQWIQQLHTYGLLAGAFRPPDEVCVLRSYLRQREMLTQAASMHIQHMQKALQQMNLLLHNVVSDITGVTGMKIIKAMLGGERDPQVLARNRDERCQHTLGTIAKSLVGNYREEHLFALRQAVDLYETYQAKIADCDQAIIKQVEQQPDRSDDGPPAAEKKTPANVRLRAGIDVRDLLFKKSGVDLFAIPGLAADTLLTLASEVGFDMRPWKTEKRFASWLGLCPGTKISGGKVLHNKTKRNPNRATQAFRMAAASLYRSQTALGAFYRRIKSRSGGQQAVTATAHKIARIYYAMLTHGTSYVELGQQAYEQRYKERRIDRLKVQAKSLGFQLLPCAT

SEQ ID NO: 315825 - protein, 347 aa, unidentified
MRGAVHMQITTIGLDIAKNVFQVHGIDAAENVIVRKQLRRSQIIAFFEALAPCLVGMEACATSHHWARELTKLGHEVRLMPAKDVKAYVKRNKNDAADAEAICEAVRRPTMRFVRIKSAEQQGQLMLHRARDLLMRQRTQLINALRAHLAEFGITAAQGREGIKELLAIVAQEEGSRLPVDAHASLTVLAAQLQAVQTTIGSIEKRIVAQHRSNEASKRLETIPGIGVVGATTITAVVTDPKAFRSGRDFAAWIGIVPRQDSTGGKQKLGPISKQGDQYLRRILIVGAHSVLRRARQQPEKYPWLTQLLARRPFKVVAVALANKMARIAWALLARGGTYRAPQLVAV

SEQ ID NO: 315826 - protein, 416 aa, unidentified
MDGFRWFVGLDWAREEHRICLLDGEGKQVAERDVSHDGAALSALCTWLLERTAAQPGEIAVAIETPRGPVVEVLLERGFAVFAINPKQLDRFRDRFSVAGAKDDSRDALVLGHSLRTDPHAFRRLAVDDPLVIELREWSRIYDELKAEQNRLTNRVRQQLWRYYPQANQLAEDVAAEWFLDLWLKVPTPEKAARVSEKAVARILTNHRIRRFDAAHVLRILRTPPLAVAAGTVEAATAHIRTIAARLRLVNQQIKEAERRLDELCAAIEAATETAPGQICEQRDVAILRSCPGLGRINIATLLAEATEPLRRRDYHALRVLSGAAPVTRRSGKSCIVIRRHACNDRLQKAVYHWARVAIQHDPTSRRQYAALRQRGHSHGRALRSVGDRLLSVLCTLLQRQVLFDPDYKTAHLAAA

SEQ ID NO: 315827 - protein, 342 aa, unidentified
MSEKEAILGIDISKDKFSAALLKGEKKSQVKEFSNNIEGFEQLKQWLEQNQLEKVHACLEATSTYGHSVATYLHSLGHIVSIVNPARIKGFAQSRLSRTKNDQADATTIARFCAALKPQAWTPPSPEMAQLQSYSRRLRALEQMATQEKNRLKTTVDESLIEDIEAHLVFLETQIDNVKKRQKELLNEYSSLKSQADLLTSIVGIGEPTAMTILAEIGDINQFSSARQLAAFAGLTPQEHQSGTSVKGKTRLCKIGNPHLRKALYFPALSSIRHCSPIKDLRERFLEAGKNKMQIVGVVMHKLIRIVYGVLKSGKPFDQTKLALPNVVLEEETDFLPQQFSL

SEQ ID NO: 315828 - protein, 358 aa, unidentified
MAITTIAHAEATRVTVGVDTHGDVHVAHAKDQLGRRLGTVSITTTPVGYQDLLAWAQGLGQVEAFGIEGTGCYGAALARFLHQAGQVVLEVNRPDRAARRRRGKSDPVDAEAAARAVQAGEVTILPKAADGSAEMLRSLRVARTTAMRARTQAINALRSLLVTAPAELREQLRGRSAVRLVKAAAALDPGALTSPTAAAMLALRTLARRYQALDAEITTLGSELDRLTARAAPSLLALFGVGSEVAGALLVAAGDNPGRLRSEAAFSMLCGSSPIQASSGKTTRHRRNRGGDRQANAALYRIVVVRLRWHQPTKDYVARRTKQGKSKKEVIRCLKRYVAREVFAVLKDIGQTDPTKTT

SEQ ID NO: 315829 - protein, 410 aa, unidentified
MEVLHPHCAGLDVHKDTVVACVRHMAQGAVRREVRTFKTTTKDLMALSEWLSAEGCSHIAMEATGVYWKPVWHVLGDGEFELVLANAAHVKNVPGRKTDVNDATWLADLMAHGLIRGSFVPDEQTQEMRNLLRARKQFVRERSSHIQRIQKTLEDANIKLDSALSDVMGLSGRAMIEALIAGQSDPDILAGLAHRRVKAPPQELREALRGRVHEHHRFMLRLHLSQIDALAGAIAEIDREVDAHVEPFRTAITLLTTIPGVSDLSARVIMAEIGNDMSRFPTDGHLISWAGLCPKNDESAGKRRSTRMRKGAPWLKTTLIQCAWAGARKKGSYLQAQFHRLRSRRGTKKAIGAVAASILTAVYHMLTNGTLYQDLGPDHFDRRAKASQTKRLVIRLQNLGYAVQITPLAA

SEQ ID NO: 315830 - protein, 344 aa, unidentified
MSDNTRIAVDLAKSVFEVAVSVRPGTVSERHRLSRAQLVRFVAQRPAATIVMEACGSAHYWGREFQQLGHQVVLLPPQRVRPYVRGNKTDRTDATGMLEAYRNAEIRPVPVKSVAQQTLAALHRLRSGWLAQRTAQLNSVRGLLREFGIVIPVGAPHVVPRVRALLEEADSGIPDALRNTLADVCTDLRTLEGRITQVERQLEALAQQLPTVARLRSIPGVGLLTATALVAVVGDARRFPSGRHFASYVGLTPREYSSGATRRLGRISKRGDAYLRMLLIHGARTTLWHAKHRKEPDSLRSWAVRVEKLRGHNKAAVALANKVARIVWAVWTRENTFTAIAHAA

SEQ ID NO: 315831 - protein, 328 aa, unidentified
MGIDLAKATFDFCLLSRDGAVLWRGRFTNDASAIRQFLAQLEGGRWKPSLIHFALESSGVYGKALIGALHQVALAVSVLNPAQVKYFAFSVLRRTKNDRVDAELIARFCRERKPLATRPLRPVEEQLKLLVHERESRVGEQNRERSRAKKDPFQISLPALISHQRQYRLNQLQKEITQLDEAINELIASDECLKTQSKLLCSIPGIAETTAAKLLSELAGKEFQSARRLAAYAGLTPSEFLSGVSSYGKTHLSKIGNAFLRKALYLPAAVARRWCKPLRPWVTLLEKRKLTDLAIRGAIMRKLLHIAFGVLKHQTPFDPSLVFMPKTV

SEQ ID NO: 315832 - protein, 343 aa, unidentified
MQSITTIGLDIAKSVFQVHGVDVAGQVVVRRQLKRRHVLTFFEKLAPCLVGIEACASSHHWSRQLQALGHSVRLMPPAYVKPYVKRQKNDVADAEAICEAVTRANMRFVPTKTPEQQSVLMLHRTRHLFIRQQTSVINAIRAHLAEFGIVAPVGRRGVEELLTVIADPNDKRVSDVARACLVALGSQLLSLKKQILHFDRMIMVWHRSNATSKRLNYIPGVGPLLATALVSSVADPGAFRSGRNFSAWIGLVPKQHSSGGKDRLGSISKQGDRYLRNLFVVGALSVIRYAKLHGTKHRPWLTALLARRPTKVAAIALANKLARMAWAMMAKGERYRQPAALAA

SEQ ID NO: 315833 - protein, 412 aa, unidentified
MRVIGLDVSRSVAEIAYLENGLLRAGGRVGLRRDELERFAAKLKPDDHVVLEATGNTIAIANVLTGHVGKVIVANPLQVRLIAEARVKTDKIDAAILAQLYASGFLPEVWIPDEATQAMRRQVSRRAQIVRQRTRLKNEIHAVLAAHLIERCPATDLFGKKGRAWLSLQPLPMDERIGIDQRLHELDRLAENLQQVERVLAQSAIQNDRLRKLLTITGINTTVAIGLISAIGDIARFRSPEKLVSYFGLNPSVYQSGLQPAKHGHISKRGRSYARAMLVEAAWAAAQTAGPVRAFFLRVRDRRGQQIAAVATARKLAIIVWHVLTRNESFAWDRPALTARKTRDLELQAGMPARRGSRKGSAAAYNLKSVRDLERAAGEQAEQAYQRLFSRWKQARPQASAVRAPWPPIRTP

SEQ ID NO: 315834 - protein, 352 aa, unidentified
MTVTIVETRLQARAITGGVDTHADVHVAAALDPIGGLLGVAEFPATPAGYAQLLGWLGGFGTVCLVGVEGTGSYGAGLARHIAAAGVRVVEVDRSDRQDRRRAGKSDPLDAVSAARAALSGRARGAPKGRDGQVEAIRALMVAKRSARSVRTQTINQARALIVTGPDELRARFARHTPADLVAELASLRPRPGSMIRYHTLLALRELGRRAQYLDDQLARLDQLIVPLVTARAPGLLALYGIGPDTAAMLLVAAGDHPERLRSEATWAHLCATAPLSASSGKVTRYRLNPGGDRQANHALYRIVITRMSSHPPTRAYAGRRTNEGLSKKEIIRCLKRYVAREVYPHLRPPAG

SEQ ID NO: 315835 - protein, 346 aa, unidentified
MGKSITDLSSVTTVGLDLAKHVFQVHGVDASGRVVVAKAIRRNKLLEFFASLPACLVGLEASGSAHHWARELITLGHEARMMPPAYVKPYIRRQKNDASDASAICEAVTRPSMRFVGVRSRENQAALMRHKAREMLVTQRTQLLNGLRGHLTEVGVIAPQGLRCARELAELIEACDETIPFEVCEALAPLVVQLRNLDEAIAQLDRILAKLAQKDETARRLMSIPGFGPITASAMAAAIQDTSSFAGPREFAAYLGLTPKQNSSGGKPKLGRISKMGNRYLRKLLVVGAHAVLFHRKPHTDPLRMWAKRLIEKKPFKLVAVALANKMARIAFAIMRGTTVYREIPA

SEQ ID NO: 315836 - protein, 338 aa, unidentified
MKYNRIAIDISKHVFTLHGVDGQERPVLRRNLRRAEMETFFAKLAPTEVVLEACGGAHHWGRLLRRLGHQVRLIPAQYVKPFVRRAKNDRADAEAISEAASRPSLPSVAVKSAEQQASGMILKHREMLIGQRTAAINALRGHAAEFGVIAAKGTAQIKALLDKLAGEAAVPAMAQAMFAQMGEHIARLDQQIEALDAELLARHKADAVSQLLAAVPGIGPITAITLTLSVEPEHFASGRHFAAWLGLTPKEHSTGGKPRLGRISKAGNERLRTLLVVGATSVIRHAKAGRKGASAWLLRLLERKPRKLAAVALANKMARIVWAMMARGEAYRPQPVAA

SEQ ID NO: 315837 - protein, 526 aa, unidentified
MSEVSLIRQTKYRGIITEAGSLTFPPWEPAEPLLAKPPGKSVSPFGGDLCFGWLGSPRLYLYKPLGCVSAFWKWIPARKDKTMQYQKVLKMLESIPYLSVGLDVGADFTWMSIMLPNGTLAGKPFKIVHSDPQSRELAVAKIKEAQEAYSLKSRCFLESTGIYHIPLLCFLRDKGFDCSVINPIITKNSTNMNVRKLHNDKFDSKKAARVGLDASLKVSIIPDDEVIDLRNLVRDYYYFKDLQSAVVLKLTAELKVSFPAYRKVFSKVTTKTSLKLLDAYPLAEDLLAAPKETVVETIRSTARFGEKYALARYDALRTAAEDAAIFGRALKSNSVRIRLYIDSYREYQKRLDTIMEAIHATVDGLKDSPIYGRILLLQSLRGVGFMSAVVLVAEMGSFDLFPSPKKLYAYFGLDPAVKQSGKFNGDKVHMSKRGSSLARRILHMVALNNLKVDKGSGMPVNPVIHSYYADKCKAKKKNVAVGAVMHKICNIIFAMLRDNKPFEVITPQEHCKRYLAAHPDKVQSAA

SEQ ID NO: 315838 - protein, 384 aa, unidentified
MYKHNILFIGLDTHKVSTEVAHVEDQRGAKPTHYGKVKTTKTAITKLARQYQSKYPHATLHFVYEAGPCGYWIYRLLTSLGHCCYVVAPSLIPKKPGERIKTDKRDALKLAKLLKDEELTPIYVPEPEDEAIRDLSRARETAMKDLKDAKYQLKALFLRNNITCKVNDNWSGQHLRWLTELILPHPSQQIVLQEMIQIITERIGREKRLANELFHQVKLWRFYPVVKALQAIRGIKLLIATGVIAELGDLRRFDHPRKLMSYLGLVSKEHSSGDNRRLGSITKCGNGRARRLLVQGAHTYKHKANISTELQKRQEDLPKGITDIAWQAQLRLCRRYSRLMSRGKHRNVVVIAIAREIAAYIWAIAREVVISPVNPRLRVSRVPA

SEQ ID NO: 315839 - protein, 364 aa, unidentified
MISVGIDVSKGKSTVCILKPYGEIVSKPFNITHTQKDLSELSSMLFRLNDEVKIVMEATGIYHLPVLTYLQEKGFFVSVINPYLMKSYRNESLRKAKTDKIDSRIIANYGIDHWFKMKEFQTSGEIYEELKLLGQQYRHYMKLHLLSLAELTHLLDLTMPGIKNLLASWNETNRKDKRSDFVERFWHYDVITSMSEQEFTEEYILWAKEKKYVPSQEKAKVIYTLAQESIPTLPSETSSFKMLVTEAVRVLKEVDATLGLILSRMQEIAKTLPEYSVVREMGGVGNTLAPKLIAEIGDVRRFRNGKALVAFAGIDPPPYESGQFVGCNRKISKRGSASLRKVGYETMRSLKMRSRPEIRFTDML

SEQ ID NO: 315840 - protein, 399 aa, unidentified
MYYVGVDIGKTQHAAAAVNDVGHLVIRPQFFSQDADGFNALLQQLQSLGDPSSIVVAMEATGSYWKPLRHFLEQHGYRVDPVNPMITAHEAAADVRGRKTDKLDAVATAQVARRGGYNPVPSANPAHEPIKALARQHQYLVGRRTEAKMRLASTLDALFPEAHQVFTNLGSVTALAVLEHFPSARLLAQAHARTLTALVTRASRGKLGAAFARKLRAAARASVAQSYINEGEEFVCAQLVAEIRSLNGLIDQIEQRLLATPASPVAQLLQTIQGAGQVLPRLVAAELGNLERFRGPNMAARILAYAGAEPRVRESGRWRGQTKMSKRGSGSLRHALYLLATTIRLFNPCFNAVYQRQIARGKHHNVALSHVVRKLIEVLCGMYKSSTPFSPPLPTALCS

SEQ ID NO: 315841 - protein, 354 aa, unidentified
MKTYYVGMDVHRASISIVVLNGAGKLVMQSVIETGAERVRGYLKQLRGKVYVTFEEGTQANWLHDIVRPLVTEVVVCDPRHNKLLNSGNKNDRVDAQKLAELLRNGALKAVYHGDNGMRTLKELVRNYDCLVGDTTRVMLRLKAIFRGRAIPCAGHDIYRSDRRAQWLEQLREPGARQRASFLYAQLAALKPLRHDAKLVMVKEARRQAAYPWLMSVPQLGSVSVTQLMAVVGTPHRFRTKRQFWPYVGLAVVTRTSADHEVVNGVLRRSRRPIATRGLNRNHNHLLKKVFKSAATSACHSGPFKAGYDARVAQGMDPSLARLTIARQLAAITLAVWKRGEKFNMQMMNQQLAA

SEQ ID NO: 315842 - protein, 377 aa, unidentified
MSKVQFVGLDVHAETIAVAVAEPAGEVRSLGVIPNRPESVRKLIGKLGPIDRLKCCYEAGPTGYVLYWQLTQLGVACEVIAPTLVPVKSGDRVKTDRRDAEKLARCYRAGELTAVWVPDAAHEALRDLVRAREAAKKDQLRHRHRLGKFLLRHGKRPTEAGEKWTKKYLNWIRIHAHFDQPALEATVSHYLQEVEHAAERILQLEKAIDEAVAQASPEIRAVIEALQALRGVAQMTAATVVCELGSLTRFSSPRQLMGYSGLVSRETSSGNRVQRGAITKTGNAHLRRVLVESAWAYQHRPNVQGGVLRRQTSLALSEAAKRIAWKAQQRLHKRFIAMAARGKERGKIVTALARELLGFMWAIAVHTESHFKMTKAA

SEQ ID NO: 315843 - protein, 415 aa, unidentified
MNRLIERCAMLDIHKSQITACVRVPDGDGGRQQEIGEFASTTSGLLTLADWLRSYAVTVVGMESTGVYWRPVYYLLEDEFECQLFNARHLRHVPGRKSDVQDAEWGCQLVEHGLVRPSFVPPRPLRELRDLVRYRKAKIQERAREVQRVEKTLQDAGVKLSSIASEVLGVSARKMLEALISGTHDPDVLAELAKGKLRNKIPALREALHGRFTGHHALLIGQMLAQIDFLDETIATLSERIEELTRPFSRELELLDTIPGVDRRAAEMLLAEIGPDMSRFPTDAHLASWAGICPGQHESAGKQRSGKTRKGSKWLRGTLTESAKAVVRTKRTYLSARYHRIKSRRGHAKATIATAHKILTAAYHVLERGVPYDELGEEFFYRRDTENTERYRRRLVRQLERLGHKVTLEALPEAA

SEQ ID NO: 315844 - protein, 326 aa, unidentified
MTLPKLGIDISKKTFDVALVHDPNARTHKQHQFLNTPLGFQALRAWLTKQGAPQVHAVLEATGAYGDALALFLAEAGQVVSIVNPAQIKAFGRSKLQRNKTDRADAVLIARFAWENHPAPWTPPTPAQQELQALVRHLDDLLAQRTQVTNRLTDGRLTPAVRASWAQVVTTLNQQIAQIKQQIDQHFDDHPRLQAQRDWLDSLPGIGPDTAARLLGEMPHLAEFASARTAAAYTGLTPQRQQSGTSLHAPGRLSKLGNARVRHALYFPALTALRCNPAFQAFAARLAARGKTKMQIIAAAMHKLVRLAYGVLKHQQNYDPLYAISA

SEQ ID NO: 315845 - protein, 350 aa, unidentified
MKVTTIGLDLAKNVFQVHGADAAGTPVLRKQLRRAQMAEFFAQQPPCVVAMEACGGAHHWGRKLRALGHQVRLIAPQYVKPYVKSQKNDAADAAAICEAATRGHMRFVSVKTVEQQSVLALHTARSGFVKQRTALSNQIRGQLAEFGVVLPQGLSKLNGQLPIALADQSNELTGTIRNLFLMLHAQLAHIDDLVARLERQIREWANQDPGARLLQQILGIGPITASALSAVIGDIRQFKNGRQLAAWLGLVPRQHSSGGKSVLLGITKRGDKYLRTLLIHGARAALKAYQRNPEKMPAHLAQLLARKHPNVVCVALASRNARVAWAMLSRGEDYKGWEVAKRPALPAQLS

SEQ ID NO: 315846 - protein, 359 aa, unidentified
MKFVGIDYHKRYSVVCATDERGQELKQRRINGNTAAGFARFFSELGEENKVVMEACWNWGWLYDLLGQIEQVGEVVLAHPYKTRLIAEAQIKTDRLDAQILAKLLRGDLIAQSHAPSAATRARKHLLRQRLFFVRLRTMLRNRMHAILDRQHGLERPQLKNFFCRRGQSWIENVELPCVDDQPLIKQDLEVAKVLEQKIKELDRVIGKSQSAEEKLLESIPGIGPLFSSVIATEIDGIKRFNSSAKLAAYAGVVPSTHASGGRVFNGRLLWQCNKWLRWALIEASWSAIQFSGYFGAIYRNARARGKNKNVAITMVAHRMAKIIWLLLKEKRPYTETLPDRSEDEVTVTPRRKALSLAS

SEQ ID NO: 315847 - protein, 364 aa, unidentified
MGHVQYTSKGESVMKLTTIGIDVAKSVFQVHGTDERGKVVLRRQIRRSQLLLFFSNLEPCLIGMEACGGSHHWARKLAGLGHTVRQMAPQFVTPYRKNDKNDGNDAEAICEAVQRPNMRFVPVKSPQQQAELVLHRIRRRLMGERTALINQLRGLLAEFGLVLAQGANHVRSKLPSLLENSSDSVPPLALELFQSLYEELCRLEQCIAGYDRRVQQLYRGNPLCQKLGELQGIGALTATAFVATVAHAAQFKNGRQCAAWLGLTPKQDSTGGKTRLLGISKRGDVYLRTLLVHGARSIMRHTPKRDDPKSRWVEQLRKRRGENIAAVALAAKHARILWALMVQGQSSPQPPSNQSIAPHVQPGS

SEQ ID NO: 315848 - protein, 357 aa, unidentified
MYYSGIDLHKNNCLITTIDEQGKIIKQDRINNTDYNILNYFFSCKGKHKAVVESTNNWYWLCDLLHEHDIDVVLAHAKYLKAISYAKVKTDKVDSLTLAQLLRMNLVPTAHQISPEKRSMRDLMRARLRLVQKRTCCYNSIHVLLDKFNLSIPENMQLHNPSVFNRIEQIKLEPTYQFQLKSYIEQIKLLTDQIKEIENHLSSYLIPNEDIKHLLSIPGIGKITAFTIYLEIDGITRFNDVKKFFSYCRLVPGAKNSNRKQQHKSSKDGNRYLKLAFTEAAVRAVQYYKEIRQFYRKKLRKRHKAIARTIVAKELARIVYYVLKENTEFKTFKGTEISRKKKQIVAAPGKPLLRTGS

SEQ ID NO: 315849 - protein, 326 aa, unidentified
MQYIGFDIHKRYTFYTQMNDAGKIQRQGKLPNTREALGIFFADVGEPARVVMEASINWYHLYDLLETLDIPVTLAHPLRTRAIAEAKVKTDKVDSATLAHLFRADLIPAAYIPPREIRDLRELLRYRGALVRLQTMVKNRIHAILLKHGYQAPVQDVFGVQGREWLTTLPLRPVYQQALQGYLAILDALRDQISAATTAIDREALTTPAALRLRTLPGVGHYTALLLLAEIGDVRRFPSPKHLVSYAGLAPTVHASGGRVRTGHISKQGSPWLRWVLIEAALHASRKPPYQALYDRLKNRKGFRIARVAVARELLTTVYWMLRHAH

SEQ ID NO: 315850 - protein, 334 aa, unidentified
MENIALIGIDLGKNSFHIHCQDRRGKAVYRKKFTRPKLIEFLATCPATTIAMEVCGGSHFMARKLEELGHSPKLISPQFVRPFVKSNKNDFVDAEAICEAASRPSMRFVQPRTESQQAMRALHRVRESLVQDKVKTTNQMHAFLLEFGISVPRGAAVISRLSTILEDNSLPLYLSQLLLKLQQHYHYLVEQIKDLESQLKRKLDEDEVGQRLLSIPCVGTLTASTISTEIGDGKQYASSRDFAAATGLVPRQYSTGGRTTLLGISKRGNKKIRTLLVQCARVFIQKLEHQSGKLADWVRELLCRKSNFVVTCALANKLARIAWALTARQQTYEA

SEQ ID NO: 315851 - protein, 477 aa, unidentified
MKQRRLVGIDLGIASAHTVRVLDGNGNTIAKRKAWPNLKSLNELESTALLNAPQGIRLEVVIEPTGPAWLPIAVFFSSRGHTVYRVSSAKAADLRRFLSRHAKSNGIDADTLARLPLVDPIGLRPLQLPSAERAALDRRVRATDRLTQLSSLHKRRIKDLVRQLMPMTPLSGDLSMSDLAVLERYADPNQLLKAGKNRLTTLLSKTSRNQLGTERAEQWLDSARASIELYGGHPGVSFTDLAAEVASEVRLLQATQQELATHAAQREQCYRWVDPLGLARSLPGLGEIGGPALVACMGDPARFARGKQFRSFTGLVPKASETGESDRKGMPISKAGSSLLRSTLFRAADTARKQDPQLARIYYVQMVERGKDHLGALCVVAANLAERAWAVMERGMPYVVCDIDGTAVTPEQAKAIIAERFAVTEMIRGRRRSKKKAGKAPQKVHVGHSNSAQGTKRGDLPQGQSFGKQDGAVKMPA

SEQ ID NO: 315852 - protein, 394 aa, unidentified
MIYAGVDIAKTDHVIGAVDERGAEMCRPMPFKNTEAGLERAVAWLEGLAGSPSDVVVGMEATGHYWMACYSFLVARGYSVAVINPMQVKAVRKLKGLDKVKNDRVDAGLIAEALRIGQYDETRLATDEMASLRSLSRYLQSLRGMAAELKTQCVCLMDAHFPEYAGIFSDMFGAGSRAVLSKSPLPFELARRRADSLARDIAEASRSGGKSSGYAAKIKAAAKSSIGVRLGQEAASFQVKSLIRQIEFADSECAGVEARLRSLLDEVEPLVLTIPGVSYVTGAQIVSEIGDVSRFRNAPALVSYAGLNSSVSQSGQFDSGGGPITKHGSPYLRRALWLAANRARQYDPGLRAFYDRKRAEGKPHRVAVTAVARKLCHIVFAVMRDQVPYDPGRE

SEQ ID NO: 315853 - protein, 462 aa, unidentified
MAKKVLGGGRNPDKPKVDGKALDIVHPDAAGIDIGGSEHWVAISPDRDPEPVRRFDCFTQDLQRMADWLISRGVRSVAMQSTGVYWIAVFEILQQRGLEVFLVNARHTKNLPGRKSDVAECQWLLKLHTFGLLNNSFQPSDEVRRARTLWRHRAGLVAQASSAIQRMQKTLTEMKIQLSNVLSDLSGVSGMRILQAILDGKRDPRELAELADPQVKASKEVLAKSLEGNWRQELLFVLQQEIELYRTYHEKIGGCDQQLEQHLKTMAPRLDLQAQPLGPRIKGKRARGKAPKFELRTELYRLTGVDWTRVDGVDVQLAQTVIAEVGVDLNQFATEKHFANWLGLCPTNETSGGRVLNRRTPKVVNRAKVAFRQAATTLLRSQSYLGAQYRRLRTRLGAPKAITAMARKLACLFYRLLKHGQPYVDKGTEYYEQRHREQQIRTLFKRAKQLGVQVVIPATSNA

SEQ ID NO: 315854 - protein, 451 aa, unidentified
MKDLSMEVVNPNAAGIDIGSRSHFVAVGQKEEDVKEFGVYNEDLSSLAKWLSDHGIKTVAMESTGTYWQNLFTVLQGAGFEVILCNGKFTKNIKGKKSDVQDCQWIQKLHTLGLLSGSFLPDQATEQLRTYCRHRMNLIEQGADTIRKLQKYLRLLNFRLDIVVNDVTGLTGLSIIKAICKGETDPEKLASLRNGNCKKSEEEIAKALQYNGRKDFLFALKHEYEMYVTLQSRIEECDVEINTLLKAQISSDENKRQHHIEKKVHKRVNKNNPKNIDINLLSYQYFEGTDLLSIEGLSHSTVLTIMSEVGNGIYKFDTAKQFASWLRLSPNNKISGGRVLSNKIPKGSNRLKIALRNAANVIGNLKDTALSNFFKRIAFRKGRVSAISATARKLAVIIWNMLVKKIPYKSENTYEFLDQKRKRKVMEMKKLIHKFDITPDDLGLQLNINNL

SEQ ID NO: 315855 - protein, 356 aa, unidentified
MNHDNKLDFTGQQIYVGMDVHKKSWSISIYTDQFEHKTFSQPPEVGVLVSYLKRNFPGAAYKTVYEAGFSGFWIHDRLQEQGVQCLVVNPADVPTKDKERAGKTDRVDCRKLARSLRNGEIDGIYVPSRPKAEDRSLLRTRHSMVKKQTRCKNQIRSILCFYGINIPDELATGYWSKRFINWIESVRMERASGNLSLKVHLAELLHIRQIIAELNRAIRALAKTEDYRNNVRILRTVPGVSILTSMMLLTELYDISRFKTLDKLCSYVGLIPNTDSSGEKDAKTGMTGRRNAQLRVAVIESAWTAARKDPALMMAFNELCKHMTKTKAIIRIARKLLNRIRYVLKNQQEYVPAVIQ

SEQ ID NO: 315856 - protein, 352 aa, unidentified
MMIIGCDFHPRFQQIACVDTETGECVERRLHHPAEAESFYRSVAGRGVRIGMEATGSFGWFRRLLNELGHELLLGDATAIRASNPRKQKTDKRDARHLLTLLLEERFPAVWQPTEENAGLRQLLLHRSSLVRMRTRVENQLDSLGKNEGMVASRRWTGKRRREVEGLALQGWYCERRRDLLLFLDQLEERIGPLDQAVRAAAEADAQARLLMTHPGVGPVVSLAFVLTIGDWQRFQRGKQVASYLGLIPCEDSSADKRRLGHISKQGNPMLRWLLVQAATTAQRYDGPWHRQYVRLSMQKHHGVAKLAIAHKLAVRLYWMLRSGQDYRQVMERGSHAGQSACPNGCGTTPRT

SEQ ID NO: 315857 - protein, 411 aa, unidentified
MDIVVERCCGLDVHKDTVVACVRTPGKGGKRDQVTRTFGTMTTDLLALRDWLVANEVTLIGMESTGIYWKCVFYVLEDAAECWVLNARHLRNVPGRKTDVADAEWICQLVEHGLVRPSFVPPKEIRELRDLTRYRKAQIDERGREAQRLDKVLQDAGVKLSSVATDILGKSGRDMLEALVAGTRDPEVLAELARGRLRAKLPRLRLALEGRFSTHHALIVGQILAKLDFLDEAIGTLSGEIDRVIAPFGAEVELLDTIPGVDRRIAECLIAEIGTDMGRFETSSRLASWAGMCPGNHESGGKRKSGRTRKGSKWLAANLAQAAEAAGRSKDTYLGAQFTRLRGRIGHAKARKAVEHSILVAAFHILAGGVPYNDLGADWFQRRRPDAHARRLAHQIEALGYSVTIEPAEAA

SEQ ID NO: 315858 - protein, 364 aa, unidentified
MKRKVYVGMDVHKETIQIAILPSNTKALVKEQQIKHEEGQIKKFIQKLKSEGTEIHCCYEAGVTGYPLYRYLKTLGVNCTIVAPGKIPRQNSDKIKTDKRDAIKLARLLRSGELESIHVPSEEDEAVRDYLRSRDSLRLDLGRSRQRLMKFLLRKGITYSTTKYWTASHYKWLNNLHLENEILQATFNDYYSRVRVQEENLKAMDQKIQEIAKSEPYREKVGILRCFRGVDYLTAMFLLSEVNDFKRFKTAGSFMSFLGLVPGEYSSGSKRKQTGITKTGSPRLRRILVEAAWQHRFPGTGSKVVVARRVGQSALVVSLAEKASLRLHKKFKSMQLRGKTPQVMITAVSRELSGFLWAAMNLVA

SEQ ID NO: 315859 - protein, 310 aa, unidentified
MEIKVFIGVDVSKDSLDVAIGPQKEIITFSNDQKGVDALLKKLRRIDAQLIVFESTGGYELLATSCLAEAGLAVVIVNPRQVRSFAKATGILAKTDAIDARVIARFAEAVKPEVRPLKDHQTSELTALVTRRRQIIEMVVAERNRLKLANKRNKKDITDHIRWLQKRLDKIETDIGKMIQSSPIWRCKDDILQSVPGIGPITSATLICDLPELGVLSPKKIAMLAGLAPLNCDSGKFKGRRRIWGGRASVRSGLYMATMAAIRCNPAIKGFYQRLTAAGKCHKVAATARMRKLLIIVNAMLRDQTLWQQN

SEQ ID NO: 315860 - protein, 340 aa, unidentified
MTLYIGVDIHARQQTLSFLDTADGTTGRVELQHERDDIKGFYSQFHGEVIVGIEACGYTNWFEELMEELGHQLLVGDAAEIRRLARRRQKNDRRDADLLLDLLSHHEFPALYRYPRESREVLRQLRYRHKLVKLRTMVANTLHALAINAGLSLRAKLLTSGGRQQLQALTLSPSSQEQRDELLSLADELSQRVLKVEQWLKAQAKGDVRVQRLRTHPGVGLLTALCLVHTLGDLSRFSSTRKVAAYVGFDPMEDSSAERKVYGGISKAGSRLLRYLLVEAGQTAAKDDEQLKQFYQRLLPRRGKARAKVAVARKLLVRCFIMARAEIDYAEFRRRGKETE

SEQ ID NO: 315861 - protein, 395 aa, unidentified
MAIDPGKVSHRVWLATGAGGLIGEPLSLSVERAGVDQLERLISRAAAAPVIGIEATGSLHRAWASELERRFPGSLRLFAPSETQAARTQLGSRRFKTDDRDCAALVWLMCQGLGRPAAAPTIDALLAAVRHRRGLVAARKPLQQRLHDQLNGLCPGLSAPVGHGRALKLEDPSGQAVLACAAVFAGRAPSVRSLRKRAPGRLTERNASFWVERWRGLLPPPRDAELRAERLGRDIDRHRQLQADIAHVDAQIAGLLAETDGQVLTTLPGVATTRAAAFAAHSLPIERFPTAEHLYSATGLAPASYESATLRRRGRISRQGLADHRDALMGIAWGLSQFSDSFKQRHAELERRGFRPLQARVALARHACRLCFALLHSQQPYDEKRYGRARHSRGR

SEQ ID NO: 315862 - protein, 376 aa, unidentified
MTKLRFIGLDVHAETIAVAVAEPGGEVRSIGTIPNRPESIRKMIGKLGPAKELRSCYEAGPTGYVLYWQLTALGVECQVVAPTLVPVKAGDRVKTDRRDAEKLARCHRAGDLTAVWVPDEAHEALRDLVRTREAAKKDQLRARHRLSKFLLRHGRRQPEGMKAWTKKHLEWVKGHVHFEQPAQEAALQDYFHEVEHAAARIERLEKSLDEAISKAPEQIRAVIEALQALRGVAQLTAATIVSEIGGFSRFEPRTLMGYSGLVASEHSSGSHLKRGGITKTGNAHLRRVIVEAAWAYQRRPWIGGYLLRRQRNLNLSDEVKEIAWKAQHRLHKRYMKLTAVGKNKNQTVTAVGRELLGFIWDIAVKTERAWEQTKAA

SEQ ID NO: 315863 - protein, 343 aa, unidentified
MTHYVGLDVAQKLTAICVVDDSGRRQWRGQCTSDPEPIERTVRRHGGEDARIGIETGAMTPWLVHELRGRGLAVTCLDARHARAALKMQINKTDQNDAEGLAQIMRTGWYRSVHVKSFASHRARALLGARAQLVGMTTRLSNHIRGVLKTFGMLPGAGRGLAFDRRVETLLADRAEVAPIVRPMLAAWRQLRQQTAAFDKAVRVLVKSNPICRHLMGVPGIGVLSVLAYVSMVEDPARFGRSRSVGAHLGLTPKQYQSGEIDRSGRISKCGDILARTLMYEAAVVLMTRVRRALGLKDWAQAIARRSGVGKARVALARKLAVILHSMWRSGEPFQWSEQPAAT

SEQ ID NO: 315864 - protein, 404 aa, unidentified
MKGPIVSIDVSKGKSDYQAFKDLNVKYTGSRSIKHNKEGFDEIVNLVREMEKKLETEVCVVYEATGVYHRVLKKVLEDNNIKQFIINPLLSAKTRKNDSLRSPKTDKLDPKSIAKTYYSHSLHNSHKQETIYHELRELSRYYEDILVHIRKDKVAFRAQLDIVFPGYDTLYDDLYGPVALAIIEKYPHPEMLQKKKINTVSKVIQNKTCHRQAVSDTMADKAIEYSKTIYSGCDKDDIEVLILQRFIKKLNEDMAEAERTIGEMIKLAQELPDFNIIKSIPGIGDNLAARIIAELGDMTRFKKKNELVAFAGLDPRISESGQNDGDHMHITKKGNKRLRCLLYLAVTCSIRLKRDDNSIKDFYIKKKQQSNPMCSKAAKTACASKLIRIIYSMCKTGELYQYNK

SEQ ID NO: 315865 - protein, 367 aa, unidentified
MKKVSTRALAQSKNISQKKLTIGLDLGDRNSWYCVLDEAGQIQLEQRVRTNATALREVFGVMPHSRIALEIGTHSPWISRMLTELGHEVIVANARKVRLIAESRKKDDRMDAQTLARLARIDPQLLSPVKHRSAQAQADLMMIRARAGLVRARTGLVNTARGLAKSYGERLRGCNVRNMNPEKAEGLSPELQAALEPLLNAIESLSERIVEYNDRIEKLAQQSYPQTALLKQIKGVGTLIALTYMLTLEDPHRFRKSRDVGCYLGLQPGRRNSGQSEPQLHITKEGDPYLRTLLVQGAQHILGPFGIDCDLRRWGLKLAERGGRSGKKRAIVATARKLAVLLHHLWVSGEVYEPLHNSSRTTVAAAA

SEQ ID NO: 315866 - protein, 435 aa, unidentified
MKKIRKNAGGIDIGAKKIFIGLEDKEVRSFDTFTSDLEQAVSYLEENNVTSVAMEATGVYWVILYDILKARGIDVWLVDGRSTKQVPGRKTDVKDCQWIQQLHSYGLLNRCFVADELVHELRSYQRLREDHIRSAAMHINHMQKALTLMNVRLKEVLDQVHGVSGLKIIRAILKGERDPGVLVKLCHGSVLKTKKELILKSLKGHYNEAGLFALGQAVVCYDFYQQQIAGCDLKMEEVLKKMGANRPKVSNKATPRKNVRHHKPNIEGMDRYLLQIFEGKDATVLPGITDYNWMQLLSEIGTDLHKWKTEKHFTSWLGLAPKQHHSGKMKKNYKAKGQPKAGLIFKQAATSLLNSKKIALGAFGRKIRAKKGASPAIKAMARKLAELYWKLFVKGLSYVEKGIKDYEEKILFNKQKNIMKMARELGLSISYKTAV

SEQ ID NO: 315867 - protein, 316 aa, unidentified
MTDAPVFVGIDISKARLDVAVRPAGSPFTVPYDDAGIAMVVERLSALSPVGIVVEATGGLEVLLSGALATAGLPVAVVNPRQVRDFARATGRLAKTDRLDAQILAQFAEAVRPACRPLPDASTQQLAALLTRRRQLVEMLTAEKNRRGSAPHGMRSQIQTHIDWLEQHVAQLDRDLTTAVQASPIWREHEELLRSVPGVGPVVTRTLLAELPELGTLTRKQIAALVGVAPLNRDSGTFRGKRTIWGGRATVRAALYMGALVAARHNAVLKAFYQRLRGAGKAPKVALTACMRKLLTILNAMLKHRTPWRTLSDQAT

SEQ ID NO: 315868 - protein, 359 aa, unidentified
MSNVPVFVGLDYHQDSVQVCVVDREGQQLCNRSVENNAGVIERIAVRYGRPRRMAIEACCGAADLAEELTTQRNLPVQLAHPGYVNRIKRSPDKTDFGDARLLADLTRVNYLPSVWLAPRSIRELRRLVRHRVQLVRRRKDVKLRVRALLRENRLRCGHARAWTKAWFAWLTERAEWSESDRWILEDHLQELVSLAGRIAGVEAKIRLRIQDDPVVARLLKLPGVGLVTAVTLRAEVGRFDRFDKGKQLARFCGVTPRNVSSGARQADAGLIKAGNPELRTVLIELAHRLIRSNGTRWTKLANHMLRSGKPKNVVVAAIANRWVRWLHHELRRPAADPPTSVPARRKGPVPSAPTIASP

SEQ ID NO: 315869 - protein, 379 aa, unidentified
MSSNVCHQIIYLAIELSSSSWVIAYRLPANDKAKVHRLEGGDGAGLLAFIASLRHRLDPSDDASTLDASTLVVSCFEAGRDGFWLHRLLSAHGVISHVVEPTSILVTRGARRAKTDRLDAFGLLRVLAAKFAGDPDACRIVVVPTVEEEDAKRPHREREFLVQERVRIENRIAALLATQGIRGRPSLRSWDADMRALRTGDGHPLLTHLVAELNRLRRLLSLTLEMIRELDAVREQALEAQHDSASRTVKALCTIRGIGVNFASVLTREVFYRTFDNRRQIASYLGLAPTPFQSGGMDRDRRINRAGNSRARKTLVQLAWLWLRYQPESSLAAWFRDRVGSLQGRTRRVAIVALARKLLIAIWRFVTLGLAPEGAIIAA

SEQ ID NO: 315870 - protein, 351 aa, unidentified
MIVLGADTHKRSHTIAAVTAATGELLGENTVQVSAGGFAALLVWARGFDGERVWALEDCRHVSGSFERFLIARGERVLRVPSRLMADSRRGARTRGKSDSIDSVAVARAALREGLDGLPAAQLEGPELDLRLLVDHRERLVRHRVGLNNTLQWHLHDLWPEVQLPGSALMSRKWSSRIGRRLARAEQTMRVRIARDELRRLRELTQAIKALEAEIGELVDKVAPQLLVEPGFGPLTAAKLVGEIAGAARFSSDAKLARAAGLAPIPVSSGKSNRHRLDRGGNRQINAALHRVAVTRARCHPETHDYLARKTAEGKTQREAIRCLKRHLARRVWHLLQPPHPGPGQPHPSIS

SEQ ID NO: 315871 - protein, 390 aa, unidentified
MQALYPRPDEHAAVRNDLKAIFVSLELSRSTWVITSLSPGGGEKMSKHAVPSGDIPALLARLSQLKEKARARTGQVFPIIVIQEAGLDGFWIHRVLQQEGIESHVVDPASIATSRRRRRAKTDKIDGEALVRALLAYKRGEPRVCAMVQAPTPQEEDRRRISREREVLTAERVQHVNRIKGLLFAQGIGDYEPLHRNRRERLEELITGDGRPLPECLKAQIRRELDRLELLIEQIKAVEAERDAVLAQAQASPGVPAPAAQLLTLRGIGPEAAATLCSEGLFRTFSNRKQVAAYAGLAPTPWQSGAVHRDQGVSKAGNPRLRTIMIQIAWLWLRHQPQSALALWYRARIKRTGGRLGKTMIVALARKLLVALWKYATAGVLIEGAVLKPA

SEQ ID NO: 315872 - protein, 405 aa, unidentified
MEIVIERACGMDIHKDNITACILTSKGKEIQTFSTKTVFLLQLIDWIKQHECTHVAMESTGVFWKPIVNLLEAEGIEFLVVNAQHMKALPGRKTDVKDSEWIAKLLRHGLLKASFIPDRNQRELRELVRYRRSIIEERARQHNRIQKVLEGANIKLSSVVSDIMGVSSRDMLRAIADGEDDPEKLANFARHTMKRKKDQLELALQGYVNPHQRLMIKTILSHIDFLSEQIVILDQEVATRVVPFHEDVERLDSIPGIATRMAEQILAEIGTNIKKQFPSAAHLCSWAGLVPGHNESAGKRKSAKTKNGNKYLKSALVEAAHSVAASKNYLGAMYRRTAARKGRKRAAISVAHAMLRIAYYLLTREEIYVDLGEDYFDKQKQQSIVKYAVRRLENLGYSVTIAEVS

SEQ ID NO: 315873 - protein, 371 aa, unidentified
MEWTAPYGIDCARMRLLRSQTREPSVKQIIRIGMDTSKHIFQLHGVDAAEQPVLRKRLRRKEVVAFFAQLPPTVIGLEACGASHYWARELAQLGHQVKLIAPQLVKPYVTRNKNDGRDAEALCEAMSRPTMRFVPVKTAEQQAALMLAGIRERLIARRTQLSNAIRGYAAEFGVTAARGLDKIEPLLAQIAQDESLPALARELFAMHGREYVQLQAELKKIEARLRAWHRTNADSRRLAQIPGVGPIGATALVMKTPDPHAFPSGRHFAAWLGLTPKDHSTAGKTRLGKITRAGDERLRSVLVAGATAVIQQAKHGRGHPSPWVMALLKRKPPKLAAVALANKIARIAWKLMATGESYDGARMLGASALAA

SEQ ID NO: 315874 - protein, 334 aa, unidentified
MEQITTVGIDLAKNVFSLHGVDAAGKTLLRRTVRRDRLAETVAALPPCLIGMEACSGAHDWGRRFQGHGHTVKLMAPKFVAPYRKSGKNDGNDAEAICEAVTRPSMRFVPLKSVEQQALLALHRVRQGFVVERTALINRLRGLMSEFGQVLALGSVTVRRQAAQAAEALPELARGAIADLLEQLHVLDERIERYDRQIEAQARLSEPARRLMKIRGIGPTTALAIVATVGNAQEFKNGRQFAAWIGLVPGQYSTGGKARLGHISKRGDAYLRNLLVQGARSVLHTAGARQDRMSRWALSLQERRGYYRTLVAIANKNARIAWALLARDQELRTV

SEQ ID NO: 315875 - protein, 337 aa, unidentified
MDHIAIDLGSRESQICVRDSSGKIQHEQKLPNQALSLLFERPRCRVVVETCAEAFAVAEQARQRGHDVRVVPATLVRSLGVGARRIKTDRRDAQALSDASCRVDLPSVHVPSCWSQEAKSICGMRDALVSSRTKLVNTVRGWLRRNLLQIRSTPVTFSRRVTTEFDRRGQPLPSHLQRQLAAIDALTEQIRSADQQLLELAGQSPVCQLLKTAPGVGSLTAVRYAAALDRIDRFAGAHQVQSYLGLTPGEDSSSTRRRLTAITKAGPSTVRWLLIQAAWVALRRRPEDPMCVWARQIAYRRGKTIAVTALARKLAGVLYAIWRDGRPYQADAARAIS

SEQ ID NO: 315876 - protein, 408 aa, unidentified
MNTLYVGIDVSSKSNVIYLMLPNGDKHSNFSVANSHEGSTQLVKRILSALTSHSLDTVLIGLEATSVYGDNLVYFLREDATLAPFNRKIHVLNPKQVKKFHDAYNDLPKNDYVDSFVIADCLRFGRINKEVYMGDYRYKALQNLTRARFFAVQNLVKEKQRFMNVLFKKYSTMTQEKVFSDTFSTTALAVYDEFESAEALANMDLHELTDFIIEKGKNRFPDPDAVAKAIQKAARSSYRLPKTVNDSVNQVLSISITSMKALESQIKEFDKAIKAQMELLPNVLISIPGIGPVYSAGIMAEIGDINRFNSQAALAKYAGLAWKQHQSGGFEAEVTRLIPSGNRFLKYYLCEAAFSLVRCDKEYSDFYRLKYKEVNRCQHKRALALTARKFVRLVFRLLKDNRLYCPAK

SEQ ID NO: 315877 - protein, 462 aa, unidentified
MTKRRKKAKSRSFQITKLPAQLQHINLNAAGIDIGSERHLVAVPEGRDEVSVREFGTFTVDLEALAAWLKTCGVTTVAMESTGVYWIPLFELLERRGFEVKLVDARHVKNVSGRKSDVLDCQWLQQLHTYGLLAGAFRPPDEVCVLRSYLRQREMLRQVASQHIQHLQKALQQMNLLLHNVVSDITGVTGMKIIKAILAGERDPRVLASNRDDRCKQSRATIAKSLVGNYRAEHLFALRQALDLYAVYQAKIADCDEAIIKQLEKKPDLSDDQPPSGDRYVQARDRVRGGIDVRELLLKKSGVDLFAIPGLAADHLLTLASEVGFDMSPWKTEKHFSSWLGVCPGTKRSGGKTLASKTKRNPNRAAQAFRMAAASLSRSRTALGAFYRRLKARRSGAQAVTATAHKLARIYYAMLTKGANYIELGQQAYEQRYKERRIAHLKIQAKSLGFQLVACTADESSF

SEQ ID NO: 315878 - protein, 404 aa, unidentified
MEATPVFAGIDWSWQRHAVCVVDENGDRIEEFSVAHSRPGLAKITTVLGRLGAVGVAIERGDGPVVEHLLRTGFEVVVISARQVKSLRAQYTASGAKDDRFDAFVLADALRTDAGRWHPVRPDSPETVALRMKVRARQDLVGHRIAVHNQLLAVLQHNFPGAIGLFSQLDIPISLVFLRRFPTQAKAAWLSERRMAHWLEANGYCGRNTPHQLIEHLTRAADGRQTGPAADASEHIVLTLVALLHQLRVQIAELETSIREALLAHPDGPILTSLPRAGTIRAASLLAEIGDCRARFPDDTALAAAAGVAPCTRQSGKYLNVGYRRGCNKNLRAALIDWAQDTPRANAWAHNTYRQARDRGCRHPHAARILARAWTRVLWRCWHDRTTYDPTQHGQLTKLEKTAA

SEQ ID NO: 315879 - protein, 345 aa, unidentified
MTNNIQFSSVCGIDIAKSVMQIYRVTSDGVVSNKAVKRADFLNEFRNTSPALIGMEACGGSQHWAHELQSLGHTVRLMPPKLVKPYVTGLKNDKNDARGIYTALVMDVREVPVKSAAIRDLALLQTMRTKRQREKVAKINHIRGILSEYGLIMGKSVNSFLAKAGSLIAELKERADVSPYIVSELTDLFQEVKEAIAKIKELETNIESIAKTLKHYDLFQSAPGVGPITAATMLVLLCNPEVFKNGREFAAYIGLAPKSSGSGGKNFVTHIPKKYECNNEVRTLLVQCAHAICRSKHKSDWVSSILARKPKKVAIIAVANKLARQLWIMAKKGEKFERRFILAAV

SEQ ID NO: 315880 - protein, 350 aa, unidentified
MLHAGLDLSRNRLDVCLLSEHAEVVEEFAAPADVDGLRGLARRVAGHGLPVRGVIESMTGARFVHDTLEQLGWEVLIADAQKAKGLAPLACKTDKIDARVLAVLSHRDLVPAIWLPDPSVRREREQARFRLHLVKHRSMLKHRIHSTLICFGHPCPVSDLFGIAGRELLDRIEIPQPWRGTVDASLALIEDLERQIDVINRELRAGGVDHPYVPLLLTVPGIGWVLAFTIAAEIGDIERFATAKKLVGYTGLCPKVNQSGDSNRRGPLSKHGPKYLRWAMLEATMHALRHPAYAERYQRTKKRLGRQRGAKVAQIDIARRLTEAIWHMLTTNQPFNPTAAAGGAALRLAA

SEQ ID NO: 315881 - protein, 345 aa, unidentified
MRTLYYIGLDVHKKTIAYCVKNEQGRLMGRGTVEATRQGLRQWLKGLPGPWVGALEATLFTGWIYDFLKPHAVAVKVAHPAMLKAIGASKKKNDRIDAEVICDLLRVNLLPECYMADERTRALRRMLRYRNVVVTMATRMKNKMVGLLMEVGAPYNKKKLHGKKYFRELLENLEEAPESVVELLRLSRGQLEMFTTIQRRLVEQLAADRALIRRVTLLQSIKGVGEVTALTWALEVGDPARFGSLKHAISYCGLCSAQRESAGKSQRGPLSKMRNKHLQTILIEAAKLAPRWNPELAAIYQRELGRGNANRATLAVARKLVAWLLAVDKRRSAFVAREVPQTQVA

SEQ ID NO: 315882 - protein, 429 aa, unidentified
MNYTQNEKIEQVTDTTMVVGVDIGSRTHYARAFDNRGRELTKRVFSFQNDIEGFNSFHLWIEKLKNENKKTAVLIGCEPTGHYWFAFAKYVQDHQKTLVMVNPFSVKKIKELDDNSPKKTDAKDPKTIAKLVVDGRYSIPYMPEGIYAEIRDLVYSRDRIMKQHNISANRIQRWLAIHFPEYLGLYTRFDATSGLAVLEQAPLPKDVIALGVEGIRKIWHDKKMRGRGVTEDRAKTLVEAAHNSVGLDGGIGTKSELYMLLEEHRLWTSQLEAVNKVLEEMILKVPHVEKLLAIKGVGSVTIAGFIAEVGDIRRFKSPKQIQKYAGLEIVENSSGKHKGRSRISKRGRRKLRKSLYQVMVPLLARNKEFRTIYDYYVTRVKNPLKRRQAMIAVSCKLIRVFYAVLTKGVDYDRFKMMSDIHHESGLIAA

SEQ ID NO: 315883 - protein, 384 aa, unidentified
MSKHNIVFIGMDTHKSFIEVAYIEDVRGVKPIHLGKNPSTKQSVTKLVRRFESKYPHATLHFVYEAGPCGYWIYRLLTSLGHCCYVIAPSLIPKKPGDKIKTDKRDATNLAKLLKSEDLTAIYEPEPEDEAVRDLSRARETAMKDLKDGKYQLKTLLLRNNVTAKVKDNWSKQHLRWLTELILPHPAQQIVLQEYIQTITERMNRLKRLDNELEHHVKNWRYYPVVKAIQAMRGVRLLVATGVVAELGDLTRFDHPRKLMSYLGLIPSEHSSGGSRKLGSITKCGNSRARRLLVEGAHTYRFTANISKELQLRQEDLGKTIVDITWKAQLRLCRRYQTMLRLGKHYNVIVTAIAREMIAYIWAISREIVLTPIEPKLRLSRVPA

SEQ ID NO: 315884 - protein, 371 aa, unidentified
MDKHIKFFVGLDTHKDSIAVAVCEAGREPSRFVGTLGPDVQGVLKLLRKYGPAGQVSVVYEAGPTGYGLHRELSRHGYHCEIIAPSLIPRRAGERIKNDRRDCARLAELSRAGELKAIWVPDAAHEAMRNLWRAREDAVNLRLKVRQQLKGFLLRQGRRYDGKTSWTKMHHRWVADQRFDQQADQITLTEYHLAVQAAQDRVQRLSAALQQAIQGWRFEPVVSALRALRGIDTVSAIGLVCEIGDISRFASARQLMGYLGLVPSEHSSGNTVRRGSITKTGNAHARRLLTEAAWNYRFPARISNELRERGKALSPQIRTHAWKAQLRLCARFSQLSSRGVQANKVCVAIARELAGFVWAIARQASPSTPAQ

SEQ ID NO: 315885 - protein, 318 aa, unidentified
MNPQQATEFVGVDVASAHLDVAVQGQASVRRFANTPQGIALLLRTLRPASVLALESTGRYHVPLALAAHAAGLHVYVLNPLDARRYAQSVGQRGKTDRMDALVLARYICREHAQLRQWQPPTACQAALRELLAHRATLVRQRSALAQAGCHSKTLARLDEPVLAALQQAIEHIDEQLASTVQADPASQETFKCITSVPGLGLICGSLLVMLFGRLQTRSADAVIAFTGLDPRPNDSGKKTGQRRLSKRGWPETRRLMYAAAMSAARTKTWNGFYCAQRDKGLSTTAALVVLARKLLRVAFSLFKQQALFDPALVAGRA

SEQ ID NO: 315886 - protein, 309 aa, unidentified
MSEFIGIDVSKASLDVAVHGSGARLQVENNEQGMERLVEQLKRLEPELIVLEASGGYERLCVGALAQGGLSVAVVNARQVRAFALAIGVLAKSDAVDARVLAHFACAVRPAVRPLADGQRQALDDLMGRRRQLMDMLVMEKNRLGQARDPHVRRDIQGLIRVLEKRIDGCNGDLQRLIRESPVWRAQEDLLRSFNGIGKANAFMMLAELPELGTLSRKKIAALVGVAPIARDSGQHRGRRSIAGGRAQVRSMLYMAAVTAARTNPVIRAFYQRLRAAGKPAKVALVACMRKMLTILNAMLRTQTRWQCA

SEQ ID NO: 315887 - protein, 344 aa, unidentified
MSKVIMIGLDIAKHVFHVHGADERGRAVFSKRISRGKLLDFFAAQQSCMVALEACGGAHHWARQLTQLGHEVRLIPPAYVKPFVKRQKNDAIDAEAICEAAQRPSMRFVAVKSEQQQAAGLVFRTRDLLVRQRTQLINAIRGHLTEYGWIAPKGPSHVAMLADLIEEEEMASSLPEAAHAMFRLMLNLLAGLNGKIVDLDKEIARRAREDEVSRRLMTVPGIGPISATAIAALAPPAETFAKGRDFAAWLGLTPLQRSTGGKQKLGATSKMGERTLRRLLIIGSSAVVQQARKRGAPKGSWLEQMLARKPRMLVTVALANKMARIVWALLVKHENYRAPVAAKA

SEQ ID NO: 315888 - protein, 341 aa, unidentified
MSTITIGLDIAKSVFHLVWMSTTGKVLKRKMLSRKKVAEYFANLEACTVVMEACGSTHYWSRVITRCGHEVKAIAPQFITPYRKGNKNDYNDAEAIAEASQRQNMRFVPLKSLAQQDIQMLHRIRERLIKNRTALSNQIRGLLAEYGLVMPKGVNHLKAQLPGFLEDATNELSTLTRRFFLGLSEELDGLTIQIKSVDSEILGINKQNDVCQRLNTMTGIGPIVATAFYAGIGNGKAFKSGRHVSAWLGLVPKQHSTGGKPVLLGISKRGNTYLRTQLINGARAALRHCENKTDQVSIWARQLKERSNYNNATVALANKMARMAWAMLHHQEDYRLKVVTK

SEQ ID NO: 315889 - protein, 318 aa, unidentified
MQKAITYVGLDVHKDSIVVSLAEAGLRGRLREVREYGKVLNTPAALKAMATKLAAGGNELRFCYEAGPCGYGVQRQLSAMGHHCAVVAPSLVPRKPGERIKTDRRDAVKLAKLHRASELTPVWVPDPAHEAMRDLVRARLAAVRNIREARQQLSGFLLRNGYHYHRHPWTLMHRRWMADLKFDQPLHYIVLQDCIAAVEASEQRRDRLEAGIIAALPEWSLAPLVETLQALRGIALVSATTLVAELGDIARFSNPRQLMAYLGLVPSEHSSGRSRRQGGITKAGNAAARRMLMRRPGAIGSQPASADISSRNRSVCQS

SEQ ID NO: 315890 - protein, 338 aa, unidentified
MELSVIGMDIAKNVFQLHCVDRQTGEIERIKLRRNEVLPYFARRTPALVAMEACGGAHWWARQLQQLGHTVRLLPAKAVRPFVLRNKTDAADARAIWTAVQQPEMKTVAIKTEYQQSILALHRMRAQLLKFRHMQTNAIRGLLLEFGHPVPESYLALRKAFPTVMATLDKQWPGILIETLREQWARVQSLDNEIALIEGRLKRALAETPTCQMISDIPGVGLMTATAAVATMGDPASFKTGREFAAWLGLVPRQTGTGGRIRQLGISKRGDAYLRTLLMHGARAIIARRTYSDWVAGLIARRPYSVVIAAIANKLARTIWAVLATGKRYDGAAFAAAI

SEQ ID NO: 315891 - protein, 321 aa, unidentified
MRNGAQDTQLTNQENMIYMGIDVHKRHINVAVMSEHVVLGQNHVEIRDVDAYMVRLKKKYPDRRLRAAYEAGFSGFALYHQLESLGIETIVVNAADVPTTDKERTTKSDRADSLKICHALKCGQLRKIWVPPDELSGDRDLVRYRLVLRQHLAKTKTRIKMFLYKQGVQIPPELESSHWTKAFQAWLKEQTMTTASSQTTLLLMLEELQHADQVYKKHLRRINELALTQRYSHNVDLLYTIPGIGRLTAITILTELGPIARFAKADQLASYVGLIPMQHQSGSSDRNMPIQRRAHQELRTSGAVLADGYKRKQPLQYGLRA

SEQ ID NO: 315892 - protein, 437 aa, unidentified
MSKRLQVGFDIHQKHNHVCLMTKDGQTVDPHQRFDNNWPGHRKLVAMLVSVLEEGQFEGLDIAGEASGLLWFHPFYHLTQAKELTPFDSHIYLFNPRTIKHFKKVLAERDKVDPKDAYAVAERLRFGGRMPHELTFDERYLPLQRLTRYHYHLSHTLAREKIYARMVPIYLKASDYTRKPKPFSDLFGATSRHILSEYATTDELAALPLDDLADELDRIGRHRFSDATDNARCLKRAAAQSYPLPLCLIEPINVILDSLLAHIRFLEGELEKLDSLIETTLVDVPGALYLRSVKGLGLVYAAGLLAEIQNPDRFIQGCKRDKEGNLRPKTKHDAQASLARFFGLWWPRSDSGEFQAEDRRLPKTGNPYGRYYFVEGANSLRRHNAEYTAYYQRKYDQSLKHKHWRATVLTARKLVRLVFALLHDEEMYQPPEVRSSS

SEQ ID NO: 315893 - protein, 355 aa, unidentified
MQLETEIRNTHDGMRSVKGGGRSCHVMSALVCGLDVHKDSTYATILNDEGKIVNQARMSNERVLSYLAHYKVNKVAMESSTAIAPLFRQLASRGFDVMVSHPKKTRYIAEAKIKSDRVDSRTIAELARLDALPLAYVPDTETSRLREKVRRRAFLIRQRAKLEVKVKSVLTYEGIKPPSESDLFTVKGVEWLRSLNLESIDSYLRIMSTFSREIKLLSKQLLGLAEEDEDVKLLMTVPGIGYYSALLVKSEIGDVNRFPFGERLCSYAGLVPSTRSSGRMVRHGGITHEGSRWLRWVMVQAAQTHVHRFDSTVTRMYNRVAERKSKRVALTAAAHKLLLVCYSVLRNKRPYYDQA

SEQ ID NO: 315894 - protein, 354 aa, unidentified
MAEALKNSIAFVGIDIGKNSFHVVGLDGRGAIVLRQKWSRGQVEARFANMPPCLIGMEACVGAHHLSRGLQRLGHDARLMPARYVRPYSKGQKNDFRDAEAIAEAVQRPTMKFVATKTADQLDLQGLHRVRERLVSQRTGIINQVRAFLLERGVAVRQGLRFLRNELPSILAAPSDALSPRMVRIIEDLAGDWRRLDERVEGLSKEIEAIARRDAGCERLMSVPGIGPIISSAMVAAIGAGDVFSKGRDFAAWLGLVPKQISTGDRTILGKISKRGNRYLRVLFVQAAWVVLIKPKSWERHGLKSWIEAAKRRLHRNVLAIALANKLARIAWSVLAHGRSFEASKLAAAVTQPA

SEQ ID NO: 315895 - protein, 358 aa, unidentified
MTDPLLEVTGGVDTHKDTHVAAALDGLGRLLGTEEFPATPAGYGGLLGWLRGFGELATVGVEGTGAWGAGLARHLTAQGVEVVEVQRPNRQHRRRYGKSDPADAIGAARAVQAGEAAGAPKAANGNVECIRLLQVARRSAMKARTKAANQMHAVVTTAPELLRADLTGLDTKSLAARASRFRPGNPTTPTAAARRTLRILGRRWLALSVDIDELDKDLDQLTATVAPTLRSLPSVGPQNASALLIAAGDNPDRLATEASYAALCGSSPIDASSGRQHRHRLNRGGDRQANAALYMIVVSRLRWHQPSQAYMQRRLADGKTRKETMRCLKRYVARQVHRAIASDLGLHEPRSAPVELAA

SEQ ID NO: 315896 - protein, 340 aa, unidentified
MEYKRISVDTSKTVFTIHGIDSAERAITRREVKRDKFLAFFEKLPPTEVAMEACGASYHWARQLTAMGHRPKLIAPQYVKPYVKRGKNDRNDAEAICEAAGRPNMRFVPVKTEAQQADAMALSVRDLLVRQRTQLVNALRGHAAEFGIVAPRGLDRIEGLRAKIAQREGLPAPAQRMLELLGTQIDGLDQQLAELDKQLLAHHKANPISKFLAGIPGVGMIAALTLATKIDATQFASGRHLAAWIGLTPKEHSTGGRQRLGGISREGNERLRQLLVVGAMAVIRHAKPGSKSASPWLLNLLERRPKKLAAVALANKMARIVWAMLTSGEAYRAPTCPKAA

SEQ ID NO: 315897 - protein, 386 aa, unidentified
MHLYFVGLDVHKQVIAFCVKTAEGGIVVEGSIAATRAALDEWVRTLPGPWHGGMEATMFSHWIYQHLKPHAAKLEMGHAARMKAICAGKKKSDRIDARTIADLLRCNLFPACFVISPELGALRQQLRFRRLVVEETVMFKNKTAGLLMSAGVEYERRRLHGKRYFENLVKDNEWIDRQLRPLLEFNRAQVTTLQAMDRRLKGMLARHPALEARIEALCRIDGVGTVTALSWALEAATPERFPSIKHALSYCGLTSALRESAGHQKRGPLSKQRNAHLQSALIETAKLAPMYNQKLKQVHRKTMEKGGHRNRATLAVARKLVAYLMAADRAFFASQRRDAAAGATDRQAPAAAGTCVFSGMADLSIRCDEPEHRRDLPSQIPAPSSR

SEQ ID NO: 315898 - protein, 349 aa, unidentified
MKAVNAELFAGQEVFVGMDVHKNSWTVTELYGGNVTKTYSMKPDPLELAKHLNREYPGAKFKSVYEAGFCGFWIHRELIKLGIENIVVNPADIPTSNKEKLYKNDVRDSKKLARELSNGSLHPIYIPSKEQLKLRDLVRLETQIVNNTTRWKNRIKSYLNLKGAKLTSRSVNTLKYMRKNAKTDNNITFYFLLDGFLTEQERRLAVVKEQKRLIHKLGKDKLLNCLMSIPGIGIRISTLLIAEIWDMNRFKNKDNLCAYVGFSPRLFGSGDKERMKGSSNRKHKQLQSKLIEAAWRTIGVDVELRAVYCQFTSRGSAQRAISVVAKKLLLRIRSVWLHEKIYKLNSIQK

SEQ ID NO: 315899 - protein, 340 aa, unidentified
MQVTTIGVDLAKNVFQVHGITASEEVVFNKPLRRTQFLPFFAKLDPCLIGMESCSSAHHWARELTALGYEVRLIPPMYVKPYVKRGKSDAIDAEAICEAVTRPTMRFVATKTVEQQSLLSLHRARDLLVRQRTQLINNLRGLVAEFGIFIPKGLARVIGFAEDITLGEVLDLPDIANEVIRNLSEQLMALHKQVRWYEERLKQVAKEDARVRLLRTIPGVGAVTASAIIASIGDGHQFKNGREFAAWLGLTPTNKSSGGKEKLGRITKMGDQYLRSLLVVGMTSLVRQTRSHPERASKWLTSLLERKPARVATVAMANKTARIVWAVLTRNEPYSPRTVA

SEQ ID NO: 315900 - protein, 407 aa, unidentified
MEIVREYVSGLDVHKKSVVAAVITPQGRRVKTFSTTTRALLELVDWLKAEGVRHVAMESTGIYWRPIFNLLEQTEMEVLVVNAGHMKQVPGRKTDVKDAEWIAELLQYGLLKGSFVPHRGQRELRDLLRYRRTLIEQRADEVKRVQKLLEGANIKLANVAADVLGVSGRAMLEGLIEGQQGNAELAHLARGRMKSKQRQLEEALEGSFGPHQRWMLRRHLDLIDFHDGKLKELDAEVAERMRPFLAALNHIDAIPGLGQQTAQEIVGEIGTDMSQFPTDRQIASWAKLSPGSNESGGKKRPGRTGKGGPIRHIMIRAALNVSRNPNSYYGAMYRRLCKRGCKERALVAVAHALLVAIYHMLRDGTVHQDLGANYFDERRREQSARNAVRALRLQGHDREGTRAVSGG

SEQ ID NO: 315901 - protein, 342 aa, unidentified
MREKRSIGIDLHRRRFTCCIRLENGRNYLSEWSLEQLPRFTQKLRRRDEVAVEVTGNTRLFYEAVAPFVARVVVVDPHQFRVISHSVKKTDPHDARNLALYLAKGLLPEVRMKEKEQAEVASLTQTRDRLVKLRTALKNKVNNLLSARGIELDKESLSSEKGLTWVLEQKVEELAHLELDVIVEQIRSLNRSIARLERVIDEAGKKLEGHRNLTSIKGIGSLGASILLSVIGNVNDFAHEGKLAAYFGIVPRVQDSNETEHRGRITKRGSKLGRTALVQCALIAKRYSPYLHRYYERIRARRGTGKAIIALARKFLSIIYHTLKNNWIFEDFPNFVLAEAKT

SEQ ID NO: 315902 - protein, 456 aa, unidentified
MILRMGIDIAVRAPHQASLADDRGELIWSGHRFRTTATDLDHLWERLPAGSDPAQVTVVMEPTRNAWVPLAAWFRRKGATVVLVSAERSADLRAYYAKHTKSDRLDSVLLARLPMLHPEGLHPERGLGPGDPLRRATKLHSTLVKRRTTSLARLDALLEILGPDWHTALSGDLANTTPLRFLAAGYADPHTVKRVGRSRLVRFFHRHSRGAWGEPEADAIMTAAKATRQLWEDELDFADLAEDIAVEARLALTLTQEIKELDERIAILVTERDPAGIITSAPGVGAVTSAVILGRLGDIDRFTSLAGIRSFSGLVPSLDASGVSDRHGGPTKRGDALLREALFNSANQARRYDPTLAAKYHRLMVETGKHHNSALCHIATTLLTRIASCWKNQTPYELRDVDGRPVDRTEARAIINDRYQVPQHLRRARTTTTPNGTGRRSKESPSAPSPARQPQR

SEQ ID NO: 315903 - protein, 308 aa, unidentified
MRYVGIDVSSRWLDVAISGDSICRFTYDQGGLRQLQRILVTQSPALVVMEATGGLERTVSKLLEAAGLPVAVVNPRQIRAFARASGRLAKTDAIDAQLIACFAEAIKPPVRHLSDSHEQELKDMDARRRQLVEMIIAERNRLRTASPTVGKQIRRHLGWLEKEAKALEEALSESLAVDPKLSGKARLLESVPGVGPVTSACLLAGLPELGTLNRRRIASLVGVAPFNRDSGTRCGKRIVWGGRAHVRSGLYMAALVATRYNPLIRTFYSRLVAAGKPKKVALVAAMRKFLTLLNSIIHSQRPWSATAE

SEQ ID NO: 315904 - protein, 325 aa, unidentified
MEAKKLCCGIDVSHAKLDVCYQNNLGELFHLQVANSKQGFAKIMEHTGPDYHFVMEATGVYYIRLAFYLHKQGCELSVVNALAIKRYIQMHLERNKTDKKDAAWICRYAIDQRPVYWQMPDSAYFESRQLYNTIREYTEQIKRFNNQLHSLRLLPVPSKDTIKSLEKVILSMGKQIKQLEQKLQQLLEQWQPEQLKSVSSVKGIGKRAAAMLIVFTQGFKHTQNHRQLISFAGLAPTQYSSGSSIHGKPRIYKRGGKNLRDVLYMCSMNAMKTNTACKALYDRLRANGKTGKQALIAVCNKLLKQVFAVAKNNSLYQPNYCSAKP

SEQ ID NO: 315905 - protein, 352 aa, unidentified
MRTSRKAAGIIATIGIDIGKNTFHLVGLDKRGAIVLQQKVSRGQLERRLANIPRCLIGMEACSGAHHIGRQLAAVGHDVRLIPAQYVKPFRKGHKNDYRDAEAIAEAVQRPTMHFVAIKTPEQLDLLALHRVRSRLVGQRTGVINQIRGFLIERGITVRQGPMPLRKALVEILSSDTGVLSPRMVGLVTDLVQDWRRLDERIAAVSAEIEALAEQDDGCQRLMTVPGVGPIISSAVVAAIGNGAGFKQGRDFGAWLGLVPKQESTGDRTILGKISKRGNKYLRTLFVQAAHVVLVRRPSAAMRSLWPWIEQASKRLHRNMLAIALANKLARIAWAVLARGRAYQPRNTVDAA

SEQ ID NO: 315906 - protein, 332 aa, unidentified
MENFYFIGVDISKKKLDFCVMFEGKVVHEEETANHQNAIMSLIRHLEKDYGIDGSRMLICAEHTGQYTFPLACACKAAECKLWLENPAEIKYSSGIQRGKNDKVDAKRIAVYASRFQDKVQYYERPSEDIERLKQLEPERSLYVTDLAKYKGQLKDQREYMPTALYERKVKRLTALMENLEQAILAITNEMDEVITSCPVLFRQMELLMSIDGVGRVVATNMIITTEAFTRFDDPRKFNCYAGVAPFSYSSGTSQQSKARVSHRADKVMKRLLHMAAVAVTHRNGGELKKYYDRKVAEGKNKMSVINALRAKIVARMFAVIKRNELYKPILS

SEQ ID NO: 315907 - protein, 325 aa, unidentified
MDEAILGIDVSKKELSIALLFNTSYKKCKISNNIEGFTNLSKWLQAQGMTKVKACMEATGSYGEKLAEYLYEQGHQVHIVNPVCIKAFAKSKLSRHKTDEVDAHLIAEYASKNELRAYKPKEPMLKELRFLYRCLQNLKEQHTQVENFLETKACLPKSVKKVYQNLIKHIEKQINVVNVAIDQVVSSKESLSQDCKNLQSIPGIGKITAIAILAEIPEFPSLESARQLASYAGLTPSHRTSGTSVKGRSYLSKIGSSSLRKALYFPAIAAKNHNPLLQPFVKKLEKKGKHTMVIIAAIMRKLLHICFGVLKYKTVFNPQILKNNP

SEQ ID NO: 315908 - protein, 377 aa, unidentified
MKKELYLGLDVHKDCIPTAVAEEGRKGEVRETGALSNDLHAVEKWIGRLRKAHGKEVILRACYEAGPCGFGLARRLKQLGVECEVVAPSLTPTRAGDRVKTDRRDARKLARLLRAGELTPVYIPDATDEAIRDLCRARTDAVDDRRRSRHRLKGFLLRHGYRYQGKSSWSAAHERYLRELVLPHPAMKVILEEYLQSIGAAGERIGRCEAAMSVLLEQWRLAPAVRALMAMKGFQTVAAMILVSELGEVHRFSHPRQVMAYLGLVPTENSSSDRRRQGHITKCGNAHARWLLVECAQHYATPPKVSKELSRRQEGQSHEVRAISWRAQNRLHRRYTRLLARRLQRNKAIVAVAREMCGFIWELLRTQDCYQASSPSL

SEQ ID NO: 315909 - protein, 351 aa, unidentified
MSEITTVGVDLAKELIVVCAGDAVGRTLFFRQFGCAGFAGWMANLPPCTVGMEACSSAHHWARVLAGHGHRPKLMAAEFVKPFRKSQGAKNDRNDAQAILSAVREPNMRFVSVKSLEQQSILACHRMREGWHAERTALLNRTRGLLAEFGIWLARSSAALYRALPRLSQEEAVPARVRALLGQAHEHLRQIDAQISHCEAQIRLHAKQSECAQRLTAIIGIGPITASAVVATVANARDFRNGRQMAAWTGLVPRQSSSGGKERLGSITRRGDTYLRALLTQGARAALQAALMRAPEKRSRLEHWMVELRQRVGYHKTLVAIANKHARICWAILAKGEEYDPQAWQRHALAA

SEQ ID NO: 315910 - protein, 418 aa, unidentified
MKEIKAKGRNVVNEKTLIVTVDIGKTTNTGYCRCPDKTEVKPFEFRNGYYGFQKFADVIFKTKDAKGLENVVVGFESTGAYAEPLIHFLKPKGVQMVQVNPLHTRKLKELQGNSPNKTDKKDPKVIADIIELGHALTVVIPEGAAANLRRLTNARERVLQRRTALLNQLQDVVFICFPEFLEIMKDVKTKTAHYLLRRYPRPADILERGLDALVFEFKKISRGMLGIDRAKALHEAAKTSVGIQEGSMGLIMELQEFLASIEQCEHFVGQLEKEMSRCLQDIPYSKLLLSMKGIGEVTVAGMIGEVGDFRKFDNISELLKYAGLNLYEISSGKKKGNRRISKRGRALMRKILFFAAIRTIRKGGIMHDHYQRYLQNGMKKVKALVAVSRKLLGIMLALVRDHSLYEENHVKTGYLKAA

SEQ ID NO: 315911 - protein, 410 aa, unidentified
MLFIGDDWAEAHHDIEIEDKAGRLLVRKRLPEGLAGVTLLHELIAEHLDPSGEPDQVLVGIETDRGPWVQALLATGYLVYAINPLQVARYRERHSTSGAKSDPGDAHLLAEIVRLDRAHHRRIAGDSEIAEHLKVAAPAHQTMIWSRVRQVNTLRSLLREYYPAALAVFGTDLASPDALAVLAAAPTPELGRRLSQARIETLLRKAGRQRNIAATAARIKTALGSDQLTARPGVVPAYAASASALVAVLTTMVTQTEVLAGQVEQGFGRHPDVEIYRSQPGLGVILGARVLAEFGDDSDRYADAKARKNYSGMSPITRASGTKRVVLARYARNRRLGDALFRQAYSALRASPGARACYDRQRARGASHYQALRTLANRLVGILHGCLSHHTLYDENQAWHTPDDKLTIAA

SEQ ID NO: 315912 - protein, 343 aa, unidentified
MQTITTIGFDIAKSVFQMHGVDAAGQVVIRRKLKRRYVLGVFQKLPPCLVGIEACASSHYWARELQALGHRVRLMPPAYVKPYVKRQKNDMADAEAICEAVTRANMRFVPIKTPEQQSGLVLHRTRHLLIRQQTAVINAIRAHLAEFGIVAPVGRKGVEELLRVVADGNDKRVPNVVRACLAALGTQLLSLKKQILEFDQMIMAWHRSNEASKRLDEIPGVGPALATALVASVADPKAFRSGRNFSAWIGLVPKQHSSGGKDKLGSISKQGDRYLRSLFTAGALAVIRYAKIHGTQHRPWLSALLARRPTKVAAIALANKIARMAWAMMARGDRYKEPVALAA

SEQ ID NO: 315913 - protein, 370 aa, unidentified
MEEGIKFFVGLDVHKDTIAVAVAEAGREPARWVGGIAHDVGKLLKRLACYGAPAQVQVVYEAGPTGYGLQRELARRGYRCQVIAPSLIPTRAGDRIKTDGRDSVRLAELSRAGELRAIWIPDPADEAIRDLARAREDAVNARTQVRQQLKGFLLRHDVHYAGKTSWSKTYYRWLATLNFGATGAQTAFTEYWQAVTSSDERVARLTTALAGSIDGWRFESVVLALQALRGIDQISAIGLVAEIGDIGRFAHPRQLMAYLGLVPSEHSSGERVARGSITKTGNAHARRLLTEAAWNYRFQARIGYRAQRRAEELPQEIRDVAWKAQLRLTGRFARLRARGVHINKVCVAVARELAAFVWAIASLRAQLPHS

SEQ ID NO: 315914 - protein, 345 aa, unidentified
MNNVTILAIDLAKDVLQVCKVTSKNKISYNKSITRKALKELLNNEKNCLVAMEACASSQYWSRLALKLGLSVKTMHARHVKPFRTTQKTDRNDALAIAVAATQLTIKSTRILTIEEQGLQSLGRIRDLQKSQCIAISNQIRSLLSEFGITIAKGDKALREAIPYIIEDAENELPHQLRVALFSHWENYQNQVERLNDITKQLEAEVHKNTHCKKLMKLEGVGSLGAVGLLTALGDGSSFKNGRAASACLGVTPVQHSSGGKENIGSIAKKSSGLRLRSILFNGAMSAVSSLSKRVAKTVKEKWLQALIERRGKKVAAIALINKNVRTAYAMLQTDTEYKPQLLEA

SEQ ID NO: 315915 - protein, 345 aa, unidentified
MEHRHYVGLDVSQDLTTICVIDDAGTRVWRGTCASDPDAIAAAIRTHAPAVVRIGLETGLLSNFLTRTLRQRQLPVVCLDARHAKAALRVQINKTDANDAFGLAQVVRTGWFREVAVKSMDAQTLRMLLIARAQLVGQRQTLANTIRGLLKTFGHVVARGGNGPFAVRVRTLIAGTPELGAVIEPLLDAWQALRAQIAVLDRHAQSRAKTDRVVRRLMSVPGVGVVVALAYTAVIDDPARFKRSSSVGAYLGLTPRRYQSGEVDMAGRISKCGDALLRSYLFEAANALLTRIPRTCKLRTWGLALAARIGARRATVAVARKLAVILHRIWKDDRDFAWDEAPAAA

SEQ ID NO: 315916 - protein, 416 aa, unidentified
MLFIGDDWAEDHHDLEIQDEDGRRVARARLPEGLEGITRLHALVAEHAPAVWADMPPEQVAAQVIVGIETDRGSWVTALRAAGYQVFAINPLSAARYRQRHSTSGAKSDAGDARVLAEIVRLDRDHHRAVAGDSDLADAIKLLARAHQTAVWERTRQVLRMRSALLEYFPAAVRAFEDLAAPDALSVLRRAPDPDRAAKLARGHLVAALRTARRHHVETKADALLAVLRAPALRQPVTLQGAYAAVVTGQVGIITALNGQIAGIQEVMAEHFGRHPDAEIYLSQPGFAVVLAARTLGEFGDDKDRFASSRARKNYSGQSPITRASGKKSVVLARYATNRRLGAALHLQAFAALGASPGARAYYDALRARNIGHHGALRQLANRLVGILHGCLKTGAVYDENVAWQHQQITTGTVAA

SEQ ID NO: 315917 - protein, 328 aa, unidentified
MRYLGMDVAKAKLDCCLLLDEDSDKRKTKSVANSRPGVADFLVWIGKQHISPAELHVIMEGTGVYHEQAAQALADAGVMVSIVNPAQVKDFGRGLAVRTKTDGMDSYVLARYGALLKPAAWIPPAPEARMLQALLARRDAIAQDLQRERNRQEKADATDTPALIRQSLSDSIEFLSKQLTQLQRDIDQHIDRHPGLKDDLALLQSIPAVGPQVGNNMLAVMHSHQFGSAEQLAAYLGLVPIERQSGSSVLGRARLSKAGPARIRAVLYMAAVVATRCNPHVKAVYDRLLARGKSKMSALGAAMRKLVHLCFGVLKTRQPYQRDYAKIS

SEQ ID NO: 315918 - protein, 404 aa, unidentified
MLFVGVDWAEDHHDVCVMAEDGMVLGRRRVPDSVAGIGELYALVAEHGDDDDAVVVGIEIDRGLVVWSLLSAGYEVYAINPMASARYRDRHATSGAKSDPGDAKVLADLVRTDRHNHRPIAGDSDLAEGVKLLARAHQSAIWGRQRQLNALRSSLRQYYPGALAAFGTDLASTDALAVLVIAPTPELGRGLSRSKIAAALRKGGRQRNVERRAEEIQGALRAEYLEAPELITKAHGLVTTSALALISTFNVQIAELEAALSEHFEQHPDAKVVLSLPGLGTVLGARVLGEFGDDRNRFSGPKSRKNYAGTSPVTKASGHSRVVLARFARNRRLADACDSWAFSALTKSPGARNYYDQLRARGKTHRQALRQLANRLVGILHICLERGVLYDELVAWPENSELAA

SEQ ID NO: 315919 - protein, 349 aa, unidentified
MNYVGLDIHARNFTISVLSKDNMTIFETELPTSADNLRSVIGAIAEPKCVVLEESTVAAWAYRTIVPYADEVIVADPVTNAWISKDENINDARAARKLAQLLRAGYINPVHHNTQHNQFFKELVQFYHDTSTELTRFKNKLKAKFRQHGVNCTGTQVYSDKGRQRWLQQLEDADAHYQIQFLFETIDHLQAQKGRLRREIAKRAKAFEPISRFREVPGIGLVRAATFFAIIDTPHRFANKRKLWSYCGLGIAKQTSDQMSGPQHLTRRGNPMLKDITKGAAVTAIRMVDNRFAVQYKALIGNDVGPESARLTVARAIVSTLWAIWRKGEEYIPGKRSVAGFDSQTKHGG

SEQ ID NO: 315920 - protein, 410 aa, unidentified
MSVLQVALDSVTVIVAVDPGKVFNRVWISDGSGLLVEPMSLPVSRDGIGQLERLLEERGLTSPVIAVEATGSLHRAWCSALERRHPGSVRVFAPSETKSARTQLGSGRFKTDDRDCAALTYMARQGGGRRFEQHSAVEELRAAVRHRRGLVADRKVVAQRLHDQLNALCPGLSAPAGHGRSLALDTPTGLAVLACAAAFAGRPPRLRSVICRAPGRLTTRTAQYWVTRWRGCLPPPADADSRARRLARDLDRYRRLRADINDLEAEVVGLLAATDGHILTTLPGVGSIRAAAFAAHSLPIARFPDAEHLYSATGLAPALYESATVHRRGRISRQGLAEHRDALMGIAWGLSQSSPSFALRDAELRARGMAPIQARVALARHACRLAYRLLRTQHPFDEPRYRRGRLGRGR

SEQ ID NO: 315921 - protein, 366 aa, unidentified
MKKISTVQVFSNEIVKEQKLTIGVDLGDRWSFYCVLDEAGKIILEQKVATTAEAMKQTFAKIPRSLIALETGTHSPWASRLLTELGHEVLVAHAQKVELITQSNRKDDRHDARTLARLARIDPELWGPVRQRSAQAQIHLTVIRARAELVSARTALVNAARGLVKSYGERLPKCGTYPVNEKLAEAVSAELRDVLAPLLREVESLNEQIKEYDERMEKIAQEAYPEVYLLKQVKGVGTQIALTYVLTIEDPYRFEKSREVGCFLGLKPGRRNSGKSEPQKHISKEGDRYLRTMMVQGAHYILGPFGEDSDLRRWGLKLAERGGKNAKKRAVVAVARKLAVLLHRLWVGGEVYEPLRNSQKAMRAVA

SEQ ID NO: 315922 - protein, 323 aa, unidentified
MSPVVGIDVAKRSFDLAIDLANSKYRTKAKLPNDPKGFQILQTWLQTHAQADSWIVMEATGTYHEALAEFVYGLGYRVCVLNPAQMALYARSQLTRVKTDRSDAKLIASYGQRHAAQLRPWQPDPPALKRLKALVRRRDDLLQMLQMERNRLDVAALVVRDSLLENIGQLQARIAQIERAIDDQIDQDPTLRGQRELLVSIDGIAGTSAALMLAELGNVERFAHASAVTAFAGLNPRLQESGKRQGQVCISRTGSPRLRAGLFLPALVAMTHNPVVRALKQRMRERGKANKQIICAAMRKLLHIAYGVLKSRTPFDPQKTLVC

SEQ ID NO: 315923 - protein, 356 aa, unidentified
MNKRSKLDFSGQPIYIGLDVHKKSWSVSIFTQHGEYKTFSQPPEAEILSQYLQHHFPGAQYRSVYEAGYCGFWIHDQLKDRGIQNIVANPADIPTRDKERRNKRDRIDCRKLARALRGDEIEGIYTPPRWRLEDRSLIRTRLSMGRKQARCKNQIKSMLLFYGVDIPERREMGHWSRRFIRWIEEIRMERASGDMALQSHLEELCHLRQLIAKLNRAIVALARTEQYRSWISLLKTVPGISTLTAMIVLTELHEITRFGSIDPLCSYVGLIPDTQGSGEKEHVGGVTQRHHSQLRWLLIEASWIAVRKDPVMMEAFQEYCKRMRKTKAIIKIARKLLNRIRYVLKNQVEYVTGVIE

SEQ ID NO: 315924 - protein, 377 aa, unidentified
MKRIKFVGLDVHAETIAVAVAEQGGEVRPLGVIPNRVESIRKLVKKLGPVEQLQFCYEAGPTGYVVYWQLTALGAKCEVVAPTLVPVKSGERVKTDRRDALKLARNYRAGELTPVWVPDAAHEALRNLVRAREAAKKDQLRAKHRLGKFLLRHGQRPPTGVKPWTLNYLSWVKHEVHFEQMAQEATLLDYLHEVEHAEGRIARLDLAIEEAVKLTPPQMRAVIEALQALRGVAQVAAVTIVAELGEVSRFTGARQLMGYGGIVASEHTSGESSWRGGITKTGNAHLRRVVVEAAWAYRHRPSVGKSLQKRQEAVSEEIREIAWKAQHRLHTRYRKLMARGKEKEKVVTAIGRELLGFMWAIGVKAEAAQKKTERLAA

SEQ ID NO: 315925 - protein, 417 aa, unidentified
MKCFVGLDVSSTKLDVCIMLSDTSTPVTASLSNDLSGATEIKNHILDLNHTYHFERIVIGMEATSLYSFHPAMFFHEDRQLKELHVEIMVEQPNKIKKYRDAFEENKNDTIDAFYIADYFRIERFSPSFLKEEKYMALQHLTRTRLQIIEQLTRTKQHFIENIYYKCNTLAYQFKKEELSTNLWSSTMMTLMTDEMTLDELANMPLQELDDWLQKLGKGHFKDSEKLAQTIQAAIRGSYRLSKLQQDSVNVILGLLAREIRNLEKMIKEIDKAIEDMVETIPEYQCLTSIPGVGKVYAAGIIAEIGQIERFKDHPQVAKFAGLNWREKQSGNSNSQHTSLVNRGNRYLRYYLVEAANSVRRYDDEYKDFYKKKYHEVPKHQHKRAIVLTARKFVRLVDVLLRNHQLYTPPRRLMEDN

SEQ ID NO: 315926 - protein, 308 aa, unidentified
MTTIYTGLDIAKLNLQLHLAGRIHDLPNTAAGHRRLLKLLTTHAGVHVVCEATGGYERDVVAALHDAKVPVSVLNPARVRHFARATGQRAKTDDIDAAILSAYGQALQPKPTAPRTEQEQQLAELIRRRVQVVEILVAQRQQAERLTVPALRRQAQSLVRRLERDVAQIEEQLKALRTQAAILDARVQKLEAITGVGAITALGVLAELPELGTLNRRQAAALAGLAPHPRESGQWHGRRSIGGGRAPVRRALYMAALVAAHSNRQLKEFYQRLRAAGKPAKVALTAIMRKLIVLMNHILKNPNFALQN

SEQ ID NO: 315927 - protein, 375 aa, unidentified
MKERVRFLGLDVHAETIAVAIAEPDGEVRSLGTIANRAESIRKLVKKLGPAERLKACYEAGPTGYVLYWHLAELGVFCEVIAPTLMPTKPGDRVKTDRRDAERLARSYRSGDLTPVWVPDEGSEALRDLVRAREAAKQDQMRARHRLSKFLLRTGQRPATGVKSWTLAYMSWVKQIRYTQAARESTRQDYLHEVEHMAERVMRLEQAITEAVKQASPEIQQVVRGLQAMRGIAQISAVTIAAELGNISRFESARQLMGYSGTVPSENSSGQRTRRGSITKTGNAHLRRIAVEAAWSYRLRPCVGPALRKRQEGVSEEIKEIAWKAQHRLHKRTMRLAAAGKDQRKIVIAVGRELLGFIWAIGVKAETASRQQRAA

SEQ ID NO: 315928 - protein, 353 aa, unidentified
MSYIIGCDAHKHYSQFAVYEGNNLRGKQVRVEHERGAIREYLSEFPEGTPVALESIGNWYWIVDEIEQAGCKALLAHPAKAKVMMGNVNKTDKLDARGLATLLRNGTLPTVWIAPSEARDERELPRTRMALCKIRVALKNRIHATLAKYNLSLPTESDVFAPKWSSQLNQVIEQLPPETQTCLQQELQLLEKVQEQIRAMEERMKERIALTPEMQLLKTVPGVGDILAIVIGTEIGLIQRFSCAEQLASYAGTVPAVKSSGGKVRYGHTPKESNHYLKWAFVEAANAPAQYRMHPRWQSRHVTRLYERVRLRTGHSVAVGAVARHLAEATFWILNKQEPYREPSRQKVLPRQA

SEQ ID NO: 315929 - protein, 371 aa, unidentified
MNFIGIDLHSNKFTCCYRDEKSSTEDPRKGRAMETFSLDSEGLGAFFMTLTADTYVLVEATSTTFTFVRLFTDRVKQIIIANTHELKQVSLARCNTDKIDADKLCRIIKAQVLSGEQLVSPVTLPPVEIQELRGLFTTYRLFKKQNTQLKNRIHSLLKEQLHGFTQEEIFGKGDRKEIRSLSPGSPMHFQVNLLLDRLEREEADVDVLQDKILLQAVPFMAQIDILTSMKGISVFIAIAIIADIIDVSRFKNSKAFTSYLRSAPRMSNSNTSTSNRGTNKMGRKLAATLIVNSLNHVLDASPKLTQWYDRLCQYKKPGMVRTGLRRRVFAEIYQMLKKGEYHYGRDEMKHEAKMNQYRNFLKKNKISIEIA

SEQ ID NO: 315930 - protein, 390 aa, unidentified
MLYIGIDISKYKHDCIVIDESGVIIRNVFSFDNSRTGFDQFMKMYRSLDPKEIKKIGFEATGHYQNNFKIYLERSGIKFMELNALLVHKFKNSQTLRGVKTDKTDARLIASYLSSIEFKPYPKISYHILALRSLCKRHFDLINERTKYLLRLTNFLDRTFPEFKEFIKGNIKSKTAMYILHNYGIASKIANINIQSYENIRKESRGHFSVAKFTKLRELAKNTVGFSYETDLFEIKSLLRVYDTLQDEISSLENEITMHLSKINSRIPSILGIGTISAATIIAEVEDISRFDNPDKLLAFAGLDPRIYQSGTQEFKGRMNKKGSVVLRRVLMNCAESILMYNPALYTYYRKKKDEGKCHRVALSHVARKLVRTIYKLETEHIDFDLSFVK

SEQ ID NO: 315931 - protein, 320 aa, unidentified
MVKSSNFFGIDISKNVFDVVRNGEKHFQFSNNITGFKQFIKLLNRDSHCIMEATGVYHYALVMYLYQNEIAVSVVNPLVIKRFMQMHLRTVKTDKADAKQISLYGMQNELILWEPPASYILDSKDIFELTSLYIKQRTMLKNRLHSFGSKSTQRMIINELKKAIRHLDKAIKKLETELEKIIKTYHQKMYTNLKSIPGLGSKTVLYMILITDGFQKFESAKQLCCYAGLSPTQRISGTSIRGKSRISKQGNSKLRNLLFMCSFNACKSNRACKSLYERLVNKGKSKKLALIAVENKLIKQAFSIAKSGIPYDENYVLKLT

SEQ ID NO: 315932 - protein, 427 aa, unidentified
MSEVRAIQPEPEFAAFIGIDWADQKHIWCLQTAGSEQRESGELEHTPEAVESWVAHLYQRFAQRPIAVALEQSRGALVFMLSKYEPFHLFPVPAQMAASMRQALYPSGAKDDPRDADLLLDLLLQHRNKLRRLSPDSEATRRVQNLVEERRKLVDEKTAQINRLTDHLKVYFPQMLEWFGRLDSELVCALLERWPALEELQKASPASLRTFFRKHRCRDRERIECRIEAIRRALPAIQDRAVIEAKSAVVKVIVQLVHILLGGIQDLDGQIEEAAAAHPDFFIFNSLPGAGPVMAPRLLAAFGSQRDRYRSAREIQSFSGIAPVTESSGKRKWVHFRWACPKFLRQSFHEWAGHSIVQSEWARVYYQQQRSKGNTHHAAVRALAFKWIRIVFRCWQDGVAYDENTYLAALVKHGSPLSGLVAIEKTL

SEQ ID NO: 315933 - protein, 414 aa, unidentified
MDIVHDRCCGLDIHKKTVVACLIAPGPDGKPKKEIRSFGTMTGDLLGLADWLQRAGCTHVAMESTGVYWKPIYNVLEDRFNLLLANTKHLKMVPGRKTDVKDCAWIAELLRVGLVQPSFVPERAERESRELTRYRSSLVRERTAEINRLQKTLEGANIKLASVASEVMGKSGRAMLEALVAGIADPTVLADLALGQLRRKIPELQRALVGRFGAHQCFLVVEQLAHIDELEQRIERVSQEIRERMRPFETEIALLDTIPGVNRWTAEVLLAEIGFDLSRFPSAGHLVSWAGLCPGNRESAGKRKSGRTRKGSPWLRVALTESAHATGRGKTYLAAQLHRLIPRIGLKKAAIAVGHSILVIVYHVLTRHQPFHDLGALYFDHRHRASLEQRLIHRLEALGNTVTIERTQAPASAA

SEQ ID NO: 315934 - protein, 380 aa, unidentified
MEKATIIGVDLAKHVFQIHGACADGSVAFRKKISRVKLLPFLSSQPRYVVAMEACAGAHGWARDIQAQGHEVRLIAPAYVKPFVKRQKNDMADAEAITEAAARPTMRFVAVKSAEKQASGMVFKTRDLLVRQRTQTINALRGHLTEHGIIAPQGVFHVGRLAAEVENVNNHLPSIVIELCTLLLRHIATLDEQIAALDRRIRDRAREDETARRLMSIPGVGPVCATALEALAPPPETFTRGRDFAAWLGLTPRQNSSGGKARLGRISRMGQRDLRRLLIIGAMAVVRCSQAGRSCRIVAGPYDGEKAPNACGDCARQQDCSHRLGFDGERRGLPESGRGRLRAEAAGAAWMWWGQRRIMGKRSRRRGRENQLTGWRLERG

SEQ ID NO: 315935 - protein, 341 aa, unidentified
MKNKSFIGIDISKNVIDVSIFCEETPIKDFSHDVFNNSRKGFGEMCTWLKKNHVVLSNCLFGMEFTGSYSMELEKFLNARNYQFCMFSTHVVKHYPMGPKDKSDKIDSAKIADFLYRYNGTECVKPYNMPDKTMQKLKALMNERKFLVEQRTCFMNRRQLCITKEDAQLYDGYIKKFSRDIENIELEEQKLLATDDSLLSTYKNLLTIPGIGFVNAINVIVITRNFTAFETARQYASYVGVAPHFRTSGTSVKWRPRPSARCDGQAKADLSMAATVVVQYDAELQSFYNRKLGGKQDSDTKRKALNAVKFKLVLRMFAIGKQNRKWEPLDSKSSNEKLAIS

SEQ ID NO: 315936 - protein, 320 aa, unidentified
MMAHNDLIVAGMDVAKDKVDACIRSLSQRQTFPNGPEGRRKLIVWLRKHSANTAVMEASGGYERNWIKVLRQVGIEVRIVDPKRVRSFALSAGRLAKNDTIDAEMIAWFAETFSQAPRQTHDAAHEELLSLVKARKGLIDLKTRLQSQNEHVVPGPVQKAHARLLKTLATEIAKLEVAISAKIKATPNFADRAEIIQSVPGLAKTASAALIAGMPELGQVSDEIAAALMGVAPYDDDSGHRRGERHIKGGRRWVRNAIYMPCLGAATQNNPVLKAFYQRLIAKGKAPKVALTACMRKLIIILNTMIARRQKWDPTRCPVA

SEQ ID NO: 315937 - protein, 371 aa, unidentified
MKSILSVGMDVHKNSFSLCAYDGYTGEIVSESTFASDVKLVIKFIETLKSRYENDVEIKCGYEAGCLGYSLYKSLTARGVDCVILAPTTMQVSAKNKMVKNDRMDALNIAKNLTSGSYKAVYVPDEEDVEIKEYIRMIHDFKKELKRVKQEICAFVLRHGYQYDGKSKWTIRYMNWIRELKMSEIQRETLNEHIAEMENLHNKIDRFMNRIDEMYQSERYHEKVSKLRCFKGIDTFAAMTIQVETADFERFPNAKAYASYTGLTTGEHSSGDKNNQIGITKQGNTVIGKTLVECAQSLVKGNVYAKKSQRLKSRQKVMDVNIIAYADKATERLKKKYQKLIERNVPRNKAIVAVARESACFIWGMETGNIH

SEQ ID NO: 315938 - protein, 352 aa, unidentified
MTAVMIGIDPHKASHTAVVISGAEEPLGELRVRAGAAQAERLLEWAAAWPERTWAVEGAGGLGHLLAQQLLSAGERVLDVQPKLGARVRLLATGNVNKNDPNDARSVAVAALRSPGIREARPDDHAAVLKVWAKRRRDLASSRTQVVCRLHAVLCELVPGGVPKKIIAAHAARLLGSITPADAVAAARRELAAALVEDLRRIDGQLREARKKLDTAVRACGTSLTGLFGVGPVTAATVIGEVRDVSRFKDRDRFAAYNGTAPIEVSSGQRKVHRLSRRGNRRVNHAIHMAAVTQVRQPHSEGRAYYDKKLAEGKTRKEALRALKRQVSDAVFACLRADARRAAAQVRDPGGQ

SEQ ID NO: 315939 - protein, 413 aa, unidentified
MEAYYVAGIDVHKAMLAVVVSEVKPGECEFHKRRFGTTRSQLRELNQWLTEVGVQEVVMESTARYWRPVWVALEETGIKRHLAHAHSNGARRGRKSDFRDAERLVHRLVAGELVLSYVPEDEQQGWRWLTRTRYQLVCERGRVQSQIEGLLEDAQIKLSSVITDLLGASGRRILEALAQEQGSHDAAKLAQLGHAKLRASREELTDALDGRWLDRHRFLLGLHLDRIRQLDSQIEQIQQQTAAAMQACQEAVARLIQVPGIRTEGALQMLAEIGPTAAAFPSPEQLASWVGVCPGQQESAGQSYSQRSAKGNWQMRRLLSQAAHAASHAKGSFFESLYRRLVVKIGPPKAIWAVAHRLCRLIWKILHEGVQYHEQGAPTSSSKSIRRRQLKLTAEFRKLGFQVQFTPINPSHP

SEQ ID NO: 315940 - protein, 421 aa, unidentified
MEEVDELDQVVERVAALDLGKTGLVACVRVPSDTPGRRQQEVRSYDTLTRSLLALADWLRTERVTRVAMEATSSYWKPVFYLLEAEGFQCWLLNPKHVKHLPGRPKTDTLDAVWLAKVVERGMCRPSLVHPAPIRQLRDLTRYRRTLIQDQTREKQRLEKLLEDAQIKLSSVISNILGVSGRAMLEAMIGGQRNPRVLAQLARTRMRTKIGVLEEALTGHFTDHHAFLTRTMIDRIDQVTADIEKVNTAIEEAMAPFRTHAQRLDEITGIGIRSAQELIAEIGVDMTRFPTPAHLVSWAKFAPILHQSAAVTRNGATGKGNPWLAGTLGEVVAGLSRTHTFLGERYRRLVRRRGKKRAIVAVGNSILKICWHLLSDPEARYQDLGETCYAARHTTQRRRRVLIRDLERLTGQRVTLQPHAA

SEQ ID NO: 315941 - protein, 388 aa, unidentified
MLPVINALEVQKGKPAMKKNTTELEKPRRLVLRKNKQRELTIGVDLGDKTSRYCVLDREGNVLFERSTATTKKGLAQAFASMGASRIAMEVGTHSPWVKRLLESWNHEVIVANAHRVKLITESTRKDDRLDARKLARLARVDPELLSPIRHRSEGAQADLVMIRARAVLVEARTKLVNSARGVTKSFGERLASCDPDQMRVKCLVGLPSSLQSALQPLVTAVESLTRQIHEYDDKIAQIARSGYPETARLRQVTGVGELIALTYVLTLEDPQRFRRSRDVGGYLGLRPKRRDSGASRPQLRITKEGDVYLRMLLVQGAQYILGWHGVDTDLRRWGLKLAARGGKNAKKRAVIAVARKLAVLLHRLWVTGARYEPLRHSQIASSLQVAV

SEQ ID NO: 315942 - protein, 392 aa, unidentified
MFYLGIDIAKVNHVASLIDEDGSILVKAIKFTNSNEGLKKLIDSISNYDQSQIYCAMEATGTYWLSLFSALTDKGFNVSVFNPYQIKSFRGAYSNRKQKNDVIDSIIIANFLSFNGIEQTSLPNDDLLALKNLTRYRSNLVDNISKAKIQIKGILNKVFPEYSDVFSDTFGEASKQVLLNCPTPSEVVNFNTKKLANLLKKASKGRHGTDTVRKVKDLAKNSFGIKFTGDACSFEIKQLVNQIIFLENQVDELNLKIKEIYSKLDSHLESIPGIGKKIAPVILAEIGDIHNFNSPNKLTAFAGIDPSENQSGNKKSTDGKTSKRGSPYLRHAIYQAAFIASNNDPVMHEYYVKKRSQGKHHYVALAGVERKLLGIIFHVLKENRDYRPSKFS

SEQ ID NO: 315943 - protein, 343 aa, unidentified
MKLMRVGVDLAKNVFQVHGVDRQEKSVWRRRLSRKKWLKVLAETVEPGCEIGMESCSGAHHWARQLQAQGFTVKLIAPQFVKPYVKSNKNDANDAEAVCEAMSRPSMRFVAVKSVEQQDIQAVHRISSELLGQRTAKANQIRGLVAEYGLVAPQELCQLRRALPSWLEEPENGLTERFRRLLNGLWEDLKGLDARVADLDGEIDAIAKNDPAAKRLQQLRGIGPITATALVAAVGDGAQFANGRQMSAALGLTPRQRSSGGKERLLGISKRGNSYLRTLLIHGARAVVRTAKHKDDPLSQWVTRLVARSHPNVAAAALANKTARIAWAMLRHGTDYQPDRVAC

SEQ ID NO: 315944 - protein, 336 aa, unidentified
MLIIDCDFHTRFQRIARLDTQTGELVERRLEHENGEARGFYAALRAPARVGMEATGYSQWFETMLAEQGHELWVGDAAEIRAAVVRKQKTDSRDADHLLDLLLKDKFPRIWIASPRERDVRQLLRHRHKLVCWRTSVRNQLHALAMGQGICRKQKLWTAAGRKELEGLALGPWASRRRQELLQMLDWLEAPISALDQAVIQEAERHPAARRLMEQRGVGPVTALAFVATIGPVERFRNSKQVVSYLGLNPRESSSGGKQRLGWISKQGNSMLRFLLVEAAQTASRGDPELRRDYLRLKFRRGSAVAKVAIARKLAVRLYWKLREAGQPRAAGSYAG

SEQ ID NO: 315945 - protein, 428 aa, unidentified
MNMTSKSAQFAALIGIDWASQRHALCLYDCATGKRESSILEHTPEAIAQWARGLQERFKGRKIALCLEQSKGPLIYALLEYPFFVLYPINPATAARYRQAFKTSRAKDDPSDAQVCLELVLHHREKLKPWLANDAQTRELSCLLQHRRAAVDLRTLLTNMLRDALKSYYPQALELAGQDLFAPLGCQFLLKWPSLQELQKARKESVRKFYYVHNCRRMDVIEKRLDAIAQMTPLCRDRALLEPAMVQVRMLARQLLQLGGALKEYHSKIEQLFAQHSDALIWESFPGAGPTLAPRLACAFGTQRSRYQSAVAIQQYSGTAPVTEKSGKNQHWVHRRWARPHFTHQSFFEYASQSVLHCQWAKLYLKEQMARGKAYPTAIRALAFKWQRIMFVCWRDRVPYEETIYLQSLQRRGSHLARKLNQQPSKAA

SEQ ID NO: 315946 - protein, 309 aa, unidentified
MSSHFFCGVDLAKHHFSLHAVDDRGKVILHKSVSRAKLLTTLANMPPMRIGIEACSGAHYWAREFIKFGHDARIMAAKYVGPYRTKGKNDLNDAIAICEAVQRPNTRFVPVKSPERQAILSIHRMREHWVQERTALINRIRALLAEFGIVIPTGRHAIQRDVPLILEAADYGLPDIARAVLGDSFEHLQVLNQRIDDTELCFDIVTKASPNAQRILKVRGIGPQTATAIIATIGKGEQFDSGRDFAAWLGLVPKQYSTGGKPRLGRISKRGDKYLRTLLVHGTERSSLTLGRNRTGSVSGGGTFLNEGE

SEQ ID NO: 315947 - protein, 305 aa, unidentified
MTQVYIGVDVSKQWIDVSHPTRGQWQIETPALDRFAAEAAAEHAIVVFEATGRYDRPLRAALAAADAAHVRLSPQAPRQLARVLGIRAKSDRADAVLLRRYGEAFQPAPGRTAPAEPLADLVVRRRQLVKMLQAEHIRAHEPLAEPARASLARMVDHLATEIAALDGLIAGAIATCPERAETARRLRTAPGIGPVTAATLIAELPELGRLDRRALAALVGLAPFENESGRWRGRRHIRGGRAELRRALYVSAMHASRGNGALKPFRDRKIEEGKPVKLAITATARKLLTILNAMVREQKDFKYPA

SEQ ID NO: 315948 - protein, 285 aa, unidentified
MERYIGMDVHAASCTLAVISEKGRKLKDFPVETNGQALVEAIRMIPGHKHLVMEEGLQSAWLYETLSPHVDELVVTGVTESRGLKSDKRDAYGLAEKLRVGNLDKPVFKSPRQFTRLRELSRIHMTLVGDVVRIQSRLKSLYRSRGVFVSGVNVYGVRYREQWQAQLSSSAQTRATRLYEHLDFLMEQKKQAEADLLREAKKHPIVRVLETTPGFGPIRAARLVPIVVTPHRFRTKRQFWNYCGLGIVTRSSSDWVQTADGAWIKARVPQTRGLSRQHNHFLKSI

SEQ ID NO: 315949 - protein, 358 aa, unidentified
MPKWRCFRIPRTKRASIEKVSIIGIDLAKRSFQAHGAHADGGVAFRKKLSREKVLAFLAEQSPCVVAMEACGSAHHWGRAIGDLGHEVRLIPPIYVKPLVKRQKNDAADAEAICEAASRPTMRFVAVKTEEQQARAMLFRTRDLLVRQRTQLINALRGHLAEHGVVAPQGPANVKELELAVEEEKTSLPLLVVELSRVFLEQIDVLSKRIGELEKATVHEAARGATSRRLLTMPGVGPITAMAIETFAPPMAVFKRGRDFAAWLGLVPRQHSTGGKQVLGKISKMGQRDIRRLLIIGATTIVRWACRKGAPEGTWLQRMLARKPRMLVAVALANKMARSIWAMLTKGEDYRAPAAAAI

SEQ ID NO: 315950 - protein, 452 aa, unidentified
MKANKTRPTARDLAALEQINLHAAGVDIGAAEIYVAVPPGRAAESVRCFATFTADLHSCAAWLAACGIETVAMESTGVYWIPLFEILERRGFEVYLVNARHVKNVSGRKSDVLDCQWLQQLHTYGLLQPSFRPPEEICALRSLVRQRAMLIKYRASHVQHMQKALQQMNLKLTNVLTDITGQTGLQIIRAIVAGERCPAVLARMRDGRCHKSELEIAKSLEGHYQREHLFALRQALEMYDFYGQQIRACDEELEAMYQEFAEPAEPGTPPPAPRTGRRRKNHPHFDLGQAVYRLAGVDLTQIDGIDALLAQEILTTIGTDMSKWPTVKHFASWLRLAPNNKITGGQVKQRGTLPTQNRANTALRLAAQSLARSDSALGGFYRRVRAKHGAPVAVTATAHKLARIIYFMLKRREPYRDPGADYYDQQYQARVVRNLQRRAAKLGMRLEPIPVG

SEQ ID NO: 315951 - protein, 460 aa, unidentified
MNNGSGVSRGDRNRNARLSRLREAVPVTSAVVGIDLADRKQMLVVTDHDSKVLARRTFRCKAWDLGAALDWAGERTSRAGFGGVTVACEPTGHRWRVLAQLATQRGMAFVCVQPALSSWARKTEDLTTDKTDDKDAVLIARLTAQLRCYLPEPVDEPNAAWARLRHLGARREQLLEEHVACVHVIRDMLECVWPAALEAAKWPFRSATWVAAMTVVMRRDGGDLSRTRRLGQARFERAVQAEVTRRGGVRPCQRIVRRVFTALSDDAGVLAHRPAVFERVGWTLSDWEQARAKLEETEARMTGVLDEVGLRRLVTSIAGLSSVGAAAILAQTGDLHRFTSARAVVKHAGLAPRERMSGTFTGRARLTGAGRPGLRVAAWRAVWGCLQTNKVYAARYRQLTGRAQQAHPHPGADRGRRRDPAPAVRRRRPRAGVGPGHRRPRHADKSLRHNEIHTLAITTR

SEQ ID NO: 315952 - protein, 422 aa, unidentified
MKLKYSICCGLDVHKNVIVATIVITNADGISEYRQKSFSTFNSDIRKFHSWLIENNCYHVCMESTGKYWIPIFNYLENDIEVCLTHPKYVKAIKGKKTDKKDSKWIADLYKFDLVRCSFIPTKDFRQLREIARYRFKLVCMKSSEKNRIQNCMTVSNVGIASVLSDPFGKTATEIMSYLLTHTSDSIDEKAVRKLIKKGAKAKSDEIIDAIRGYNIESDQAKKLELARSHLEYLDGMITQSEVELYVRMKPYYKFVELVSTMPGMTELSSTIVLAETGVDMGIFDDAKHLCSWCGLSPTNNESAGKKKSVRISKAGDYLKPMMVQCALAAIKSKKQPYFAIKYGRVKKRRGHKKAIIAIARMMIVCIYHMVSEEKPFTPIDYEELMSPKNHIERVILNENNVFAYLESLGYDSSKLVKRNDN

SEQ ID NO: 315953 - protein, 325 aa, unidentified
MSLPCLGIDVGKHKLYAALLLTADKKPKRKTFSNDASGHQALLKWLAYHQVERVHACVEATSTYAHPVARCLHNQEHVVTIANPKQVKAYGDSLLVRTKTDRVDAAIIAQFCLERNPRAWTPPAPEVEALQALVRRLDVLEKIMSQERNRLETTPDELIEDIKTHLDFLKQQRQSLLEKIKHHIDHHDTLKDQRDLITSIPGIGEKTAAIILAEIGDIRFFKRARQLAAHAGLTPKKHESGSSIRKKSRLSKVGNARLRKALYMPALASINHNLVIAQFRERLLAAGKLKMQVVGAIMHKLIRWVFGVLHSGTPFDVNKALTAHA

SEQ ID NO: 315954 - protein, 427 aa, unidentified
MNHTQNEKIKQVTNDTMVIGIDIGSEKHWARAFDNRGMELSKKAFGFNNTAEGFTSFETWYENQRRAAGLKRIIVGLEPTGHYWFNLNQFLSENGVRVVLVAPQHVKHSKELDDNTQRKDDLKDPRVIAKLVTEGRYFLPYRPSGVYADLRDGFNRRCGIVESMTRAKNRLHRWFSINFPEYMHAYGSVTAKTGLMVLKKAPLPKDIVALGVEGIEKIWRDAKVRGAGKKRATTLVALAEQSIGEKTANEAARLELWQLLEDYEHFAHQFEVIKEMLMRKVHEIPNADKLLQIPGIGYFTVIGFFAEVGPIERFDDPKQIQKLAGLSVVENSSGKRKGLSGISKRGRDKLRWVLYQAAMSAVKNNQEFKEIHLYFTTRKDNPLKKMQSIMAVAAKIIRVFYGMVRTGSDYDVERLMRDIRRPEKAAA

SEQ ID NO: 315955 - protein, 338 aa, unidentified
MAIVMGLDQHRAQITAEWIDTDTGEVSRARVAPALRPDVRRFVKRFAGQRLEVALEATTGWRFVVEELRAIGADVHLAEPAETAARRGNKKRAKTDRADARHLRELLMIGRLPESWIPPEHLLDLRARVRLRHTLVDQRGEWQQRIQAALYHHGFPQRNGLLTAENRTWLEGLPLPESAQQQVAVALVMIDALDAQSAPITRRLRLYARRQPGCRALMKHYGIGELTAVTILAELGDARRFSSSRHAVRYAGLDITVHQSDQRRAAGHLSRQGPPALRWALFEAAQAARRPGSPDRLYYDQAAERLGGNRACLALARKLLKRSFHTLRELGDEGLAPA

SEQ ID NO: 315956 - protein, 334 aa, unidentified
MDTNVFVGCDISKSTIDVSLHHEKRIARQKQFSNTVAGHRHLIKWITESEPLVRVVIEATGNYSLDLALTLDSCSAIELMVANPSATRQFARAQMRRSKTDRVDAEMLADFAKRMVFVPWTPPEDDILELRGMSRRIQALTTERTRELARLHQAGATVTTSAIVINDIEVNIRHLERRLHVMLEQAIRLIEMHSQMNTAFHLLTSIRGIAKKSAVMILPEILILPRGMSVRQWVAHAGLDPRKYSSGDSVEKRERISKMGNVKLRRALYMPALVAIKWEPHIRAFYEHLIAQGKKPLVAIVAVMRKLLHAIYGMLKNETPFEGQKFYQIPVPTA

SEQ ID NO: 315957 - protein, 407 aa, unidentified
MDVIHAKCAGLDVHQKTIVACARVMTGKTVQHHLQTFGTTTDDLLALGDWLARHEVTHVAMESTGVYWKPVWYALEGQFQLLLANPMHVRNVPGRKSDVNDATWIADLLAHGLVRSSFVPPEPIQELRDLTRTRKQLTREIARHTLRIQKTLDQANLKLTGLLTDILGVSGRAILDALVAGERDPDRLADLATGRLKASRAELVAALHGRVTPHHVFMLQLHLTQVDALRAAVRDLEARLGDALAPFRAAVERLTTIRGIGPLAASVLVAELGVDMSRFPTAGHLRSWAGLSPRQDESAGKRRSTRTLAGNPWLKTTLVQAAWSAVRKDNTYFRAQFLRLKARRGPKKAIVAVAASILTAAYHVLQREVRYDDLGGDYFSRRDKAKLARRLIARLHDLGVMVEVKVA

SEQ ID NO: 315958 - protein, 393 aa, unidentified
MHSVGIDIGKRQHVAAICRQGQRTADKPVLRFGADRAGLALLERWLAQHGPVERVVMESSGHYWLPLAAALHRASVPVAIVNPISAKAFGKRRLQRVKSDPADARTLAALGMADQPATREPLAGAELREAARFAMHLVEEQSRIDNKITRLIELGFPELEQAYDDPTCTSALAVLRLAPTAAAVARKRVTTLADANRGPGHRAVGVSKAEQIQALAKDTIAPPELAPQLGFEMELLIAQHDLLEQQIAQAEERVAGLLDGELARRLQTIPGVGPAICATLIAEIGDIFRFTDFDQLVAYAGVHPAEKSSGQKGGPETSWHMAKTGNAYVRAALYRMSVVGLQHNPTIAAHYARKRAQGKTKMNALGHCMKKSLAIVWGIWRGDHDFTPEPPIA

SEQ ID NO: 315959 - protein, 429 aa, unidentified
MNNVKTKFSIFVGLDWANKKHDVCVQIGDSDKRRYEVISHTPESVDSWLNELRKEVKGDIAVAVEMTKGPIVYALQKYSFVTVFPIHGLTLARYRQAMFPSGAKDDPSDAELALDMMLNYPKKVKPLRPSSEQTRALALLVEQRRSLVDDKRRNTNRLIDALKQYYPQPLEWFSHRGSELFCDFLIKWPSLQVIKRARTTSIVKFFHARGGNAVSNTQRRVNAINEAIPLTQDNSVILPHKLLVVALCKQILTLIENIRVYDKQICLLFNDMADADIFTSFPGTGPCLAPRLLAVLGEDRARFNSSEEVQNYTGLSPVTERSGQKNWVHWRWQCSKFVRQSFIEWSAKSVHQSYWAGLYYAQQRAKGKSHQTAVRALAYKWVRIVYKWVRIVYKCWKTRTPYDESRYLKTLKEILPCWLHKRLVERLMA

SEQ ID NO: 315960 - protein, 347 aa, unidentified
MLHAGLDLSRRKVDVCLLSEQGEHLDQLATAPDADALRTLARRIDEVHREPVCAVVESMTGARLLHDTLEQEGWEVEIADAQKVKGLAPLACKTDRIDSMVLAVLSHRDLVPAIWLPDPRIREERELARFRLHLVKHKSALKNRIHSTLINFGRPCPVTDLFGAEGRRLLARLEVPEPWRGNITAALELIDDLEGQIAEINARLRDGHADHPYIPLLMSAPGVGWVLAFTIAAEIGEIERFASPAKLTGYTGLCPRVNQSGEKDRRGPLTKHGPTYLRWALLEATMHALKHPAYSERYQRNKRRLGKQRGAKVAQVDIARRLCHAIWHMLSRGQEFAPRGAAFRLAA

SEQ ID NO: 315961 - protein, 362 aa, unidentified
MRIKGCDLHARQQTLAMLDTATGEVVNVTLTHEGHNVREFYSTLPRPVCVGIEATGSMQWFLNLMEELGIECRVGHPATIRAAEPRKQKHDRRDADLILKLLVENRFPAIWMPTKELLDLRALLRHRHQWVRIRTRIQNAPQSIALANGLRRGPSLWSRDGQNTIASLPLAPHTAYRRSELQAMYGKFEAEIEKLNQRVEEQACGRPGARLLMTHPGVGPVTALATEVFLGDPARFADSKALASYVGLIPREHSSGGRQRLGGLSKQGNPLLRFLWGEAGAHAVRRDPELQRFYRRKLVQKGLGKARVAVARKLGIRLWILLRDQIEYQEFCRRGQKQQKSSDACAGMPETPYRATSHRPVD

SEQ ID NO: 315962 - protein, 280 aa, unidentified
MKYIGLDCHKRYDFATLIDSETGEIRSKKLAHKKDEFKAFIGDRGKSKMVIESCWNWSKTYELAKDLVDEVILAHPLKIKAIASAKIKTDAIDSRTLAQLLKADLIPQAHLREADNRAKQKVIRHRAFMVAMRTRVKNKVNDLVNNRLLPPTVEETKPKNLFSKRGKEENGVAWLKLLEWSVEDKEIFESAMRLIEQLSREISVSNRMIDEIYKRDKDAQLLYTIPGIGKTLAVLINTEIDGIGRFKSPSRLCSYAGLVPSIHSSGGKVYHGKMILEGNR

SEQ ID NO: 315963 - protein, 355 aa, unidentified
MERYIGMDVHAASCTLAVISEKGRKLRDFPVETNGQALVEAIRMIPGHKHLVMEEGLQSAWLYETLNPHVDELVVAGITESRGPKSDKRDAYGLAEKLRVGNLDKPVFKSPRQFTRLRELSRIHMTLVGDVVRGQARIKSLYRSRGIFVTGVNVYGVRHREEWQKQLSSSAQTRAMRLYDHLDFLLEQKKQAEADLLREAKKHAIARILETAPGFGPIRAARLVPIVVTPHRFRTKRQFWSYCGLGIVTRSSSDWIQAADGGWIKARVPQTRGLSRQHNHFLKSIFKGAATTVITQCNKDPIHARYERLLDGGTKPTLAKLSLARMIAATVLRMWKDEKEYDPERGGPSTVTREG

SEQ ID NO: 315964 - protein, 319 aa, unidentified
MITTGIDVSKAKLDVFFNHMPHKKHETFSNTPQGIEAIIRRLPENAFVIFESTGPYSKLLYKTLCEKRIKCCCTNPYKVLRFAQGMGRHAKTDKIDARILAEYGDKAEPEPTQFKSDKDLELHELVSTRDVLMHDIRAHKNRLEISFSSDKVNQVFLDVIQKLEEELFKICQAIDDFMKQNENYAKKKEQLETIPGIGSVSAAAILAYGPEIGTVSGKQFSSLIGLAPRTKQSGSTLMHDHIGGGRPDLRKAWYMPALTAIKCNPEMRKFYDKLKAKGKSSKVAIVAVMRKMSGYANSVIKRQVNFEKEGKPSLPNLAA

SEQ ID NO: 315965 - protein, 340 aa, unidentified
MNYYAGIDVSLEASSVCVLDGTGKIVREGKVASEPGALIAWFSSLGLSLTRIGLEAGPLSQWLYAAMRDAGLAVELLETRHVHNAFKIMPVKTDRKDARGIAELMRLGWFRPVHCKSMEAQETRAMLTARKLVQKGLHEVESSLRGILRGFGLKVGKTTAVQFEARIKELVAGHPSLEAVATSMLAVRAALRREFNGFQRQLRAMARRDTRALLLMSTPGVGTIVSLTYACAIDDPARFKSSKIVGAHFGMTPTRYQSGETDRSGRISKIGDASVRAALFEAAHVILTRPIKGCTALKSWAMRIARRAGMNKAKVALARKLAVIMHRMLADGTPFATQKA

SEQ ID NO: 315966 - protein, 347 aa, unidentified
MEYVSTIGLDLAKHVFQVHGADIAGSPLFNRKLRRGEVLRFFEKLPSCLVGMEACGGAHYWAREIANLGHDVRLIPPAYVKPFVKRGKTDAADAEAISEAVIRKTMRFVPIKTAEQQADAMVLKTRALLVQQRTQSVNALRAHLAELGIIAARGLPSVAALMTIVREGEDTRLPAAARFALMAVADQIDTLADQIFKLERAIVTEAKRDEDMRRLTTIPGVGAITAATIKALVPDPGGFKSARHFAAWVGLTPRPHSSGGKERLGGISKMGNPDLRVLLVLGATAVLRIARNDDRARPWLKALLARRPFKVAAVALANKMARIIWALLNKGGIYHRPEPLSIAAVAR

SEQ ID NO: 315967 - protein, 345 aa, unidentified
MTIVEAARAVTGGVDTHLDVHVAAALDPVGGLLGTEGFPADPAGYKAMLSWLEGFGEVTKVGMEGTGSYGAGLARFLRRQGIEVVEVDRQSRQARVRHGRSDPIDAVEAARATLAGRASQPKSMDGAVEAIRVLVVAKRSARQARSKALTQMRHLSYTAPDQLRCRLKGLTIPVLVAEAASLRPTRSPDPVTAGTKTSISSLAHRVRFLDAEIAGLDELIEPLLFATAPELLALKGVGPDTAASLLITAGDNPERLRSEAAWAHLCGVSPIQASSGKMTRHRLNRGGDRQANSALWRIVMVRIAHDPDTKAYIERRVKEGRSKREVIRILKRYVAREVYRHLPRG

SEQ ID NO: 315968 - protein, 330 aa, unidentified
MKSWNVIFGVDVSKLTLDICCAERSLHVKIDNCSKGFEVFRKWCKAHGINLGDSLMVMEFTGGYEYRFLQFCQSLSIPYCRIPGLEIKQSMGMTRGKSDQADAFRIGQYGEEKKKRLEPSKPLDQNILKLKQLLSFRKRLVREKAGLESTIKERKCMYPINKADTIIQIAQAKIKTNEKYIALVEKEIGRIIQSNESMLQNYRIITSLKGIGPVNAWMTIAYTENFTSFTDARKYAVYVGVIPFEHTSGTSIKGRRRVSHLAHKELKQELNQAAKTAIVHDPEIRAYAERKLKNKQYPLVLNNVKFKLILRMFSLVKRGVKYVENYQRAA

SEQ ID NO: 315969 - protein, 316 aa, unidentified
MNSTIQNEINVGIDTSQAFLDIYIRPVDEYRSFTNDTAGIKQAIRFIRTFHPVRVLIEATGRLEMAFFCAADKAGLPVCVCNPARVRNFAKSIGRMAKTDKLDASDLAHFGEVIQPTITQLKPEKIRLISDLLAVRSQCLEMSTMQKNRLKRMPKSVHAPIRKILKTITEESSRIDRQLDRLIAEVPEWQERVDQLTSAKSVGKVLAYTLLSELPELGQLNRKQIAALVGVAPMNRDSGRYNGKRFIRGGRHKVRTVLFVSIMSAIQCHPKIKPMYERLVSAGKPKKVAMVACMRKQLTILNAMVKDGTYWNENMA

SEQ ID NO: 315970 - protein, 341 aa, unidentified
MGSFIGIDTHKDSLSCSAVDEVGREVESVHAINDGRGFRKIERFAHRVEATRIGIECSGSFGLALAQHLLAAGFDVREVPGQLVKRDRRSLSKGKSDALDALLIARVVAREDSLPPPPLRGLTHDLKALVDHRETLLNEATRHRNRAHAILTQIRPGYSRTLPALTSSRQLDAARDLVEGDAGVRATVLRDALKRVAELDSTAHALEKQIGALVKASGTSLTQIVGVAAITAGRILGELRDVGRLSGQAAFGALTGTAPVPASSGKTDRWRLNRGGNRQLNRAMHTIALTQSHHDPRARAYLEQKRAAGKTDREAMRCLKRHLARVVYRRLAADHTLVLLT

SEQ ID NO: 315971 - protein, 349 aa, unidentified
MNTVKQSIGIDISKDTFTACGCTHTFNGETTFTQVHSFTNDSRGFNQLMRWSKSVVLKDSPLVFLMEATGVYYERLAHHLYKINKQVIVVLPNMSKHYFSSLNVKSKTDEIDARVLSRFAVERTHRLWQPPKPIYIELRNLTRYLVQLNEQRTALSNIKHSKEAANEVQQFVLKSNQTLVEQIDKQIEKCKVEIEKFIQKDKDLAERVSNLMTIKGVGLITIATIIAETLGFERFKSAKQLVSFAGYDVVQQESGTSIKGKTRISKKGNRYIRNALYFPAMVATRFNPVMKANYLRIIQQKPSKMIGQVAIQRKLLTLIYTLWKANIPFNPDYNKVASPVKAEATLDAQ

SEQ ID NO: 315972 - protein, 316 aa, unidentified
MKNYIGIDISKATLDVYNGKKSYKFENDENGFKQIVSLSEDIKNTILIFEPTGIYSYALSEFCSKRKIQVVIVGPKESRDFARSLKVRSKTDKIDAKVLYKYQSHVEPKMVKVPIVNHQAIKIQEMLNAYESIQSSKQRFKNQIESTSKLNKDLLRTLNRLIDNLDTEAQRLFNKIEVLLLKEEETKNRYDAISKIPSIGQKSALYLCAFFLKYPLANAKEITALLGLDPMIKDSGTFRGKQRISKHGGQQIRNMLYLPTLCAIQHNSRIKKFYEGLTARAKTKKLAVIAAMRKLILMAFSIFKSKEEYQPLLATI

SEQ ID NO: 315973 - protein, 415 aa, unidentified
MKVVFPTCCGVDVHKSFLVATIIKTPKDSLQPGYQKQRFSTFNSDLNHFADWLHENECLDVCMESTGKYWVPVFNILEKRGIRVVIANPKWVKAVKGNKDDTKDSKWIGDLFRIGLVKGSFIPAKNIRILRELTRYRYKLTSMKSSEKNRFQNAFTVCNVALDSIVSDMFGKSATAITDYLASDENFDPQHCVSLLQRSLKKKADDVLASIEGYEISLEQKCRIGMIRDHLRYMENLIERVDTCVHAMVEQYEGEISLLCTIPGIDRKSAITIISETGVDMTQFGSSKRLCCWAGLTPGNNESAGKKKSVRISRAGVYLKPVLVQAAHAAVKDKKNPYYAQKYERIAKRRGKKRAIIAIARMILTAIFSMLSTGETWNPVDLFKFDMPKHLKERQRDKAVKQAIRFLETQGLKVS

SEQ ID NO: 315974 - protein, 403 aa, unidentified
MNAVGIDVSKGKSTVAIFQPGDQVILKPRDFHHTQSDISSLIGIIKGLDGETKVCMEHTGRYYEPVASWLSDAGIFVSAVNPMLIRSFGDDSLRSPKTDKADAKKIARYTLDRWTKLKQYSHMDETRNQLKTMNRQFGFYMDQKTAMKNNLIALLDQTYPGANAFFDSPARSDGSQKWVDFVYTYWHVDCVRGKSLEAFTEHYKNWCKRKDYNFSAAKAEEVYHDSADLIAVFPKDANTRMLIHQAVDMLNLTSKTVETLRTEMDQTAAMLPEYPVVMAMNGVGPTLGPQLIAEIGDVTRFVKRGSLTAFAGVDPGKNDSGKHSQKSVPTSKKGSPHLRKTLFQIMDGLIKRSPIDDPVYAFMDKKRAQGKPYYVYMTAGANKFLRIYYGRVNEYLSTLSEGE

SEQ ID NO: 315975 - protein, 360 aa, unidentified
MSFNGTSVGLDVHALSVVAHAVDEETGRVERARLCPDHGEILDWLHRLRAPVRVAYEAGPTGFGLARALAAAEIDCTVAAPSKLIRPGGDRVKTDARDAAHLTRLLRLGEITAVTVPEADVEAVRDLVRAREDARADLMRVRHRLSKLLLRHGRVYSGGQAWNGVHETWLRRQRFDDSHTAAAFDHHFDAVLSATAARDRLDEQIGTIAASPRWADPVDRLGCLRGISAYTGLALTVEIGDWSRFTGSSIGAYVGLVPTEYSSGTSRVQGSITKAGNAHVRRLLIEAAWHHRAAYRNPGPTMRARWAKVDPALKARGHAGNRRLHQQWCRFNERKKHHVVANVAVARELAGWCWSLATLN

SEQ ID NO: 315976 - protein, 341 aa, unidentified
MTEYIGLDVSMKETAVSIRREGERIWRGKCASDPNIIAELVRKRAPAAKRIVFETGPLSVWFYHSLRSEGLPAICIDARHAKAALDMAANKTDANDADGLAHLAEVGFFREVRVKGFDSMLTRTLVAARTRLVRITIELSNQIRGIMKTFGLLVPAGKGTTFEKNVRSRLIDQDRLAPIVLPMLEAWRGIRIRAAELGRQLVADARQSQACRTLMSIPGIGVITATSFVTAIEDPNNFKKSRSVAAWIGLTTRRYQSGEVDYDGHISRRGDRHLRGLLYEAAAVILTRCSTESSLRTWGLKLRERIGFKRAAVAVARKLAVIMHTMLKTGELFNPSAGATA

SEQ ID NO: 315977 - protein, 346 aa, unidentified
MGKHSSDFSSVTTVGLDIAKNVFQVCGADASGKVVFNKPVKRDKLLAFFSALPKCLVGLEACGSAHHWARELIKLGHDARMMAPIRVKPFVVRQKNDTADAAGICEAVARPSMRFVEVRSVANQAELMRHKAREMLVSQRTQLLNGLRGHLGEMGVIAPQGPRHARELAGLIEACDESIPIEVCAALAELVHQLHRLDEAIDRLDKAFAKAAQSDPTARRLMTIPGIGPITASAIAASVPDVSGFSGPRDFAAFLGLTPRQHSSGGKERLGRISKMGNRYLRKLLVVGAHAVLFHRKPHTDALRVWAKRLIETKPFKLVAVALANKLARLVFAMLKAGTSYKGIPA

SEQ ID NO: 315978 - protein, 397 aa, unidentified
MLAVGIDVSKSKSTVAIIRSDGTVLSKPHDFSHTISDITQLTALIHSYQEEAKVALESTGHYHYPILKALLEAGFTVFVINPFLVKKFMDNSIRKGKTDKKDAVRIAHFVLEKSYQLRPYSPTDQKYEDLKFLSRQYSQSVSMKVKARVQLSNLLDEIMPGIQNIIPISSRYLENTLFFDFVEKYQSYEKISQMGEKRFVNSYIAFAQKHRCRGSQKKALAIYQAASDGIITRSPDVTTSLALSQCLLMLKQASSSADLILRQMQSIAYTMPEYSIVRSMYGVGDRLAPILIAEIGDVRRFTSAKALNAYAGNDAPPYQSGQFEGTNRHISKRGSAYLRKACYEVMHSLKVHKPENDPVYQFIIKKESEGKHKTVAKMAGVNKFLRIYYARVMELYK

SEQ ID NO: 315979 - protein, 331 aa, unidentified
MKILDTIGIDISKLNFDARIHSTQSYEKIENSNKGFAKLLKWAYKNSPHPQENILFVFEHTGLYSHQLSVWLTGKEVPFLLVPGLEIKRSLGIARGKNDKVDATKIALYSYRIRDEAKPTIMPTKLVQSLKRLLSLRSRLIKQRAGFKASLKEQKRVLAKQENQVLLDTQGKLIKYLSKQIETVEKEMEAMIKSDEKLNGQFKLIVGIKGVGKQTALFIIAYSDGFTRFKTWRQFASYCGIAPFPNTSGTSIRGKTKISNLANKKIKSLFDLCAKSAIQHNTEMKAYYNRRIEEGKNKMSTINIVRNKLLSRIFAVVNRQTPYVDLMKYAA

SEQ ID NO: 315980 - protein, 337 aa, unidentified
MKITTIGLDIAKRFFHVVCCNEQGRLVKKKMLKRAQVLSFFQQHTTCLVALEACATSHFWAREIRKCGHQIKLIPPQHVKAFLVGNKNDYNDALAISVASKQHHIKSVCIKSVEQQDNQAQHKARELAVRQRTALCNQIRGLTAEYGIILNQGVNTIRKSIPLILEDENTGLSGAFKAVLKQLETQLSNLDSYIETYSTLIVETAKNNDICQRIQTIPGFGPMVSSAYFNEVGNGSNYKRGRDVSASLGIVPRQHSSGGKDTLLGISKRGNSYLRCLLIQGAKAVVSRAKTKNDKLSQWINRLVQTRGHNRACVAYANKMARMAWAISASGESYSPV

SEQ ID NO: 315981 - protein, 345 aa, unidentified
MNKLSVVGLDLAKNVFQVHGINTDGEVVVRKQLRRSEMRKYFAQLAPCLIGMEACGGAHYWSRELTRLGHTVRMMAPAFVKPYLKSNKNDRNDAEAICEAVQRPNMRFVQPKMPEQQAVLHLHHGRQLLVRQRVALSNHMRGVLSEYGIVVPQGVKVLSRQLPEILEDAENTLPMLARHLLAELKAEHDQLIERVGRFEQQLKAWHANSAVSQRLASIPGIGVLTATALAATVGEGQDFKNGRQLAAYLGLVPRQASSGGKDRLLGISKRGDSYLRSLLIHGARAVIHHIQRRLKAGRPGGNPWVEQLLQRCHINEAAVALANKMAQTAWVLLARNETYCPARPV

SEQ ID NO: 315982 - protein, 377 aa, unidentified
MLWSRRLPNDQPAIEALVDRVADMELVVWAIDMTAPESALLRGVLAARRQQTRYVPGRVVHSMTGAFAGEGKTDARDAVVIAQTARLRGDLATITVPDDVAIELDLLTGHRNDLVAERTRGINRLRGLLTRIFPALERCFDYSTLTGLTFLTRFATPSALGSVSDDEIYDHLRSHGVRRPTIPKMIDKARAAAAAQTVTLPGEATTALLVQHAATSLITLTRQIADLDKQMTEVFRRHRHARILESVPGIGTRSGAELVAIAGGDLTSFGSAAKLAAYAGLAPVPHDSGNRRGTLRRPQRYHRGLRKVFYMAALNSAQRDGPSREFYQRKRREKRSHVHALIALARRLVDVVWALIRDGRLWTPQPVALPTNSPVSA

SEQ ID NO: 315983 - protein, 312 aa, unidentified
MLNTTSQKVVYIGVDVAKATLEVHGLRSQRCLPNTAAGCSKLRAALPFNAHVILEATGGYERMLCSTLHAGGVAVTMVNPRQVRDFARAKGLLAKTDRLDASVLSLYGQCFKPQADVPPSAAQAELAELVRRRDQLVKLRVMEIGRDEHHQHRYVRLQAGRMRRMLEKEIERLEIWIAQAIAADEALKVKAKRMREVCGVAQTLAAVMLAEMPELGSLSRAQAGALAGLAPFNNDSGPFRGQRSIRGGRSLARSTLYIASVSASTYNPILRTFYQRLRARGKPAKVALTAVARKLVVLLNLLLKNPEIPVAT

SEQ ID NO: 315984 - protein, 343 aa, unidentified
MQAITTIGLDIAKSVFQVHGVDAAGQVVVRRQLKRRYVLAFFEKLSPCLVGIEACASSHHWSRELQALGHTVRLMPPAYVKPYVKRQKNDMADAEAICEAVTRANMRFVPTKTPEQQSGLMLHRARHLFIRQQTAVINAIRAHLGEFGIVAPVGRNGVEELLEVVADPSDKRVPEIVRACLAALGAQLRRLKEQILEFDRMIRAWHRSSEMSLWLDDCPGIGPVLATALAATVADPKAFRSGRNFSAWIGLVPKQHSSGGKNRLGGISKQGDRYLRGLFVAGALAVIRYAKIHGTKHRPWLRALLARRPTKVAAIALANKIARMAWAMMVKGERYKEPVALAA

SEQ ID NO: 315985 - protein, 335 aa, unidentified
MHYLYYVGLDVSKETFDASLVAFEDANEMAHRKFANSRKGICSCLHWVEKRHGIRLDDVIFCAEDMGSYISEMAVCASDRTLTFNFSLISPLVIKYSMGIARGKTDRVDARRIAEYAITHYRKIALYLPAEKELCQLRTWLILRAYLAKQRVAKLVLLEKLDYKEKFADVSIQRSMLQEEIAYAETHMKTIEREMKELIAADSNICRNYKLLTSIKGVGPITAIVMLCSTLNFTKITDHRKFACYCGLAPFEHSSGTSVRGGCHTSSMANRDIKVQLNRSALIAIRCDPQLKAYYERKVAEGKHKFSVLNAVRAKIAARCFAVVRRGTPYVALQI

SEQ ID NO: 315986 - protein, 318 aa, unidentified
MNTNTLQNINVGVDTGKSQLDIYIRPLDIHFTVPNTEKGISDAIKTIKKQKPQRVVIEATGRLEMPFILACNKAKLPYVIANPLRIKRFAGAIGQRAKNDRLDAALIAHYAERVQPELTKLKSENILLMSDLVTRRNQLLTMQTMERSRLQILPKNISSTITPILTALKNQIEKVEAKIAKLIESCPEYQAKNTILQSMPGVGKVLAASLISNVPELGFITNKQASSLIGVAPITRESGRFKGKRLIQGGRTQVRTVMYMAMMSAIQCNPVFRTAYERLLTAGKPKKVAIVACMRKMVVILNSMLRDGVMWDTDSLKN

SEQ ID NO: 315987 - protein, 488 aa, unidentified
MSATGQQEGKKDPTLNARAPKRKARGSNCHQGKGHQRRSKLTITNPDAAGIDIGAQVHYAAVPEDRAPVSVRSFGAYTAQLDELVQWFKDCGIKTVAMESTGVYWIPLYQKLEEAGFEVLLVDARQAKHVPGRKSDVQDCRWLQQLHSYGLLRAAFRPEDSICRLRTLQRHRKNLVEYAAMWVQHMQKALNEMNLHLHHVLSDISGLSGLRILDGILAGERDPAKLASLAHHRVRKSRAQIEAALTGDYRPELLFVLEQSLQNYRQIQQQITQCDLSIEKQLVKMTDGPAPRQAAEPMPSSPELGGGKSGKRKPPVALETSLAGHLKRILGVDLTTIPGLNVLAILTLISEIGTNMTKWRNEKAFVSWLGLSPNNKISGQRVLSSRTRKVVNRAATMLRLAAMIVGKTDTPLGSFYRRKRAQLGGPKAVTATARKLGCLVYRLIKNGQGYNAPDLHTYELKYKDQILNSLRKRANTFGFDLVELPKAA

SEQ ID NO: 315988 - protein, 403 aa, unidentified
MARTAQTDTTTIAHPALYVALELSKDTWKLGFTTSRTKKARIRDVRARDLPGFLAEIGAAKKRLGLPPDTPVKSCYEAGRDGFWIHRFLEAHGIMNLIIDPASIEVDRRRRRAKTDRIDAQKLAQLLARHGDGEEVLRVVHVPPPDAEDERLLPRQLSALKRKRTQTTNQIRAKLFQHGVDLDPRRGNFAKQEFLKNLDRARQWDGARLQPELLLSVRMLWDHYVLLTRQMKDLEQRQRQMLREARAGSSKSTEAQRTAARLSQLCGVGDIGGYLLATEFFGWRKFNNRGEVGALAGLTGTPFQSGDSARDQGISKAGNPRVRTLMVELAWLWLRWQPESRTTRWFHEHVGKAGSRSKRKAIVAVARKLLVEFWHFVEHDVIPEGAVLKGEHAEESALAEVAA

SEQ ID NO: 315989 - protein, 427 aa, unidentified
MKKIKIDYLSTLFVGIDIGSRTNVISALNFDQDFLIRMVPVANAQGGAEQMEELVAQVLSQHHEFRAVIIGLESTGFYGVHIANYLSTSEKLAPFSTKVYCLNPNEVKQYKKSFNSLDKNDGIDSFVIADFARVGRIHTEPWRGAQYLALQRLTRHRLHITECIAREKTYMLNNIFLKFSEFAMLKKDEHPFSDKYGATAEAVLTDYLSTEDIVDASVDELVAFISSKSRGRIADPEQTTYLLRKAAQDSYRLDQCLYEPLTVSIGCSFNCISAFEKELKAINAAIQRAVKGLNPTEYQILTSVPGIGPVYASGILAELGTIKCFKSNDALAKYCGIVWKENQSGEFEAEDTPMNKAGNRYLRYYMIEAAGSVMQHCPEYKAFYDKKFAEVRTHQHKRALALTSRKLIRMLFGLLANGKLYSVEKSR

SEQ ID NO: 315990 - protein, 341 aa, unidentified
MNVKTIGIDLAKNVFQIHGVDEHGKRLFNKQLRRAQMASFFANIPPCLIGMEACASAHFWANKLISMGHNVKLMAPQFVKPYVKTNKHDAADAEAICEAVTRPNMRFVPVKTAEQQAVLALHRSRQSFIKQRTAQANQIRGLLAEFGIVVPRGIQQLQRRLPELVEDADNPLPVLFRTQLSLLQHHMAYLFDVIDTLDKQIEQCYRQNALCQRIGKIPGIGPVTASALIATIGKANNFENGRQLAAWLGLVPRQHSSGGKQVLLGISKRGDTYLRTLLIHGARAVLQSAKHKQDAVSSWANQLMARRNNNIASVALANKNARTVWALLAKEREYCAPIISA

SEQ ID NO: 315991 - protein, 410 aa, unidentified
MEIVVERPAALDVHKEQVTACVRVPVGRDRREQHLAEFKTTVQGLLALRDWLQAHGATQVAMEASGVYWKPPWAILEDEFECVLVNARHVKQVPGRKTDVSDAAWLCQLLEAGLLKASFVPPKPIRTLRNLTRYRKAQVGERQREANRLHKILEDTGIKLDCVASDILGASGRAMLDALVSGTTDPDVLADLAKGKLRQKLPALREALQGRFDAEHGIVVGAILAHIDFLDEQVSLLSDAIEEQIRPFAPAVELLCTIPGVQRRTAEVILAEIGTDMSVFPSAGHLASWAGLCPGNDESAGKRRSGRTRKGSRWLGIALTEAAQANTRSRDTYLSAQYRRLKPRRGHRKAIGAVRHSIIVACWHMLTTGEVYRDAGGDYFTHLDPDKQTRRLVAQLERLGHTVVKSRDVV

SEQ ID NO: 315992 - protein, 367 aa, unidentified
MKNTIVHHEGTASLEVAVNKIKLSGSVIKIALDVHVRLYVAVAQYDQLLPKPARRLAPSEFVPWVRQLLRAGHVVHVVYEACGFGFNLYRELKALGVHCYVIAPRKLDEGYTRVKTDPRDATTLCQRLSRYVEGNTRELAVIRVPTEAEEQARHVSRQREQLVRHRQKLEAQGRSLLVSHSLPAPAHWWKNQTWSRLSKLLPSWICLRLEVHRPALLTLEQQISALSTELEAAAPGDVPAGVGKLTTVVMTREICSWERFRNRRAISSYTGLCPGEHSSGTKRIPGSVTKRGNLRLRAALVECAWRMVRFQPNYAPVKKRLSVLAKGARATGAQRKKAIVAVARHLAVDLWRVHTGRNTAAQLGLTI

SEQ ID NO: 315993 - protein, 347 aa, unidentified
MRFYTQQHAYYCGVDLHTKMMYLCIMSHDGEIVLHRNLKTDPKAFLAAIAPYRDGLVVGVECVFCWYWLADLCARESIVFVLGHALYMKAIHGGKAKNDKVDSHKIAGLLRGGMFPQAYVYPAEMRATRDLLRRRQYLVQRRAELLAHIQNTNSQYNLPALDKKLDRKANRVDVPQHFSDVAVRKSIEVDLALLDELDVLIKRLEAYIVREVKVHDPRSWWRLRSVPGIGEVLGLVMLYEIHDIERFAGAQNFCSYGRLVKCAKQSAGKHYGYSGNKIGNAHLKWAFSEAVCLMMRELPQAKAFVDTHAKKHGKGKAMSILTHKLGRAVYYMLKRKEAFDVKYFFAK

SEQ ID NO: 315994 - protein, 357 aa, unidentified
MIHLGLDVAKNSIAVAILRPEETEPDAEKIGHDEASIRRLVARLGDQRRLWACYEAGPTGYDLHRLLSSLGVRTDVVAPSLIPRHPGDRVKTDRRDARRLARLHRAGELTPIRVPTVAEEGVRDLCRARQVVVEERRRARQRLGSFLLRHNEVFRDGAAWTARHEAWIASRHFSDPAMKSAFSFYRCAVAVEDAALRAITADLAAYFDAPGLSDPVHRLAAYRGIDHLGALTIICEVCDFRRFAHAGAFMGFCGLVPSEYSSGETVSRGHLTLAGNVHVRTQLVESAWSYQFGPARGATLAKRQEGLDRETIERAWRAQVRLCSRFRRLGARKDSRNTVAAAIARELAGFVYAEMTA

SEQ ID NO: 315995 - protein, 360 aa, unidentified
MSKIKELDFKGTTIFCGLDVHKVSWRVNIRDTEFELKDYTQPADSNLLHKHLTRNYPGAKYKVGYEAGFCGFGIQRELSALGIECVLLNAADIPKGDKDRRQKNDKRDARSISQELSTKKDLRSLYVPSPAWEHARTLVRNRQQQISDNTRCKCRIWHFLHFSSLPIPDKAETGQYWSRKFIKKLEDMDCGGSAELKAAMELKLQDHLHKRDLVLQSTRAIRKMYRQDIYWPLMQLILSIPGIGEINGAIILFELQDILRFKTFDNLCSYVGLIPDTEDSGDTKRNKGLTHRRNTYLREALIESSWMLVKKDPAMLMKYKQYCQRMHKNKAIIKIARHLLARINYVLRKQTPYVSGLLAG

SEQ ID NO: 315996 - protein, 414 aa, unidentified
MNTLVSNIGVSGTLIALDIAKKHHDAKIRHPDGRTSYLRIENTLEGFNRLLALTASPHEDIIAAFEPTADYHRNIAWWLHKQGAQCHLVSSVRCARAREMLFRTWDKNDRKDASVIMYLLEQGLSSPFYDPLANGIIDIQEISNTYHQVTLARTRCLNSLVNHYLTLYFPEAEQFLHMSRAEWFCQFLLQFPTPSCITSLNRDVFVKQSWDIVGRKQYKQQFLEHLYDVAANSIALPLPDDSLAVATFRLQLHRYIELSAQRLQLEKQAEKYLQERSDYQHLRTIPGIGPVIALMVIAESGDLTRFAHYRQYLNFCVFNLSAIQSGQKHSGYRLSKRGNARLRYAFWLAATVAVRTRENSFRYKYERYLRENGDKPDQKRKAMTAVATKVARVAHAIVKQNIDYKGYYEISHGT

SEQ ID NO: 315997 - protein, 323 aa, unidentified
MSNKATKKRRHFVGIDVSKKLLEVAAHQSDYHFCCPNDPQKFSVLIAELISLRPARIVLEATGGLERALVQALHGAGLPVVIVNPRQVRDFAKALGHLAKTDRLDALVLAHFAAAVQPAVRPVKALQETDLDALMGRRSQLSDMLTQEKNRRGSAATKATRDDIEEHIEWLEERIKELDEKLKDQLECSAVWKQKDEILQSVKGIGFVTSLSLLADCPELGQLNRHQIAKLVGVAPLNRDSGQQRGTRHIWGGRAQVRSKLYMATLAAIRSNPVIKSFYQRLIAHNKPKKIAIVACMRKLLTIINVMVRDNKPWNVKAQPVSA

SEQ ID NO: 315998 - protein, 313 aa, unidentified
MKSAPVFVGIDVAKDQLEVALSGEGPVRSFPNDDQGIHNLVVELSGRNCDRIVLEATGGFETPVASALAARGLPIVVANPRQTRDFARATGQLAKTDHIDARGLALFAERILPEIRPLPTEEARLLDALLTRRRQLVDMLTAEKNRHGFAPLPLKKGIIKHIHWLQREIDKANKDLTDAIQASPVWRAREELYCSVPGVGPVLSCTLIAEVPELGRLNRKQIAALIGVAPFPRDSGRMHGKRMVFGGRSTVRQALYMGALVGSRRNPRLRAFYDRLIAAGKPKKVALTACMRKLLVTLNAMARTGSPWEAQHA

SEQ ID NO: 315999 - protein, 399 aa, unidentified
MDYLGIDINKRTSVIAHYFEDKFQKEFTIQNNKNGYNQLLKYLKKLNQPQLIFESTGVYSRGIVQFCQVNHVKYIEMNPLEAKFKTNSLRSWKTDHSDAHKLAQLGPTLKYTDSLNTKNEIYFELRERVRFHLEIEKNQSRLKVQIIELLHQTFPGLEKLFKNRYSMIALNIAEIYSHPSFVQQQDIDTLISNIFNSTEKGLSTRKAENYADKLSKIAHESYPSVKSSSFLVRKLQLLIRQLKDSIEQLSQLDKEMINLAQELKCYEIIQSIPGIGELTAAMLIGELGDITHFKTNKQLNAYVGIDIKRYQSGNTHYKDTINKRGNKKARQLLFWIVMNIIRGQRNYDNHVVDYYYKLRKQPNEKSHKTAVIACINRLLKTIHYLIMNQKLYDYQMSPH

SEQ ID NO: 316000 - protein, 355 aa, unidentified
MHATTVGVDLAKTRFEIAVADQQFRIQRRERLTRNQFCRFFANCPPSLIVMEACGSAHYWARTLSSSGHEVQLLPPQYVRAYVRRNKTDAADAAALIEAARCAAIRCVPVKTVDQQLVQQFHRLRTQWMTTRTARINYLRGCLREFGINFPLGAVRGLLAVREALRTGDNGFPDALRPWVLETLEEIAGLERRIKAVEDQLEDVLREDVVMWNLRRIPGIGLLSATALRVAVIDVHRFPTGRHLASWIGLTARECSSGERRRLGRISKRGDPYLRTLMIHGARAVLVSAQRTAKAGLPRDRLRQWALQTQARCGHNKATVALANKLARIVWATWYHDRRFDVNWSSSPKVTATAT

SEQ ID NO: 316001 - protein, 353 aa, unidentified
MTCTKYVGLDVHQASISIAVLDDDGKMLSQSIIKTEAATITDFFKGLTGPVHLTFEEGCQAQWLFDILHPLVARIVVCNPKHNKLLLSGNKNDCLDAHNLATLLRGNLLKNVYHPTHSSTALKERVRLYENLTEDSTRVSNRIKAMFRSRGIACAGRPPYQKAHRDQWLAKIEDCGARARLSLLYEERDFLKQLRQRAKQEMVKEAQGHRAFKALLKVPALGPVRVAQIIATVWSPQRFRSKRQFWTYCGLAVVRRTSADYEFQGGSMRKKAQVTATRGLNHNFNHRLKQVFKSAAVDAIKRGQFKAYYQHQKERGLKVELVRVQLARKIAAVVLSIFKSGEEFDESRISSPA

SEQ ID NO: 316002 - protein, 363 aa, unidentified
MSHYRVGCDAHRRYSQFAVLDQDGQLRQQTRVDHEPGAIRAFLENLPEGTPVALESVGNWYWIADEIEAAGCLPLLTHAAKAKVMMGNVNKTDKLDAKGLAKLLHLDSLPTVWLPPGEIRDERELHRTRMALSKLRTALKNRIHATLAKYGITSTEHSDIFTGKGRVWLHATLCRLPPETGRCVAQEIEALDGLQLQIAQLEERIRERIALTPSIQLLKTLPGVGNILAIVVDREIGSIDRFCTSGQFTSYAGLVPTVHASGGKTRFGHMRKPSNQYLKWAFIEAANVVVRHRHHPAWKVTYVCQIYDQVSQRKGHAVAVGAVARHLAEGAFWILKRQQPYRPPAIRQASPKQVRGRAQLVSN

SEQ ID NO: 316003 - protein, 417 aa, unidentified
MGKIMERCAGIDVGKRFLLCCVLTGAAQDEPHSKTLRFDTTVPALERLRDWLNREAVTHVVMESTGSYWIPIFNILEGQFAVVLANPEEVRNRKGHKTDRKDAEHLADLLRHDHVRSSYIPAKPIRELRDLTRRRVQLIQDGTRERNRVQKMLEQTNVKIASVLSDLFGVSGQHMLLALLEGKATPEEMAGLARGSAKQKTPQLIEAMQGHRMTDHERFLIRSCLRHLACLEEEIEDLDTEILRRMQTPPFQEAFGLLQTLPGIGQLSAATILAETGTDLASFPSAEQMASWAGLCPGNRESAGIQKGRHTTHGNPYLRTALVQCAWSASRKQGSVFELRFQQLVKRCGPKRAIVAVAHQMLIILYCMLNGKVPFRGAESAPQQRRRKNRAHHHLRCLRRLGIQVQIIAAPDTPEGP

SEQ ID NO: 316004 - protein, 349 aa, unidentified
MLADELDYVVGVDTHLDEHVLAVVAAPSGAVVARRAVRASGPGYAAALRFAREAANGARVWAIEGTGSYGAGLARYLAGRGETVLEISRTPRAERRLRGKDDSLDAARTARAALASETLAVPRSGERREALRLLLVARRSAVDVRREALGQLRGVIVTAPDQLRQELRGLPIGRLLERCSRLRRSSSASADELATRLVLRSLARRIDAATREAAELERELLGHVRALAPRLLDEPGVGPIVAAQLIVVWSHHGRLRSEAAFARLAGVAPVPASSGQTIRHRLSRGGDRQLNRALHTVILHRRLHDPATREYIARRVAEGKSKRDATRLLKRYLARHLYRVLNNTEPSMA

SEQ ID NO: 316005 - protein, 342 aa, unidentified
MREQRYIGIDLHRRRFTCCVRLGSGRNYLSTWNLEQLPQFVKKLRPSDEIAVEVTGNTRLFYEAVTPHVARVVVVDPNQFRVISHSVKKTDPNDARSLALYLAKGLLPEVRMKEKAQAEVASLTQTRDRLVKLRTALKNKVNNLFSARGIEIEKEDLSSEKGLCRVPEQTLEGLAQVELQIIVEQIRSLNQSIGRLEQVIKEAAQKLPGFSNLTSIKRIGALGASVLLSVIGDVKHFQEEGKLASYFGIVPRVQNSNETEHSGRITKRGTKLGRTTLVQCALIAKRYNSYLERYYEGIRSRRGTGRAIIALARKFLGIIYRTLKNNWVFEDFPSFVLAEVNT

SEQ ID NO: 316006 - protein, 420 aa, unidentified
MAVPADITEEPVQTFKAFTADVERMADWLGDLGVTTVAMESTGVYWIPVYEILESHGLHVVLANARDARAVPGRKTDVNDAQWIQRLHACGLLRASFHPDREIAALRSYLRLRERHLDYAAAHIQHMQKALTHMNLQLQHVVADITGATGMRIIRAIVAGERNAATLATLRDTRCKSSVETIQSALVGNYQPEHVFALAQALAMYDAYQAQLEVCDHQIAQSLQRLSRKRPSPSEPLPKPRHRARQPNALNFDVRALLYQLVGVDLTQIHGIGPYLALRLVAECGTDLSRWRTAHHFTSWLTLAPGCRISGGKVLSAHTRKTKNRVTAHLRLAAVTIGRTNTALGAFYRRLSARIGKAKAVTATARKIAILFYNAMRFGMAYQDPGADHYEQRYRERVVKGLHRRAAEFGFTLQAVEGVS

SEQ ID NO: 316007 - protein, 387 aa, unidentified
MRKMNSKVACAGMDVHYKFSNVTFRDACGKVVSHQRLYHPDRKQLAERLSHWPPGIPVVMEASFGWGWLSDLLEEAGMEVHLSNCFKVEQMRKARGWVKTNKKDADLVSLLPFEPSDWWKVWRAPPDVRDRREQMRFRGDLIESQTGAKSRVHAVFHRHGVFHEFSDLFGAKGRKFLVELCLHNPVSLPPQALLALRGQVKLLDHLRSQLADVARILHKQMLKTPLTIRLKTIPGIALILAHILAAEIGRIERFKNHKSLASYCLLAPRADDTGEETPGQSPLGRHLGVRGNHTLKWAFIEAAHGAVRSGGRWRDIFDRATNGGKTNRGRGYIKVARELVKVVYVVWAKGVDYQATPPVRPGRKTNRKHSRSETGQLLHPMVHASMA

SEQ ID NO: 316008 - protein, 279 aa, unidentified
MSNIIGIDVSKASLDCAYLRDPDQDKAKRKSCPNKVHSFAALVTWATARSGLPIQALAFIIESTHVYHEQLVHFLFNAGATVYLVNPGRVRKFAEGIGILSKNDMVDADLLVRYGLMARNLIAYQPAAPEVNDLRSLLNRLDALEHNLRSELNRQEKVGKTIVFHRLEQQSIARSVKRLRSEIKTFKRAIRACVKSSPSLLRDFNLLHTIPGVGDKTAWIMILGSRAFRSAPEVASFLGLNPIEKRSGKSQYRRPRLSKSGSGHRKWGRIHFAGTAIGR

SEQ ID NO: 316009 - protein, 398 aa, unidentified
MTESSDYESVQVFIGVDVGKDTHHAVAVNRAGKRLFDKALPNDENKLRLLISDLKQHGQILLVVDQPATIGALPIAVARSEGVLVGYLPGLAMRRIADLHAGEAKTDARDAAIIAEAARTLSHALRTLKLADEQIAELSMLCGFDDDLAAQTTQASNRIRGLLTQIHPALERVLGPRLDHPAVLDLLQRYPSPEKLASLGEKKLATQLCKLAPRLGKRLAADITLALTEQTVVVPGTNAAVVVLPRLALQLITLRKQRDEVALEVEQRVLTHPLYPVLTSMPGVGVRTAARLLTEVACRAFASAAHLAAYAGLAPVTRRSGSSIRGEHPSRRGNKTLKRALFLSAFAALRDPISRAYYTRKMSQGKRHNQALIALARRRCDVLFAMMRYGTFYTPQAS

SEQ ID NO: 316010 - protein, 367 aa, unidentified
MKKVSTVAAKPSKKISQQKLTVGLDLGDRNSWYCVLDESGQIQLEQRVRTSAKALQEVFGAMPRSRIALEIGTHSPWISRLLSELGHEVIVANARKVRLIGESRKKDDRLDAQTLARLARMDPELLSPVKHRSAQAQADLMMIRARAGLVRARTALVNTARGLAKSYGERLRGCNVRNMNPEKAQGLSPELQSALEPLLAGIEAVSERICEYNERIEQLAQQSYPQVALLRQIKGVGTLIALTFLLTLEDPHRFRKSRDVGCYLGLQPGRRNSGQSEPQLHISKEGDPYLRTLLVQGAQHILGPFGPDCDLRRWGLRLAERGGKSGKKRAIVATARKLAVLLHRLWVSGEVYEPLHNSNRTTVAAAA

SEQ ID NO: 316011 - protein, 368 aa, unidentified
MGEPTTYVGIDAHKRELQVAMLIGDTTDVISWTTLVDDRTIGRLRSQLERAASGIIECCYEAGPSGYALQRRLDGGRVRCRVIAPSLIPRKPGDRVKTNRRDARQLAQLLRADLLTTVHVPTEAEEAARDLCRARDDARRDLMRARHRLTKFLLRRGRIYHAHAWTKRHGEWLQQLTWPHAADGHVITDYRCAIEQVETRLRELDRLLEQLASEPPYAAPVAALRCFRGVDTVSAVMLLAELHDARRFPHPRALMAFTGLVPSESSTGDTHRRGAITKTGNTQLRRLLIEAAWHYRHEPRPSARLRQRRRDQSLAVTTIATRAEQRLCHRYRRLSARLKPKPLVITAVARELVGFMWAILQLPEVQRR

SEQ ID NO: 316012 - protein, 479 aa, unidentified
MIRSVGIDLSRTGNHQVCCLDEQARPCDSFSFDSTLEGLEKFEKRVFLEGATPTIVFEPTGLAWIPMAAYLRARHPDCQLVKARLQKVAALRRYLHSRAKSDRVDGVTLAKMPFIDAEQLDEAYLPPAEYHALQRLTRQRERLMKSITIRKNRIGSIINGYLPGLRKAFTDEWSDRARLFYRQLLNPFTVVRDGKDAFETLFVSAKAKGAITESHRVYQACQKLAEFYEKSRAASMINEDFFDNLQDEISCELRLMETEEAEVERVSGRIEELYRHLHPSDHLRTIPGIGVRTAQVFLAVIGNPNRFRNQSAFANWTGVVPGARQSADSEGKGLRMTKAGPAMMKRALYQAGDIARRYDPQLADLYYREMVQHGKTHLQAMGAVMSHLAARILAVLQEDRPYELRDNQDRPISKMEAIGLIQQFKVPEETRQARRRRKPNEGRLTGRRTREAAKAPQSEPLIPPPKIVYCAEELQSTAN

SEQ ID NO: 316013 - protein, 319 aa, unidentified
MDKTKYVGIDVAKDSMEVAVHESQEKLSLTNNETGIAKLKTRMKKLKPSLIVMEATGGYEVAVAAELHSLGFPVAVVNPRHIRDFARSVGILAKTDALDAKVIARYAATVKPEARTLPAEETRRLGVIMMRRRQIIAMRTAEKNRLHQADPEIKGRINVHITWLEQELDDINKELKQMIGSNPEWKEKNDIIQSVPGVGQNLAMTILSDFPELGQLNRKQAAALSGVAPFNRDSGIMRGKRSIWGGRAVVRSAVYMCIVSAIRFNPQIRTFYQRLVKAGKIRKVAMVACMRKLLCILNVMLKNHTTWNYSDHQLIGPCQ

SEQ ID NO: 316014 - protein, 339 aa, unidentified
MTAYVGIDLHRRRSLAVCIDEEGERLWWRRFENSPLTMADVIGEAGPAPEVVLEATFGWYWAADVIVDAGGRVHLAHPLGIKGFENRRVKNDLKDATLLADLLRMGRLPEAWIPPGSVRQLRELVRYRHRLNQLRSGLKSQIHGVLGKVGVIPQLKWLWGPSGSEFLSELRLGAAYQLRVESLRELIELYDQEIAGLDRRIHHRLRDDPGYGAIRQLTGVGPVFAGVFCAEVGNVTRFHRPEQLCSWAGLTPRLRESDTKTIQGSITKQGSRLVRWAALEAVTRHHGGPAIQASFRRIADRRGINRAKVAAARKLLTLVFYGLRDGEIRCLTRPEEPAA

SEQ ID NO: 316015 - protein, 387 aa, unidentified
MEVRMVNTPSADSNNEPVACYVAIELSKSGWLVGFLTPLSDKTGRYQVKAGDAQALLDLIERVHTRVARQLNRPVEVMSCYEAGYDGFWLHRVLEAHGIHNHVLDPASLQVNRRARRAKTDRIDVDRMLRALIRYLRGEPEACSVAQVPRVEEEDAKRLHRERKRLVVERVQHVNRIKGLCAAQGIYNYAPLRPDRWSQLEKLRTGDGRSLPARLKSEIVRELKRLELVLEMIETVEVERDATIKDPRSRHLNADKIKMLARLRAIGPEFATSLTGEVFYRKFANRRKLGRYVGLDGSPFRSGSVERDQGISKAGNPVARSMMVELAWTWLRYQPDSALSIWFRERVGNLKGRPRRIAIVAMARKLLVALWRYLETGVIPTGAVLKA

SEQ ID NO: 316016 - protein, 315 aa, unidentified
MTNPVFVGVDVAKEQVDVAVRPSGDRWSAVNDEVGITALVARLRPLAPALIVCEATGGFERAAIAALAAAGLPVVVANPRQVRDFARATGQLAKTDALDAGMLALFAERVRPTPRPLPDAAAQLLDAVLTRRRQLLEMLVAEKNRLGFAPKPVHRGIQAHIRWLERQLDEVTKELAGLIEASPVWRAKDDLLQSVPGVGPIVSYTLLGELPELGTLSHKQIAALVGVAPLARDSGTRRGKRLVWGGRASVRTALFMAALCGRRWNPALKQFYERLKAAGKPTKVALIACARKLLTILNAMVRDQSHWACHVQYSC

SEQ ID NO: 316017 - protein, 343 aa, unidentified
MDYFAGLDVSVKDTSVCIVDGTGKIVREVKVASEPEALLAVLRNATYCFKRIGLEAGPLSQWLYGALAEAGLPVICVETRHMRAVLKAQINKTDRNDARGMAQMMRVGLYRPVHVKTLRSQKLRMLLTHRKLVQSKAIALDNDLRGTLRNFGLKVGVVGTVKFEARVRELVENLPDVAELVEPLLIVRQVLREQLGILHRRLLAIVRDDDVCRRLMTIPGVGPVVALTYRATVDVPVRFRKSKSVGAVFGLTCAKYQSGEIDRTGAISRCGDEMVRTTLYEAAQILLVRSTKWSWLKAWAMQIARRRGMKRAIVALARRLAVIMHRIWVDGTEFRWTRKAAAA

SEQ ID NO: 316018 - protein, 352 aa, unidentified
MERYVGVDAHAQSCTLAVMSATGQHLRSLVVETNGEALVQAVQGIGGRVHVCLEEGTQSAWLYELLKPHVAEIAVSMPPEKRGAKSDERDAWTRANELRTGTIETRVYKAPAQLAALRCAVRAYDFAVTDLARAKNRLKSVFLSRGVRAESGVYDPQRRAEWLKQLAAPYQRLARWICREIDELLPLREEAEVQLAEEVKRHPIIRKLSTVPGMGPIRSAHVVAIGGTPERFRTRRQFWSYAGLGIITRTSAEWGQERGGEWVRAPKVQTRGLSRRRQPRLKAVFKGAATTVISQLPEHPLHADYQRSLRSGTRPPLARLTLARKIAAIVLSMWRHQEVYNPKRHRLAVSKP

SEQ ID NO: 316019 - protein, 364 aa, unidentified
MKEQNQRFVGIDLGKRSMAVHFIDHNEKHESWTCMTDVEGRLRLLKRLTPLDTIAMEACPLAFILEALITKQLGAKVLVLNPHGLALIYRSTKKTDREDAAKLAWVIQRLPENELPLVTVPSQKEQELRTLVAEQVNLAQSRTSEINRLHALFVQDGITTVKKKDLHSEQNRSNRYAELSDMARGRATRLERIVSSYEKNLEEVENLISSLIAEHELTPYLMSLPGVGPNLVAAFIGYIGDGQRFKQKTITAYAGLVPRVDCSGDSNKYGPITKRGCTVLRRALVQAAWGLARSTNNGVLGIKYNQLLLTKGKSKAIVAIARKLLETMWILATRKEFYFDYDPVRYNRKMVRYNIQSIGGVGVA

SEQ ID NO: 316020 - protein, 368 aa, unidentified
MKKVSTVGTEESRNFPIQQKLTIGLDLGDRNSWYCVLDEAGHIQLEQRVRTTGKALQEVFSAMPRSRIALETGTDSPWISRLLSELGHEVIVANARKVRLIGESRKKDDRLDAQTLARLARIDPQLLCPVKHRSAQAQAELMMIRARAGLVRVRTGLVNTARGLAKSYGERLRGCNVRNMNPEKAESLSPELQAALQPLLVAIESVSERIAEYNQRMEKLAEQSYPQVALLKQVKGVGTLIALTFLLTLEDPHRFSKSRDVGGYLGLHPGRRNSGQSEPQMHISKEGDPYLRTLLVQGAQHILGPFGADCDLRRWGLKLAERGGRNGKKRAIVATARKLAVLLHHLRGSGEVYEPLHNNSRTTVAATA

SEQ ID NO: 316021 - protein, 311 aa, unidentified
MSEFIGIDVSKAQLDVAVHGGNGFAVENTEAEVSRLCEQLKALAPELVVMEASGGYERLCVAALAHAGLPVALVNARQVREFARATGVLAKTDRLDARVLAHFAAVVRPAVRPLPDEQHQMLDELLARRRQMVAALVAEKNRLGLARTRLVKRTVREAAATYERLLELIDRELDDLIKASPLWREKEDLLRSFKGIGPVSARTLLAELPELGLLNRKQIAALVGVAPIARESGSWRGRRSIWGGRGQVRAVLYMATVTAMRSNAQIRVFYQRLRRAGKPGKVALVACMRKLLTILNAMVRTHTRWQQPMAA

SEQ ID NO: 316022 - protein, 369 aa, unidentified
MSAVPVGAATLLWLETDERMAMSTMTETARCVTAGVDTHRDVHVVAVLDERGAELGCEPFAADPAGYRKALAWVRSFGRVERVGVEGTGSYGAGLTRYLHNQRVEVLEVSCPDRQRRRSHGKSDPVDAVAAARAAQSGEASAQPKSRTGNVEALRALRVVRRSAAHSRIDSVNQMRALLVTGPEKLRESFRDTTIWRMVTAAARLRPGDPTTPAGAVKFALRELAKRIQALEDELDRLDAIIGPLVKATAPTLIARHGLGPETAGALLVSAGDNPQRLHKESAFAHMCGSAPIDASSGVVVHKRLNRGGDRSANEALWRIVMVRMVSDPRTRHYVERRTKEGKSKREIIRCLKRYVARELYPYLVEERS

SEQ ID NO: 316023 - protein, 336 aa, unidentified
MRYIGVDLHTTQITVCYLTEKDEILIRKYQLCEIEKFVSDLNKTDEIAVEATCNTRWFAEQVAEKVSRVVLVNPRQFEVVKNSCKKTDKNDALNLAKFLKADLLPEVRAKGEEAEKVQSLVNTRTKLVRLKTSLINKIHALFVANGQKLKKASLSSEKALEKVLLSEWSAIERIELEIIIEQLRSLKVSIKKLDKVIETESEKLKGYESLVSMSGIGSLSAGILLSVIGEVKDFATADKLASYFGIVPRVANSNETVNHGRITKRGNKTGRTTLVQCSLAAIKKSEYLKKYYEQVKARRGHGKAKIALARKYLGIIYNTLSNNWVFADFNNFELAE

SEQ ID NO: 316024 - protein, 350 aa, unidentified
MNPVIGLDVAKGESQVQAYLERKKPYKKSFKVKHDLDGLASLLDFIKEVEDISGERPPLVMESTGHYHTPVVQYFEDKGYLIIIVNPLISYKTKSSSLRKVKTDIVDANHLCELYYKEDLEPYKKRGIQLANLPHLTRQHDNITGMFVQTKLQFQAVLDQVFPEYSNVFGDLYSNVSLKILQTYPTSEDILSANNEVLTTKIKEFCNSRSLQWANQQAEKLMTAAAQNPFQQALYSSLALSLDMYINMIFEYKKHLSLLENEIDALAKSIEESKIIQSIPGIGEKIAATIISEIGEIERFNHPKKLVAFAGLDPSIFESGTFKGTYNRITKRGSSRLRQALYMAVKCANS

SEQ ID NO: 316025 - protein, 428 aa, unidentified
MEQIPQPIVNAESEPEFAALVAIDWADQKHYWSLQAAGQGLRRGTLDHTPEAVEVWIMELHMRFGGRPLAVALEQRRGALAVMLSKYAHVHLYPVHPTTLAKFREAWFPSRSKSDPSDADLLLEILTTHRSRLRRLNPDTVEMRCLQSLVENRRKLVDERTALSNRLTDLLKLYFPQILGWFNDVASVVVGDLLEQWPSLQDLQQVKPAKLEKFLRDHHCGEIPERLTQIRQAIAATHDRALLDSAPYLVTAWVRQMAVLRESIRQLEKRIAERAAQQEDWHIFQSLPGAGAALAPRLMVALGTQRDRYSSASDLQCFSGIAPVKAASGNTQWVHFRWACPKFLRQTFHEWAACSIAQCEWAKDYYQQQKARGKKHHVAVRALAFKWMRILYRCWKDRQPYREEIYLASLAKRRTTLVAALAQASQMK

SEQ ID NO: 316026 - protein, 363 aa, unidentified
MNSVYHTELSSHEGTRRQFNGGKADIKLGIDVHQDFYVVVEQVDGSNPKPPQRFQKQAFLHWATKLKQSGAEVYAVYEACGFGFTLQRQLSELGIHCYVVCPQKLDEQNRRVKTDGLDAKALCLKLDRFVEGNRHALALVRVPSEEEEQARALHREREQLVNVRKVLEAQGRSLLVNHGMEPVQGWWKKRAFATLAAPEWIKELLGNSQPVVLLLQEKIDQLTRQLQNAANAEPPRGLGKMTSVIIDREIGDWDRFNNRRQIASYTGLCPGEYSSGNTRLQSCVTKHGNPRLRAALVELAWRLVRFQPNYKPVRKWRQILAKGALATGAARKKAIVAVARQLAVDLWRIKTGRLRAEELGLIN

SEQ ID NO: 316027 - protein, 395 aa, unidentified
MHKSTVTARRPGGEVVLLPFDVEHTAEGLKKLVAKLRQLDGEIRIVMEHTGMYWRPIAMTLKEAGFYVSVVNAILIHNFSDNSIRKVKTDRADAMKIANYGLTFWSDLQEYAGEDENRQLLKIQSRLYERTATTAGMLRNGLISLLDQTFPGANKLFRDESRNSRGHVKWIDFVLRFWHKECVAALSLATFTDTFQKWCKRTGYKFSASDAERIHAIARNAVATLPKNDSTKLLITQATNSLNAIYDSLQAIRTEMDRLASMLPEYELVMGMEGIGKVTGPQLMAEVGDVRRFSHKGALVAYAGVDASPYQSGSFDSKSRHVSKRGSPHLRRVLFVIMSMTLIRANTANPVFCFMDKKRAEGKHFYVYTVAGSAKFLRIYYAKVKEYLNALEDTA

SEQ ID NO: 316028 - protein, 408 aa, unidentified
MNAVGIDISKGKCMVAAMRPFGEVTLTPYEVTHSYANLEKLGYDIIGLGESTRVIMEATGRYHEPVAAVLHELGIYVCVLNPIVIKQSGAGSVRKVKSDKKDALKIAKYGIDNWTTLRQYTPTDAARQQLKLFSRQYNLYMKTSVALQNNLISLLDKTFPGANTLFDSPTRADGHQKWVDFITCFWHCDCICRVSQNAFTERYQKWCKRKGYNFSESKAEDVYISSAGHFPTLPKNANTKLLITSAAAELSAVREGLMTIKAEVIRLAKQLPEYDIVVGMYGVGEITGSQLMAELGDVRRFNNRKSIVAFAGIDPEVNQSGSYQRESNPASKRGSPHLRKTLFQVVDTHLKRSPEDEPVYQFLDKKRAEGKPYYIYMIAAANKFLRIYYARVKEYLNNHFSEQESSEL

SEQ ID NO: 316029 - protein, 273 aa, unidentified
MIVQGTSVGLDVHALSVVAHAVDEGTGKLVRARLCPDYGEVLGWLGQLRAPVRVAYEAGPTGFGLARAINQAGMECVVAAPSKLQRPAGDRIKTDARDAAHLARLLRLGEVTAVRVPERDIEAVRDLVRAREDARADLMRVRHRLSKLLLRQGVVYCGGTPWTCSHEDWLRRQRFADIHLKAAFDHGFDAVLAATAARDRLDEQIMEAAASPRFADPVNRLGCLRGISALTGLALTVEIGDWSRFTGSAIGAYVGLVPSEHSSGTSRVQGSIT

SEQ ID NO: 316030 - protein, 424 aa, unidentified
MKKVLYVGLDVHKESIVVATAPQGDTEAQLYGKIGGTLDALDKLIKKMARPDLELRFVYEAGPCGYVIYRHLKKQGYHCQVIAPSLIPTKASDRVKTDRRDARQLARLFRAGELTAIYVPDEEDEAVRDLVRARDRAMVDQRKARQRLKGFLLRLGHRYLGRGNWSAEHLRYLAQIKLSHAAQQIAFQEYLEAITVATERLERLTKAMEAALPAWKREPVVRAMMSLRGVALINGMTLIAEAGDLTRFDSPTSLMSYFGLTPSEYSSGEKRVQGGITKAGNGACRRALVEAAHHYRIAPRVSPAMQKRQEDQSKEVRAIALKAQQRLHSRYRLLTARQKKPVIVIAALARELCGFVWAIACQLSVPEKLKPREKGTSKETKAAVQTTPAPVKSSGLTETTKKTYQLNVEKTFKKQAVKTRAIPG

SEQ ID NO: 316031 - protein, 425 aa, unidentified
MKNNILKTLFVGIDVSSKINVLCALDFQGNKLLNLEALNNQPGAESILNSIIKCLDSNSLKYVVIALESTSFYSTHIANLLSSNELLLAYQPLVYCLNPKTVANYRKSFVDMDKTDPLDAYIIADFARCGRISSKPWRGAQFLALQRLTRHRLHLIENITREKAYMVSNIYLKFSELAVLDKEDRPFSNTYGVTASAVLTEYLSLDDITYSSVEDLVEFIRRKGKNRFSDPENTAKILKKAARDSYRLDKILYEPLNVAIASSFNLVKALESEIKTVDKAIEKTIKGINPNEYQSLISIPGIGPVLASGILSEIGTITSFDSNDALAKYAGLTWRVTQSGNYSSDTTRMTKTGNKYLRYYLIEAANSVKNHIPEYKEYYYKKYGEVTTHQHKRALALTSRKFVRLVFGLLTKNQIYSSYKVGEIH

SEQ ID NO: 316032 - protein, 412 aa, unidentified
MEVIHRCCAGLDVHKETVVACVRQTRPDGQTDESVRTFATTTAGLLELGDWLVERQVTIAAMESTGVYWKPVWNLLESRLELILVNAREVKQLPGRKTDVKDSQWIAQLLSCGLLRRSFVPPLPQRELRDLTRTRTSLLQDKSRVANRLQKILEDANIKLGSVASDVLGVSGRDMIRALIDGKMSPTEMAELSRKRLRLKIPQLKAALTGKVSEHHRFMLRLLLEEIEHYEQQIAKLDQRIQEVMSPLEKTALKLLDEIPGIDPRAAQNILAEIGSDMSRFPSAGHLATWAGLAPGNDQSAGKRRSGRMSDGNRWLKGTLNQCAWAASRKKDSYFAAQHRRIAYRRGMKRATMAVAHSQLCICWELLKHGQVYKDLGRDYFERTDDERVKRQSVKRLERLGYTVTLEKKNAA

SEQ ID NO: 316033 - protein, 452 aa, unidentified
MEKQQKKIVQVNALEQINLNAAGIDIGGEEVYVAVPPDRDEESVRSFPTFTADLHLLVDWLKACRIDTVAMESTGVYWIPLFEILETSGFNVYLVNARHLKNVSGRKTDVLDCQWIQQLHTYGLLTPSFRPPEQIVAIRSLVRHREMLVQYRSAHIQHMQKALTLMNVRLTNVLSDITGVTGLMIIRAILAGEHNPKQLAQLRDGRCKRSEAEIAKSLEGHYKREHLFALKQALELYDFYDLQLKACDAELEAMYQEFDPPENPGTPPPASRTQKRRKNQAHFDLAPALYRLTGVDLTQIDGVDELTVQNVLSEIGTDMSKWPTVKHFTSWLHLCPNNKITGGKVIQTGVQPTKNRASAALRVAAASLKSSDSALGAFFRRLRARLGTPVAITATAHKLARIIYFMLKERKPYHDFGADFYDLQYRTRVLRNLNRRAAKLGFRLEPVDPAVS

SEQ ID NO: 316034 - protein, 384 aa, unidentified
MNNHTIIFIGLDTHKDFCEVAYCLDSRESIPESRGRITTSKQAITKLARQFQSKYPEATLHFVYEAGPCGYWIYRLLTKLGHCCYIVAPSLIPKKPGDKVKTDKRDALMLTRLLKNADISPIYVPEPEDEAVRDLSRIRETAMQDLKKAKARMKLFLLRNNINYAGSSRWGPKHRRWLTELILPHPAQQIVLQECITTLNERFSRLDRLDNELKHQVFNWRYFPVVQALQSMRGVKLIVAAGVIAELGDLSRFDRPRKLMSYLGLVPSEHSSGGKRRLGAITKCGNSRARRLLVEGAHAYRYPAKMSTEIQKRQEGLPPKISEIAWNAQLRLCKRYQRLMHRGKHRSVVVTAIAREMSAYIWEISKHVTLPPVNPKDRLVRVPR

SEQ ID NO: 316035 - protein, 327 aa, unidentified
MEQAILGIDISKSSFDVSLLYNGSCKWNVFENNLEGYHKLDNWLKKYSLEPIHCCMEATGQYANCVAEYLFGSGHSVSVVNPARIKFYGNSKLKRNKSDKADAELIAEYCLREKPSLWSPPPASFKDLQALIRQLDALMESKQRDKNRLKSGVRTLSVISSLEACVEFFTQQINQIKSEIQDLINNDPELLRRQKLLITITGIGKLTAAKLLGEIRDISAFRSARQLAAYAGLTPKNFLSGSSVHKKTVISKTGNAHLRKLLFLSAMSAKRWNPIVKEFCDRLIQNGLSPMEAVCAAMRKLLHLVYGVLKSGKPFDPDYLKNTQIAS

SEQ ID NO: 316036 - protein, 428 aa, unidentified
MKYTQNEKILQVTEKTLVVGVDIAKEIHVGRAFDFRGVELGKRIEFENRKEGMGKFLDWANKIMKAHGKENVIVGIEPTGHYWLCFEQYLRENGIKVVLVNPFHVKRSKELDDNTPTKSDIKDPKTIAMLVKDGRYTEPNIPAGIYAEMRVAMNIYERLQKRLSVLKNQIINWLDIYFPEFLEVFSDWEGKVALLTLKEMPLPCDVVEKGVEGIIECWRDKVDKRAISRKRAMELVEAAKRSIGKKEGRKLARQEMRYLLEEYELLRKQLEGIEDEMAKLLKDVPNGEKLLEIKGVGVKTAVGFISEVGDIMRYEDAKQIQKLAGLNIVENSSGKHKGQTCISKRGRGRLRSSLFKAMITIVAKNEEFKKLHMYYTMRQNNPLKKKQSLIALCCKLIRIFYAILKKGIKYDGNKMLSDIKREALATTA

SEQ ID NO: 316037 - protein, 348 aa, unidentified
MRFYTKQHKYSCGIDLHARSMYVCILDEEGKTVLHKNRKATPEALLRAIAPYREDIVVAAECMFVWYWLADLCAKEKIPFVLGHALYMKAIHGGKSKNDRIDSHKIAALLRGGTLPKAYVYPRKMRSTRDLLRRRNYLVRKRSELLTHLQNTNSQYNLPEFEKKIALKANRDGVAEHFSDPSVRKSIEVDLELLDFYDRLLSDLERYIEKSAKGHDVHSWYLLRSIPGVGRILGLILLYEIHDIRRFPRVQDFVSYCRLVKCPRESGGKKFGAKNTKVGNHHLKWAFSEAACFFIRVNEQAQHYHSRLVSKHGKGKALSIFAHKIGRAVYFMLKRKEPFSMEKFFAHA

SEQ ID NO: 316038 - protein, 426 aa, unidentified
MSEVEWVKPEPQYAAFIAIDWADKKHVWCLQGMGSEKRESGELEHTPEAVEAWVVQQCQRFGTGPIAVAVEQSRGALVFMLSKYEAMHLFPVPPTMAAKMRAALYPSGVKDDPRDADLLLDVLLKHREKLRRLLPDTEATRRVQNLVEERRKLVDERTEQSNRLTSHLKIYFPQILNWFEHLDTELVCALLLRWPTLEELQRVPPAQLRTFLRKHHCRNQELNERRIQEIRQAIPAIRDRALIEAKSTVVKVTVRMMRSLLEGIAALDEKIEEAAAAHPDFFIFDSLPGAGAVMAPRLLAAFGSQRERYGSAGEVQTYSGIAPVIERSGKKKWVHFRRACPKFLRQSFHEWAGHSIAQSVWARSYYQQLRSRGKGHHAAVRALAFKWIRILFRCWKDRVAYDEVKYLVVLGRRGSPLAAVDVAISG

SEQ ID NO: 316039 - protein, 340 aa, unidentified
MNEITTIGLDLAKHVFQVHGVDASGVTVVRKRLRRSEMLAFFARLPSCLIGLEACATAHYWARKLQAIGHEVRLMPAQYVKAYVKRNKNDAADAEAICEAVQRPTMRFVPVKTAEQQAALLVHRGRERLVRQRTALVNALRAHLAEFGVIAPLGLRNVARLIAIVRDESDARLPDLAREVLRVLAEQVEQLQAAVAAMEKQLMAWHKSNPVSQRLATIPGIGPIIATAIAATVVEASGFRSGREFAAWLGLVPRQHSTGGKARLGGISKRGNRYLRRLLINGASANLLRSKATNADPWVIGLRRRRPSLIVAVALANKTARIAWAVMHRQENYQRMAVAA

SEQ ID NO: 316040 - protein, 362 aa, unidentified
MAHAIRWVGLDVHAHESTFAIFDQDSGEVITRRVAGRPHVLLAWLRGVEAPMRAVYEAGPTGYGLARRAADEGLDVRVCAPGHSERRPGDRVKTDKRDAIRLARLLAAGELTLVTVPSIEHEQLRDLVRCREDIRTDLMRARHRLGKLLLRREIYYTGRCRPWTHEHRRWLTHLRFADRASQLTFEDYLHAHDVLLARRDRIEHELAEIADESPWASTIARLRCLRGIDTLSAIGLCAEVGDFARFAHPDALSAYLGLVPSEHTSADKRRQGAITKAGSSHARRLLIEAAYHYRHHPAIGMTLERRHRGQPAPVIDAAWHAQRRLHARWRLLKTARGKQNGIVAVAVARELAAYCWQIALTH

SEQ ID NO: 316041 - protein, 334 aa, unidentified
MALELLAIDLGKRSFHLYGIDTDGMILSRKVSRAKLAEVVNNLAPIAIAMEACASAHYWARCWLAVGCEVRLINPRFVKPFVKGSKNDAVDAEAIFEAATRPTMRFVPVKSTDQQDMQSLHRARDRLICQRTALINHTRGLLAEYGIVLPQGPSHFTARAPAAIAGADLSDLARTIFGELLDQLDDLDRRVKKLDARIAGLCRTNETCRRLTKLPGVGPVVATAIVAAVNDGRQFRSGREMAAWIGLVPRQYTTGGKPRLGGIGRRANHYLRRQLIHGARAIVSRSAKHGDRQSTWLKALAARRGFNRTIVALANKTARIAWTLLSRKEEYVAP

SEQ ID NO: 316042 - protein, 313 aa, unidentified
MKEEKTFIGIDVSKEKLDVGVRPQVAFMTFANTEDGISLLTDFVKSKQPELIVLEATGGLEMAALRSLVVAKLPAVCVNPRQVRDFAKAMGVLAKTDKIDAHVIARFADSVRPEIRPLKTEETEMLDAFNTRRSQLIIMLTAEKNRLTTASKWTKKDIEKSIKGLEKALAKINREVENLIKKSPHWRHMDKILQSVPSVGPVMSLTILADLPEIGTMNRRQIAALVGVAPLNRDSGKYKGRRAIWGGRARIRSVLYMCVISGICHNPKIKAFYNKLISSGKKHKVAITACMRKLMIILNTMIKNGTCWNESGC

SEQ ID NO: 316043 - protein, 342 aa, unidentified
MSTIQTIGVDLAKNVFSIHGVDAYGKCVLRKTVKRNKLLDTFAKLPPCLIGMEACSGAHHWARELLKLGHNPKIMASKFVIPYRQNEKNDANDAEAICEAVSRPRTRFVSIKSEEQQAVLCLHRIRQGLIKTRTATINQLRGLLSEFGIVMPQGRYSAQNTIGSVLEDAENGLPILARELLQDLSNKIQHLNLEVLHYDRRVSALVREMASAKALMDIPGVGEHSASAIVATVNDAKQFGSSRQFAAWIGLVPRQYSTGGHVHLGRISKRGEKHIRTLLIHGARAVIARCKEKTDRNSIWLNQLVERRGYKRAAVALAAKNARIIWALLTTGKEYKINYVNG

SEQ ID NO: 316044 - protein, 423 aa, unidentified
MVCVGIDVAKDKHDCCILDSDGTIRADCITIPNNMDGFKQLLQTIRDCTKKSDKIKVGLEATGHYSYNILGFLLDNGLPTYVINPLHTNLYRKSLSLRKTKTDRVDARTIATMLLSDVDLKSYTDTAYHNEELKSLTRYRFDKVRERAKLKQSVSRLVTILFPELEKLVPSLHIASVYALLSEYPGAKQISEIHLTKLTNLLATASKGRYGKDKAIQIRDAARTSIGSVMPAKFLELKHTIKLIRELTSEIDEIEVSIQKIMDELNPPILSIPGVGIQSAAMILAEIGDFSNFESPDKILAYAGCSPSTYQSGKLTNCYAHMEKRGSRYLRYALYNATKYVCHWNPVFAEYLAKKRAEGKHYNVALSHATKKLVRLIYALQKSGKAFVYVDRTDDDVKECKRYRKDSFYWYKNVIATNGKNLE

SEQ ID NO: 316045 - protein, 360 aa, unidentified
MNQHTVGRKIAGIDLGDRDSWVCIIDGASGEVLERATIPTSGEAFGAYFARCEPMLVALETGTHSPWASRAVSDAGHEVIVANARQLPLIYGAKHKSDARDPEKLARVARLDVRLLAPVEHRPREQQRDLSVIRSRHALVRSRTLLINAARGMVKAFGSRLPKCDADAFHKVAWEFVPSELGLSLHPIFESVTTLTRQIRELEDEIERLATDAYPQTQLLTQVAGVGNLSALAFVLTLGDPQRFSDSRMVGAYLGLAPGRRQSGDRDQPMSITKAGDQFMRVLLMQCANFILRRDAPDSDLKRHGQKLGKSGSKIAKRIAKVAVARKLAVLLHALLTSGEVYEPLRNASARRRRQPLVSA

SEQ ID NO: 316046 - protein, 366 aa, unidentified
MEKIYIGVDFHARQQTTCYLKTETGELVISALQHQDKEQVRAFYQQFPSPVIVGLEASGYSPWFEALLEQLGGEVWLGHATEIRRRARWRQKNDRRDAELIWDLMVHDEFPRLHRPAATSREVLRMLRYRQKLIKLRTMAKNSLQAIALQAGLAKGKQLFSRAGEEEFKSAAMSPVLQWQREHWFQLLQPLNAQLLETMVWFKAHSKDDLGIQRLRTHPGIGLLTSLCLLHTLQPVSRFRNTRKVTAYAGFDPVERSSAERQHFLGISKAGSRLLRYLLVEAVQTAVRYDEDLKRFYKRLAERRGRPKAKVAAARKLLIRAYIMLRDEIDYAEFRRRAVAARLARTGQGPINVPEVLIGQPASPDA

SEQ ID NO: 316047 - protein, 385 aa, unidentified
MQASTQTSTICTPTREQSATFFVAIELSLKGWLVCIHSPDRDRLSHYDIGAGDCDKLLALIEQARARVTRALGVKPEVVSCYEAGYDGFWLHRVLVAAGVKNHVFDPASIAVERRGRRVKTDRIDNESMIRTLMAYLRGEPRVVRVVRVPSPAQEDARRLMRERERLVKERTAHVNRIKGLLRTQGLAAGQPKRADWLTWLEAQCDHRGRSLGHCLVAELKRQHERLRMICQQVKALEDERASALPEALAAKAAALIRLRGIGPNFAGNLTGEVYWKDFSNRRQVASYVGLAPSPWQSGGLSRDQGISKAGNRRARCTAIQLAWLWLRHQPDSELSQWYRARVGDARGRLRKIMIVALARKLVVALWRYLETGLVPTGAVFKKGK

SEQ ID NO: 316048 - protein, 341 aa, unidentified
MLYSGIDLHKRSLVIHTLDADGTTTREAQLKSDRGAVLAYFGTLAGPHRAVVECVQSWYWLRDLLGPTGVDLRLAHAKYVKAISYAKVKTDRVDARMLAQLLRTGLVPEAHMIGAEHRETRDLLRSRLQLVTRAVRCRHAVGSLLEKYNVPTPEELPELARMQAALQEEQRTLIRTHVRRVEAVLKTRLLPTPDVQRLVWIPGIGKLSAYALVLEIDTISRFPTVRHFHSYCRLVPGADNSAGKVRHKRSRDGNRYLKQVFHTAAIRAAQYHPEIRQEYRRLSRRKGKIVARALIAKELASIVYWVLRKQEAFNGKFRGHVLTAKPAVWPRLASPESLTDA

SEQ ID NO: 316049 - protein, 335 aa, unidentified
MEFKFFIGIDVSKDTLDIGLLNAENSETVNHQQVSNNDSGIATMLRWLEEHKISIENSLFCLEHTGMYNYPLLQFFSKQGASVWVENPIQIKKSLGLQRGKNDKVDAIRIAQYAFRLRDQAKLWHPAREVIDRLKHLTALRERLVETRKRLLTPVEELFKIGSDAMAKVLERAMRKTMKALEKDLEAIEAQMKDIIDKDDNLKSLYKLVTSVVGIGFVTAVNLIVCTNEFKLFSSHRQFACYSGIAPFEYRSGSSIRGRTKVSHMANKKMKRYLHMASLTGIKLDEGLKNYYNRKVQEGKNKMSVLNAIRNKLVARVFAVVNRGLVYQKKYLVLS

SEQ ID NO: 316050 - protein, 387 aa, unidentified
MRRSKSRIVGLDVHPDSFAGAILQGMDPWKARVVSTSTRVALPLLEKWVLRHTREEDILVMEASGNAFCVAERLRALKHKVVILESHRAGKVGKTYCATDRVDAIKIARIYLSALSPVVWQPDTKTRERREVFSAYQAVVKEGMRLKQQIKSMLNEHCVRLEKGFRLSHPSALGRLLRRRKWTEAQKMLLSQLHAGLVGARVRRQRLRHYMAQEILAEKELLRLTRLCGINLITLYGLIAAIGEIQRFATARKLSAYFGLNPSVEQSGNYEGSGALKRHGRGAIRALLVQSAKKLLQVDNPLQKWGLAIAMRRGRNKAAVAVARKLCVAVWHVMQGHVIGAIERMDTLHTKLHKLATDLGLSAIKQLGYDTKEAFVQKKLFLLRSYA

SEQ ID NO: 316051 - protein, 400 aa, unidentified
MRAVFGIDVSKTSSEVAILVNGEKVHGYTILNDAIGFNRLLGDLKTVHNPEIIFEATGVYSRRLQAFLEECGYAYTRLNPLEAKKQLDSLRVRKTDKIDAEKLAKSQLVHNRKPTYVQEEVYQHLHDLSRFYQNMTEDLVRAKNRLHKVLQVTFPELENLLSTPTGEQYWNLVMAFPCKEFVLSLSQSDLYEIIRQSTSKRISEKRIAYLTDKLIELAKQSFCAVKKTSPMLEEVRYYAQELLRLSERRQVVLNDMVALAQPLPEYDILRSIPGIAETTATSIIGELGDIRRFQSTNQINAFIGIDLRHYESGNFLAKEHITKRGNPYARKILFKCIHNIASASHTNPCHIADFYEKRKRQSTIASTKPHTIASIHRLIRTMYYLITHNELYDYSLTQNR

SEQ ID NO: 316052 - protein, 419 aa, unidentified
MSNSTLSKKLASVKPGTLYVGVDLALDHNVAVVLSERAERLARFRFPNDRGGYDYFYRRLEAVQGRQQASAVLVGMEPTNYFWKLLAADLELHQVGYRLVNPYTVKKHREGDQLDRSKDDYRDAFTIGDLLRTGKFTETRLLHGQYAELRQYSTLYERLRRDTGRQKTLIRNMAGQLFPELTREFKDFTGATTLAMLNNHAAATMIQSMSEDAFIAGVRADFQGKRLQVSRLRRAHALVANSVGLKDGVQALQLALRMHIEALETLQRQLDEASIAFVDTFLALPEAPYLLSVHGLGVITAATILSEIGDPKHYSNGRQLIKLAGTQPVLNTSGRKTRSRTPMSHKGRPRLRTALFFAVMRLVQVDDAFAREYLQLQTREENPLIKMQALGVLMNKLLRILWALMRNRTFYNPDFQRAA

SEQ ID NO: 316053 - protein, 463 aa, unidentified
MAARKPKRMGAQTVEDEDYQLRYERVAGIDVAKGSAMVCLRLPPGPGKARRTSRTWEVTARVPDIEALAAELKAAGVERVSMESTSDYWRIWLVVLEGAGLDVQLVNSSQARNLPGRPKTDKADAQWIARLTEMGLLRGSFVPPPEIRALRQYTRQLVHLSQDRTRYWQRLEKLLESALCKLTSVVSGLAGSVSCLAMLEAMIAGERDPQVLAGYARGPMKSKHAALVKAFTGMQFGPEHAFSARSDLRMIKMLDAEITGLEQQVRDHLAAIPAAWGTDADGVTGPGAGTGPDAAVLPAVDRLAEIPGVGPATAAGLIAEIGLDMSRFPTPHALVSWVGMAPVPNQSGPRKGRGKKGHGSSYARRYAGQAGNGAARTDTFLGQRHRRIRSRPGGGGWKKANVAVGRSILIIVWHLLKDPAARFTDLGPDHYARHTDTNRKARNHKRQLEALGYDVILTPREAA

SEQ ID NO: 316054 - protein, 344 aa, unidentified
MDHFAGLDVSVKETSVCIVDDTGKIVREVKVASEPEALLSVLANPAYHFKRIGLEAGPLSQWLFSALAEAGLPVVCVETRHMQAVLKAQINKTDRNDARGIAQMMRVGLYRPVHVKTLRSQKLRMLLTHRKLLQSKAIAIENDLRGTLRNFGLKVGIVGKVKFEARIKELVENLPDLAALVEPLLIVRRVLREQIIILHRRLLAIVRDDEVCRRLMTTPGVGPVVALTYRATVDVPARFRRSKAVGAVFGLTCSKYQSGEIDRNGRISRCGDEMMRVMLYEAAQSMLRSKKWSWLKAWAMQIARRRGMKKAIVALARRLAVIMHRMWVDGTEFRWTREQAAAAA

SEQ ID NO: 316055 - protein, 354 aa, unidentified
MTQSSEQNIRTLTSIGIDIGKDVFHIVGFDGDGKVVLRRKIKRLSLVAEFEKLPPCIVGMEACLSAHFVSRTVRRLGHEPRIIPAIYVKPYLKGQKNDYNDAEAIAEAALRPNLRCVTEKTQDQLDLQACHRVRSRLVSRRTATINQIRAFLIEQGIAVRTGAHALRKSLFAILENRADEISPRMHDLIVGLHEDWASLDDRIEIITGEIEAIGRSEANCRRLMSVPGIGPIISTAVVAAIGTGEAFERGRDFGAWLGLVPRQYSTGGRSVLGRISKRGNKYLRTLFIQAANVILMRPHNWEKFSFGSWLTEAATRLHRNKLATALANKLARIAWSILRHEQTFDNNLPEAVAI

SEQ ID NO: 316056 - protein, 346 aa, unidentified
MVYVGIDLHRNRSQIAVLDQDGSQLLSRRIVNDPRLFLETLAAFDQPRVALEATYGWEWLADLLEEAGCELHLAHPLRTKAIASARVKTDAVDARTLAHLLRTDLLPEAYIAPRELRDLRDLLRHRIALTRIRSALKQRVGAILAKHGIARPYSNLFGPGGGRFLAELELREGPRRRMDSLLSLIADFDREIAATTAEIESRAKEDPYVDVLCQIRGVGRYIAMLIIAEVGDISRFPSARHLCAWAGLTPTVRSSDGKARLGHISGQGSPALRWALVEAAQHAPTGGGPLRAAYERIAKRRGRQVAKVAVARKILTLCFYGLRDGEIRCLAPRAKPRTNRTTAVTQ

SEQ ID NO: 316057 - protein, 350 aa, unidentified
MAGADVHEKSIMLKIAAGRGRARKRSFINDPAGRRAMIAHLKESAGSAGAGRISLVYEASSLGFRLYDELTEAGIHCDVVAPTKIVRSMKDRRRKSDERDAELLLELLRGHVLAGNALPAVWVPDAATRDDREIVRARLDVAEKLTGVKAQARTLLKRQPLEKPSGLGQGWTAAYRAWLRGLVRGPGPLPYGARRALESLLRQVKLLEEEIERLDDEVAALSEQAAYAKPARELMGVKGVGLHTAMVYLTEMGALERFGNRKQIGAYLGLVPSAHESGQSGERKGHITHHGPWRVRRVLCQAVWARIRSHRPTQADYERLVARNPKHKKIAVVAMMRRLAVQLWHVGLAA

SEQ ID NO: 316058 - protein, 429 aa, unidentified
MNSTQNKKIEQVKETTMIVGIDVGSEKHYFRAFNWRGIELTRKPVAFSNSMEGFNSFYNTIVELMQKSELEEALVGIEPTGHYWFDLGQFMGEKSIKFVMVNPHHVHKTKELDDNSPSKNDRKDPRVIAGLVRDGRYFYSYMPTGVYAELRNASNRRFVLVEEQTRAKNRLQKWIAVYFPEYKGIYTHIDAKGGLLVLKQAPTPEEIVKLGEEGIIKIWKDAKLRRNGNKKALKILNAAMRSIGLRTGLTEARMEIQDLIEDYELQTKRLERVNDLIKELCQQVRYADKLLEIKGIGITTVAGFIAEVGDITRFDSTKELQKLAGLELVSDSSGKHNGKTKISKRGRKRLRYLLFEAAISVVGKNEEFKEIHRYYTTREKNPLKKMQSLIAVACKLIRVFHVILTKGISYDASKMLKDIRHQGEQLKAA

SEQ ID NO: 316059 - protein, 423 aa, unidentified
MNHFTDSQYTAYIGIDWADTKHDICLQAANSDQLEFDCIPHQVSDIEQWALSLRQRFGGPIAIALELAHGPIVYALQKYDFLVLFPINPSTLAKYREAFTPSRAKDDPTDAELALDLLLRHPDRFQPLEPQSVELRALATLVEQRRGLVNDRVRITNRLRNTLKQYYPQVLEWFDRINTPLFCDFISRWPTLEQVKRARKSTLERFFRQHSMRFPQVLETRYQAIKAATPLTRDAAVVTPHRLYTLVLAEQLRVTLQAIRRYDEEIAQLAPQHPDYELFSALPGAGPSLAPRLLVAFGEQRQRFTCAADMQKYSGVAPVTERSGRKHWVHWRWQCPTFLRQTFVEWAAQTVNKSFWAGAYYRQQKAKGASHQAAVRALAFKWIRILYRCWQARTPYDELIYLEALRRRGSPLLDQLGAVAETA

SEQ ID NO: 316060 - protein, 421 aa, unidentified
MAEENAMKVHRNCCGLDVHKQTIAACLIREDGMGNTCKEKRLFGTMTRDLRELAQWLRGAEVSAVAMEATGVYWVPVWNVLEREGLHLLLINPEHYKAVRGKKTDLKDGERIAELLQDGRLEGSFVPSTPLRILRDLTRYRVKLVEHQSAVACRIQKLLEQCNIKLASLASNVLGVSGTAMLQALARGETNPERLAELAKKQLRKKIPALRLALDGHLLPHHRFLLRDMLDELAHIEGQLARLEAEIERNMPPFQKTLQAWMSIPGIKQRVAWTLVAEIGPDMQVFPSPAHIASWVGVCPGNNESAGKRKSGKTRKGNCWARRALCEAAWVAAKAKKTYLAAQFRRLAATRGSKRAIIAVAHTILTIGYHILQRGTLYQELGANYFDQRHVLRTTKRLVKRLQALGHRVILESPLPNTRIA

SEQ ID NO: 316061 - protein, 331 aa, unidentified
MLNEAGVKLAVTQAPPDVDGLRHLAKEVAALGGPVNAAIESMNGARFVHDSLELMGWDVEIADAQKVKGLAPLACKTDKIDAWVLAELSRRDLVPAIWLPDPEIRAERERARFRLHLVRHRVMLKNRIHSSLLAFGKPCPVSDLFGKSGRERLCRLELPDPWTKNIATALSMIDDLDSEIDACEKELRSLGADHPYVSLLQSAPGIAWVLGFTIASEIGDISRFSSPKKLMGYTGLCPRVYQSGGKDFRGPISKNGPKYLRWSLIEAAVHASSHPVYKDHYDRTKARLGRQRGAKIARIEVARKLTEAIWHMLQTGSMFAPARSPAAPLVP

SEQ ID NO: 316062 - protein, 409 aa, unidentified
MIFVGDDWAEDHHDVAIVDESRKALVAHRRLAEGVAGVGALHELIAGFSDDPGEVVVGIETDRGLWVMSLVAAGYSVYAVNPLSVARYRERHVVSGAKSDPGDAATLADLVRTDRHHHRPIAGDSEEAVALKVVARAHQRLIWDRQRQVNRLRSTLREYFPGALDALGTDLAHPDAVGLLARAPTPSAAAKLSISAIGAALRKGGRQRNVAGRAGELQTVLRAPRLDPPAAVADAYGAQVRAAVGVIAEMTRQIAALETELARDFESHPDAEIVRSLPGLGVILGARVLGEFGDDAERYADGNPRRNYAGTSPVTRASGKKRAVLARYVRNRHLADACHQWAFCATNASPGARALYDEHRAKDESHDQALRVVANRLVGILDGCLRSRSLYDENTAWGHRAAKTEPAAA

SEQ ID NO: 316063 - protein, 553 aa, unidentified
MAMKVLVKAAATSSIPFGRLHSFLLQRPDRGGGINSRQEQPQHRLMKTKPTRAKPPGPTSTAAKRKLRLEKVTKAGKGRVVDVTALDHMKQINFHAAGIDLGAAENFVCVPATSSALGESPVRAFGVFTEEMDALVEWLRVCQVTSVAMEATGIYWMVLYDKLEAAGMEVVLVEPGSVKSVDGRKSDVLDCQWLQKLHTYGLLSRSFRPDAPVRRLRTLTRHRAILVECGTDHLRRIEKALVQMNLQLNLVVSDINGETGLRILDAIVNGQRDPKELVKLRDPRCRKSTVAEMEAALTGHYTDDLMFLVEQNLAGWRFFQKQMEGCDREIEKALAHIPTAKVENIPPPPPKAVPAASAEEQAAHAKRKKKSAANRGNNALTLDAVSLCQQLQRICGVNLMNVCGLNLLSVLMIIAEVGTDMSRWRSAKAFCSWLGLCPGTKISGGRILSRRSRRVVNRASTILRMAALVVGRTDSWLGRFYRRKKAHLGAPKAITATARKLACVIYHMLKYRDEFVPLDVMVYETKAAEHRLRKLRRDAQAMGLELVKKEHAA

SEQ ID NO: 316064 - protein, 345 aa, unidentified
MVTYSGRIVYVGIDVHKDTYAVTCVCDKKIVKTATVQADPVGLAASLQRWFPDAMLSTVYEAGFSAFVLHRALIKAGIPNIVVNPASVAVAANDKVKTDRRDSKKLAIDLADSRLRGIYVPTEAEELARLLPRTRAQIVEHRATIARQIKAKLHQFGLIAPSSRRLISNRYLREIAAWPLPSELGVSLSLLAEQWRFATRQLIEMRRLLRAQAQAQAPIEKVYRSVPGIGEVVARTLATELGDMTRFANERALFSSTGLTPSAHSSGASVRRGHISRQGSSRIRQLLVETAWRALPRDPVLKERFDRRAATRGKKRAIVAIARRLTGRIRACFRQGTTYAVGTYA

SEQ ID NO: 316065 - protein, 321 aa, unidentified
MSEPYNVGIDVSMDRLDVVILPDERRFSVPNNAAGWAGLVERLRPLAIAAIGLEATGGYERGVARAPLAADLSVRRINPTKLRQFARAHGVLAKNDRLDARMIAAYVAIIPTRQMQADPATERLAETVAMRRQLCDEHVAVMNQASHLEDAMLRRITKRRLARLEADIALLDKRLGEIVAAEAGLTGHYRLLISMPGVGPTLAFTLLALLPELGSMSRKQIAALVGVAPYNFDSGKFKGLRRIYGGRMTVRNVLYMAALAAFRFNPALKVFHRRLVAAGKKPKVTIVAIMRKMIVTLNAMLRDGAEWTDGSNTGRHTVPTT

SEQ ID NO: 316066 - protein, 409 aa, unidentified
MIHVGIDWASDHHDIVTVDERGCRNTGFRVSQDAEGIATLRERLRALAVEAGGKEHLAIGIETSHLLLVDVLLNDGYKVYPLNPKAVSRYRDRYAVSGAKSDDFDAELIAQALRTDRDRFRPLVPDSDLVRELRILVSDQRRFIRTRTLFSNQLRAALRDYFPTALTLFEDLDSPTALAFLKAHPRPAKIPAKQLERLLAKNRHPSPKDRAQTIAAALAGPAIPVDEFAIRAKARATVTLVNQLQILNEQLQGYQREIEELFERHPDADIFKSFPGAGPSNGPRLLAEIGDNRDRYTDADGLQGEAGTSPVTKASGKSHFVQMRRACRRSFRDAMYQFAFCSMKKSGWARAFYDTQRARGHNHAAALRSLGDKWLKIIHRVWKDRVTYDEKTYLAQRMRHQLKCIPTAA

SEQ ID NO: 316067 - protein, 343 aa, unidentified
MQAITTVGLDIAKSVFQVHGVDAAGQVVIRRQLKRRYVLAFFQKLPPCLVGIEACASSHHWSRELQAFGHTVRLMPPAYVKPYVKRQKNDAADAEAISEAVTRANMRFVATKTPEQQSCLMLHRTRHLFIRQQTAVINVIRAHLTEFGIVAPVGRKGVEELLDVVADPSEKRVPEIARACLAALGAQLRRLKEQILEFDRIIMAWHRSNEASRRLDAIPGVGPILATALVASIADPKAFRSGRNFSAWIGLVPKQHSSGGKDRLGSISKQGDRYLRSLFMAGALAVIRYAKINGTKHRPWLTALLARRPTKVAAIALANKIARMVWAMMARGERYKEPVALAA

SEQ ID NO: 316068 - protein, 440 aa, unidentified
MRVDPEFNQGGLEMNYNQNQKLTQITPSTLIVGIDIAKEKHVARAQDDRGYEFGKRLIFENRIHGFQQLLEWVSKLQQENNKSHVIFGAEPTGHYWLSLAYYLIAKDYDFVVVNPMHVKKSKELDDNSPTKNDTKDARVIAQLVKDGRYSVPNLLEGIYAELREAIKLRDQLTKQLVVIEGRIQNNIQRYFPEFNDVFKEWDGKTALCTLRAFPFPSDIRDMSPEDILAQWKTVVKSGIGINRAIKLVEKAKNSIGITIGLRFARKELHSLLDQYDLYCKHLEELDEEIEELMADIPGAKEMMAIKGLGATTVATFFSEVGAVSNYNHPKQLENMAGLSLQEHSSGKFKGQTKITKRGRKKLRKVLYLAVRSLVANNSTFMALHKYYKTRPNRPLKGQQSMIALCGKLLRVLFVIGNKQCEFDGSKILKGISQNNVLQAA

SEQ ID NO: 316069 - protein, 337 aa, unidentified
MANKQRIVVGIDVSMDKLSYSIYDGKLHTTNEIPYTKESINRHLVRKFKDVDNLLFVMEATGIYHTKLVAQLKEFKVAVVNPLVIKHYSKLKLGRTKSDLFDARVIAEYGYKEDTTLYTPPSKEIVELRLLLKAVEDLLKQRGEIASQIHSLKRRADTLSYIIDSYIRHKEFITKEIDELKAKIESILVESFSNSYELLKSIGGIAMMGAATIIATFDSFKSFSSAKEAASFIGIAPSVYESGVSVRRKGSISKRGSSLARGQLFMNSLSAIRVNSRLKEYYNSLLARGKSKNASLIAVAHKIVRVAFALLKHNRAFTLDYTPQKPVVVTLNNKESA

SEQ ID NO: 316070 - protein, 370 aa, unidentified
MTVFMGADLHKTQITVHIRVGDKIESLSEIKQYPTTPGGYAELLARIAEYKSAGYDVKVGVESTGNTRFFKNQVEKAGAEVTVINTLKFKVINESTKKTDKHDASTISEFLEKDMLPESYVCNQETENLRRLLKSRERLVHSIVGQKNEVHALLVSMGLSDELRSLQSKKGRQKVLDTLLSHSDLVLEAQSVKLMFQIIDQMAESVKTIEKQLAELTKDDEMVNRLMTIRGCGKITAWIIRAYTEDIGRFASAKKYAAFCGLVPWVQDSNETVHHGKITKRGPQELRTAFVQLVLGIRRCGDTSEWRIMQRLDYMKKNKGSGKSIVAAARKMAEIAWALLTEKQDFDARKMMGKYKPMNLVDQALAAINK

SEQ ID NO: 316071 - protein, 349 aa, unidentified
MASCVLSHVASVPDLVCVGVDVSKETLDVHVDSAKRGFKLPNTPAGRAKLIDRLRGLPLAFVVVESSGGYERPLLFAMLEAGLPASHVNPRVVRDYARSFNLLAKTDPIDGRTLSWFGRERQPRLFTQTDKLRHMLQDLNRCRRQLIEQITALSNQAETAIHPTAKQVLQDAAEALEKQLAVIDRDVQAEIDKLPRLKRRQELLLEVDGIGPITSRTLVIELPELGTIDRRKLAALVGVAPFNDDSGTISNRRIIKGGRPHVRAALYMAALTGIRSNPVLSAYYRHLTDSGKPSKVALVACMRKLLTHLNTIITRDEAGDAADASANAHEAGGSPGAKATPAQGRGEKE

SEQ ID NO: 316072 - protein, 391 aa, unidentified
MPEDVPRPAQAAIRTDLGAIFVSLELSRRTWLITSLSPGAGEKMSKHSVPASDVSGLLRRFAELRRKAVARTGRDFPIIVIQEAGLDGFWIHRVLQSEGIESHVVDAASILTSRRGRRAKTDRIDGETLVRTLMAFKRGEPRVCSMARAPTPQEEDRRRVCRERRTLVGERVRHVNRIKGLLFAQGVFGYEPLRKGRRERLEDLRTGDGRPLPVHLKAQIIRELDRLEVVLEQLKTVEAERDALLKPANDEMPSPAAMLAQLKGIGSETAVLLWSEGLFRRFDNRRQVAAYAGLAPTPWQSGSIDHEQGVSKAGNPRLRATMVELAWLWLQNQPTSTLSLWFHERVQRLGGRMRKTIIVALARKLLIALWRYTTAGIVIEGAMMKPSPATT

SEQ ID NO: 316073 - protein, 425 aa, unidentified
MNKSESKGTVEYAALIGVDWAAEKHDTCLWDAATGKSHHQVIEHTPEALAEWLSELQTRYPGQRLALCLEQSRGALIYALMGHEFLDLYPINPVTLARYRAAFAPSWAKDDPDDAKLLTEILRLHRDKLAVWKPDDEQTRTLGFLNEERRKAVDLRTKLVLRLQSALKLYFPQALQWAGTDLASPMACDWLLKWPTLEAAQRARAQTMRSFFYARKCRSAAHIERVIAAIPTAKPLTQDVAVLAVQPLTVQMLAKQLQLLNKSITAYEQQIQILFRQHPDAFLFESLPGAGKTLAPRLLCAFGSDRARYPSAQNMQTYAGVAPVIERSGKSCWTHWRWNCPKFLRQTFHEYAKVSILYSTWARAYYDQQKQRGERHNAAIRSLAFKWIRIIHRCWQTRTLYDESLYLQTLAQRGSPLCALIAEPA

SEQ ID NO: 316074 - protein, 436 aa, unidentified
MHPQSEAQNTVPSGVSPGNTPGGTQPFHLGLDMAFKTGTACLLDHLGRDAMPRWTFPNSRPGAEELVTTVVQRLKRHGATSLVVGMEATGIYGWHLACFLSEAPALRPWATKVFIFNPHRTLSFKRALGTTDKTDKADAGTVAQWLRVGLLPAPFAVDAVYGPLQRLTRFRYHLSETLTREKLYTLGLMYLAFSEFSVQAPLKDPFGATSQAVLEEFSLDELVAKPLEELSAFLARKGHGRIAQPDEVAKLLQQAARDSYRLDKVQDSALRLVLSVSLTNVKTLSAQLRQVDALIARELKAIPLATCLLSVPGLGPVYSAGMMAEIQNIHRFEDHAAVAKFAGLVWRSHQSGDFIAEETPLAKTGNTYLRYYLVEGANSVRVHEPEYAAYYQAKYKEATKHHHKRLVRLVDALLRPDLSGLYVPPEQRHGGRAVMA

SEQ ID NO: 316075 - protein, 360 aa, unidentified
MSIVYYGGLDVHQKSIAAFLYCSETGECIEEVPNDRVRLLRAVSRWGARGELRLCYEASSAGFVIKRWLDEVGVDCEVVAPAFIPKGSGDRIKTDRRDARRLAQLYQSGMLRTVRVPDSEEETVRSLVRYRDDLTRDMTRSKNRILKFLGLRGMRYTEGRNWGEKHRQWLQHLELEPLQDVVLQSHLSSLDQLEDQRQRIDERIAEVAQTPAYHDKVQRLMCLRGIALYSAMVLVTEIGDAHRFRGAPELMSYLGLVPREHSSGDSRHSGKITRVGNTRGRWVLSEAAWNQTRKPGTSVRLRKQRHSQPEAVAAISRKAEQRLYHKFWKIAVRKDRNTAATAVAREMAGFVWSLLTVEVA

SEQ ID NO: 316076 - protein, 404 aa, unidentified
MKGPIVSIDVSKGKSNYQAFKNLNVKYTGSRSIKHTKEGFDEIVNLVREMEKKLETEVCVVYEATGVYHRVLKKVLEDNNIKQFIINPLLSAKTRKNDSLRCPKTDKLDPKSIAKTYYSHSLHNSHKPETIYHELRELSRYYEDILVHIRKDKVSFRAQLDVVFPGYDTLFDDLYSPVSLTVIEKYPHPEMLQKKKINTVSKVIQSKTCHRQAASDTMADKAIEYSKTIYSGCDKDDIEVLILQRFIKKLKEDMAEAERTIGEMIKLAQELPDFSIIKSIPGIGDNLAARIIAELGDMTRFKKKNELVAFAGLDPRISESGQDDGDHMHITKKGNKRLRCLLYLAVTCSIRLKRDDNSIKDFYIKKKQQSNPMCSKAAKTACASKLVRIIYSMCKTGELYQYNK

SEQ ID NO: 316077 - protein, 326 aa, unidentified
MDVLGIDLAKLSFDATLLLQTGSSHYASFPNTPEGFLQLATWLKQHNVSSLHACMEATNIYWQALASWLHAQGYSVSVVNPARIKGYAMATMQRNKTDKLDSAIIASFCAKHQPSLWQPASQEQQRLRALTRHRDDLLQTQLQQQNRLRDTTDELVRSSLESLLLAIVSQLETVQEHIAQQLREQESFQTNLALLTSIVGIGAVTAAKLLAEFADLEEYASAKAAAADAGLTPSHYESGTSVRRRSKLSKMGKVGIRAALYWPAITAMRCSPAIKAFAHRLAARGKPKMVIICAVMRKLVHICYGVLKHQTPYDPDKAFGHSTPAT

SEQ ID NO: 316078 - protein, 394 aa, unidentified
MCQQYKAEASMTKHNILFIGLDTHKTFTEVAYIEDQRGTKPIHLGKILSNKAAFKKIARQLQSKYPHTTLHFVYEAGPCGYWIYRLLTSLNHCCYVIAPSLIPKKPGERIKTDKRDALKLAKLLKSEDLTPIYVPEPEDEAVRDLSRARETAMKDLKDAKYQLKALLLRSNITCKVNDNWSLQHLRWLAELVLPHPCQQIVLQEAVSTITERLKRLKRLDNELTHQVKNWRYYPVVKAVQAMRGVRLLVATGVIAELGDLSRFNHPRKLMSYLGLVPSEHSSGGKRRLGAITKCGNSRARRLLVEGAHSYKYNANISKEMQLRQEGLSKEVVDMAWQAQLRLCQRYNRLMHRGKHRNVVVTAIAREMIAYIWAISREVVLPVVDVKLRLARMPA

SEQ ID NO: 316079 - protein, 346 aa, unidentified
MMIIGCDFHPSWQQIAWLDSETGETGEQKLVHASGDAKAFYQQLAAPVLIGMEATGNSQWFIELVQDLGHEIWIGDAAQIRASYVRKQKTDKRDAAHILKLVVEGRFPKLWTPDREQRDLRQLVLHRHKLVEIRSRVKNELQHLAMNKGMQKKRTLWSQAGQKMLRELRLKPWASCRREDLLGLLGMLNEQVGKLDEAVRGAAEEHPQARLLMTQPGVGPNTALAFVLTIGDVRRFPRGKQVASYLGLIPREESSGGRQKLGAITKQGNRLVRSLLVEAAQIAVRFDPGMKKQYLHRCHQKPKGVAKVAAARRLAVRLYWMLRTETPYPEIVRIESSPRVALVGVS

SEQ ID NO: 316080 - protein, 411 aa, unidentified
MVCGCCAGIDVSKRDAKVCVRVQGRGSVKTTAKVSTWSSVMPQILKLRGQLVADGVELVVIESTSDYWRPFFYVLSEAVPVMLVKASDVKGMPGRKTDVSDAEWLADLAAHGLVRASFVPSEPLRQLRDLTRARVGLFQERTRELQRLEKELEDACIKLSSVVSTLQGVSARAMLQALVDSERDPKALAELARGRMRAKVEQLTEALEGRFNDHHRFMVSFRLARVDQTTADIDALDRRIDQLIEREGLVAARELLVSVHGLGKHGAEELLAEIGPDMSVFPTAQALACWVGVAPGSHESAGKKHPVKARSGNRYAKRTLGIAAKSAARMKSSFFAARFKRVCAHRGYNKAVVATQHSMIVAIWHILSTGEYYRDLGGDYYSRRSPDRTIRRKIKDLEAAGYHVVLDPLPA

SEQ ID NO: 316081 - protein, 389 aa, unidentified
MIYVGIDVAKDKHDCCILGSEADNLYPVFTIPNNKAGFDELYEKIFSVTDDKTEIKVGLEATGHYSLNLLGSLIDKGLTTCVINPLHTNLYRKGLSLRKTKTDKVDAGSIAMMLMTDKTLKPYSDTSYHSEELKSLTRYRFDKVQERAKLKSSVARLVNILFPELEKLVPSLHMASVYALLSEFPGAYYIAESHLTHLRNVLEIASKGRYGRDMAVTIRDAAKDSIGSVMPAKSMELKHTIHLIEVLTDEIDEIEVSIKSIMDTCNSPIMTIPGISYRMGAMILAEVGDFSRFSNADQILAFAGLSPSTYQSGQLDSSYSHMEKRGSRYLRYALFNATKYVCHWDGNFGAYLSKKKSEGKHYNVAVSHATKKLIRTIYRMELTGEAYRK

SEQ ID NO: 316082 - protein, 363 aa, unidentified
MAVAVAGERPIDLRDAKPEDKLGSSPAVPSNPNSRKGRAASPLWQGREKMDAIVVGIDVSKDKLDIAFRPGGETFVVERNASGLEELTERLRSRPVRVVAIEATGGFETVAAASLFGAGLPVVVVNPANVRAFAQALGKRAKTDPIDAAVIAHFAEATKPEVRPLPDEATRLLSDLVARRRQIVEMIKAEQQRRQRATNKRLVKSLDRLLKALQKELSDIDEQIYECVRSSPKWRETADLLMTVPGVGPVIASTLIAELPELGTLDRRQIAALAGLAPWTRRSGKWQGKCMIGGGRANVRAALFMGALVAGQYNPVLKSYHDRLIAAGKVKLVAVIAVARKLLTILNAIARDRKPWSPEAAHV

SEQ ID NO: 316083 - protein, 357 aa, unidentified
MSKTAPDTDVVVGVDTHKLTHTAVAINALGVRLGSVTVPANRTGYQALQAWAQSLGPIRAFGVEGTGSYGAGLSRFLSEHDCRVFEVNRPNRQQRHQKGKDDPLDAESAARSVLAGQVTALPKSGTSTVEMIRHLKVARDTAVKARSQAMQALKSIIVSAPPVLREQLDQITGKMALLRHLAALRPGPLTSTTTSAKTSLRAIARRCLVLTAEVKDHDAQLEQLTQHLAPDLVQAHGMGAGTAAEMLLLIGDNRERIRSEAALAKLCGACPIPASSGKTNRHRLNRGGNRQANAALYRVVIVRMRAHQPTLDYVRRRTAEGKSKLEIIRCLKRFVAREIFGYLCRPAKAQHSMLASP

SEQ ID NO: 316084 - protein, 357 aa, unidentified
MSSNMKKYIGLDVHKDATSIAVLNGVGKLVMESIIETKAATLLEFVRGLRGELHVTLEEGTWAAWLYDVLKPHVEEIVVCNPRRNALLKEGSKSDKVDARKLAELLRAGLLRAVYHGENGLRTLRELARSYLTISKDQARVMSRLKALYRSWGMACSGRQVYTPRHREQWLSKIAQPGVRRRAELFYQQLDGLSVVRHAVRGELLAESRNHRTVKILRQIPLIGPLRAALLLALMQTPHRFRSKRQLWSYSGLGVETHDSAQHRYVDGQLQRSKKPQQIRGLNQNHNHEMKKIFKSTAMSASRCAGPLQDFYAGLLAKGMKPDMARLTLARKIAAITLTLWKKGERFDAEHLKSQAA

SEQ ID NO: 316085 - protein, 354 aa, unidentified
MNSVRYIGMDVHRDTISVAVLDEGGRVMMQSVLATRAAAILDFIQGVRGALQVTFEEGTHSAWLYDVLVRRVAKLVVCNPRKNALLKSGSKSDAIDARKLAELLRAGMLSAVYHGETSALEVQQMARSYTQLTEDTVRVLTRLKAVFRGQAVSCAGKKLYGKRHRDEYLAQLGGGLRRRAEHLYQELDALQPLRHAVRRELMVECRQHAAAQWLPSVPFLGPIRAALLIGRVQTPHRFRSKRQFWSYCGLGLETRDSGQYRVVNGQVERRRKPALIRGLNWNHNHEMKNLFKSTATAASIRQGVWREFYLGLLAKGMRPEMARLTLARKIAAITLKIWKKGETFDAEHLKLQAA

SEQ ID NO: 316086 - protein, 426 aa, unidentified
MPAFLNNFLRRETLMLKIVYPICCGIDVHKKFLVACIAFTNDKGVTTYKSRRFSTFTNDLRKLSEWLSSNSCTHVCMESTGKYWVPVYNILEATCKITLAHPKYVKAIRGKKTDKKDAKWIADLFKHDLVAGSFMPPLPIRQLRDLMRYRFKLTNFSSSEKNRIQNCLTVSNIQLANVVSDTFGKSSMRIIDYLLEKPDDKDFDFVPLLHSSMLHKVDDIRLALDGMITPEQRQKMNIILQHYGELGKCKSNLESLILSLSEPYAKERTLVSTVPGIKNPFSAIAIISEIGADMSVFPTAKHLCSWAGVTPQNNESAGKKHSVRISRAGVYIKPLLVQCANAVVKSDKHPEIKGRYLSIKKRRGHKRAIIAIARMLLTAIYHILKKGEPYNPELYKKAQPFPASREITVEQAILIARRHGYSVVKD

SEQ ID NO: 316087 - protein, 339 aa, unidentified
MKLYGAIDLHSTNSVVTVIDEQDRVVYQKRLDNDLTVILKQLAPYRSSLEGIAVESTYNWYWLVDGLMEAEYRAHLVNTAAVQQYEGLKYTDDHSDARWLAHLLRLGILPQGYIYPKEQRAVRDLLRKRSQLVRQRTANLLSIQNLVTRNTGSSISSNRIKVLRVEDVGSLLGNADQVLAAQSNLWVLRCLEEQIGKLERGVKERVKLRPQFRYLKTVHGIGEILALTIMLETGEIKRFAGVGNFASYCRCVGSEKLSNGKRKGSGNTKNGNKYLAWAFVEAANFAVRFNPQIRRFYQRKKAKTNGIVAIKAVAHKLARACYYIMRDEVPFDVAKAFAG

SEQ ID NO: 316088 - protein, 343 aa, unidentified
MGQYIGLDVSLKDTAISIREDGKRIWRGKCPSDPGIIAQAVRKHSDDPLSVVFETGPLATWFFHALTGEGLRAICIEARHAQKILGETMNKTDANDAEGLAKLAETGFYKAVRVKSFEAMLIRSLVAARTQLLAITTQLTNQIRGLMKTFGLVVPKSKGRVFIEKVNDLLDGHVELKGIIYPLLEACQAVRERASTLSRQLLLAARQCQSTRLLMTIPGVGAITAISYVAAIEDPKNFPKSRSVGAWLGLTTRRYQSGEMDFNGHISRRGDQRLRGLLYEAATSLLTRTRAETVSDLKTWGLQLRERLGFKRAAVAVARKLAVIMHSMLKTGQTFIPTREELA

SEQ ID NO: 316089 - protein, 390 aa, unidentified
MIKLIIGIDIGKHYHQATVIDETGQILGGSLRFTNTSSGAELLLKRIASVNQEGLPLIFGLEATGHYWLALYSYLIEKGYHVVVLNPYQSDAFRKVYLSSVKTDKEDAFLIADILRFGSSSQTKLAEEKLLALRNLSRFRLTLNQQITDSKRRVITILDQVFPEFESCFSDIFGKTGRSLLKKYPTPEEMEAVSVRKLTNIISKLSKGRFKNEKAQEVITKAKTSFGITLALDSLTLQLKILLETLEFTESQLKIVDDQINPLIDDGCVLLTLPGVGKTIAASILSEIGDIKRFKTSSQLVSFAGINPTVRQSGNFLGNKNHMSKKGSPYLRLALWQAAITSSRFNPVLKEYYSLKIKEGKNHMTVIGAVARKLTGIIFAMLRDQTAFTV

SEQ ID NO: 316090 - protein, 359 aa, unidentified
MKKVFIGVDVSKEKLDATIIEKTEERHEVTGYETFENSKDGIRKLSAWVRKTAKATKEDCLYCAETTGGYDRLLCEQLYAKGLTVWRESALEIKRSSGLRRGKDDKTDSKTIAEYAMRHADKAEPYRPADKRLEELRELYLYRDSLVEERKAKATRAKEIKATCANSPSATFMHKTSMEDVKRIEGRIRECEKRIVRLIASDEGLSRNYGHVTSVKGISLVNGVALLVYTANFTKFDNPNKLATYYGVAPFRNRSGSSVNSRADVRCYSNRKLKGQLSQAALIATLYNPTLKAYHDRLIAAGKPRSVALNNVKNKLLHIIFSLVVHDCDYEENHEWKRKLQNSGTGKTAAASEQNRLQP

SEQ ID NO: 316091 - protein, 369 aa, unidentified
MSFVFPSTCPKRYLATFDTTTKGLRAYHDFLSQFHVEAVGMESTGVYWRLVWHALCDDFELILAQPAHMKAIPGQKTDKKDAHWIAKLTRIGLLPRSFVPDETIQELRELTRQRKHYVESRNRETNRIHKFLQSGGIKLTTYIEDIMGLSGRNLLQLLVDGTPITPRIVHQSVYTSLKKKVPQLLEALDGYFSDHHRFMLKQSLEIYDFYQKQIELLEERITVYLSQYENHVETLDSIPGIDVITASVIISEVGVDMSQFPTSGHLASWAGLCPGNNESAGKKRSTKIRHGNSYLKKCLCQAAFAVKRQKGSPLAERYYQIQSRRGSQKATIALAHQLLKIAYILLKEQMTYPEFLAQKKKTTRDELVA

SEQ ID NO: 316092 - protein, 378 aa, unidentified
MTNATVATTSVVSAKATLPTNLGAGSPQLTVGIDLGDRHSHLCVLDGDGAILEQSRLQTAPAAFRQRFAAMPPARIAIEAGTHSPWVNALLTELGHEVLVANPRKLRAIYDNDNKSDHVDAEQLARFARMDPKLLSPIAHRGMATRADLAILRSRSALVDSRTQLINHVRGSIKPFGVRLPASSTPTFARKAAWQIPRELRRALVPILRTIAEITTRIVEFERRIEQIATERYPETIKLRKVNGVGAITSLTFVLTLEDPKRFAKSRAVGAFLGLRPGRSQSGKRDPELHITKAGDRDLRRLLVQSAQYILGPFGSDCDLRRFGLALAARGNKSAKKRALIAVARKLAVLLHRLWLSPIEYDPLRHAEGRNPSRRRRA

SEQ ID NO: 316093 - protein, 388 aa, unidentified
MLPNIPHPSPEQTVAVRPDLTLYASLELSRATWLVTCLLPERDRISKYATPGGDGNALLGLLERMRARGQQLTDRTVQIVVIQEAGLDGFWVHRLLEANGIESHVVDPASIAVPRRRRRAKTDAIDGETLLRTLLAWKRGEPRVCAMVVPPTPEEEDRRRICRERAILLQERIRHTNRIKGLLAGQGITGFNPLHKDRRHLLHAARTGDGRPLPPQLKAEILREIELIELLLRQIADVEAAREVLAGPKTAKVPSPVALLKQLKGIGPEISSALYFEGLFRSFGNRRQLAAYAGLAPTPWRSGTVDQEQGISKAGNPRLRSTMIEFAWLWQRHQPASALSRWFHTRVGNERGRIRRISIVALARKLLIAVWRYVTQGEVPEGAVLKAA

SEQ ID NO: 316094 - protein, 389 aa, unidentified
MSATHVSESTTVTAPVLYVSFELSWGTWKLAFTTGSGRSPRIRTIAARSTAGLVFEISTAKRRFALPDDAKILSCYEAGRDGFWLHRFLANAGVANVVVDSASIEVNRHKRRAKSDRLDALELLSMLIRWHNGEQTVWRTVRVPTVDDEDRRHLHRELIDLKAQRTEHSNRIQGLLAGLGLSLVVDKKLPDRLAQLRQWDGAPVPPALQQRLRREHERWQLVGRQIDELVAQRKQQIRADDNPEVKQVRQLLRLKGVGENGAWLLVREVFGWRQIRNRRELASLAGLTPTPYGSGESQREQGISKAGNRRVRWMMIELAWGWLRYQPTSELSQWFRRRFGPGNTRMRKVGIVALARKLLVAFWKYLENDELPAGAEVVEKKILGLKRAS

SEQ ID NO: 316095 - protein, 364 aa, unidentified
MLHAGLDLSRRKVDVCLLSEEGERLDQLAVPPDIDSLRRLAHRIDAVHGEPVCAVVESMTGARLIHDTLEQEGWSVEIADAQKVKGLAPLACKTDKIDSLVLATLSQRDLVPAIWLPDPRVREERELARFRLHLVKHKSALKNRIHSTLISFGKPCPVTDLFGVEGRELLARLDVPEPWRSNVSASLALIDDLEDQIDNANRRLKSSHADHPYVPLLMTAPGVGWVIAFTIAGEIGEIERFASPEKLTGYTGLCPRVNQSGEKDLRGPLTKHGPTYLRWALLEATMHGAKAPRLLGALPANEEEAWQAARGQGGPGRHRPPARPRDLAHALPQGGVRSPRRRFSSGGLTAPFGIAPASERSNFA

SEQ ID NO: 316096 - protein, 406 aa, unidentified
MWNAVGIDVSKGKSTVAVLRPAGEIVRKPFPVTHSAKCLHDLVSYVRGLDGETRVVMETTGHYYEPILKAFLDAGIFVSAVNPSLIKRHDSDENPLRKVKSDPADAKKIARYTLDRWENLRQHSVMDTTRTQLKTLNTQFHFFMQQKVSLKNNLISLLDLTYPSANALFDSPVRSDGSEKWIDYVHSFWHADCVRKIGLKAFTERYQNFCKHHGYNFQPDKPQKLFEASKDLVPVVPKDPVYKQLILSSIEQLNTVSKQIEIFRCTMNELASTLPEYQTIMSMYGVGPTYGPQRMAEIGDISCFDHRSAITAFAGVDPGVNQSGTMNYESSRASKHGAPRLRKTLFQIMTTLLQLAPADDPVYRFMMKKKSEGKPYQVYMTAGANKFLRIYYGRAKEFFASPSATE

SEQ ID NO: 316097 - protein, 412 aa, unidentified
MTANSLMQKRSAIKPDTLVVGIDVAKYNHVARTMVLGGEISRPFSFPNSRKGFLALSAEIEARKPTPASAVIVGLESTGVYWINLARWLAEHGCQVVQVSGLYVHRTKELPDNSRGTSDGKDALLIADLVSQGKYLGFVRPAGILADLRQLVGLRQRLVHERTARYNLLHQSVDLLFPEFVTVFQDVTGPGARRVLRRFPTPAAALAQPPDEMRRLLSEDGRVRASVAKLARLQAVAEQSIGAREDTAGMEYALNDTLLELDSLDARVKQVEVKIDRLLAQIDETPILTSLVGQMTAAIILGETGGLRQYSCAEAVLKLAGLNLYQISSGQYRGDRHISHMGRSLLRQTVYLAVLQHTHPGMPLYPYYAELLRRGKPKPVALVALCCRLVRLLYALVRDGRCYSAQPPERNQ

SEQ ID NO: 316098 - protein, 419 aa, unidentified
MNKIETKKQRIVNAKTLIVAIDIGKTTDTGYCRCPSGEECKPFEFSNNAEGFKKLWDRICWMKMSHHLEEVVVGFESTGAYGEPLAHYLRQKPVKLVQVNPMHTKRMKELQGNSPGKTDRKDPKVIADIIGLGHALSVVIPEGAAAELRRLTLARERSIGRRTALYNQLQDLVFIVFPEFLQVMKDVKTQSAQYLLHHYPTPQDIVACGSESLTRILRQVSRGKLGEVRAQALYDAAAQSVGLQEGRRGILLEIEEILSALEACKRFIEKMEEEMVPYLEQIPYSDSLLSVKGIGEITVAGLIGEVGDFRQFRTLREMMKLAGLDLFEISSGKHKGNRHISKRGRPLLRKLLYFAAINTIRKGGVMHASYQRYLERGMPKMKALIAIARKLLGILFALVRDHSQYVESYSPKEVLNLAA

SEQ ID NO: 316099 - protein, 401 aa, unidentified
MESPIVSIDVSNGNSHYMCFIKNNKRFGKVKKIDHNIEGFKRLLEDIQKLEAETNEKVCAVFEATGVYTKPLERFLSKNSIKTYIINPLESARKRKEEIHNKKTDKLDPISISKVYYDKEEMMELKKKDETYNWLRKKNRLYEDQLNHLRKYKVTFQNQLSICFPGYLDLFRDGYSDIPMTILKKYPHPDLLKNKKAETVARYLEKNTCHTHKISLEYALKIIGFAKKTYPGCEKDDVEVEIFKILLDKVIETQRECEKTLNEMITVASTLEEYRYISSIDGIGPNLAARIIAEIGDIEEFKSREALVAYAGLDPHIYQSGDQDGKHLKISKKGNKYLRCLLFLAVGCSIRGAKDNPVNRFYQKKKQQSNPLNSKAAKTACTAKLLKIIYGICKNKTTYKR

SEQ ID NO: 316100 - protein, 354 aa, unidentified
MVTIISDDLPRIVVGVDSHKETHQAAVLDITGAILGNESFAASSAGYRELEAWLATLGTIERVGIECTGSYAAGLTRFFRERQVDVFEVNTTHRATRARRGKDDAIDAEMAARKVLSGEASAQAKDTTGDIESIRLLKLSRESAIKARTIALLQIRDVLITAPAELREWIESAGGARHRVNRAWALRPDLERLGEPLQAAKFALRQLSRQVKFLDEEIVGVDRQLATLVERCAPHLLQCRGIGTQHAAQLLITAGQNLERLHSDGAFARLCGVAPVPVSSGKTNRMRLHRGGDRQANRALHLIVIARLRLDPKTQVYMARRQAEGLSKMDAVRCLKRFVAREVYKELKRDLLQN

SEQ ID NO: 316101 - protein, 358 aa, unidentified
MESTIAESTQPQVTVGVDTHKQFHVAHAVDQLGRPLGTHRLAATPAGYRGFVSWAHTLGQLVAVGIEGPGHFGAGLARHLRAEGVAVSEVGRPKRQRRARFGKSDDADAAGAAAMVLAGDALGEPKSADGAAEMVRVLRVARTSAVRARAKAYNALQDLVVTAPAALREQLAGLYKDRLIHACDQLREPETLTTPTDAVTVAIKSLAARCRELDTEAARLERHIDTITATAAPELRAIYGVGPDTAATLLTALGDNPNRISSDAAFAKLCGVSPLEASSGKTIRHRLNRGGNRDANRALHVILVVRMRRHGQTRDYFARRLAEGKTKNEIMRCIKRYIAREIYHALHEPSRRTNELIA

SEQ ID NO: 316102 - protein, 406 aa, unidentified
MLFVGDDWAEDHHDVEVQDETGRRLAKARLPEGISGIARLHGLVGRFLPEDGDAAEVKIGIETDRGPWVAALIASGYQVYAINPLQSARARQGQDVSGAKSDAGDAHVLADLVRTHSHQLRTVAGDSEQAGAVKVLTRMHQTLIWDRTRQVLRLRSSLREFFPAALEAYDDLDSPDVLELLTKAPEPSRAARLTRAQISAALKRARRHDRDTKTTAIMAALRTEYLTQPPVIAAAYGATVRALAAMITTSNEQITALEGPVEACFGQHPDAEIYLSQPGLGPILGARVLAEFGDDPTRYAGARARKNYAGTSPITRASGKKKVVLARYVRNKRLADALHHQAFSALSGSPGARAYYDELRDRDISYNAALRQLGNRLVGILHGCLKTHTCYDEATAWNQHIQQAAA

SEQ ID NO: 316103 - protein, 372 aa, unidentified
MGPTPDNMNKCCLHTELSSHEGTRPEFNPGKTVIKLGIDVHQEFYVVVVQEGGANPKPAQRFAKAAFLSWAARLGEKSGGAIHAVYEACGFGFGLQRALTGLGIECHVVCPQKLDEQNKRVKTDGLDAKALCLKLDRYVEGNREALALVRIPTEEEEQLRAIHRQREQLVKARKQLEAQGRSLMVNHGIEPVPRWWKRRAFAALEMPEWMKQLLRNSQPILLALEEKIRALTGQLQTAAAPDQPRGLGLMTSVVIDREIGNWSRFRNRRQVGSYTGLCPGEYSSGNTRLQSCVTKHGNPRLRAALVELAWRLVRFQPNYKPVVKWRRVLAKGALATGAARKKAIVAVARQLAVDLWRIRTGRLSPEQLGLSF

SEQ ID NO: 316104 - protein, 316 aa, unidentified
MRKKETFVGIDVAKKELEVAVFPRADTETWPNMEEGIVRLVDWLKSLSPTLVVLEATGGLEMPCVGALAAEGLPVVVMNPRQIRDFAKATGRLAKTDRIDARVIARFAEAVRPEIRELKTEEMQELTALGLRRRQIIQMITSEKNRLTSASKWTREDIKEHISWLEKRLDDVTNELSKAIRNSPMWREKDDLLQSVPGVGPVLSATLLSQLPELGSLNRKQIAALVGVAPLNRDSGLFRGKRSIWGGRASVRSALYMATLVATRFNPPIAAFYHRLRTAGKEHKVALTACMRKLLTILNAMARNRTHWSPVCLGES

SEQ ID NO: 316105 - protein, 360 aa, unidentified
MTTTMTAVGLDVHARSTEAAALHLPSGELRRARFGPGLEQVLAWLGELPQPVHACYEAGPTGFGLYRAACEAGIRIDVVAPGKTPRPSSERRKSDRGDAELLARLLPSGALCPIAVPSARLEAARDLSRAREQLRGDLMRARHRLSKLLLRQGRVYPGATTWTQAHRRWLSGQRFCDPNSELAFIDYLAAIDGLCARKAALEERLSRLAREDDLWPTIARLRCFRGIDTLSALVLHLEVHSWERFPAARALPGWLGLVPSLAQSGEHLRQGAITKSGSRYARRILVEAAWHYARPPRIGVTLRNRQQGQPGHVLEIAWRAQHRLYRQGERLRARGKPGPVVTVAIARELACSLWAAVMAP

SEQ ID NO: 316106 - protein, 387 aa, unidentified
MVQVNDLSRSLAAFDPISTLVVVVEMSKASWLVSSVVPGVERQPLKKLEPDATALLRLIERWRNEAVRVGRPISRIALAYEAGRDGFWLARWLIARGIEAHVIHSASVAVSRERKRAKTDRLDAAMLMRVFLGWLRGERGHCGMVAIPTMEEEDARRPNRERESLVNERSRIVNRMKSALARLGIRGFKPHLRKAPERLAGLRTAEGTGLPANIIEEFRRDMARLALVREQISSIEKTRAERLERAPDTGPHAMVRLLARVIGIGIETADMLVREILSRKLRDRRALARYAGLTGSPDESGLKSREKGLAKAGNARVRRGLIQLAWRFLMFQKDSALARWYRTRTEGPSGARKTTMIVALARKLLIALWRLVTTGEVPDGVELRTAT

SEQ ID NO: 316107 - protein, 329 aa, unidentified
MQNFIFIGTDVSKLTLDHGIHQGMVHQKTANNNAGFKSWLKWALGFGRKEQLWVVMEHTGYYSYQFELFLHQHQVRYTKVAALEIKRSVGLVRGKSDKVDALLISRYAWMNHDRLEPQQLSAAVMTELKDLVNLRDKLVRDRSGYKARMKEQAATRKYAKSHIQNKIQLRMIKELTTDIQEVEAAIKGLIKEDDALFNNYKLLLSIKAVGFVTAVYMLAYTDNFRKFLNSRKFACYAGLAPFEHTSGTALRGKNRVSPYANKKAKCLLNLAASVAIQHNQELKIYYRQRVSEGKSKMGTLNIIRHKLVDRMFAVIKRGTPYIETLSTAA

SEQ ID NO: 316108 - protein, 349 aa, unidentified
MTLVGCDLHTRKQQVAVLDTETGAMDERQLSHAGDAVEQFYRALSGPVTVGIESTGYALWFHELMQRLGHTLLVGEAAKIRAMVVRKTKTDRRDALHLLDLLKHERFPLVWIPDPATRDLRALVTHRMRLVRMRTMVKNGLHAIAMNRRLTLGPSLWSQRGLAQLQGLALAPHTTQRRDESLQLLTWLTARIAALDDRVAAAAQADPGARLLLTHPGVGPLTALTTVLVLGPVSRFPDSKHVVSYTGLAPAVHASADTCRLGQITKQGSPLLRFVLGQAGLIAAHAEVDLTRHYRTLLRRRGRPKAIVAIARKLLVRLYIMLRDQIDYEEFRRRGRTPRRQEVPPPALA

SEQ ID NO: 316109 - protein, 307 aa, unidentified
MFVGIDVSKDRLDVHVRPSGEVFGVARDGEGLEELVARLRPLAPTLVVLEATGGFEAVVAAALAGAGLPLAVVNPAQVRAFGRATGRLAKTDRLDAALIARFAEAIRPEPRPVASEQAQALAELVTRRRQVVEMIGMESNRRRQARGPKVLRGIERTLAALQAALTELDREIDDQIRGSPAWRAAEDLLTSVPGVGPITARTLIAELPELGRITRRRIAALVGIAPVNRDSGASRGHRAIAGGRTSVRNVLYMATITAIRRNAPVRAAYERLRARGTPPKAAIVAAMRKLLTILNAILRDARPWQAP

SEQ ID NO: 316110 - protein, 345 aa, unidentified
MALYVGLDVSLRMTSICVVEADGSSVWEGKAESEPVPLVKVLSPWRDKIALVGIEACPLSEWLYGALVESGFQIVCIETRHAQRFLSSRPNKTDRSDARGIAEMMRLGHYRSVHVKSKASQLLRTTLIARKKFVDHMLAIEDTIRGLMKVHGLKLGAVHRSRFAARVETLLADAPDLRMAIEPLLEARNMMRKHKALMDRQLAQMARKDDVCKRLMTVSGVGPLVSLSFKATIDDPNRFKDSKAVAAHLGLTPRVYQSGEIDRSGNISKCGDKLMRHALYEAANSHMRISKKWSTLRAWGVKLAKRIGSRKACVAVARKLAIIMHRMWVEETDFRFGKPPVTQPT

SEQ ID NO: 316111 - protein, 412 aa, unidentified
MRLYCGIDWAENHHDVALVDPEGQLVARARIADDAAGYGQLLRLLAEHGDGPDNRIPAAIETSRGLLVAALRGSGRPVFAINPMAVSRYRERHTTARKKSDHVDAMALANILRTDMNVHRPLPADTELAQAIAVLARAQQDAVWDRTQASNKLRSHLREYYPAALAAFAEVRDGLAAPLARALLAAAPTPARAARLTTAQYRAILRRAGRQRGIDAEAQRLATIFRADYLHQADTVEEAMGQRTLALLRQLDAACVSADELEAAAIEHLRQHPDAEILTSFPGVGELTAARLLGEIGDDRTRFADARALKAYAGAAPVTRASGKSIHVMNRRVKNQRLAATGYTWAFCALTRSPGARAHYDRRRQAGDRHTAAQRNLFNRLLGCLYHCLTTGQRYDEANAFPTPDTDLALAA

SEQ ID NO: 316112 - protein, 360 aa, unidentified
MKVQRTSVGLDVHARSVVACGLDGETGELFERRLTPDHGEILAWLGDLPGPVAATYEAGPTGFVLARSINASGIRCSVAAPSKLQRPVGDRVKTDKRDARHLARLLHLGEIVEVEIPSVEQESARDLFRAREACRKDLMAARHRLSKLLLRLRIVYYAGTAWSRNHERWLQSQRFDDPALAIAYDTAFDTVLTTTARRGRLDAAITAMAADSTFTPVVTRLGCLRGVSTLTAFGLATEIGDWHRLSGRSIGAYLGLVPCEYSSGDNRVQGGLTRTGNGHARRLLIEAAWHHRPSYRPGEVMRRRWDAAPPAARARGQAANRRLHARWLRFNERRKRPVVANAAIARELAGWCWSLAVMDD

SEQ ID NO: 316113 - protein, 342 aa, unidentified
MPNSTLLKYVVGIDIAKDSFVACFGSLDSVQRVRSGKPATFANDLPGFAALLRWVVAQRSSDAPLWFVVEATGVYYEELAYFLADQQQRLSVLLPNKVKHFAQSTEQKSKTDQLDARLLCRLGLERALPAWVPPTPALRRLRVLERERQVLTQQGARLKTRLHAYEYSYQPEERTLARLATQQQLVQHQLRDIDADIAALLAAEPELQRKLALLTGIPGIGLTTAVVLVAETAGFSLTENERQLASYAGLDVVQRQSGTSARATTISRRGNVRLRTALYLPAISSLRCNPQLRVFYARLRARQPNGKPGVIAVMRKLLLLCYALWKRNQPYSATYTNAQLVN

SEQ ID NO: 316114 - protein, 402 aa, unidentified
MNAVGIDVSKGKSMVAIMRPFGEIVSSPFEIKHTTSDINSLVELINSVEGESRIVMEHTGRYYEVLAHQLSKANLFVSAINPKLIKDFDNDSLRKVKSDKADAVKIARYALDKWQNLKQYNVMDELRNQLKTMNRQFGFYMKHKTAMKNNLIGILDQTYPGVNTYFDSPARSDGSQKWVDFASTYWHVDCVRKMSLNAFIDHYQNWCKRKKYNFSQSKAEEIYGKAKELVPVLPKDDITKLIIKQAVNQLNSASTTVESLRTLMNETASKLPEYPIVMAMKGVGASLGPQLMAEIGDVSRFTHKGAITAFAGVDPGVNESGSYEQKSVPTSKRGSSDLRKTLFQVMDVLIKTHPQDDPVYQFLDKKRAQGKPYYVYMTAGANKFLRIYYGRVKEYLSSLPES

SEQ ID NO: 316115 - protein, 380 aa, unidentified
MDNSTGTVRKNDQETNFIGMDLHLDNVVVVVAQNEIKDNTVRSKTVLSKKFKTVGQPNIDEHFKVLETYCQDKPHMAVVESTYNWYWLADEFEKRNWNLRLADPSTVSKAGFKYSDDYTDASYLAECVRNGSIRSTAIMPKDDRAVRDLARYRMTLVEDRGRLKTILVNMTTNHLSIKLNADKLLKEIDEAVEKAASASDEGAADEVLSHYYDNRQVRTKMRSLLRRIRFLTNEVEALDEELTELIKPNVYATSLQSIKGCGYVTSMLIGLEIGDIGRFRTHKDFVSYCRLAPTSKLSNGKSKGLGNAKNGNAYLSWALTELATFVVRYNPEAKRVYVRYFNRSRLRVKAIRSVAAKIARGIFMMLKNGEVFDMKRCFGG

SEQ ID NO: 316116 - protein, 358 aa, unidentified
MKAQVKKIDFTDQNIYAGFDAHLKSWKVTVMAEGTVYKTFTQPPKPEVLFNYLQENFPGGTYHTAYEAGFCGYWIHDKLVSFGIKSIVVNPADIPTTDKERVQKEDKRDSRKIARSLSSGNLTPIYVPSIKTQQDRTLLRTRTMLVRDMARYKNRIKSFLYFYGIDIDDSFINPQSHWSNRFMSWLESIDTGETSGKEALNVLITECKNLRSSILRITKQVRQLSQTDPYQEYVILLRSIPGIGLLTSMIILTELETINRFKNIDKMCGYIGLVPSTKSSGEKEKTGDITPRGHSVLRTAIIESSWTAIRNDPSLMRSYLSYRQRMDENKAIVKIAKKLLSRIRYVLINKKPYKCSVV

SEQ ID NO: 316117 - protein, 344 aa, unidentified
MYEIKRIGLDTSKAVFTLHCVDQTGRQVLQTNLRRAQMATFFNKLAPTEIALEACGSSHHWARELAALGHQVCLIPPQYVKPFVKRAKNDRNDAEAICEAAGRPGMRFVPVKTTTQQAQGMVLKVRETLVHQRTQLVNALRGHAAEFGVIAAKGTSQVILLLEAIAAETTIPPEAREMLALLGQEIEHLETKLDEIEMKLTAAHKANPVSQQLATIPGIGPIIGLTLAVEIDPAAFQSGRHLAAWIGLTPKEHSTGGKQRMGGISRAGNEQLRCLLVTGATAVIRFATRPGNKHASEWLLKLLQHKPRKLVAVALANKMARIAWAMMKSGETYRRSQAAATVAA

SEQ ID NO: 316118 - protein, 339 aa, unidentified
MKYTPVGVDIAKHLIQVHFIDENTGEVVDKQLRSRDFLEYFSNREPCLIGMEACGGSQHWARELTKLGHKVRLLQARFVKAFVMGNKNDVMDARAIWMAVQQPGKEIAVKTEEQQSVLVLHRTRMQLVKFRTAQINALHGTLLEFGETIHKGRAAMEREFPEALERMKERLPPYLITVLENQYKRLNEMDSLIEDIEKQLASVAKQNETCKRLLDIPGVGPLIATAAVATMGEASAFKSGREFAAYVGLVPKQTGSGGKIRLLGISKRGDTYLRTLFIHGARAAALLTKEPGPWITELKKRRPASVAIVAMANKLARTVWAIAAHDRKYDRNHVSIRPY

SEQ ID NO: 316119 - protein, 352 aa, unidentified
MPAVKPPIVPLKYVVGIDIAKDSFVACLGYLEASQQLHFGKEATFDNTASGFADLLQWVAKQQAADSPRWFVVEATGVYYEELAYFLADNQQLLSVLLPNKVKYFARSTEQKSKTDQLDARLLCRLGLERALPAWRPPTPALRQLRGLARERQVLTRQGAQLKTRAHAYAHSYQPDSRTLARLSAQQQLVVQQLKALDQDLADLLTAEPELARKLAHLTSIPGIELTTVIVVAETSGFVLVENERQLTSYAGLDVVQRQSGLSTPATRISRRGNVRLRTALYLPAVSSLRYNPQQMAFYARLRARQPSGKPGVIAVMRKLLVLCYSLWKNDCAYDPHYHPAHVAEKEVAPTT

SEQ ID NO: 316120 - protein, 430 aa, unidentified
MKSNTQNAKIEAITEKTLVLGIDVGSETHYARAFDYRGIEYSKKPFKFSNTEAGFVTFKEWILDLKERHEKDKVVPGMEPTGHYWFNLGKFLQDNEMKPVLVNPHHVKKSKELDDNNPTKNDRKDPKVIAGLVREGRYMIPYLPDGVYADLRTVSNIRFQLQAELTRIQNRISRWFNIYFPEYKTVYGKPDAKSGMLILKAAPLPEDILTLGIDGVNQIWRDAKLRAVGKARAKTLIEAAKHSVGSKEGAVAARMEIRMLLEDYESRNICLQEVMTLIEGLVKQIPMAEKLLEIKGVGIRTVSGFLAEVGDISRFNNPKELQKLAGLALVENSSGKHKGETTISRRGRKRLRYLLFEVAMSLVAKNLEFRELHNYYTTRRLNPLKKMQSLMAIAAKLIRVFYAMLTKGVDYDPKKMVNDIKRPAVYLQTA

SEQ ID NO: 316121 - protein, 450 aa, unidentified
MSPLALDVVTKTGKTPVLGRMLSKYVGRKTSSIENDITKARNHSRQRGNIMRVVFGIDVSKASSEVAILVNGEKIHGYTIPNDAIGFNRLLEDLGTVYQPEIVFEATGVYSRRLQAFFEDNSYAYIRLNPLESKKQLDSLRVRKTDKIDAEKLATSQFILNRKPSYVQEALYQELRDLSRFYQNLTEDIVCSKNRLHKVLQVTFPELENILSSPTGKQYWNLVMAFPCNSFVLELDDAALRAIIRQSTSKRISENRVTYLVDKLTKLANHSYCAVKKTSPMMEEVKYYAGELLRLSEYRQSVLEKMITLAQPLPEYEILLSIPGIAETTATSIIGELGDIRRFHSANQINAFIGIDLRHYESGDFLAKEHITKRGNPYARKILFKCIHNIASASHTNPCHIADFYEKRKRQSQVTSTKPHTIASIHRLIRTMYYLITHNKLYDYTSTQNR

SEQ ID NO: 316122 - protein, 353 aa, unidentified
MKCDKYIGMDVHQATTVVAVLDATGKLILDTIIATEAAALIRFLQSLSGALHVTLEESTPAAWLYDVMRGFVAEVIVCDPRRNKLLTEGSKGDKPDARKLAELLRAGMLRPVYHGQQATRGLKEVVRGYETVSSDMQRTMSRIKAMFRGCGIPTGGRGVYQQGQRQEWLERLTEPGRRQRVQWLYQQLDQLRPLRRQVKQTMLQEGRKHRAVALLQSIPQLGPVRATVIVATIDTPHRFRTRHQLWSYSGLAVVTHTSAEYEIKEGRLVRSRKPIATRGLNRNCNRRMKEVFIGAATGGSQTEPYRSYLQALQSRGVGKEMARLTLARKIAAIALVIWKKGETFDLQKLNWTT

SEQ ID NO: 316123 - protein, 434 aa, unidentified
MSEFLNDFIVGIDVSSEFSVVAMLEPNGSLIRKPFRIDHNPAGFNKLLGILKKEEERLKQKPIYFVESTGIFHLPLFFFLKSNDLKGFVLNPLCVHSTKNFDLRKVKNDAKDAESIARLAKFQDVKYSLVPEPQILSLRMLLREYYAISDMLTELKNRLCTDLYLLFPGYLDVFSNPFGKASLKILRDYQTPQAILSENPDTLAQMIAKTSRKGLIWGQKKVAKLVAMAQLCLSMPMEFSILSRKIQYHLDGIETFQANLEGLKDELAGMISNADFPKNVRDSIILLEAMPGIGFLTAATILAEIGDFSRFHSPKALVAFFGIDPSVNQSGKFNGDRNKISKRGTRFGRRVLFTAALASIRTTCKGDPINPVLRDYYQNKCQNKKKKVALVAVMHKLLHYIFAVLRDQKPFEFRSPEDHQSWRNSSHSSLILAA

SEQ ID NO: 316124 - protein, 355 aa, unidentified
MNSEKYIGLDVHQATISVAVLDSTGKLVMESILETKAATILELFAGLRGTLSVTFEEGTWAAWLYDVLKPHVAKLVVCNPRKNALLKDGNKSDRIDAHKLAELLYLNKLSSVYHGETGVRMLRELARSYLTIVKDLTRVMCRLKAVYRSWAIPCAGRDVYYTRHRDEWLGKIKEAGVRRRAERLYQQLDMLQYLRQQARRELLAESRQHAITVKLRQIPSLGPIRSALAVALIQTPHRFRTKRQLWAYSGLALETRTSAEYCYVKGGLRRSKKQISIRGLNKDHNHDLKGLFKGAATRASVLPGPFQDFYQRSLAKGIKPTMARLTLARKIAAITLTLWKKGENFDADKLKSQAA

SEQ ID NO: 316125 - protein, 354 aa, unidentified
MKHLQLKDGDRLRRQCIGIDVSKKKFTFCLCQSTEQDLHFYTKPKEFENSEPGFRHLLAWSGNEVDSSVPYSFLMETTGCYHESLALFLARKGMTVIIVHANKAKNFARLNGQRTKTDPVDSKMLATMGCDTPGLKPWPIPDEKYLQLRDMSRLSEQLEKTRTQVLGRMESVTYSGYVTKSVLKAHKTLLKSIEKVQAANEQDMAELVNGDPVIKAGVDNMESIKCIGKKTAILVTAETLGFHQMTSAKQVASYAGLDVKKEQSGDSDKKGHMTKRGNAHLRAGLYFPAMVASWCNPQLMEDYNRICASHPQSKNIALVALERKLLCLMYSLWKSGKQWNPEYGQDKKQEEAMS

SEQ ID NO: 316126 - protein, 348 aa, unidentified
MQVTTLGIDLAKNVFCVHGCDANGKPVLRKQLSRRQLLSFVANLPQCLVAMEACASAHYWAREIEKLGHQVRLIAPRFVRPFVKANKNDASDAEAICEAASRPSMRFVAVKSTAQQDVQAVHRVRQQLIKTRTALVNQARGLLAEYGIVVAQGVSRLRRALPAILEDRDNGLSGVMRELLAEIAERLRFIDDRLRKYDLTIHRLFRQDERCQRVAAVEGVGPLSATALVAAVGNATDFKSGRELAAYLGLVPRHRASGGRTVLLGISKRGDRYLRTLLVHGARSALYRIERQRGARAIWAARLKLRRGANVAAVALANKNARVLWALLSRGQSYQPAPFPARVPQAGG

SEQ ID NO: 316127 - protein, 322 aa, unidentified
MLNEKGKKLKSGRVANYRSELEKFLDGRGEVKAVVEAGRSSYTMVDLLDELSIDVTIAHPKQVKAIAKAKIKTDKRDSFMLAHLLRTDLIPEVYKRSRENRGYQRILRQRAFYVGSTTRTKNKIRALLAQQGEELRDKVSRKKNLFTGSGVKFLKTLNLPDTDKKLLSALLKTFSHLDERKKETNGLVEKLYLQIPEARLIHTVPGYGVFLSVLTAVEIADIERFSEVSKFHSYAGVIPSTHSSGGRTYHGKIVKQGNRWLRWAAVEAVWPSLKADFDMRCFYNKLKKRKGPNPAKVAAARRMLTIIFRVLKENRPYISYKR

SEQ ID NO: 316128 - protein, 350 aa, unidentified
MKIVGCDFHPSYQQIAVLDTETGEVLEKKLMHANGEAERFYRELQGPALIGMEATGNARWFELLVEKLGHELWIGDAAKIRASYVRKQKTDKRDAAHILKLLVEKRFPRLWVPDGQQRDIRQLLTHRHKLVSVRTRLKTELQHLALNQGVQKKRQLWNENGRALLASLPLQGWTQQRRKDLLQLLAVVEPQIVQLDKAVEQAAKTDAQAVLLMSQPGVGPITALAFSVTIGDVSRFERSKQVSSYLGLIPTEHSSGSKRRLGSISKQGNVFLRALLVEAAQSVVRHDPGFRKEYQHRCHHKVKGIAKVAAARKLAVRLYWMLKSNKSYSELVLNGGSPRHPVAAKAKPLT

SEQ ID NO: 316129 - protein, 347 aa, unidentified
MKFYTTFHQYYCGIDLHARLLYVCILDERGKKVLHQKIKADPKKLHQLLKPYIGKIVVGVECMHCWYWVSDFCRDIKVEFILGHALYMKAIHGGKAKNDKIDSYKIASLMRGGNFPLAYNYPKEYRATRDFLRRRTHFMRHGASLKAHVVNTDSQYNLPAQSLNLKNVSAREGLRHHYNNPVIQRMITFEMNILDCYIRELKHVESFIEKEARDDFPVLGNIIRTFPGIGQIIGLTILYEIGDIKRFTSVQKFASYSRLVKCKAESAGKVYGTSGNKIGNGYLKWAFGEAAVLYLRNNDKAKRYLMKLQKRMNKAKALSALAHKIGRCVYFMLRDKKVFDEKKFLKG

SEQ ID NO: 316130 - protein, 324 aa, unidentified
MIDGILGIDVCKNTLDVSISSYAKVRTKSFTNSPDGWRHLLDWLIAQKIQRVHACLESTGRYSLGIACALYEADHVVSIINPAQIRDFVRTKLGRNKTDGVDASHIREYCELFKPSPWAPPSEAHRRLGELQTIRSGIIAGLTEWKNRKNSGIVDAEAQALADATISHFTSQLAAVDKAIALTIDNDCDLQSKRDLLLSISGVGETLAGVVLAELPGPDVLRSSAEVVAYAGLNPRRHQSGTCIDRATRISKIGNAVLRAALYMPALSAMRYNSAIVALVTRLKSRGRLKPKQIVVAAMRKLLVLCFGVLKTGRPFDAAIAMGG

SEQ ID NO: 316131 - protein, 355 aa, unidentified
MNKINSNFEGQTIFVGMDVHKSSWNLGIHLNDMFVKNVHQRPNPTVMANYLKQHFPGANYKAAYEAGKFGFWIQRQLTSLGIECLVVNPADIPKSQKDSLQKTDPRDARNLGLRLQSGVLHGIHIPDEQQEADRMFFRHRKRIWKDLCRCKNRIKGLLAFTGIDIPDQYDNASWSHNFINWLKAVDCKQKSRRRALDYMISQMEYLRKELLTISNEIRKMMREQRYKTNYYLLRTIPGIGPLTAASILVEIGDVKRFETFYHLNSFVGLLPMEHSSGQSENKLSLTVRKHRQLRSDLVESAWTAKRTDPAMALYFQEQIKRKDSKIVIIKIARKLLNRIRFVLINQQPYELGIVK

SEQ ID NO: 316132 - protein, 320 aa, unidentified
MTILTSPTVIGVDVAKAEIVVYREDLKIIQAINNDRTSVGHWLKTLPAQSSIALEATNLYHLDTAELAHGMGHRVYIVDPYRVSHYRESIGQRAKTDPCDARLLARYLTSEQHRLRVWNPPPRHYTVLKSLLNKRAQLMKVRVSIKLSWSTEPLLEDLLADGLKHFKQLDQAIQELLRKVSQEAGISENIRRCKAIEGVGELTATGLATTYMRGEFASADAFIAFLGMDLKAKDSGKKHSPRHLSKKGDGELRRLAHNAAMAACRSPVWKPFYDSYLARGLARTQALVILARKLCRVAFALMKNQSEYQPNLRLQGSPAT

SEQ ID NO: 316133 - protein, 344 aa, unidentified
MDHFAGLDVSVKETSVCILDDAGKILKEVKVASEPQALLKVLGNPAYRFKRIGLEAGPLSQWLFSALADAELPVICVETRHMQAVLKAQINKTDRNDARGIARMMRVGMYRPVHVKTLRSQKLRMLLTHRKLLQSKAIAIENDLRGTLRNFGLKVGMVGTVRFEARIQELVETIPDLAVLVEPMLVVRRALREQIVILHRRLLAIVRDDEVCRRLMTIPGVGPVVALTYRATVDVPARFRKSKSVGAVFGLTSSRYQSGEIDWSGRISRCGDEMMRTMLYEAAQSMLHSKKWSWLKAWAMQIARRRGMKRAIVALARRLAVIMHRIWIDGTEFRWTREPAMAAA

SEQ ID NO: 316134 - protein, 310 aa, unidentified
MSVVQFTQVLSRGCGMDIHKKVVVATVQGEGICKETRSFDTFTRSLTQLREWLVSLGITHVAMESTGVYWKPIYNVFEGFIPHIWIVNARHIKNVPGHKTDKNDSEWICQLLMAGLLKPSFIPPKAQRELRDLTRYRRKLIQSVSANKNRIIRILEDGNIKLSSVLSDTSGATAVKLIDMLCDGKQITLSDIESVRHGRCQHTKEEMLEACAGCLDEHKVYMLGKIRECNASLKEDILDFDKRIKDVLSSYHDAIERMCEIPGIQNRVCEDLVAEIGLDMSNFPTSAHLCSWAGMCPGNNESAGKKKSSR

SEQ ID NO: 316135 - protein, 359 aa, unidentified
MQTKSKNLFKDQSFFIGIDTHKKSWSVSIFGEQYEHKTFSQNPDPDLLASYMKKNFPGGHYQSVYEAGFSGFKSCRKLNRLGVDCIVIHPADVPTSIKEKLQKTDKVDSRKLARSLRAREIEAIDVPTKKLEADRALVRQRFRLVKDISRTKNRVKSLLFQFGIDIPGRLTSSQTRHWSKIYLNWLKELTIEESSLKQVFDNYIQIGELLRKELLSLNRQVREMSREATYKDNYNLLTSVPGISLMTGMTILTQLGDIKRFKRLDDLCNYVGLVPRMYGSGEKMVTGKMIKRGRKELKIMLIESSWQAIRKDPALMAKFNDLSKRMHKNKAIIRIARKLLNRVRYVLVNKREYVLSVVE

SEQ ID NO: 316136 - protein, 323 aa, unidentified
MSLSAVLGIVLAKQKFDAALLVDGKTKHKTCKNSVEGFEALTLWLTKQEVEKVHAYLEATGSYGEDLAVYLHDAGHIVSIINPARIKGFAQSEMIRTKTDKMDAALIARFCLAMKPKEWTPPLPEMRSLEALVRRVDSLIDMRSQEKNRLSTSHESVTSMIKEHIAYLDREIEKLRKQIDELIRKNPQLKEKEELLESIPVLGKATIPRLMAELDDLDKFNHVREMVAFIGLAPREKLSGSSIKGKPRLSKIGHAKLRKALYTPALVSIQCNPVMIDFYKRLKNKGKNEKVIVCAIMRKLVHVIFGVLKSGKKYDPNFKPILA

SEQ ID NO: 316137 - protein, 334 aa, unidentified
MLYVGLDVHSRQSSLCILNSSGGTVNQIQLKGPRATVVDRLRQLDQPFSICYEASCGYGHLYEALRPLAAHVAVAHPAKLRLIYKSKRKNDRVDAQKLAKLLLLDMVPSVHVPHIDIRAWRSLIILRQRVIAQVVRAKNQIRGVLRENDIAGPKWLWSKKKLAWLESLELHAVAKLRLELAIEEFKALDQKIKRLEAELQKYADRHPAVRLLMTIPGVGIRTAETFVAWVDDITRFRRTRQLGAYFGLVPCQDASADRNRLGHITRDGPPVMRKLICEATWTAVKKCPRFKQFFERVMGGKSERKKIALVATMHRMIKVMGAMLRSGESYDDAR

SEQ ID NO: 316138 - protein, 333 aa, unidentified
MEKLIHFIGIDVSKLTIDVAIIINNDIGRIIQLVFTNDSKGFKEFKNRLNKEKIPFPETVFCMEHTGYYSKQLSRFIIARHGNLWMEMSLKIIRSLGVQRGKNDKLDAKRIALFAQRNQQDFVPYNPPRLIVENLKTFLMLREKLINSKIALVVPVNELTCVDKAAGKIALKAISKALQGIKKNINTLDAKIDELIASDKELAEKFKLVSSVPGVARITFCYLVYFTNEFKNYTEAKQLACYCGVVPFEYTSGSSVKGKPKVHNMANKKMKKLLHTAALCAVTHYPEFKQYYERKIKEGKPKMLILNNVRNKIVLRIAAVIKNNQPYKTNIAA

SEQ ID NO: 316139 - protein, 343 aa, unidentified
MKDTIYDHYIAIDWSIKNMAIARMTKKSNKITAIDVPSDIEDLQAYLKNLRGTKILAIEETTTSQWLYAELKEYVDRILICDPNRNKLLNEGPKTDKIDATKLVQLLKAGLMKEVYHSTDKFLYLRRVVSGYEDLVKSGVRLKNQRYALLRACGKSGKEKTGSALGSQGEQFVLNCLDRQIEAYEKEKEGYEREFERLARKNPEIKHQKSLPGIGTINAVKIVARVVTPHRFADKGHYLSYTGLIKLEKTSGGRSYGKRSPRYSRQLKSVYKSGVLAAIAGNNPINNYYQHLIQEKGYPEHNARQKACRRLAILSLGVFKSGKKYQPFRRNHVKSSKEGTSGL

SEQ ID NO: 316140 - protein, 372 aa, unidentified
MKYTTKYVGLDVSKETIAIAIAEAGREKARYWGVIRNEPAAVRKLIRQLGKKEELEVCYEAGPTGYGLYRLLKDLGVSCVVVAPSLIPARPGDQVKTDRRDALRLAELFRAGELTGVYVPTVEDEALRDLVRAREDAREDVHRAKQRLIKFLLRHGIRQPEQLKKRWTMRYRVWLGTLKFELPAQEMTFREYLHAIHEAEERVRRIETNMLEVASEGAHAGVVEALQGLRGVAFLAAVSLVAEIGRFNRFRNPRQLMAYLGLVPREYSSGQTVRRGRMTKAGNSHARRIVVESAWSYRYPPAVKGSLAKRLAGLDGDIQMISWKAQMRLHGKYKQLVARGKQKNVAVAAVARELVGFIWAVACRVENEQQGV

SEQ ID NO: 316141 - protein, 343 aa, unidentified
MKYIGLDLHKKSIFATVLDGEGKILSKTQIGAKSRDITYYLKRQGKKDELSVAMEASYNWPYYYRAAEEAADTIVLAHPLKTRIIGEAKIKTDKIDSAALAYMLKADMLPAAYVPSRATLENKLLLRSRISLVRIRTQVKNKIHSIVDRNTDSYSYLENMSDIFTKTGIKILRDTKICPTDYSILKGYLDLMDEINKKIKDIESQIDEKSIEDSDIELLKTTPGIGTFSAFLIKSEIDDIHRFTSKEKLSSYAGLIPSTHASGARLHHGRIVKQGNKFLRWALVEAALTAVRCSEYFRYHYSKVKSRKSANSATIAVARRMLEVIYAMLKENREYIEKPVDIK

SEQ ID NO: 316142 - protein, 344 aa, unidentified
MAEDPSSVIAVIGIDIGKNAFHVVGLEGRGAIVLRQKWSRGQVEARSANMPPCLIGMEACVGAHHLSRQLRALGHDARLMPAKYVRPYSKGQKNDFRDAEAIAEAVQRPTMKFVATKSADQLNLQALHRVRERLVRQRTGISNQIRAFLLERGVAVRQGLRVLRAELPGILARRCDVLSPRMVRLIEDLAGDWRRLDERIESLSGEINALARQDAGCERLMSVPGIGPIISSAMVAAVGAGDAFEKGRDFAAWLGLVPKQISTGDRTILGKISKRGNRYLRALFVQAAWVVLIKPKTGSATVSNPGSRLPKGGCTTMCWRSRWPTSSRASPGAFWLVTAASRQG

SEQ ID NO: 316143 - protein, 350 aa, unidentified
MNRYIGLDVHSASCTAGVVSANGKRLSSTVLETNGKVLVEFLRLLPGDLHLIVEEGTHAAWLHEILSPHVKDMVVMSVLKSKGQKNDKLDAFGLAEKLRTGSIERRVYKGQGELSTLSSLSKAYRNVMVDSVRVMNRIKGVFRSRGISTSDGQVYCLKTKDQWLNKLPLKMRPLASTYYTELDVLLSVREQALKDMLKEAKTHQIFHILQTVPGLGPNRVAEMMPIVITPYRFPNKRMFWTYCGLGVVMRSSSDWIRAADGSWLRTNTEKTRGLNQNHNHNLKKIFKGAATTVIGQKRLEEPIFQHYLSLLENGTNPNLAKLTIARQIASVTLCVWRSKVEYDAKKLKKK

SEQ ID NO: 316144 - protein, 313 aa, unidentified
MNTIGIDVSKDTFHAAFSDTEVQIFKNTRSGIQKFIEILIEKSFVAHDTEIGCEATGVYHLLLCSELKKASWTIKVINPLITHRMISSSLRSVKTDRHDAIAIRKTLFTGAGYAYLDTPEVLALKTLVQERDALCRMKAELKLRIHAHKIKAEAANLPFHDSFTGTLKLLSYEMRQIEKKLCEYVPDTQKLLRSIPGVGLMTSAMLVAHIGDIKRFSSAEKLTAYIGLDCRVHQSGISIHGKGYLSKRGNRHLRCMLFNAAFIARQKNPDLKRYFEKKISEGLHYTKALCAVERKLVHLIYAVWTRGTPFENR

SEQ ID NO: 316145 - protein, 411 aa, unidentified
MSLPESSFYVGVDWAAEAHAVCVLDAAGRIKTQFTITHTAEGFADLLRRLGKLADEPMDVPVAIERPDGRLVDALLEAGHPVVPVSPNAIKAWRDGEVLSGAKSDAGDAAVIAEYLRLRAHRLRPAAPLTAETKALRTVVRTRDDIVEMRVAATNQLAALLDAHWPGARTIFADIESPIALEFLTRYPTAAHAERLGEKRLHAFCVKHGYSGRRPAAELLRRLREAPAGTTQDTLVEAVRDAVLALVSVLKALGAARKDLDRSVAAHLGEHPDGPIFTSLPRSGQINAAQMLAEWGDSRAAYDGPDAIAALAGMTPVTTQSGKHKAVHFRWACNKRFRKAMTTFADNSRHASPWAEHIYRQAIARGHDHPHAIRVLARAWTRVIYRCWLDGTPYNPKRHGNATKLNQPIAA

SEQ ID NO: 316146 - protein, 412 aa, unidentified
MSIALPNQQFVGKPYKILHNSIDSLTTAVSKIKEAEELYSLESRIFLESTGIYHYPLFCYLRDKGFNCSVINPIITKNSTNINIRKVHNDRFDSKKAALVGLKPDLKVSLMPSDLALNCRNLCREYYDLMDNRSAYVNKLQGELRMAFPQYLSIFSKVTINTSLTLLETYTSPSAFLEADKQEIIDIIKSTARFGLTYAQNKYNAIIQAATDANQFGYIIDSNIKRIRLYISFIRKYDEEINNILESLHELVDANEDADFVKQIHLIETFKGAGFLSAVSIMGEIGDFSAFSKPKQLFAYFGLDPAVKQSGKFEGTKVQISKRGSAIARRVIHTLTLQSISISRNGEAKNPVLREYYLKKCDSKPKLVAMGAVSHKVCNMIFAILRDNKSFEIITPQEHIKQYNASKCDMAA

SEQ ID NO: 316147 - protein, 345 aa, unidentified
MCEYIGLDVSLKDTAISIRRDGKRVWRGKCASDPKTIAQLIRNHAPRAKRVVFETGSLSTWFYHALVAEGIPAVCIEARHAHKILKETLNKTDANDADGLAHLAEAGFYKAVRVKSFNAMLTRSLVLARSRLLDISTGLRNQIRGIMKTFGLIVPKGAGRVFDHNVRMLLEENSNLTEIILPLLKAWRDTRKHAAELDRQLRAAARQNSAARLLMSIPGVGTVTSTSFVAAIEDPKAFRNARSVGAWLGLTPRRYQSGEVDYDGHISRRGDNRLRGLLYEAATAILTRTSARHVSRLKDWGLKLRERLGFKRAAIAVARKLAVIMHTMLRTGESFDAQGGGAFAP

SEQ ID NO: 316148 - protein, 345 aa, unidentified
MNQIIRIGIDTSKYIFVLHGVDAREQVALRKKLSRKQVLEFFAKLPPTVIGMEACGASQHWARELSKLGHEVKLMAPQLVKPYVMRNKNDGRDAEGLCEAMSRPSMRFVPVKTAEQQAALMLMGVRDGLIVRRTQLTNTIRGHAAEYGLIAPKGLDAIEPLLARIAQDETLPVLARELFVVLGRERIRLEGELEAIEAKLMAWHRADATGRRLAQIPSVGPIVATALVMKTPDPRAFRSGRHFAAWLGLTPKDHSTAGKTRLGKITRAGDEDLRRLLVVGATAVIQQAGRGRGHHSRWLLALIKRKPPKLAAVALANKVARIAWKLMATGESYEAARMNPMTAAA

SEQ ID NO: 316149 - protein, 347 aa, unidentified
MKFYNQQHKYYCGIDLHARKMYVCIIDQKGKTKVHQNIKTDPELFFELIFPYLDDVAVGVECVFCWYWLADICNIHKIPFVLGHALYMKAIHGGKTKNDKIDSYKIASLLKGGNFPTAYPYPAKWRATRDLMRRRMYISRRCGELVAHIQNTNTQYNLPAFRKKLSRKYNHDGVAERFEDPEVRKSVEVDLAMIDSLNLILKKLEWHIEKTARQHDYHTLYLLRSIPGVGQILALVILYEIHDIKRFPRVQDFSSYARLIRPVKESDGKWAGHTNKKIGNHHLKWAIKEAAILMLRDSAQAKSYLAKYERKYNKGKALGIFTHKLGRTIYFMLKNKEAFDMKRFFAQ

SEQ ID NO: 316150 - protein, 466 aa, unidentified
MPGPTSSLSSRRRKDLTRRLWSNNPGLDVVHSHAAGIDVGGREHYVAIAAPVPEPVQRFGCFTADLHRLARWLQEHGVRTVAMQSTGVYWIPLYDVLESYGLEVFLVNARDTKNLPGRKSDVQESQWLLKLHTYGLLRNSFRPASEIRVLRAYWRQRDTQVKAAGHCIQRMQKALAQMNVQLATVISDLAGETGQRILRAIVAGERNPEKLATLRDQRIRASEEEIVHSLHGNWRPELLFQLRQELALYDFYQQQIKECDQELQKQLQTLPTPTGRLTPEQKPPRRGKKRPQGNAPRFGLAAELERITGVDLTRIDGVDVMTVQTVISEVGLDMNRWPTEAHFASWLGLCPHNEVSGGKVLKRNTRKVVNRAATALRTAASTLRRSRTYLGAQYRRWVSRLGPPKAVTAMAHRLAVLFYRMLKFGQEYTDRGEAYYEQRHREQQVRSLQKRAAQLGFQVVAVGATE

SEQ ID NO: 316151 - protein, 319 aa, unidentified
MGKNKVEYEQVIDRGCGLDVHRDTVVATVMGRGIKTETRTFGTTTSSLNELGEWLESLKVTDGAMESTGVYWKPVLHVLRAFPLNLIVVNARHIKNVPGRKTDKADSQWICKLLISGLLKGSFIPPENIQELRDLHRYRKKLIGVVASEKNRIVRVLEDANIKLSSVMSDTSGVTASYLIKGLIEGRKDLEKLISECYHRKLQASPKEIKEAINGRLTSHHAFILKSMQKHIASVEEQINEIDQEIEKYITDFEKEIELLQTIPGVGKDGAIGIVSEIGVNMEVFPDEHHLASHSGMCPGNNESAGKKKVQKPGMGIKT

SEQ ID NO: 316152 - protein, 400 aa, unidentified
MDKDRIVAGLDVHKDTVYLCVLDTAETVIFANVYGTLTPDLQLMCSDMVPHGVTEAAMESTSTYWVPVWNALCDSMSLKLVNPYFIKQLPGRKSDVKDAQWIAECLLKHLIRGSFVPEKTVQDMRKYNRRIFDLNEDLTYNTNKLDAALQRCGFRLSNYVSRVNGKSYQKCVRAIITGITATEELVKLIHGKTLRKYGLNIIKDAVTGDFHQADICLLKQYAELIDVIGRQIEECRQALIAMCQEHFPQQFKRLQSIPGVKERAASAIIAETGADMKSFEKATNLVGWCGLKPRNDISNNKVKSNRTTHGNRFLRQILVEISRVASRTRNCFSSNFSCVQCTQRHKNKMKIQVAIARKLLVAVWHMLTKEEDFMDVYLKRLEKEAEWQNKIRELESLLVG

SEQ ID NO: 316153 - protein, 420 aa, unidentified
MDVLVERCAGIDIGKDEVVACVRTPGPGGRGRRKQTRTFSSFTETLEEMADWFLAEGVSEIAMEATGPYWKPVWYVLEDRPFDEMRLVNSRHVKILPGRKSDVLDAEWLAELLEHGLLRSSFVPPPAIRQLRDLTRYRKRLIQAHTAEVQRIQKTLEDAGIKLDSVAADILGVSGRAMLTALVAGERDPEVLVQLARGKLRTKIPALRQALRGRFGEHHALLIGLSLKHIEHLEGAMAELDQRIDALFATATSEAGVPFAQARDRLDTIPGVGKRAAECILAEIGVEMARFPTAGHLASWAGMAPGNNITGGKRHSGKTTHGDVWLTSILTECAWAAARTRNTYLAAQFWRLAHRIGKKKAAIAVGHSILVTCWHLLTNGCDYTDLGGDYFTRRNPDRHRDRLIQQLHDLGYRVTLDRVA

SEQ ID NO: 316154 - protein, 444 aa, unidentified
MMTELPVLDSRAAFCDVGSEHMHVSIAGGLPKVFGTFTSQLHELRDWLLGEGANSIAMEATGVYWLPLYGVLESAGLEVVMVNGRQTRNLPGRKTDMKDCQWGATLHAHGLLKAGFVPPAHIRKLQDYQRLRTDHISSAASHVQHMQKAFERMNIKLHSVISSLMGSSGLAIVHAILDGERDPEKLLELCHSTIRNKKAKDVIEALRGTWEAEHLFALRQALQSWEHYQHQIAECDQQIELLLQEITFNEQEGDGIGEKPKATPGKRPSPNAPQISGLHSMLIDLCHGKDLSILPAHTDYSVLQIISEVGTDLSKWPTEKHFAAWLGLAPGTSQSGKRKSNVKRSRSKVGKYFCVMARSLARSKDMALGGFYRRLAARRGGLIANIALARKLAVLFWRVMVKGTTFVEEGLAAYEAKFLEGKKRSLRRLAKELGQTVSPIPVKV

SEQ ID NO: 316155 - protein, 351 aa, unidentified
MPRTTTLHAVTVIGIDMGKNTLHLIGLDARGAIVLREKVARGRIALRLANLPPCLIGIEAGMATHYVARELAALGHDVKQVPATYAKPFRQGHKNDFRDAHAVAEAVQRPTTRFVPAKTNEQLDLQALHRVRSRLVSERTAVINQIRGFLLERGIVVRQGLRFLRQQLPDILAKRTDVLSPRMARIVADLANDWRRLDERIETVTDEIGTLAKSDDSCRRVMTVPGIGPIISSAMVAAIGNGAAFARGRDFSAWLGLVPKQMSTGDRTILGRISKRGNGYLRTLFMQAARVILLRSANWPKHGFGLWLVRAAQRLHPNVLAAALANKLARIAWTVLAQERSYEARVTKAAA

SEQ ID NO: 316156 - protein, 422 aa, unidentified
MVEDTDEPVELVERVAALDLGKAALMACIRVPDEDRPERRRQMVGEYATTTGALLELADRLRCQGVTLVAMEATGDYWKPVFYLLEAEGFECWLLNARHVKNVPGRPKTDKLDAIWLAKVVERGMCRPSFVPPKPIRQLRDLTRYRRILIRERTREKQRLHATLEDAQIKLSSVISDIFGVSGRQMIEALIGGQRDPKALAQMARGSMRAKIGVLEEALRGHFDDHHAFICQMMLERIDGLTGQIEELNAKIDQVIAPFDHQVTQLDEVAGIGRISAQELIAEIGVEMSVFPTSDHLVSWAKYCPQPKESSGRKKNSSTGKGNPWLSGTLGEIAIAASRTHTFLGERYRRVARRRGKKRALVATGNSILTITWHLLSDPEARYNDLGPDHYQSRINRDRQTRNLLRQLEHLTGQKVTLQPAA

SEQ ID NO: 316157 - protein, 395 aa, unidentified
MKTVCGLDVHKDTIFLCILAGNGQVILREFTTLTCDIILMLNLIQQEHVSEVAMESTGVYWIPIWRILQGHVSLKLANPYYIKQLPGRKTDVKDAQWIATVLQKGLVRGSYIPGKHIQELRQYERRYVHLSEQLTRIEQEIDRQLNRCNIRITSYASTVGSKSVMKVVKAIIDGESTADQLIRHIHGRIVNKNKQQVFSSLEGVISGTDKFILSQCYQEHELISRLQLECTEQMQQVCDSYFKDELSLLCTIPGIQKLSAMTIIAELGVDLSTFPTSAMLVGWAGLRPRNDESAKKIKSRKITNGNKYLKRILVQCAWAITRTKKCWLSGKYNELAKRKSHKKALIAIARKLLVIIWNILSKHEVYKEYIPYISLEKKQKRIDYLQKQLLELQII

SEQ ID NO: 316158 - protein, 389 aa, unidentified
MTYFVGIDIAKSEHVASILDSSTGELIVNSLHFDNNLKGFNLLLSKIAMLNKEDVVIGFESTAHYHLALFNFLNENDYSCVLVNPLQISRFRKISLRDTKNDNVDSRTIACFLLLEHQNILEEEFYNNELKELCSQRFFLVQHSSKLKIKLVSYLDRVFPELQTTIPAGTLHTMGLRAILKKYPTARQISNVRIDHLVNVAKKASKGRYKESVVIKIKDAAKSSVGFDSPGLALKIRQSIESLESIERQIDEVESFINSHHTIINSPLHKIKGINSIEIAYIMSAIISINRFGSEKKLIAFAGLDPKIRQSGTWVAKSTRMSKRGNRLLRYALIWTANNMRRHPSKMKDYYNKKRLEAKSHYCALGHCAAKLCRYIFFILNNPDVEFIN

SEQ ID NO: 316159 - protein, 373 aa, unidentified
MSTTPVQFCPMLAIAVEMSGATWLVGSCAGTKLRRKAVSDEAPLVRMRSLLAEVETALKRFGAGEHTRVVVAYEAGQEGFWLVRELRARGIEAEVIDPVSLKVDRRGKRAKTDRLDVEALARALYAWMAGDTTALRMVRVPSKEDEDNREWQRERDRLTSERRSCLDRIGKKLRTHGIWRWDRVALTQGTLRCADGTPLGRMLQETLRMELDRVEKAEARLDVLNAQVAELTDAAHSRIERLALLRGIGEIGGRGLALKLYWRDFNNRRQVGACTGLVSLAYDSGTMRQDQGISKQGDPSLRALLVEVSWLWLKHQPTSAISAWFKRRTEGQGKRHKRSMIVAVARRLAIALWRYLKDGVVPEGATFKAGRAI

SEQ ID NO: 316160 - protein, 371 aa, unidentified
MQQSITFVGLDAHKDSIVVAMLLPGRSVPLEWRIVNEPGAVRRLARKLEREAPGPVRACYEAGPCGYVLQRQLAEQRIACAVVAPSLIPVKPGQPIKTDHRDARKLAEPFRAGLLTEVHAPSEDEEAVRDLTRAREDAQRDLTRARNRLSKFLLRRGCIYRVGGRPTWSRKYRVWLHGLAFERAADQVVHEDYLLAVEQTEAQLEALDAELEKLSAHERYRAPVAALRCFRGIDTVTAMALVAELHEPRRFHGARQLAAFLGLVPRESSSGDRRRLGGITGAGNRHVRRLLVEAAWHYRHKPQVDRSLRLRRRGQPPAVIALADRALRRLSLRQRRMLYQGKHPNTTTVAIARELAGHVWNAMLAVTPARG

SEQ ID NO: 316161 - protein, 408 aa, unidentified
MNTLYVGIDVSSKSNVVYLMLPNGDKHSNFSVANSHEGSTLLVKKIYSALTSHSLDTVLIGLEATSVYGDNLVYFLREDATLAPFNRKIHVLNPKQVKKFHDTYNDLPKNDYVDSFVIADCLRFGRINKEVYMGDYRYKALQNLTRARFFAVQNLVKEKQRFMNVLFKKYSTMTQEKVFSDAFSTTALAVYDEFESAEALANMDLHELTDFIIEKGKNRFPDPDAVAKAIQKAARSSYRLPKTVNDSVNQVLSISITSMKALESQIKEFDKAIKAQMELLPNVLISIPGIGPVYSAGIMAEIGDINRFNSQAALAKYAGLAWKQHQSGGFESEVTRLIPSGNRFLKYYLCEAAFSLVRCDKEYSDFYHLKYKEVNRCQHKRALALTARKFVRLVFRLLKDNRLYCPAK

SEQ ID NO: 316162 - protein, 400 aa, unidentified
MKGPIVSIDVSNGNSHFQCFTQRGTKMGKVHRISHTVEGFNCLKSKIEELEKKTNEEVVAVYEATGVYTKPLERFLEKNEIKQYSISPLQSAKQRKTEIHNKKTDKKDPESIAEVYYIKELREDEKEADLYHELRTANRVYEDCLVHLRKYKVTFQSHLSIVFPGYMKLFQDGYSQISLQLLEMYPHPDRLKNKQPEKVAKKLNKHTDHSFEVCLKTAEKAIAFANKTYPGCDKEDAWVAVLVDDIHHLQDTMEEAEAKLDKIIELAKATPYYSIILSIDGIGPNLASRIIAEFGDISKFKTRGAMVAYMGNDPNRAESGDIEGYHLSISKKGNKRLRCILYLAVTCSIRSRKENPINAFYQKKRQQSTPLKSKAAKVACITKLIRTIHGMCKTGTVFTS

SEQ ID NO: 316163 - protein, 426 aa, unidentified
MKLEEKEQEKSIRAWIGIDWADEKHDVSLYDIATEKQEIATIRQSPEALQEWLGQLRRRYEDGYVAVVLEQGRGGLLNALMGCEFLVLYIINPKSLSSFREAFYGSGATSDPVDAELMREMVRQNPSRFRAWRPDDVMTRSLRLLTEGRRNLVNQSTALTNQLTALLKGYYPQALAWVGRLDTAWACDFLGQWPTLQSLQASSRRQILRFYEKHPRASLDLSEQLKQIQNARALTQDEAVLESSALMVQALVSQLRPLLASIVEFDRKIAMIFRKHPDRPIFESFPGAGAALAPRLTAAFGTDRDRFQAAKDMQELAGIAPVTEKSGKKKFVHWRYACPKFMRQTFQEFADHSRRWCKWAKVEYELLRKRGKSHNAAVRALAYKWIRILFRCWKDRKPYQDEIYTKALLLHGSPLASLLAECVENP

SEQ ID NO: 316164 - protein, 423 aa, unidentified
MTGVSTESSSFVALIGIDWADQHHDMALRELSTGGVERMRIEATPEALAEWLSELRKRFQGRRVGICLEQARGALIHALLEHDFLVLYPINPATLDRFRKAFSSSGAKSDPRDAHLLLELLEKHRERLHAWTPDDPDTRALTRLVEARRKAVDLQTQFVQRLTAELKGYFPQALEWAGSLTSPMAHDFLRRWPTLQAVQRARESTLRRFYSTHHSRSAEAIQMRLKQIRQAVPLVNDRAIVDTSVLTVQLLVEQLSVLVRSIRTYDAEIQILFERHPDAPLFEGLPGGGSALAPRLLGAFGTDRSRFGSARDVQQYMGIAPVTEASGKSRWVHRRWAAPKFLRQTFHEFAGHSIRYSGWARAYYDQMRARGLGHHAAVRSLAFKWIRILWRCWQDRTPYDESRYIEALRQRGSPLVTRLAAAA

SEQ ID NO: 316165 - protein, 386 aa, unidentified
MVAHYKDEVLVKEMVIQNNQNGYRYLKNYIKHLDSLFILFESTGIYSRGMKRFCEIHKIDYLEMNPLEAKFKTSSLRSWKTDKSDAHKLALLAFRMKDSKVQRQSEEIYFELRERARFHLEMEINQNRLKVELVETLHQTFPGLEKLFTNRYSKIALNIAKAFPHPDFVSTLTHDELVEKVLHSTDKGISVNKAHKYVQKLIEIQINSFPNVDKSSFLLQKVQYLCDKLLIGIEEMKEFDQEMIDLAKNTTEFENIISIPGIGELTAALLIGELGNIREFKTNKQLNAFVGIDIKRYQSGTSKSRDTINKRGNKKARRLLYLIIMNIIRGRNHYQSHIVDYYYKLREQPHGKTHKTAVIASINRLLKTIHYLIVNNKLYDYQKAPH

SEQ ID NO: 316166 - protein, 465 aa, unidentified
MTPHKDFFLHPRPPTPPPPQPPALAGPLQVFNPHAAGIDIGEAEHWVAVPPGRDPQPVRRFGTFTADLDALADWLIDCGVTTAAMESTGVYWMPLFELLEARGVQVLLIDPRQAKRAPGRPKTDRLDCQWLQRLHAYGLLAGAFRPDDQVCVLRSYLRHRQMLLTSAAHHIQHMHKALQQMNLKLTQVVSDITGATGMAILKAIIAGERDPVTLAKLRNPHCQHDADEIAKALQGTWRAEHLFALRQAVELYEFSHQQITQCDQQIKAHLETFGDTSAGQPLPPKARRHKKTNEPRFDARTPLYRMAGVDLTTIEGIEEGTALVILSEIGTDMHRWPSVKHFCSWLGLCPQHQISGGKVLSRRVRPGAHRVTVALRLAARSLHHSQSALGAFFRRMKARLGTPKAITATAHKLARLVYSLLKHGSAYVQQGLENYEAQYHERKVKTMAKQAKALGYTLVPLVAQG

SEQ ID NO: 316167 - protein, 340 aa, unidentified
MPLYGGIDLHANNSVVVLLNDQDQVIYQKRLPNHLPAILQPLSLHQGEIEGLVVESTYNWYWLVDGLMEAGYRVHLANPAAMQQYSGLKYSDDHSDARWLAHLLRLAVLPEGYIYPKAERAVRDLLRKRAHLVRQHTANVLSVQNIMARNTGARFSVKRIHELTKKELRSLLAEEPQVLAITSSLAVLDCLQHQIKTLEQTVQKRLHHTPSYEQLLTVAGIGPILAQTIALESGDIRRFPTVGHYASYCRCVDSHKISNGKRKGTGNVKNGNPYLAWAYMEAAQFAMRFQPAVQRFYQRKLAKSRNNTVLARKAVAHKLSRACYYMMRDLVPYEATKAFG

SEQ ID NO: 316168 - protein, 347 aa, unidentified
MDYYAGIDVSLESASLCVVDANGRIVREGKVASEPAALIGWFGGLGLTVLRIGLEAGPLSQWLHAQLREAGLAVELLETRHVRAAFRTMAVKSDRNDARNIGQLMRLGWFRPVHCKSLAAQEVRTLLSARKLLQSKLFDVEMSLRGMLRNFGLKVGHTTPQRFAARIGELVAGQATLEAVAAALIAAHEVLKRELAGLDKRVRGLAGADPRVRLLMSAPGVGAIVALTYVAAVDDPGRFKSSKQVGAHFGLTPRKYQSGETDRSGPITKVGDAAVRTALYEAAHVILTRPVKGGDLKSWAARLAKRAGLKTATVALARKLAVILHRMWVDGAPFRYGQVQSVAAAAA

SEQ ID NO: 316169 - protein, 411 aa, unidentified
MEVIHERVAGIDISKVDVKVCIRVPSGKRRHSEIRTFSAVTSGLLAMRDWLLAEGITVVGMEATGVYWKPAFYLLEHDMECWLLNARHMKSVPGRKTDVKDSEWIAKLVEHGLVRPSFVPPEPIRQLRDVTRYRTEVVRERTRETQRLEKLLEDTGIKLSATVSNILGVSGRAMLEALIAGERDPRVLADLARGSMRRKTDALIEALTGAFTAHHAFLARAMLDRIDACTATETRLSEHLEVMLQPFRRRIELLVTIPGVEARAAQVILAEIGADITRFPSAADLASWAGVCPGNYQSGGRSGGGKTRHGDPWLKAALGQAAVSASRTKDTYLAARYRRLVARRGKKRALVALEHSILTAVWHMFTHDTAYTDLGGHYFIERTGRARQTRRLVSQLNQLGYQVTLQTEGAA

SEQ ID NO: 316170 - protein, 340 aa, unidentified
MAIVAGFDVHRAQITFDALDDGTGELSRGRIAADPEAVRGWVERFGGREVHVAVEACTGWLFVCEALREAGAIPHLAEPVETSALRGRKRRAKTDRADARWLRTLLCEGRLPEAWIPPAHVREWRTRTRLRKTLVDERTAWLQRVQATLFHHGVRGVPAELRSAAGREFLRRLELPAAAVERIEVALALVEALDRQLEPLESELRQLARRQPGCRALMRHFGIGELTAPMILCELGDASRLSASRKAVRCAGLDIGVHRSDRRSRVGKLTRQGSPQLRWALFEAAQSACRPQSPDHADYLALKARGLSHVRASMTIARKFARRSFHTLRELGPSALEPVS

SEQ ID NO: 316171 - protein, 343 aa, unidentified
MTHFVGLDVSQKLTAICIVDDTGRRLWRGQCASDPEQIERVVRRHGGNEARIGIETGPMTAWLVHELRGRGLDVTCLDARHAKAALKMQINKTDQNDAEGLAQIMRTGWYRPVHVKSFDSHRARALLGARAQLVGMTTRLSNHIRGVLKTFGMLPGPMRGLPFDRRVEILLAERAEVAPIVRPMLAAWRQLREQIAAFDKAVRALVKSSPTCRHLMGVPGIGVLSVLAYVSMVEDPARFGRSRSVGAHLGLTPKQYQSGEIDRSGRISKCGDMLARTLMYEAAVVLMTRVKRASGLKDWAQAIARRSGAGKARVALARKLSVILHSMWRSGEPFRWSEQPAAA

SEQ ID NO: 316172 - protein, 427 aa, unidentified
MKYQVAAIDVHKKMLAVVVADVAGEGEYQFERRKFGTTPEQLHVLAQRMIQQEVEEIVMESTAQYWKPVWGALERLWKPARQQREGATKMSGKLHLCQAKSNRGQRGRKSDFLDAERLVKRLVAQKLVLSLVPDAEQRLWRTVTRRKYQLTRDKVRLHNQLESLLEEAHIKLSSFVSDLLGLSARRMLKALVEGATDPAAIAALADGRLRATPAQLRDALGASTQLHGVYRRLLKMMLEDLKQLEEQMEQLDGEMATLLEDHQEVVQRLAEVPGLGVSSAVQIIAEVRPQAEVFNSAKELSSWVGVCPGSEESAGESQSTRSPKGNRNMRRLLNQAAQAAVKMKGSIFEITFRKLVPRLGYKAAIWAIAHRLCRLLWILLRKGVRYQEHGPAVSAKSQRARTTKMIKELRKVGYRIESGPLPAGAVA

SEQ ID NO: 316173 - protein, 326 aa, unidentified
MQGKKVPERLTDPESSVGIDVCKDWLDAHRLPAGNALRVANSPDGIRKLKRWLRRHPASLVAVEATGKWHRALHRSLHADGIRVAVIDPFRLRMFAKAHGILAKTDKLDARVLAMFAAMMDPAARPPAPQALQTLQELVRGRASAVADKTALQNQRAAAETPFLRRQLDRRIVRLDKDIAAIETEVERYIVDQPDLAWRQRILLSVPGIGPIVAATLLACLPEIGTIPAKQITALAGLAPVPDDSGERQGYRRIKGGRQIVRDILYLAALSAAKCNNDLKAFYQRKLDEGKAKKLALVAVARKLLLLASSLISDNRLWTLKSPKSA

SEQ ID NO: 316174 - protein, 319 aa, unidentified
MAQNDLIVAGIDVAKDKVDVCIRSLSLRRTFASTAEGRRELASWLRRQKVGKAVMEASGGYEREWAKALRDAKIKVRIVDPKRVRSFAQSAGRLAKNDTIDAEMIAWFAETFDEARGQAYDATREQLHQMVNARQAMMDMQARLENQGEHAVPAAVQRMHAQVLKKIGAELVKIEAAISTLIQATPHFNELAEIIESVPGLGRTTSAALIAAMPELGQANNRIVAALLGVAPYDDDSGRRRGERHIKGGRRRTRNVFYMACLGAATQHNPVLKAFYDRLVAKGKEKKVALIACMRKLISILNIMIERRQKWDASRHALS

SEQ ID NO: 316175 - protein, 353 aa, unidentified
MELDKYIGIDAHSSTLVVHARDAFGKVILQSVVPTNAEAIVQCIGGLRGRLHITFEEGTHAQWLYDVLRRRVQDVLVCDARESRLLQDGSKGDVIDAGKMSHLLRMGALKPVYHERHGTAMLKELVRSYDGLVEDSIRVMNRIKAIYRSRAIPTAGQSVYRPGQREPYVEQLQDPGAAKRVGLLYEQLDTLIGLRRQAERAMIREAQQHPAYRILRTIPQLGPIRIARLIAIVDTPHRFANKAAFWNYCGFAVVLHTSGERKFVDGQLVRTQKVVATRGLNKDHNPKMKEIFKSAAMKAGARGPFAAYYAALIAGGMKPELATITLARKMSAITLAVWKKGEAFDPKKLMPTS

SEQ ID NO: 316176 - protein, 348 aa, unidentified
MQSKSQIQSIGIDLGKTTFHLVALGSRCQVVVRKKFSRQQLLSYTANLPSSLIGMEACVGSHFLGRALREQGHEVRLIPAQFVRPFVKSNKNDYRDAEAIGEAVERENMRFVPIKTEDQLDLQALHRVRERLVSRRTSVINQIRAFLLERGISFRKGPASLRRQMPEILENADEKLTARMRRLLDFLWQEWKHLQLQIESLSEDLEQIASSDEACARLQQIPGVGPLVATAVVSAIGNGAAFHKGREFSAWLGLVPGQWSTGGKTKLLGISKRGNPYLRKMFIHGARAVVLRAKREGSYLGQWVKSLEGRAARNVVIVATANKLARISWAVLSSGENYHPMPTFALAS

SEQ ID NO: 316177 - protein, 411 aa, unidentified
MVVCQIANRNVTEGTVPDLWAGVDIGKKHHHCVVINAHGRRLLSRRVQNDEPDLFQLVDDVLAISDDVLWAVDINHGIAALLISLLLNRDQPIAYLTGRAVHHASTTYRGEGKTDARDAFIIADQARVRRDLSMLRPGDELAVDLRLLTARRLDVVFDKTRQINRLRAQLLHFFPALERSLDLTKKGPVTLLTGYQTPATIRRMGAKRLETWLRNRKVSDAAALARRAVEAAQAQQTTLPGEQLGAELVARLANAVLAHREEVAELDARIEDRFRQHQDAAVILSLPGMGPTLGAEFIAATGGDLSVFGSPDRLAGFAGLAPVPWDSGSTSGNLRRPKRYHRGLQRSLYMSAQVSVFFCPVSKAYYNRKRAEGKGHKQAVIALARRRTNVLWAMIRDKTPYQGGPPLAAAA

SEQ ID NO: 316178 - protein, 352 aa, unidentified
MLAGIDTHKDTLAVAVIDDTGRPAVVTELANTEAGFDALELLLEEHTVTRVGIEGSGNYGRGAAVRLVLTGGLEVVEVPPSLTSRERSGRPGQGKTDPVDAVAIARITAREAGLPAVRLAIGVAADLRALADYRAQLVAERTALANRTHSELHGLLPGYQATIPRLTAPTFLTAAQDLLDGDTSVRAQLTRRRLIRLAQLTAEIRDLTGLIATAIAEVETGLTDLYGVGPVGAATILGEVADIRRYRSRHAFAAANGTAPIPASSGRTTRHRLNRSGNRTLNRVLYTIAITQIRADTEGRAYYLRKRAEGKTSREALRCLKRRLSDVVYKTLQDDLAAHPLPELAGAAAPGR

SEQ ID NO: 316179 - protein, 410 aa, unidentified
MGYETLIRRAHVMTRKNTLKSLPTDTEFRVVGLDLAKSDESVAAIPVDDNTPSLVDRMTYADLLDWAGKISPTLFAMEPCNGYSLLCLQLENLGHEIKVISGWTVSMWINTHLSGQKTDLNDAIALARLAVSDAELTPIRHKSITEIRIQTVQAVRQQLMSQRSKSIVSFKALAQQWGIPCAAGHRNLKKLRETIEAKVDLITRPVANAMLFLLDAVKSLDRQIGQLNQTLQELVMSDERGRLLQSVLGVGTQISARVITVVGNVERFNSPRSLVAYVGVAPRNFITGHKNLTKKKHGNCPDLSHKGQGKISRRGDKLLRSLFIQGAACLYMQFCKDQLPECQLKRWILKQLASQKPYGKLIVSLAAKLIRIVWAVLTYGEKFNIQKAGMTRSMWSEMALETPLNKEVPA

SEQ ID NO: 316180 - protein, 375 aa, unidentified
MTTTSSEQTLFAALELSKNSWLLAIQVPGRDNPSRHPITGGDADGLMAKLDAAQQRVAKISGQTPKVILCYEAGYDGFWLARLLEQRGIECRVMDPASLQVNRKARRVKTDRIDVEKLLQALIAWCRGERHVCSMVVIPSAEEEDLRRSHRERHRLVCERTAHINRIKALLFGQGIRGINVMRFYKTLTPADLVTGDGRPLPERLGQEIVREIERLAQVQEQIVEIEHERDLAPTPCAATERKRHQLQRLNGIGQISAPILAGEVFYRKFANRRQVGSYLGMTPSAYDSGESRRSQGISKAGNSLARTVMIQVAWMWIKHQPESELTKWFRRRTEGQSKRIRRVMIVALARKLAVALWRYLETGLIPEGAVLKAK

SEQ ID NO: 316181 - protein, 369 aa, unidentified
MHVVYERCAAIDVGKDEIAVAVRMPGDGPEGRVTVKRTFRTFYGVMGEAARWLVSLGVTHVAMEATGVYSMPVYYALVEHGDFAKVLICNAAHVKNVPGRKTDYADAEWLAHLLECGLLAGSFIPPAEIKDARDVVRYRAKVVRQRVSEIARIADLSMALEGRFGDHHALMCRLHLDHIDHLEAAIARLDARIEQMMEPFQCWRDLLATIPGIGQHAAAAVISEIGVAVAEFFPDDAHLASWTGLCPGNHQSAGKRRSGKPRPGNTHLQTLLVECAWAAVRHDGYLKSLFHRHVMKNGGYRSSTAKKKAIVVVAHAMIVIIWHVMVTGKPYHELGAGYFASLQDPERETRRLIARLQALGHTVTLDPAA

SEQ ID NO: 316182 - protein, 358 aa, unidentified
MKYIGCDFHPSFQQMAMLDLETGEMIERRLAHGNGEARAFYEALRGPVVVGIEASGNTLWFERLLGQLGHELWMGDATKVRREDPRKQKHDRRDAKTILKMMVEKRFPKVWIPTMEERDLRQLLMHRHHLVRMRTRVKNQLQHIALNQGIQKKYKLWTKAGMKLLRELELEPWTRLRRDTLLEMLEELEQKIRPLEQAVEREAEARPAARLLASHPGVGPVIALATVLTMGEVQRFADSRSWVSYLGLNPSERSSGEKRRLGAISKQGSPFLRFLLVQGAASAARGDKSLARVYARLKAKKHHGVAKVAVARKLAVRLYWMARTQKPYPEVVRMQGSQSHPVAEVKAVRLSRPPASRP

SEQ ID NO: 316183 - protein, 366 aa, unidentified
MAASQDDGGTRSERVGLKHQRKTAVEHFIGIDVSLEQSSVCVLNANGHIVREVKIASEPEALVAFCRELKLPVTRIGLEAGPLRQWLHTGLTSAGFDTVLLETRQVKAALSAMVVKTDRKDARGIAHLLRMGWYRPVHCKSVPAQEVRALLAGRKLLLCKLRDVELSMRGLLRGFGLKIGQISKGRLEARIRELIAGHSMLEQVIQPLLQAREVLNRQFHALHRAMLALVRHDAVCRRLMTVPGVGALVAITFTSAVDDPARFPRARALGAHFGLTPKRYQSGETDVVGGISKVGDEAARTALYQAAHTILTRPGRYSSLKRWGMEVAKRRGLRRATVALARKLSVVLLRIWTRETVFRFGRPAAA

SEQ ID NO: 316184 - protein, 379 aa, unidentified
MRPGGSSTIYDGVDAPPTASMCQSGDVEHHLREASVSEVITIGLDIAKHVFHAHGADQRGRAVFSKRISRGKLLDFFAAQPSCTVALEACGGAHHWARQLTQLGHEVRLIPPAYVKPFVKRQKNDAIDAEAICEAAQRPSMRFVAVKSEQQQAAGLVFRTRDLLVRQRTQLINAIRGHLTEYGWVAPKGPSHVAMLADLIEEEEMVSSLPEAAHTMFRVMLDLLAGLNGKIADLDKEIARRAREDEVSRRLMTIPGIGPISATAIAALAPPAETFAKGRDFAAWLGLTPLQRSTGGKQKLGATSKMGERTLRRLLIIGSSAVVQQASKRGAPKGSWLEQMLARKPRMLVTVALANKMARIVWALLVKQENYRAPVAAKA

SEQ ID NO: 316185 - protein, 337 aa, unidentified
MQVTHFVGIDVSKNNLDVSWVVNAQVLFHETFENNSRKIKPKLICWMKKQGSTFENTLFCLEFTGVYSLPLLHCLSQLGALIWVESGVQIRRSLGMVRGKNDQVDSQRIALYAYTHQHHVNLWKAPRAIIEQLSALLSKRALLVKMQKALSTSFNEQAEFLEPTVVKSIRVSTTKVVRELRKQIHQIESEVRKLISSDDKLNHLYQIITSITGVGFVTAVHVITTTNEFVNFNNPKQYACYCGVVPFEHTSGTSVRGKTRVSHYANKTMKSLLHLAALGAIKSPGELREYYDRKVAEGKNKMSVLNAIRNKLVLRIFSCVSQNRLYNKNFTLDLVLS

SEQ ID NO: 316186 - protein, 364 aa, unidentified
MNKCNLNTELSSLEGTRRQFNGGIGAIKLGIDVHQDFYVVVEQVDGSNPKPPQRFAKAAFLHWATKLKNGKGEVYAVYEACGFGFSLQRQLSSLGVQCHVVCPQKLDEQNRRVKTDGLDAKALVLKLDRFVQGNRSALALVRVPTEEEEQKRAIHRQREQLVKARMQLEAQGRSLMVNHGLEPVKSWWKGRTFAALQVPEWMKELLGNSQSLLLALQEKIGALTLQLQAAALAQQPRGLGKMTSVIIDREIGDWKRFNNRRQIASYTGLCPGEYSSGNTRLQSCVTKHGNPRLRAALVELAWRLVRFQPNYKPIKKCKRLLGKGALATGAARKKAIVAVARQLAVDLWRIKTGRLRAEELGLIN

SEQ ID NO: 316187 - protein, 400 aa, unidentified
MLSIGIDVSKGKSTVCGMKPGGEIVYTPFEVQHTREGMSELVSLLRGSGEEVRAVLESTGSYHCPVVAALLENGIFVSVVNSLRMKRFCSQSIRRVKTDQIDAMQIALYGLAYWQELQPTRLPEDTYRELQLLARQYYQMTSILIKAKVDFNAICDQVLPGMQELMNDHAGRHKLSDFVLRYRHTTHILEMGETRFRKDYCKWAEKKGYRNCERMAVLIFATAQNGIPVLPNAPSTQIVITEAIRVLHTVEASRDAILTQMQALAKTLPEYSLVREMPCIGDTLAPRLIAEIGDVRRFHSKRALIAYAGIDAPPYQSGKFRANNRHISKRGNRYLRKTGYEVMQSYVMHKPANDPIFTFIEKKRGEGKSGKLAMVAGLNKFLRVYYGKVTELYRSLPAIE

SEQ ID NO: 316188 - protein, 372 aa, unidentified
MASIIYVGMDVHTTNFTFCCYTADSDRGFAVAQTEPDYRQVIKYMERVQKQRGEECKFVCGYEAGCLGYSLYHQLTRCGVDCVILAPSTMHQEKGKRIKTDRRDAENIARCLAFSLYSPVYVPTTEDDAVKEYIRMRDDIKADLKRVKQQIIAFTTRHGFAFDGKSYWTQKHLKWLETLVFEHPLYKETLQEYLILYYMLDEKVAVYDTRIEEMSHLEHYEENVQKLCCFRGVAAHTALSLLVEVGDFQRFRSAKHFAAYLGLVPGEHSSSDKQIRTSITKAGNTHLRRLLVEAAQSYNRGAIGKKSTALKARQGGNPAEVIAYADKANERMQRKYYRIAFKSRHNIAKTAIARELACFVWGMMTGNISNAA

SEQ ID NO: 316189 - protein, 343 aa, unidentified
MQSISTIGLDIAKSVFQVHGVDAAGQVIIRRQLKRRFVLSFFEKLPPCLVGIEACASSHYWSRELQALGHTVRLMPPAYVKPYVKRQKNDSTDAEAICEAVTRPNMRFVPTKTIEQQSCLMLHRVRHLFIRQQTAVINSIRAYLAEFGIVAPVGRRGVEQLLEVVADPADRRVPEVARACLAALGGQLRALKAQILEFDRRIIAWHRSNATSKRLDAIPGVGPALATALVASVADAKTFRSGRDFSAWVGLVPKQNSSGGKDKLGRISKQGDRYLRSLFTAGALAVIRYAKIHGTSHRPWLTALLARRPTKVAAIALANKLARMAWAMMTRNEPYKEPAGLTA

SEQ ID NO: 316190 - protein, 351 aa, unidentified
MKTKDTTDSKLFIGIDVHKRSWKIRTATDLFDGSSLTIPPDAFSLKKYVDRHFKGYTVYCCYESGCCGFSHHRHFISFGWHAKVVNPADVHRPAKAQFQKTDKIDARMLCKELKDSRLKGIHVPSIEREQLRCLFRRRNELVKEHRKIKTQIKMQLLYLGIEIPKVFDNSHWSHNFRDWLGGLTFEYPTMDYCFETRLMTYEYIDRQKRDVSTKLRAYCRKYYKKDYYLLRSVPGVGGIVACGLLCELGDLRRFKNFKQLASYVGLVPWVHQSGDNLKTSGLTPRANRLMRSYLVEATWQALRFDPVMQAYYRSHSGKDVKRILIKVARKLLSRIHAVIRTEIPYEIGVVS

SEQ ID NO: 316191 - protein, 400 aa, unidentified
MMTPDDIDVWVGLDVGKSAHHAHALDHDGNTLYDKPLKQDEKAIRTMLGKLSKHGRVLLVVDQPNTIGSLPLTVARNTGIAVAYLPGTAMRRTAQLLPGDAKTDRRDAHVIAWAALKLPETLRDAGPDDETLAALKLLAGHDEDLAHESTRHVNRLRSLLLQTHPAFERALRGERITRDATLALLERYGGPMGVKRAGIEDVKDWAKSNGLRAGRIIDDMFKAIGEQTVTVPGTLMAETIIPSIAHDIKTIRDRRREVGRQVEKLLEDHPLLTVPASMPGIGVRTASNILLGIGGDIANFKSSAHLAAYAGISPVTGQSGTSIKGERPSRRGNKRLKNALWQTAFVASTKHPPSVAYYKRKREQGKHHNAAIICLARRRCDVIYSMLKNGTLYQEPALVA

SEQ ID NO: 316192 - protein, 441 aa, unidentified
MAVEFVGGPEQAEFMARVRGLDPSRVLLVPVDVGKSEAMAMVTDLRGEVVTSPFKFALTASGAKTLSDRTVSASASRSAALCRVGVETAGHYHRPLVEHLVAGHVEVVELNPAAVKAARGQQLRARQKTDERDLAAIADLLIRGAGRPPQQRSAAVLEQAAWVGHRRRKVDMGRRLRQQIHAQLDLVFPGLGGCFGDIFATKSGRMILTEFCNPERVVRLGPARLAGCARTRGIRMTVAKSELIVACARDALTPQSSQRDLVEQHLAADVAMFLTVEAEVLRCERELAALIASTPAGVLTSLPGVGVVRASAYGAAIGDHTRFTNADTAYAFAGLSPASYESAGRARPGLGITKSGSVTLRQAILELGKGMGMHHHDFADYRTRLISRGKPRPIAAVAVAHRAHRVAFALMRDGVVFDPTHPIPTSAGRPVTTSQPTPETT

SEQ ID NO: 316193 - protein, 351 aa, unidentified
MIIIGVDYHPSDQYIAFVDTETGECGERRLNHSAGEAEKFYRELAAGGVSVRVGMEATGYSRWFERLLAELGIELWIGDAAEIATKRVRKQKTDPNDARLLLKLLLEDTFPRIWVPSAENRDLRQLLWHRHRLVQMRTRIMNQLQALAMNEGQRRKKKLWNEPGRAQLEKLPLARWASRRRKDLLELLDRMNPTIEELTRAVGQEASKRPEVRRLMTHPGVGPLTALAFVLIIGTPQRFPCGKQIGSYVGLIPSEDSSAGHQRLGRITKQGSSLLRFLLVEAAQAAARCDADWRRRYRHLALRRQRNIAKVAMARRLGVRLYWMWRNGWEYVELVNFGSNAGQLGTGHGVQ

SEQ ID NO: 316194 - protein, 390 aa, unidentified
MIYVGIDAASRKHDFAIMNENGEVIHQPTTITNDLKGFKKLHTEIASHTELPDEVCIGIEETGIYAKNLSSFLHSSGFKVFSLNPLLTSFSQKSVSLRLTKTDKVDAKAICRYIRLNHSILNPYTPTLYNLDELKSLSRIRFKKLKTLSQAKMEYTRLLMIMFPEFTKYYDQHAKWARELFCKYPTTAQIARMHTDTIVSMLRIKGDRFQAAVRIKALAKETIGNVSTTNQILLTSALDDIKHYEAQIQVIDKAIDELMEPFDFIKSVPGIANITGAMILGEIGDINRFKSASSLLAFAGLDPSVFESGEFKSNKSRISKRGSAYLRSAIFTATRVACVGKGKDNKFRQKYLKKRLQNKHHTAAICAASKNMINTIFTMLQTGEFFSYSY

SEQ ID NO: 316195 - protein, 336 aa, unidentified
MIAVGVDTHKHEHLARAVDGLGQILGGLTIRADLSGYIELTQWLQTLGEDVVVGIEGAGSYGAGLCEFLLAEGIAVVEVERPRRQDRRRGKSDEIDALMAAKKVLAKDGLSTPRAGGTRQALAALLIAQRSCVSERTRLLNQLQALHTTAPVALRERVGPGNGRKLAARLVKMRGRSEAPGSEQLIFTVLRDLARRAQELAAQADAYKHELTELISSLDPTLLDEYGVGPISAAKLLVCDPRRLKGEAAFARCNGTAPKPASSGQTIRYRLSRGGDRQANNALHTIARIRARHDESTRAYLERRQSEGKTPREAMRALKRHLSRSLYKKLITIPLT

SEQ ID NO: 316196 - protein, 350 aa, unidentified
MLIIGCDFHSRFQQIAMLDPQTGEVMERRLEHENGEARRFYAGLPTPARVGMEATGYAQWFERMLAEQGHQLWVGDAAEIRAAMVRKQKSDSRDACHILDLLLRNKFPRIWIPSTEERDVRQLLRHRYKLVCLRTSLKNQLHAMAMGHGICRKKKLWTAVGRKELQGLSLGPWASRRRQQLLDLLDQLEPVLEELDRAVIQEAEKRPAAVRLMTQPGVGPVTALAFVLTIGPVERFQKSRKLVSYLGLNPSENSSAGKQRLSGISKQGNSMVRYLLVEAAQTASIYDPELRRDYQRLKFRRGRGVAKVAIARKLAVRLYWKLRKQFSPVPPAPMQGSPAVSVVGESLSSF

SEQ ID NO: 316197 - protein, 366 aa, unidentified
MQKLSTRRVMGNRILKGHQLTIGLDLGDRWSFYCVLNEQGEVLREEKLPTTPEAMKRTFEKLPRSRMVLETGTHSPWISRLLTELKHEVIVAHAQKVQLITKSSRKDDRHDARTLARLARIDPQLLGPVRHRSAKAQIHLTVIRARAELVSARTALINAARGLAKSHGERLPKRGTQQVGRELATTLSIALREVLEPLLREVESLNERIREYDQRIEQTAKQVYPEVALLKQVKGVGTQIALTYRLTIDDPHRFTKSREVGCFLGLRPGRRNSGQSEPQKHITKEGDRYLRTMLVQGAHYILGPFGEDSDLRRWGLKLAERGGKNAKKRAVVAVARKLAVLLHRLWVGGEVYEPLRNTHRAMSAAA

SEQ ID NO: 316198 - protein, 347 aa, unidentified
MKNTVIGIDISKKSTDWCLMRGTEIVSYHCVDNEASAIEQQLQELMNLYLIDKCDLMVCAEHTGHYIYPLAIACQNKQVDLWLESGYNIKCEARKERGKSDKEDSRRIAEYGYKNQADAHYYSIPEHDITVLESLLSERADYVVERAKLEGQLNDQKGYTDREVYKAKAKRLKKLIRQYDRLIEETEKELERLMRENKTMGHQAALLETIPGVGRQTAMRMIAATKGFTLFENGRQFCCYAGTAPFEYSSGTSIRSKHRVSQRADKSLKAMLHLCALTVSRRCKPNHFSDYYQRKVDEGKNPMSVLNAIRSKLVLTMFALIRTNQPYSPEIVHNYVEKFSLKPIAIS

SEQ ID NO: 316199 - protein, 334 aa, unidentified
MWHVGIDLHRATVVLAAVNDVGEAMNPITIPCSDTAAIASTVKALGSFRAVIEACGTYRWLYNLLRPYGTVLLAHPLRLRAMIQRRTKTDKLDAQLLANLLRINQIPLAYIPPEPYQQLRELTRCRARLARDQAEVKIRLRGLLARQNRQAPYRVPFGVRGLVWFRKQDFGTIENLVRDELLARLEHFGRQLAILDQQVTELQKAFPQTEVLTTIHGIGLYSALLIVAELGEVERFRTAKQVGAYAGLTSRVHQSGGHCYRGSITRQGSPWLRWILVEAAMKAIQDDAALKNFYTRVRKRSSAKIARVATARKLAEICWKRLRRWQRTHAEQAA

SEQ ID NO: 316200 - protein, 395 aa, unidentified
MSAEGEAIRSNDYRKDTTVKAPSTRPAAVLGLDVGKSSHWACLIDRDGEVLSSAPVRNREAELDALFASAPAGTLVVVDQFRNIGSLAVRRARAAGLGVAHLPGLAASRAAGLFAGEAKTDERDAAVIARTALGVPDSLSGVPGRGEALEAARALSSQRDHVVACATRDKNRLRAVLLESCPALEAAVDLSDRRWLELLAGFGGAWGIARSGAEGPQAEAAGEAASASTAPPPALVEAENRQVRFLAARISEALDEAGALEAETAALLEGDETYACLLTVPGIGPRTAAQLAVSVDIARFPDHDHLASYCGIAPRVRSSGTSVRSVRASRRGDARLKSLLIFSCNSLVRSSGRYGEYYRACRARGMGHGRALKAVARKRLRAIYAVMRDRVPYRE

SEQ ID NO: 316201 - protein, 316 aa, unidentified
MQTPLVFVGIDVSKARLDVGLRPSDERMSVPYDAHGITTLLAQLTQVQPTRIVMEATGGLERLLLRALVDAALPVIVVNPRQVRDVAKATGQLAKTDTLDAQVLARFAEVIQPVLRVIPDAQTQELAALLARRRQVLAMQGAEQNRLDRAPDRVRKRIAAHLRWLRDELARLDEELDDLIQQSPVWRAREELLQSVPGIGPVMSRTVLAELPELGLLNRKQIAALVGVAPFNRDSGRLRGHRTIWGGRAPVRRALYMAALVATRWNPVIRLFYQRLRAAGKAPKVALVAAMRKLLTILNAMVHAGTPWQPVVAQDS

SEQ ID NO: 316202 - protein, 362 aa, unidentified
MVKAMAFVGLDVHARQTHAAVLDPAAGELAVSRLRMAPLEVVSFLQTLGPGVRAVYEAGPTGFGLARAAREQGIDVRVAAPGSIPRGSGDRIKTDRRDAVRLVRLLAAGELSFAFVPSVADECFRDLVRSIEDARADLMRARHRLSKFLLRRGERYPGPGRAWTRRHTIWLGSHRFEDACSQATFADYLAAVELLTGRRGGLIDALEQAIPSCSHATTVARLRCFRGIDTLSAAGLSAEVGDFSRFAAPKLLSGFLGVVPSERTSDLKRRQGSITKAGPGHARRLLVEAAHHYRYQPRIGEALARRQQSQDARVIEIAWRAQRRLHQRWQHLYRERRKPAGVVAIACARELAAFLWEAATLE

SEQ ID NO: 316203 - protein, 318 aa, unidentified
MSQGYDKYVGIDVAKESLDVSGLTADSPSQFENTAAGRAKLLSLLPQAGACLLVAEATGGYERELVAEVVAAGHHIAVVNPRQVRDFAKAIGLLAKTDRIDAEVIARFGEATRPTPQGFSEQQEQLRELIVRRRQLVDHRTAEKNRCEQAHSTLVRNSVRKSIEGIDKDLKRIDRAIIQLVESNDDWRGRYERLKSVPGVGAQTAATLMAELPELGRLNRQQVAALVGVAPFNRDSGQFRGRRTIWGGRATVRSGLYMAALSAKKHNPVIRAFAARLLAKGKPPKVVLTACMRKLLVILNAMLRSDEMWGPRLATLAP

SEQ ID NO: 316204 - protein, 346 aa, unidentified
MEYIALDVHKHYTWARVENDQGHKLYESKLAHSRGTIKNFTKQWNPATPVAVETVGNWYWVVDEIEAGQGSPQLVNARLAKLMIGSVNKSDKLDVKGMNRLQRSGTLPTVWIPPSSVRDARELPRTRMVLSDQRTQLKNRIHATLGKYGLKVEGVSDAFGKRGRTIIERLLEELPPNTGQALKLMLDELDHVEANLRTIEGQMREAFAPCQQTTYLQSEPGVGEMLAVVIWTEIGTIERFGRAEQLASYAGLVPRENSSGGKVRYGRVRRDVNLYLKWAFVEAANSAVLNRERCEYTHVSRLYDRVKAKRGHGKAIVAVARHLAEASFWMLKKGESYREPVSFTPG

SEQ ID NO: 316205 - protein, 343 aa, unidentified
MQAVKTIGLDIAKAVFQVHGVDADGQVVIRRKLKRRYLLAFFEKLPACLVGIEACATSHHWSRQLQALGHRVRLMPPAYVKPYVKRQKNDVADAEAICEAVTRANMRFVETKTVEQQSCLMLHRTRHLFIREQTAVINVIRAHLAEFGIVAPVGRKGVEELLRVIADPADKRIPEIARACLAALGTQLQRLKEQLLEFDRMIMAWHRSDERSRRLDEVPGIGPMLATAVVATVADPKVFRSGRNFSAWVGLVPKQHSSGGKDRLGHISKQGDRYLRGLFVAGALAVIRYAKIYGTKHRPWLTALLARRPTKVAAIALANKIARMAWAMMVKGERYKEPVALAT

SEQ ID NO: 316206 - protein, 371 aa, unidentified
MKSIIYIGMDVHKKTYSLCALLKETGEIIGETKIPADVSLIIKFIENAKKSVDSDDVQIKTGYEAGCLGYSLYWQLAAKGIECDILAPSTMHRSAKNKVVKNDRRDAKNIAANLANGTYKSVYVPTDEDVEIKEYIRMMHDFKIELKKVKQHINAFLLRFGHHYPGKSKWIPAHIKWLKELELSDMYREILDEYLSQLEILSEKIERFKHRLEELSQKETYNEKIGQLRCIKGIDTTAAMTMHAETSDFDRFPTANAFASYCGLTPGEDSSGESYHRLGITKQGNSMIRTTMVEAAQVLVRGTIGKKGKKVKSKQKDQDVKVIDYADKAVVRLQKKYHRMIFRGVKRNIAITAVARELACFVWGIETGHIS

SEQ ID NO: 316207 - protein, 407 aa, unidentified
MQVLYGVCCGLDVHKKEITAALMTGEDEYVVRTFGTTTNALREMVRWLKEAGCEYVAMESTGVYWKPVYNIFEMEEIPAMVVNASHMKSIPGRKTDVNDAQWIADLLRHGLLRASFIPEKDQREYRELVRYRSSRIEERSREINRLQKMLEGMNIKLGDFVSSVMGKSAGRLLNLALAHDELTDEQIKEASDVRLKSSIEELKESLTGIITPLQRELVLMVIKVIGEQTKQIAEIEALIKKYTKEAYEEAAKKLEEIPGIGTKSAQAIIAEIGIDMGRFPSANHLCAWAGVVPGNNESAGKRKNAKSRKGNKHLKKTLTQSATSAVKNKDSFFHAQHQRLVVRKGSNKATIAVAHTMLIAIYHVLSGNEFKDLGVDYYTQFNKEKKIQSHLKQLQKLGWNPPEPKAS

SEQ ID NO: 316208 - protein, 408 aa, unidentified
MRQMYGVCCGLDVHKKEITAALLKAGEEEADVKVFGTTTDALTKMVEWLKEENCEYVAMESTGVYWKPVVNILELEGLPSMVVNASHMKTIPGRKTDANDAEWIADLLLHGLLRASFIPDKDQREYRELIRYRNSRKEERAREINRLQKMLEGANIKLGDVVSDVMGKSAGKFLNLALTQSDITAEDVAAESHGGIKASIDEIKAALKGIVSPLQRELITTVLNVIGTQTRQLGEVESLIEKYTQDAYAEAAKKLDVIPGIATTSAQAIIAEIGIDISRFPTAGHLCSWAGVVPGNNSSAGKQKRTKSKKGNKHLKKTLTQCAKAAVKNPNCFFHAQHRRLAVRMGSNKATLAVAHSILIAIYHVLCGKQFIDLGAEHYNQFNKEKKIRSHLNQLKKLGWLPPAENAA

SEQ ID NO: 316209 - protein, 398 aa, unidentified
MTESSDYESVQVFIGVDVGKDTHHAVAINRSGKRLFDKALPNDENKLRSLISDLKQHGQILLVVDQPATIGALPVAVARSEGVLVGYLPGLAMRRIADLHAGEAKTDARDAAIIAEAARTLPHALRTLKLADEQIAELSMLCGFDDDLAAQTTQANNRIRGLLSQIHPALERVLGPILDHPAVLDLLQRYPSPEKLASLGEKKLAAQLCKLAPRLGKRLAADIAQALAEQTVVVPGTNAAAVVLPRLALQLITLRKQRDEVALEVEQRVLAHSLYPVLTSMPGVGVRTAARLLTEVACRAFASAAHLAAYAGLAPVTRRSGSSIRGEHPSRRGNKALKRALFLSAFAALRDPISRAYYTRKMSQGKRHNQALIALARRRCDVLFAMMRDGTFYTPQAS

SEQ ID NO: 316210 - protein, 345 aa, unidentified
MPIVGGLDIHRKQLTFDYLDTVTGEVQRGQVAPADRVHLRSWLARFAGRDDVAFALEGCTGWRYVAEELAAAGVSPHVAEPADTAFARGRKRHAKTDKTDSRHLRELLAEGRLPECWIPPSVILECRALLETYHDLRAEHTAWVQRIHAVFFHQGAPALGEAALRTDDGLQALRVAAAAHLSPAGQLQVATALDMLAALEARLELLRHELLLAARGLTGARVLAARLYGVGPVTALALTCWLAGEGRFSSSRKAVRFAGLDITVYSSDSRRSPGRLSRQGPAVLRWAVFEAGKTHARASAPDHGYYAQVKDRKDGKRAALSEARKILRQACHILAELGDDALTAA

SEQ ID NO: 316211 - protein, 343 aa, unidentified
MSIVGGFDVHRRQITFDYVDTDTGRLQRGRITPACRGVLRRWLVDRFAGRTDVAFAVEACTGWRFVVEELERAGIAAHLAETADTSTARGPKKRAKSDAADAALQRQLLAEGRLPESWIPPEQVQEIRAILELYKDLRDEHTGWVQRIHATLFHHGVPQLGTGGVTTPAGRARLEAGEGLSPAARQAVTAALRVMDALDAELDGLHRQIRSFANGQPGCTALQVQYGVGPITSTAIWAMMGDTRRFTASRQAVRHTGLDVTVYSSDGKRARGHLAKQGPPLLRWALYEAACLASHTRAPDHGYYASVKDRIDHKRATISVARKIARRSHHILRELGDHAYAAA

SEQ ID NO: 316212 - protein, 355 aa, unidentified
MDSVKYIGMDVHKEAISIAVLNSSGKLMMECVIETKAISILQFFQGLRGSLHVTFEEGTWAAWLYDLLRRQVTEVVVCNPRRNALLKEGNKSDRIDARKLAELLYLNKLKAVYHGENGVRALQELSRSYLTISSDLVRVMTRLKALYRSWAIPCAGKQVYALRYRAQWLGKITEVGVRRRAEFCYQQLDALRSLRQQVRRELLAESGKHQAWKLLCQIPSIGPIRAAQLIAILQTPHRFRTKRQLWAYGGLGIETHSSADHRYVDGRLQPSKRPASLRGLNRNHNHDLKNILKGAAIIAATKPGPFREFYADLVAKGIRPEMARLTLARKIAAITLIVWKKGVCFDARHLKPQTA

SEQ ID NO: 316213 - protein, 570 aa, unidentified
MVVVGTDAHKYSHTFVATDEVGRQLGEKTVKATTAGHATAIMWAREQFGLELIWGIEDCRNMSARLERDLLAAGQQVVRVPTKLMAQTRKSARSRGKSDPIDALAVARAVLRETDLPLATHDETSRELKLLTDRRDVLVAQRTSAINRLRWLVHELDPERAPAARSLDAAKHQQALRTWLDTQPGLVAELARAELTDIIRLTGEINTLAQRISARVHQVAPALLEIPGCAELTAAKIVGEAAGVTRFKSEAAFACHAAVAPIPVWSGNTAGQMRLSRSGNRQLNAALHRIALTQIRMTDSRGQAYYQRLQDAGKTKRAALRCLKRRLARTVFQALRTVHQPSSEHTQPAAACHRSYCSSHLGEPPRLTDMTQKTRIQPLPPKRAGLLIRALYRIAKRRFGEVPEPFTVTAHHRRLLIANVVHEALLQRASRKLPPSVRELAVFWTARSIGCSWCVDFGAMLQRLDGLDVDRLTDIDNYATSSKFSDDERAAIAYAEAMTADPHSVTDEQVADLRARFGEAGVIELTYQIGVENMRARMNSALGITEQGFNSGDACRVPWAAPDVPSAESR

SEQ ID NO: 316214 - protein, 350 aa, unidentified
MLIIGCDYHPGFQQIAFVDTETGECGERRLAHREEAEQFYRKLSERSLRVRVGMEASGHARWFERLLSDLQFELWIGDAAEIRTKRVRKQKTDRQDAQLLLRLMMEGRFPQIWVPDAANRDMRQLLWHRHRLVQMRTRVMNQLHVVALNEGLRRKKALWRPAGRKELESIALAPWATRRRQDLLDLLDQLTPKIQELTRALEEEVEKRPVARRLRTHPGVGPLTALAFELVIGTPERFHCGKQIASYVGLVPSEESSGDRRRLGHISKQGSALLRFLLVEAAQVTVRSQSEWRSKFFHLAMRRGRKIAKVAMARKLAVHLYWMWRQGLDYGQMHKLGSHAGEPGNLDGGK

SEQ ID NO: 316215 - protein, 327 aa, unidentified
MGKESSTLFVGLDVHKDSIDIAVADAPRDAEIRHIGSIKGDLASLDKALRKLVSRGQPLHIVYEAGPCGFVIQRHLCAQGLHCDVVAPSSIARPPGERIKTDRRDAMLLARLARSGDLHVVRVPDSVDESVRDLVRAREDAVREQRSGRHRLKALLLRNGVPYAGKSSWTAAHLRWLATVKLAHSAQQIAFQEYLHAITQAGERIARLEQALRDALPDWGLMPVVQALQALRGVQLIAAMTLVAELQDFLRFESPRQLMAYLGLVPTEHSSGPKRRQGAITKAGNSAARRMLVEVAWHYRMEPRVSPIIAARQDGLPEGVTQIAWKA

SEQ ID NO: 316216 - protein, 387 aa, unidentified
MERKRGRVIGLDVHPDSFAGAVVAGSDPASARVLSSSTRVELKQLEQWALRHTRREDTLVLEASGNAFAVGQRLRTIERRVEILDSHRAGKVGKVYCANDRIDAVKIARIYLSGLSPLVWQPDPQTLERREVFSAYQAVVKESTRLKQQLRSMLNEHCVRLEKGFRLCHPKAIERLLGLREWTPARRMLLEQLHGGLVAARGRRTLLRRHMAQEIVAEERLLRLTRLCGISLVTLYGVVSAVGDVRRFAHSKKLVAYLGLNPSVSQSGNFEGGGALKRHGRGALRALLIQSGKKLLEVNNPLRKWGLAVAARRGRNKAAVAVARKLCVAVWHVLMGHVISSLERLDTLETKLSKFATEIGPVALSALGFANKADFVEKKIYLLRSYS

SEQ ID NO: 316217 - protein, 334 aa, unidentified
MREDGSIVDEFPFSNDSNGISLLLSRIDDGQCKAVLEATANMWVRIYNALEGRGIEVKLANPSMTKAIAYTRIKTDKISARILADLLRADLIYQCYVPSYEARNARNLLRHRLSIVKIETMVKNQMHALLDIYEIECNYKNILGSKGMAMLSSAKMDGDDDLIRDTQLEHLECIKQCIDKISARIALRASDSEYVRIMMSMTGIDCYTALLLASEIGDIARFPTPKHLVSWAGLCPELHDSGESKYYGKMKKNANRRVKWAIVQAAHVAAMHDPRMKEYYERNAKKMHRNKAAVKVANKMMTIIWHMLTNKQMYMQRNDRLYSDKINKMSRIAN

SEQ ID NO: 316218 - protein, 442 aa, unidentified
MSPPGNGEHAWQCLDYTCGVTVAFTQMEARMEVIIERCCGLDVHQETVVACVLIGAPGERARKEIRTFRTMTRDLEALRDWLQELGVTHVGMESTGVYWRPVYAVLEGCFDLIVGNARHIRNVPGRKTDVKDSEWIADLVRHGLIAKSYVPPRPLRELRELLRYRRKLTESQAAERNRLLKLLETANIKLASVASDVFGVSGRAMLRALIVGEASPEAMADLARGLLRRKRDDLILALDGRLEEHHRFLLAMQLRRLEAIEADIAVLDRRIGERLEPYSAAHALLMQIPGVDWVVAAVLIAEIGVDMSVFVSVYHLAAWAGVCPGNHESAGRQTSGRARKGNVHLRAILVGAAISASRTKGSYLKDKFHRLKARRGGLRAALAIAHKILVSAYHMLAKNLPYSDLGEAYLDQITQTRTVASLKRRLERLGYRVTLEPHAHPA

SEQ ID NO: 316219 - protein, 331 aa, unidentified
MDIKEVIGIDVSKNFNEARIHTNQKLIEFENNIKGFKALEKWVLNNVECHKNQIMFAFEHTGLYSYPMSVYFTEKGYSYIIIPGLELKRSMGIARGKDDKIDAKRIATYAYEKRSELKPYELPQEEIVQIKRLLSLREKLVKQRAGYKGTIGEFKIFLKRKDNKMLFDVHEKMIKEITKQIEKIEKNLNDIIKNDQQIKRIYKLITSIKGVGPQTALFLIVYTDKFTKFDNWRKFASYCGIAPFPNRSGISIRGKTKVSNLANKKIKSLLDLCAKTSIQHNPEMKLYYEKRVKIGKPKMSTINVIRNKILSRIFAVVKRGTPYVNTMGYIS

SEQ ID NO: 316220 - protein, 330 aa, unidentified
MKKMHIIGVDISKKTLDYHCYGHCITPAPVSNNVKGYRQFQKWIKLKVSREKSEVLIVMEYTGIYTYNIERFLEQQGWKYVKRPALDIKRSTGMQRGKNDKADARMISKYGWMNKEILKPMKPVSDKLVELQQLMTYRDKLVANKASHQARLKELEEQMGTKFNGKISQSARYIMDVLTVEIKELQEAIEECLATDESLQTNYDLLISIRGIGFVTAVALLIATENFTRFDNHRKFACYCGVAPFTHTSGTSIRGKTRVSHLANKKIKSLLTLAAFTAIRYDADLKNKFEQKRKEGKPLMNVINIIRAKLIERIFTVINRQTPYILKAAA

SEQ ID NO: 316221 - protein, 316 aa, unidentified
MSELVYVGIDIAKNSFEVAVTGELQTLNLANDEAGHAQLCQWLAPLAPRLILMEATGGYEQDLALALAGAGLRVSVVNPRQARDFARCVGKLAKTDRIDAQALRSFASMLDAQGHQPRALADDERRELTALVVRRRQLLTMLVSERQRLGVAHRKAKPSILAIMDAIAAQLHDVDDELKAHVQTHHADLAKLLTSVKGVGPTTACTLLAQLPELGQLNRKQITALVGLAPMNRDSGTLRGQRHIFGGRADVRRVLYVAALVGTRFNPVLKAFYAKLLAAGKAKKVALVACMHKLLVILNAIARTKSPWRDDFAERL

SEQ ID NO: 316222 - protein, 314 aa, unidentified
MNKERVYVGIDIAKANLEIAVYASETRWQFSNDEEGISHTTELLKELSPNLVVMEATGGYETPLAYTLKAHGIAVAIINPREVRDFAKATGKLAKTDTLDAKVLAHFAAAIEPEPRPISDEESQELGAILARRRQISEMLTMEKNRLHTARKIVRARIKAHIAYLEKEMVKAETGLQNKIQESPIERAKYNLLRSVPGVGPILCTTLLIDLPELGTLNKKQVAALVGVAPLNRDSGTLRGKRTVWGGRATVRRTLYMATLVATRCNPVIKTFYVRLCAAGKAKKVALTACMRKLLVILNAMLQHGTPWAYASFA

SEQ ID NO: 316223 - protein, 324 aa, unidentified
MIFIGIDISKLTFDAAYSLNSHSIHKQFSNNQKGFEAFYLWMNKSKKEVYTCLEATGIYSFDLAQFLSHKKTNVMVVNPIITHAFFKMELNRNKTDKADAQLIARYCEHVVLTGGYEKKSYQPKGADYEAIQRLVTRCDQLEKSKTQENNRLEASANKQVSRSIKRLQKAIDNEIVQVKKTIADIVKNNQTLCQQVELLVSINGIGERTAWSILAYIGDINFFSNSKQIASYAGLTPKIIQSGTSIDKSSLSKLGHKRLRKSLYMPALVAIRYNPILKVVYERLVNNGKPKKVAIIAVMRKLLILSYGVLKSEKPFDINYQITN

SEQ ID NO: 316224 - protein, 341 aa, unidentified
MQTTTIGLDIAKNVFQVHGIDAAEKVVVRKQLRRSKVIAFFEAVSPCLVGMEACASAHYWARELRKLGHEVRLMPAKDVKAYIKRNKNDAIDAEASCDAVRRPTMRFVTVKSAEQQGQLMQHRTRDLLMRQRTQVINALRAHLAELGIVAAQGREGLKDLLAIIADEKDERLPVDARASLIVLAAQLQAVQTLIGSIEKRIIAQHRATEASKRLQSIPGIGIIGASAIVSTVTDPTAFRSGRDLAAWIGLVPRQDSTGGKQKLGPISKQGDRYLRRILVVGAHSVLRRAKHNPEKYPWLTQLLARRPFKVVAIALANKMARIAWALLARGGTYRVPALAAA

SEQ ID NO: 316225 - protein, 390 aa, unidentified
MQVIADLPKTPSAIRSDLGAIFISLELSRSTWLITSLSPGGGEKMSKHSVPAGDICMLLARFSELRRKAFARTGKSLPIIVIQEAGLDGFWVHRLLQNEGIESHVVDPASIATSRRRRRAKTDRIDGEALLRTLLAYKRGEPRVCAMVKAPTPEEEDRRRLCRERKVLTNERVLHVNRIKGLLFSQGVSGYEPLRRDRRQRLDEVRTGDGRPLPKHLKAQISRELDRLELLIEQIKAVETERNALLAAQRVAAPAPAAMLLDIKGIGPEFAAVLWSEGLFRHFDNRRQVASYAGLAPTPWQSGSVAREQGVSKAGNPRLRTTLIQLAWLWLRHQPQSALALWFEERVRRNGGRLRKTTIVALARKLLVALWKYVTAGVVIEGAAMKTVGR

SEQ ID NO: 316226 - protein, 339 aa, unidentified
MKNTKYFIGLDVHKQKTTYVVRDKIGNIILEGTTSTLYIELYKRLETYLKSSIIGLESSTSYYTLYKGFLKNGYNIKVANTIQLRQLITKNDKLDARRLSEMLRLGTFPTSYIPDEKIQHLRSLLQVRHSLIEEKTRCNNRIQAFLDRNGIMMPNQEAFSKKWRQKLLQYIGSGEVSLELRYEYDHFKYLEEKSEHLGLEISGYTQKHWKQEYRLIQSITGLGPILSCYIIAHILPISRFASNRKLRRYAGVVPTTHESGDKKSKGHIPKTSSRKHLRWALIQAANSAGRTNTKLGYYYRKKKKQKNNASIAHVAVASSMIDIIYKVLTTKKPYNPKNC

SEQ ID NO: 316227 - protein, 492 aa, unidentified
MNSIYTKRSLAVTQILNEVEAVKILLVPLDFAKETHVVRICDATGAYLHKKPFDVSNDNAGLEYLCQRINSACIHRGVQKKHVLIASESPHSYCLHFMHDLQSKGYLVLRVNAAEAKKFRKNSIASSDAIDLDGIANAVLNRRARPLDEERELYSSLKRSSRYYKRYKKDLSRQKNRIGKLIDELFPGFLNRQKSGVDPYSNFCIDLMSKDFSIYKIRHMKQATLVAKMRKYHLHHPVQKAAKLQAHAAASVVPSKLIVDSLSQSLEHAIRLYKALDGVCDSEWEQMAHCLVQTPYSSMLSLPGVGVVRAATCAAEFGHVDTWNSLNQMCSYAGIAPRTMQSGGPDKPAIILGLSKKCNRRLKDALLQAAHQTAMTPHTAGALLPQLKEHKLMKHYKAVNARNGKSGLSTARMIIRKMRGMVRGETIYLPAKELSVYELKIYVMSTFEKMYNTLKGLDLTSIKPEDNCITQMEEEWKHLLESLEQKDSDINL

SEQ ID NO: 316228 - protein, 387 aa, unidentified
MTVLTVNNLPAATHGETVRCLFAIEMSGLNWVIAFNTPLSEKISRRTLTGCKWKRLLELIEEVRARVGRETGRAVEVISCYEAGYDGFWLHRQLSAHGISNYVIDPASLQVDRRARRVKTDRIDAERLLRSLMAYLRGEPKVWSVVRVPSVAEEDARRLHRERDRLVSERVQHVNRIKGLCALQGIYDYNPLRPQAMARLEQLRTTQGGALPPRLKSEIKRELQRLELVVEMIATLETERDAIVKDEASTHVNAKKIQNLHKLKAIGPEFAAVLVGEVFHRDFTNRRQVASYVGFAPSPFQSGSVAHDQGISKAGNRKGRTTGIELAWLWLRYQPDSDLSVWFRARVGTTKGRIRRIAIVALARKLLVALWRYLETGVVPRGAILKG

SEQ ID NO: 316229 - protein, 341 aa, unidentified
MRKPKQCRPHNDLSRSLIPLNLNHTLIAVIELSQKSWLVAGIIPGVEHQPLKKLEPGEDALSTLLDRWRKEANKAGYKVERIAVAFEAGRDGFWLARWLRAQGIEAHVIHAASVAVSRERRRAKTDRLDTEQLKRAFLGWLRGERDHCKMAAIPTFAEEDAKRPSRERESLVGEQGRIVNRMKATLARLGIRSFNPKLKNAAESLEDLRTAEGEPIPPNTLTELHRDLERRRLVIEQIRQIEAARLERLRRTPKAKPNAMVLLLARVIGVGIETADMLVQEVLSRNLRDRRAVARYAGLTGSPDESGSKRREKGLSRAGNARVRRGMVQRKRPPWTTALWA

SEQ ID NO: 316230 - protein, 421 aa, unidentified
MQVLYERCAGIDVHKDQVTVAVRLPGQGPGGRDTKIRKFAAFYGVLREMTRWLASQGVTHVAMEATGVYTMPVYHALLEPGCFEQVLVCNAAHVKNVPGRKTDAVDASWLAELLECGLLKGSFIPAAQIKAVRDVVRYRRKIVQERAAETQRLGGVLQDAGIKLDSVASSIDTVSGLAMIRALIDGERRGQVLAELARGVMRTKIADLSQALEGRFDDHHALMCQLHLDHIAHLNEMIAKLDAQVEAMMVPFARQRDLLATIPGIGPKAAAAIISEIGTSPAEFFTTGAHLASWAGLCPGNHESAGKRKHGKPRKGSQHLQPLLVECAWSAVRTNGRLKARYHRLVRRFGGYRNPAAKKRAIVAIAHTLAVVIWHMLATGNPYTDLGPDFYTTRSDPEKEAQRLIAKLEALGHKVTLAPAA

SEQ ID NO: 316231 - protein, 337 aa, unidentified
MESKLFMGCDIAQDTFSFCLRNQAQILLEGVIPNSKTTIRKWLHELKRIHGVELTSVIFCLEHTGIYGMLLMRILHERSLTVCVEGASNIKLSLGLQRGKNDKVDARRIAEYAMRYTDRLKQWKPKRDVLEKLQLLSGMRSRLIKARHVLSSHTQEVKRFMNKEEYMLLNKGTQEALKAIEKSIINADQKIAIIIRSDEHLSHLSKLITSVDNIGMVTCAAILIRTNEFQDFKESKKFSCTAGIAPFEHSSGKSVRGKTRVSHQAHKDLKTLLHMCAVSAITREGELREYYLRKVTQGKNKMLVLNAVRNKLVGRIFAVVRDGVMYQKNYRYNLVVS

SEQ ID NO: 316232 - protein, 321 aa, unidentified
MNSSNIIAGIDVSKTKLDIHIHPLGHHKVFENNVQAIDQILDFLRLHNVSKVGFEATGGYEKLCAYTLLSNGFEVYVIQPRWVRDYAKSLGITTKTDKIDCSIISRYINNTDMRVTPLTVDNGNIDCLKQKLSRRNQLVEIAKIQKTQIQQVTDISIIKQIEELLAILHNQIKTLEDEITTFIDQNQELKKKYVSITSTPGVSKITAITLICYLPELGTLQKKQISSLVGLAPFNRDSGFSRGKRCIHGGRSQIRTVLHMCILSAQKVNSYIKPFFTRLYNQYKKPYKIASTAAMRKLLLLANSLVRDGRVFTEEYSPKSA

SEQ ID NO: 316233 - protein, 313 aa, unidentified
MSQNSHSIIYAGLDVAKDSLVLDLQGHTYTLANDARGHARLVSLLASLPHLHVVLEATGGYEQPAARALHAAGIALSILEPSRVRAFARAKGLRAKTDPIDAAVLRVFGEAIAPAPTPAPSELQQQLGEWVARRRQLVEFLVAETNRSAHYLQTAVRRQAATLLRSLRAQIARCDEAIATLIAQDQPTAARAARLQQVPGVGAVTAAVLLAEMPELGTLSNQGAAALAGLAPYNRDSGPWAGTRRIAGGRAPVRCALFMAALTAARHDPILKAFRHRLLAAGKKKMVALTAVMRKLIVLLNRLLKDPNFHLIS

SEQ ID NO: 316234 - protein, 349 aa, unidentified
MQIKSQIRSIGIDLGKTTFHLVALGTRSQTVVRKKFSRSQLLVYTANLPASLIGMEAGVGSHFLGRALREQGHEVRLIPAQFVRPFVKSNKNDYRDAEAIAEAVERENMRFVPIKTEDQLDLQALHRVRDRLVARRTSVINQIRAFLLERGISFRKGPASLRRQMPEILENADEKLSPGMRRLLDFLWQEWKGLQAQIESLNTDLEQIASSDASCVRLQQIPGVGPLVSTAVVSAVGNGAAFKRGREFAAWLGLVPRQWSTGGKTKLLGISKRGNPYLRKMFIHGARAAVLRVKREGSTLGKWMSGLETRAARNVVIVATANKLARISWAVLASGNDYHPMHKPAVFSN

SEQ ID NO: 316235 - protein, 410 aa, unidentified
MEVLHPHCAGLDVHKDTVVACVRHMVEGKVTTHVKTFKTTTQELMVLSEWLSTEAATHIAMEATGVYWKPVWHILSDGEFELILANAAHVKNVPGRKTDVNDAVWLADLMAHGLIKASFVPDEPTQQMRDLLRTRKQIVRERSSHIQRIQKTLEDANIKLDSVVTNILGLSGHRILEALIAGQTVPQALATLAHRNLKATADELEASLRGRVTRHHRFLLKLHLDQIEAFDATIARIDEEVNANVEPFRVAIEMLSAIPGVGDLSATVIVSEIGIDMSRFETAAHLISWAGLCPKNDQSAGKRRSNRMKKGAPWLKSTLIQCAWCASRTKDSYLQTQYLRLRSRRGAKKAVCAVAASILTAVYHMLRNGTLYQDLGASYFDNRAKDKQALRLVSRLKNLGFEVQIKPVAA

SEQ ID NO: 316236 - protein, 345 aa, unidentified
MQAVTTIGLDIAKSVFQIHGVDAAGNVIVRRQLKRRYVLPFFQRLPPCLIGIEACASSHHWSRELQALGHTVRLMPPAYVKPYVKRQKNDAADAEAICEAVTRANMRFVETKTPEQQSCLVLHRTRHLFIRQQTAVINAIRAHLAEYGIVAAVGRNGVEELLGVVADPSDKRVPEIARACLAALGAQLRMLKAQILEFDRMITAWHRSNETSKRLDAIPGVGPALATALVASVPDPKAFRSGRNFSAWIGLVPKQHSSGGKDKLGSISKQGDRYLRSLFTAGALAVIRYSKIHGTKHRPWLTALLARRPTKVAAIALANKIARMAWARWPGVIATKNPSYLRREK

SEQ ID NO: 316237 - protein, 347 aa, unidentified
MRFYAQQHLYYCGVDLHARSLYVCILDQAGDVQVHQNLRADPQAFLQLVAPYRQDLVVAVECMFAWYWLADLCAREGIPFVLGHALYMKAIHGGKAKNDRIDAHKIAVLLRGGMIPMAYVYPARMRATRDLLRRRMHLMRKRAELLAHIQNTASQYNLPAFEKRIAYESNRAGLPDHFDHPVVRKSIGVDLALIKHYDRLLKELELYILRTARQHDPNALYRLRTVPGIGKILSLVLLYEIHDIRRFPTVQDFASYARLVKCTKESAGKRTGTSGTKIGNAHLKWAFSEAAVLFLRQNPTAQAWLKNTASKHGKPKALSILAHRLGRIVYYLLLRDEAFDMQRFMAA

SEQ ID NO: 316238 - protein, 403 aa, unidentified
MNMNAVGIDVSKGKSMVAILRPYGEIVSSPFEIKHTSGSIQSLIGHIKSIDGESRIVMEHTGRYYEPLARELSLAGLFVTAVNPKLIKDFGDNSLRKVKSDKADAVKIAHYTLDSWTELKQYSLMDEIRNQLKTMNRQFGFYMKHKTAMKNNLIGILDQTYPGVNTYFDSPAREDGSQKWVDFAAAYWHVDCVRKISLNAFVDHYQKWCKRRKYNFSKDKAEEIYGAAKELVPVLPKDDLTKLIVKQAIEQLNTASKTVEELRTLMNETAAKLPEYPVVMGMKGVGPSLGPQLMAEIGDVTRFTHKGAITAFAGVDPGVNESGNYEQKSVPTSKRGSSSLRKTLFQVMDCLVKTKPQDDPVYAFIDKKRAQGKPYYVYMTAGANKFLRIYYGRVKEYLMSLPE

SEQ ID NO: 316239 - protein, 412 aa, unidentified
MPVPEALFYVGIDWATETHAICVLTAAGRIKTQFTIDHTAAGFADLLRRLGRLTGNPGDVPVGIERPDGRLVDALLEAGFPVVPVSPNAIKTWRDGEVLSGAKSDAGDATVIAEYLRLRAHHLRPATPYSAQTRALRTVVRTRDDVVDMRVAATNQLSALLDMHWPGAKVIFADVESQISLAFLTRYPTYASAESLGEKRLHTFMVKHGYSGGRTAAELLARLRSAPAGTLDPTVTVAARDAVLAMVAVLTAINTARKALDVSVVAHLGEHQDAAIFTSLPRSGQINAAQVLAEWGDSRAAYDHPDAIAALAGVSPVTKASGKYRAVHFRWACNKRLRKAITCFADNSRHASPWAAKVYADAITRGHDHPHAVRVLARAWIRVIYRCWNDGVPYDPNKHGNASKLREIAAAA

SEQ ID NO: 316240 - protein, 331 aa, unidentified
MFPVGIDVSKDTLDLCMLYDGMKGRVKTRNIRNDRSAVAHILRWLRLQHCGPEDVHVVMEATGVYHERLATSLHDAGFCVSLANPHRSREFARGMGIMTKTDKVDAYMLACYALLKKPHRWEPPAADIRFLSALLRRRDVLLADAVREENRLEKYQSTDTPADVVSSCIRMAQLLREEVRSIERQVKAHIQASPDLKRDYALLTSIKSVGPQLGMHMLVVLRSHNFESADQAAAFLGVVPVEKRSGTSVRGRPRMSKIGPPQLRAKLYMSALCGKIHNKRMRTVYEEMCLRGKPKMVAIGALMRKLVHWCYGVLKTGTAFCDGGPRAAMNT

SEQ ID NO: 316241 - protein, 316 aa, unidentified
MTTVSEVFVGIDVSKHQLDVAVRPRGETWSATNAPQAFEAFIKRVTALSPTLIVLEARGGLEAAVVAELAHAGLAVAVVNPKRVREFARARGQLAKTDQLDARLLAHVAEAIRPPVRPLLSADSDRLAALVTRRRQVIDMLTAERHRQHTAPGSMRERIGQHIAWLTEELQALDNDLRQFIDQNPAWHATDDLLQSAPGVGPVTAMPLIADLPELGQLDRQAIAALVGVAPMNRDSGPKRGKRRTRGGRAQVRSVLYMAALSASRCNPVIRAFYEKLIQRGKEQKVALTACMRKVLVILKAMVKKQRAWQYVKKTA

SEQ ID NO: 316242 - protein, 340 aa, unidentified
MQITTVGLDLAKNVFQVHGVNEHGKVVLRKQLRRDQVAAFFANLPACLVGMEACSSAHYWARKLQSMGHIARLMAPQFVKPYVKSNKNDAADAEAICEAVSRPSMRFVPIKNVEQQAVLALHRVRQGFVRARTAQANQIRGLLGEYGLVVPQGIAYVAKRVPELIEDASIELPGAFRLLIDRLLEHLKQLQRQVEEIEAQIKAWHRASDASRRLEKVPGIGPLTATALVASVGDARNFDNGRQFAAWLGVVPRQHSSGGKPTLLGMSKRGDAYLRTMLIHGARSVIYRATQRLDAESWLMKLTNRRNKNVAAVALANKTARTVWALLAHGREFQAGYAAA

SEQ ID NO: 316243 - protein, 415 aa, unidentified
MALKIVYKICCGIDVYKNFVVACIAKTDKQGVTTYERHHFSTYTKGLKQLLKWLLDRNCKDVCMESTGKYWIPVYNVLEHDCSIVLAHPKYVKAIRGKKTDKKDAKWIADLFKHDLVAGSFMPPADIRQLRDLMRYRFKLTCFKSSEKNRYQNCLTVSNIQLGNVVSDTFGKSSQKIIAKILENPDDTSFDIGSLIHGSMKDKLPELELAIDGYITPEQAAKLKIIKEHFDNLEARKAELEELILALANPYQQEISIILTAPGFKNTFTAIGIISEIGTNMEAFPSAKHLCSWAGLTPTNNESAGKKKSVRVSKAGCYIKPLLVQCANAAIKSKKHPEIRDRYLRIKKRRGHKKAIIAIARMLLTALYHMLKNGENYNSDLYQKSDILPTTREITVEQAILMAQFQGFRIKSATE

SEQ ID NO: 316244 - protein, 360 aa, unidentified
MRTAQSNKLDFKGQNIYIGIDVHKTSWAVSVLSENATLKKFSQDPKPEALHKYLMTNYPGASYHSVYEAGFSGFWTHHRLTELGISNIVVNPADVPTMNKEKLHKTDAVDSGKLARELRAGTLKGIYVPDTQSLEIRSLIRLRSSIVKDTTRQKNRIKGLLYFHGVQMPTEFANSKSHWSKRFVQWLREVELTTEYGRKALDMHIEQLLRLREMLLQETRIIRQLSRKEPFAESLRFIMSVPGIGITTGISFVTEIDDIKRFKNSYQLASFVGLIPMCHSSGEKTGVGDITVRKQAILRYSIIEAAWKAIKHDPAMTMAFEGYTKRMPPSKAIVKIARKLVNRIYFVLKRRQEYVPCIVG

SEQ ID NO: 316245 - protein, 374 aa, unidentified
MEKDSTAYVALDTSKLRNAVAIAAEGRDGEVRYLGEIDNTPTATGKLVRKLAKRHPAVTFCYEAGPTGYGLYRQIKSLGHDCMVVAPSLIPQKPGDRVKTNRRDALSMARQLRAGDLTAVWVPDPHHEAVRDLTRARGAAVRDLRSKRQQVSALLLRLGQPYPGKTTWGKTHLAWLSSRKLDHREQCIALEEMLHAVRQATDRIGRLEQAIRAAVPDWSLASTASALMALRGIDLIAATSLLAEIGDLTRFASPRELMAWLGMVPSEHSTGPRVRRGAITKAGNRRARSMLVECAWSYRHPPRVGADKLAKVAAAPPAVRDIAWKAQTRLSARYRALRRAGKPDNVAITAVARELAAFIWSVGLAVASGATPQA

SEQ ID NO: 316246 - protein, 402 aa, unidentified
MNSVGIDVSKGKSMIAVMRPFGEVVVSPFEIHHTDSELCELTKLLSGLSGETRVVMESTGNYHLPVAWLLNDSGFYVSVVNAMLVHDYGNNSLRRAKTDKKDAIKLANYGLDHWLTLPRYVPEEDTRLMLKNCYRQYQQYSKVRTMLKNNLISLLDTAFPGANRLFSSPPRADGSEKWVDFVAAFWHCECVCGLSEKAFISKYQKWCKKCSYNFSEDKALDIYASACGHFSVMPKTDTAKLLVEQAVSQLRATSAALAALKLEMQSLASSLPEYPVVMRMFGVGSALGPQLMAEIGDVRRFHSKKALVAFAGIDAPPYQSGQMDIYSRSISKRGSASLRRTLFLLMGVYLQNAPVNEPVYQFMDKKRSEGKPYKVYMMASANKFLRIYYASVKAYLDSLDEA

SEQ ID NO: 316247 - protein, 340 aa, unidentified
MVHVGVDLHKRVSQIAVLTADGELTQHRLPNDLAQLQSFFAQLPTPSPIAIEASGTWWWLVDLLERLGHQPVLSHPKETKAIASARLKNDKVDARRLALLLRGDLLPTVWIPPAALREARELIRHRVSLVWLRTQVKNRLQAMLARRNLQPTRAKRWMTVRGQQELQALALSPVPATIREDCVALLRVLDTQVRRLDLELQSRWGDDPRVQRLLTIPGIGPFIAIVLVLELGDIHRFPTAKHLASYIGLTPRVRASADRVRSGHISKEGNRLLRWVLVAAATQAARRPGPLRAWFRAVQHRKGKKIARVALARRLAEIVYHVWKQELDYFVVLRHGVVRG

SEQ ID NO: 316248 - protein, 392 aa, unidentified
MIYVGIDVAKDKHDCFITNSDGEVLFKVFTFSNNREGFETLFQRIESVSEDLNNVKVGLEATGHYSYNLLGFLLDKGLATYVINPLHTNLFRKCLSLRKTKTDKVDSRTIATMMMSDMNLKSYSDISYRTEELKSLTRYRFNKVKERAKLKSSVSRLVCILFPELEKLVPTLHMASIYALLSEFPSANAVANAHLTRLSNLLSESSKGRYGKETAVKFREAAKSSIGSHMPAKSLELKHTIKLIRELTIEINEIEAAIKQIMDEEIQSPILTIPGISYRMGAMIIAEIGDFSRFDSADKILAYAGMSPSTYQSGRVDNYYSHMEKRGSKYLRYALYNATKYVCHWDDSFAAYLAKKRSEGKHYNVALSHATKKLVRLIYAMEKSGRAYLPTN

SEQ ID NO: 316249 - protein, 458 aa, unidentified
MNRRRKKKAGNEQQDWSVNLDVVHPNAAGIDIGNESHYVAVPPDRDMEPVRQFACFTEALQQMAAWLKSCGIDTVAMQSTGVYWLPVYEILTEEGLQVFLVNARHTKNLPGRKTDVQECQWLLQLHTFGLLNNSFRPPEEICVLRAYWRQRAEHVASASTCIQRMQKVLTEMNVQLANVISDISGLTGLTIIQAILAGERDRYKLADLANFRIQASREEVARSLEGNWRKELLFILQQELNLYQTYQQQIAECDTALAAHLQTLEDKVEPGSQPPAAKANKRAGGNAPTSFDLRGELYRISGTDLTQIDGINIMNAQTIIAEVGVDMSRFPSEAHFASFLGLCPDNQITGGKVLRRGTRHVENRAATAFRMAATSLWRSKTYLGAKFRRLRARLGAPKAITAMAHMLARLVYRMLRYGEQYVDKGMKYYEEKYREHEIRSIQKKANDLGLVVTLTTAA

SEQ ID NO: 316250 - protein, 400 aa, unidentified
MLSIGIDVSKGKSTVCGMKPGGEIVYTPFEVQHTREGMSELVSLLRGSGEEVRVVLESTGSYHCPVVAALLENGIFVSVVNSLRMKRFCSQSIRKVKTDRIDAMQIALYGLAYWQELQPTRLPENTYRELQLLARQYYQMTSILIKAKVDFNALCDQVLPGMQELMNDHAGRHKLSDFVLRYRHTTHILEMGETRFRKDYCKWAEKKGYRNRERMAALIFATAQNGIPVLPNAPSTQIVITEAIRVLHTVEASRDAILTQMQALAKTLPEYSLVREMPCIGDTLAPRLIAEIGDVRRFHSKRALIAYAGIDAPPYQSGKFCANNRHISKRGNRYLRKTGYEVMQSYVMHKPANDPIFTFIEKKRGEGKSGKLAMVAGLNKFLRVYYGKVTELYRSLPAIE

SEQ ID NO: 316251 - protein, 456 aa, unidentified
MKIPQSTIRLLTGRLVKILLNREVSTMKSNTQNAKIEAITEKTLVLGIDVGSETHYARAFDYRGVEYSKKPFKFSNTEAGFVTFKAWVLDIKEKHGKDKVIPGMEPTGHYWFNLGKFLQDNEMKPVLVNPHHVKKSKELDDNHPTKNDRKDPKVIAGLVREGRYMIPYLPDGVYADLRTASNIRFQLQVELTRIQNRISRWFNIYFPEYKTVYGKPDAKSGMLILKAAPLPEDILTLGIDGVNQIWRDAKLRAVGKARAKTLIEAAEHSVGSKEGAVSARMEIRMLLEDYESRNIRLQEVMTLIEGLVKQIPMAEKLLEIKGVGIKTVSGFLAEVGDISRFNTPKELQKLAGLALVESSSGKHKGETTISRRGRKRLRYLLFEVAMSLVAKNPEFRELHNYYTTRRLNPLKKMQSLMAIAAKLIRVFYAMLTKGVDYDPKKMVSDIKRPAVYLQAA

SEQ ID NO: 316252 - protein, 422 aa, unidentified
MHEERRWFVGIDWASQEHVVTLCDTQGNKIGEREFVHGGTGLSDMIAWLLKASGGATGEIHVAIETPHGPIVEALLERGFNVYSINPKQLDRFRDRFTVSEAKDDSLDAYVLADSLRTDMHLFRKLIVSKPLIVELREWSRIDEELKAERVRLANRLRDQLWRYYPQMLELADDLSAEWVLDLWEAAQTPEKAARVREPTVARILKSHRIRRFDAAHVISELRKPALSVAQGTTEAATAHIRLVVAQLRLLNRQLADAGLQLDRLCKKLAEPIAGDEGENVSGQRQEHRDVTILDSLPGVGRTVLVAMLAEAPDALQRRDYHALRNLCGSAPVTRRSGKSCLVMRRRACNRRLRNAAFYWAQTASQCDPTSRAKYKALRARGHGHARALRSVVDRLLYVACAMLENRTLFDPSFAEKKAAVA

SEQ ID NO: 316253 - protein, 385 aa, unidentified
MTSSITRFQIIPAQFEIFAGLDVDKKSMSTTFTDHASLQKSLRLPYSATHLLNYVDKHFAGKRIAFVYEAGPTGFGLHDELVARNHTCLVVAASTVPTEPGKRVKTNRLDSRNLSLRLRGGDLKGIHVPSRSYRELRHLVQLRDTQMQQLRATKCRIKALLLYEGIEFPDPGGRWNAQSIAALYALSCSSEVRFKLDHLIGTLYFHFNSAAAVQKRIRQFCKSDPELQQSITLLTSLPGVGWITAAQAVARVGNWRELKNVRQIAGFLGLVSSEHSTGEKENRGPITRSGDSRLRNKLIQCAWVAINKDPELRAFYRSVYQRQPKKVAARKAIVAVARKLTMRMYVVLKEQRPYVIRPDIAEAPLTAEETIGPRERLDASQNEQL

SEQ ID NO: 316254 - protein, 423 aa, unidentified
MNRLHYELHVGIDLGQWLHQACVVDANGELLEERGFEHSVDGLGTTLAWLLSLAGKDAERIAVAIEKPHGAVVETLLESGVAVFAINPKQVDRFRDRHSMSGAKDDRRDAFVLADALRTDGHRFQRLQLPPPEMVALRELLRTRDQLVKNHVALSSQIRDLLARCWPHLVTLAPKDKALDAFFCELLQLFFDHHPTAELSLQNIQKLVHQHHIRRLQPEHILEVLRKTPLRVAPGTTEATSAHLNLLLHQLLLVRQHRRDSDQHLERWFKQLQPTSDQPYSDAAILASLPGVGAVVLASVLSYAHDPVRLRNLDAFRSLGGIAPVTKKSGKRGKQRPQILMRRARSLPLNNALHHWARIAVLTDPRFKEHYGRLRDRGHSHARALRGVMDRILAIAVAMLRDQTLYDPSKRANFNKGAKKVSS

SEQ ID NO: 316255 - protein, 468 aa, unidentified
MARHYFTKLEDFMTKMLYTGIDASKGYADYVTINELKQVVGDFSKAYDIKEGHEKLRQHIAELNKKYEPKQIIAALESTGGVENNWLNFLYSLKDEYPIKVARLNPNVVHQYQKTALRLTKTDRTSSLAIAEYLSTHSDRVHFYEPDRYEKIRSSSSVLQLMIKQKTQYSNSLHMTLYNVFPQIIPYCKNGLTKSTLKLLLLYPSAAHMAKAKFGGKSPVTYYTLTALNKIKDKCEQRVLQDVDELAAYEVECLAEEILRLEEKIELFTEKLINLLPEKQVELIQTIPGIAKRSAVYLLSIIGDINRFESADKMVSYFGLYPVLAESGDMKKQPRLCRKGNKLVRKTLFMCVLSSTSKNPYWKKLYQRHLNKGKSNKSALCAMMAKLLRVIYGVLKHQNAYDPQIDMAYRDRFKPVPKEESVEKIEQSVEELQTILTSAPISKRYTKMVKEQSDSLLRTRSPECADCP

SEQ ID NO: 316256 - protein, 323 aa, unidentified
MAQKHVGIDISKDTFNAAFQTSKGCWSDAEFENKPSGRRKLLEWAGAEGVFTMEATGYYHMETALFLHGKKRLVHVANPMLVKRFSQMLFQRGKTDKADARMIAEFALCNEDRLRDWKPAEGRLGEARSLLTAIKQVSKQITQSTNCLGALKLTKAGKIAALAMAVLLRSQRRALHALESSLQTIVKEEFKDMYNAIMTIPGIGPKTTVALIVCTNGFKEFKNQKQVTAYVGLSPRVFESGSSVRGKGHICKLGNPYLRKLLYMCAVSSLMHNPVCKTFSDSLDDKGKAKKVAIVAVANKLLRIAFSVAKSKTTWNPELAMAH

SEQ ID NO: 316257 - protein, 338 aa, unidentified
MEWTVAIGIDTHKEVHVAVALDALGAELDSREIATTPAGYQSLLSWALELGVPAFSVEGTGSYGAGLVRFLEQAGINVYECERPRRQERRRGKSDLIDAALAARRLLGGEHLSIPRGGGRREDLRLLLLERRSAMRARTAALNQLSALLVTAPDHLRSRLGALSGERLACAAARLRPRPDVLNGVLRRLGQRVERLSTEVADAERALAGLLAEVAPDLLEECGVGPVCGAQLLVSSGDPSRMTSEASFAALAGTSPVDASSGKQRRHRLNRGGDRQLNWALHVIALARIRHHGETTAYYQRLLAAGKTTREARRCVKRALARHFYRRLCEIPTLPLTT

SEQ ID NO: 316258 - protein, 342 aa, unidentified
MQISTIGFDLAKHVFQAHGVDMHEKVVVKKQLRRAQVIAFFEKLPPCLIGMEACASAHYWARELTKLGHKVKLMPAKDVKAYVKRSKNDAADAAAICEAVARPTVRTVPMKTPDQQARLMQHRTRDLLVRQRTQLSNAMRAHLAELGLIAAQGREGLKSLLAIVANENDDRLPADARASLGVLAAQIVACNAQIATLEKRIHTQHRTCEASQRLETIPGIGVIGATAIAATVPDPSVFKTGRDFAAWIGLVPRQDSTGGKQKLGPVSKQGDRYLRRILVVGAHAVLKHARTHPEKHPWLMQLLARRPAKLVAVALANKMARIAWAVLARGETYRAPRIAATV

SEQ ID NO: 316259 - protein, 355 aa, unidentified
MTSTKYIGMDVHKESISIAVRNSAGKVVMECVIETKASMILQFIDGLRGDVYVTFEEGTWAAWLYDLLKPHVTKVLVCDPRRNALLQEGNQNDRVDARKLAELLHNNQLRSVYHGNHGLRTLKELVRSYLTITQDVSRVMTRVKAVYRSWAIPCTGKQVYAPHHRAEWLAKINEPGVHRRAEFYYQQLDALRCVRQQVRRELLAESKKHPAWKRLCGIPSIGPIRAAVLLGILQTPHRFRSKRQLWTYSGVGIETSSSADHQVVKGQLERKKKPVEIRGLNRNFNHDLKNLFKGAAIVAATKPGPFAEFYAELVAKGMRPEMARLTLARKIATIVLIVWKRGVCFDAQHLKPQTA

SEQ ID NO: 316260 - protein, 353 aa, unidentified
MTRLPNRTNDAPVTVGVDVAKATLEVGFSDSEPTLALNNDEAGHAMLIKHLAALRSNGASIGLIVLEATGGLELEVATALQLAGHAVVVINPRQARDFARSMGYLAKSDHIDARVLAHMGQTLLQRDDLGKLVKPLPDERQRMLQSMVTRRRQLIGTRIAEQQRAGAPDKRMRRSLNTIMKALDREIARLDKEMLAFIGEHHAELAALLDSVKGVGKTTVGTLLAEVPELGELNRREISALVGVAPINRDSGTMRGKRTIFGGRPQVRKVLYMAALVATRFNPVIKTFYQRLLAAGKPKKVALTACARKLLIILNAMQDAPTVRCRASLGLTFKTVAWFVGPFSAIPCLQRPQ

SEQ ID NO: 316261 - protein, 388 aa, unidentified
MIQVDDLSRSLIAFEQISTLVIVVELSQSSWLAAGVVPGIERRPLKKLDPDPTALLHLVEGWRDRATKAGRAITRTVLAFESGRDGFWLARWLRVRGVETFVMHSTSVAVSREPRRAKTDRLDTEMLIRVFLGWLRGEPRHCKMVAIPTLEEEDARRPSRERENLVGERTRIINRMKAALVRLGIRGFKPGLLTAPQKLDALRTPEETPIPPNMLDEMRRDMARLAWVREQINAIEQARLERLERAPATGRHAMVRMLARVIGVGVETADMLVQEVLSRNLRDRRAVARYAGLTGSPDESGSKRREQGLSKAGNARVRRGLIQLAWRFLRFQKDSALAQWYRGRTEDAAGKRKRTMIVALARKLLVALWRLVTIGEIPVGVALRTAVA

SEQ ID NO: 316262 - protein, 333 aa, unidentified
MKIIGCDFHPSFQQIAMVDTETGEQTERRVTLAEAVEFYRGLAGPVRVGMEACGNTLWLERLLAELGHELWLGDAGKIRAMEVRKQKTDRRDAELLLRLMLEGRFPRLWVPSQEQRDLRQLLIHRHKLVGMRRQVKNQLQHLALNQGVQQKRKLWTQAGRKLLEELPLTGWTARRREESLQLLDDLDHRVGELDGAVEQAAKKDPVAQLLKTHPGVGPITSLAFALTLGDVGRFAHSRQVVSYLGLNPSEHSSGGRQRLGAISKQGNPMVRSLLVEAGQSAARLVPELKRAYQRLKHRKHSSVAKVMVARKLAVRLYWMWKTTTAFNRHSHAG

SEQ ID NO: 316263 - protein, 324 aa, unidentified
MIDGILGIDVCKNTLDVSISSYTKVRTKSFTNSPDGWRHLLDWLIAQKIQRVHACLESTGRYSLGIACALYEADHVVSIINPAQIRDFVRTKLGRNKTDGVDASHIREYCELFKPSPWAPPSEAHRRLGELQTIRSGIIAGLTEWKNRKNSGIVDAEVQALADATISHFTSQLGAVDKAIALTIDNDCDLQSKRDLLLSISGVGETLAGVVLAELPGPDVLRSSAEVVAYAGLNPRQHQSGTSIDRATRISKIGNAVLRAALYMPALSAMRYNSAIVALVSRLKSRGRLKPKQIVVAAMRKLLVLCFGVLKTGRPFDAAIAMGG

SEQ ID NO: 316264 - protein, 323 aa, unidentified
MNAPIYCGIDVAKRNFVIGFSHQKKTKTETNNAKGIQHTLDYLSRFNVALITLEATGGLEIPVAKALARAGYRVFIANPLKASEFAKSQTRAKTDAKDAVNLAFYGLTCELKGEVEHQLYVPLSEQEEQLEALVVRRRQLVDMRVAELNRLQQSHETQLDNIQQHIEMLDKLIAELDKDIDDQSKHFSDKADLISDIKGVGKNCVAVMMSSLPELGKLSSKRIASLVGVIPHPQESGQWKGKSFCYGGRAIVRNALYMAALSAIRFEPVFKAFYTRLVAKGKAKKVAIMACMRKLLTIMNALVRRNEKWDATRYLSTESVGQN

SEQ ID NO: 316265 - protein, 391 aa, unidentified
MLYLGIDIGKNNHVASLIDEKSKPLFKAFSFSNTIDGANSLIEKLSCYADDIKSVEIGMEATGHYWLSVYSFLLGKGYTIHVVNPIQTDGWRKGTEIRKRKTDIIDSILIADLIRYGDFVETSLSDEDTMSLRNLSRFRNYLVSSISDLKRKVICVLDQIFPEYQSVFSDIFGATSKELLSHFQTADDFENINAEKLEKILENISLKNFAKNKISVISELAANSFGLKFCRDSFSLQLKLLIEQIKFIEAQVSDVEKEINIILERINSPITTIPGIAAITAAIILGEIGDIKRFSNASKLAAYAGIDASVNQSGEYQSTNNKMSKRGSPYLRKALFQAALVAAFNDPVFSAFYQKKRAEGKHHLTAIGAVARKMCNIVFTVLKNNTTYKIQ

SEQ ID NO: 316266 - protein, 331 aa, unidentified
MKILDTVGIDMSKLTFDVRIHGTQSYAQFENTNEGFKQLLNWTYKNSSFPSENIFFIFEHTGLYSHKMAVYLTEKKVSFALVPGLEIKRSLGLARGKNDKVDATNIAKYAYRLRDEIESYEMPSEQVQSLKQLLSLRERFVKQRAGYKASLKEQKRILPRKGNKILFTSQEKTINYLTKQIVTIEEEMMEIVKSDQQLIEQFKLIISIKGVGKQTALFMIAYTHGFTKFKNWRKFASYCGIAPFPNQSGTSVRGKTKVSNLANKKIKSLLDLCAKSSIQHNWEMKNYYNKRVDEGKNKMSTINIIRNKLLSRIFAVVERKTAYVNLMKYAA

SEQ ID NO: 316267 - protein, 368 aa, unidentified
MKMNAIKAAPAASAIAIKNEKSAKAKRILIGTDVHLRGYQAARKVDNGVIGVVENFRSEEALLLHVEKQCERAEQVVVVYEAGPLGYTLYRKLTARGVLCYVCAPDSSEQKRKRRKNNKIDARNLTSKLFNYLNGDEGALQLARVPTEAQEQLRLASREHDQMVEERKRLGAKGNALLLSQGFGSWSNWWRPKAWAQLSSLVPEWLLERLKIWVDVLKMLDEKICLAKVALARACSGPRPKGVGALSQIQLQSEVLDWSLYTNRRKIACLAGMVPSEWSTGDTERRGSITKVGVPAIRRIIVEMVWRIVLFQPQYKPVQKWQKVLQGTNPALKKKAVVAIGRQLIVDLWRLQTGRVTAQELNLVMVGA

SEQ ID NO: 316268 - protein, 352 aa, unidentified
MIVLGADMHKSSHTIAAIAAATGEVLDDKTAAVGARGFDQVVRWARRLGPDRVWALEDCRHVSGSFERFLIARGERVVRLPTRLMANSRRSSRERGKSDRIDAIAVARAALAEGVETLPTAELAGPELDIRLLVDHRERLVRARCALNNTLQWHLHDLWPELELPGSSLFYGKWSTRIARRLSRAEQTMRVRIARDELRRLRELTHAINALEAEIADLVAQVAPQLLDEPGFGPLTAAKLVGEIAGAARFASDAKLARAAGLAPIPVSSGRTDRHRLDRGGNRQINAAIHRVAVTRARCHPETIEFVARKKAEGKTHREAVRSLKRHLARRIWQLLRAPHPVPETTPIPSTS

SEQ ID NO: 316269 - protein, 415 aa, unidentified
MQALYRCIAGMDVHRMLYVVTILVELADGTEEKHQRSFGGFKRDRRALVAWLVELGVELVVMESTGIYWKSIYSTLEKAGIPAHVVNARHVKNVPGRKTDLSDSEWLARLGRYGLVKPSFIPPEDLRELRVVSRYRDKVAQTLAGEKNRLHKVLDDAGIKLGAVVSDIHGVSAQAMIDGLIDGTPIEQLPDLAKGTLREKHELLELSLDGELTPRHLFVLKNIREHIRYLESELASLDAYLIDAMAPYADYWRFLQTLPGLDQISAAMILVEIGTDLKAFDNVQHFASWAALCPGNHESAGKRKTGRIRKGNHRIRHLLCEAANAARRTHSVFRSFYQSLVPRKGHKKAIVAVAHKLLRTIYMLFTRRQAYRDPGIDYQAMVVNRNAPRWIRALKKYGFWPKISTLNAPIAAPVH

SEQ ID NO: 316270 - protein, 444 aa, unidentified
MAIRKREDEVFPDAAAVDIGASSHWVAVAPRSSDEPVREFGVMTDDLNAMADWLLACGVETVVLESTGVYWIPVYELLEQRGLKPWLIDARQVKYVPGRKSDVQDCQWLQKLMSMGLLRAAFRPVANVCVVRAVARQRDVLQAEQASWVQRMQKCLVQMNIQLGEVISDVMGATGQAIIRAIVAGERDAQVLARHRNGRIRAGEAEIARALKGNWREEHLFVLKQALAMYDDIERHIGQCEAKLQELMSHLGSTPVELGPVPRAGSKARKDFDARQMLANWAGVDLTRINGLGAGTVLKLLSEIGPDLSRFASVKHFCSWLGLSPGTKISGGKVLSSGTKRAANRARQALKLAAQSLHHSDSALGAFYRRLSARMDKPRANTATAHKLARMVYFMLTRGEAFVDQGQQRYEEQQRQRSVAALRRRAASLGFTLAPCPQPQVGAA

SEQ ID NO: 316271 - protein, 400 aa, unidentified
MNPLSIRVAVDVGSTRHRVAIGLPDGKLLDEFDIDHNAVGFGEFFSHIETIEHRHHLPVAVAMESYNGWARPLDGHILRHGYSLYSVNNLKLARYKEIFPAPAKTDAIDARRILELFRLSEHLPLAKDALHEVAPTPVANDQLKRLTRRRKQLVWERVRILNRLQSDLHAVCPGLLTITGEAGNLWFLNFLTCRDKLPKLAKLRQSSLLAIRGVGKLYAARIQAWQPQAQFAPEFEWVGEMIQQDARRILALGEDIKAMDQKIADISVLSELAQSIGSIPGFGQTTMAEIAGEIGTLERFETESGLAIYTGMAPLDNSSGKKNSTKAPRQVNTRAKAAMMVAVARHIECVPASRAYYDRKRAEGKKHNQAIRALGRQLVRVIWSLVKQGRKYEIREENSK

SEQ ID NO: 316272 - protein, 343 aa, unidentified
MQIIRIGLDLAKYVFEVHGVDCHGKAVLRKTLRRDVVSGFFANLPPCQIGMEASNGAHYWAKVLTEFGHEVRLISPQFVTPYVKSNKNDRNDAEAICEAVGRPLMRFVPVKSVDQLAVQAVHRIRSRLVGGRTRLANQIRGVLAEHGIVIARNIAKLRRSLADIAGSDENGLSDLVRDFVRELQLELVELDRRIATYDRRIRELYRSSEQCQRLGQIEGIGPLSATALMAAVGDRRCFKNGRQFAAWLGLVPRQRSSGGHARLFGISKRGDRYLRTLLIHGARAALSRAGGRQNPRSQWLVKLRERRHPNIAAVALANKNARIAWAMLSGDETYDPGLTVGPA

SEQ ID NO: 316273 - protein, 313 aa, unidentified
MSQNNTSILYVGLDVAKASLQLDLAGQPHALANDAKGHARLLKLLRDHPAAQVVCEATGGYEKPVLRALHAAQVPASVVEAGRVRHFARAKGQRAKTDAIDAPVLSEYGRAFQPAPTPAPTAQQTRLAELSQRRGQLLHTRTAESNRAAHYLDQLCVRQARQLRQALEKQIAQCDAAITELIAADEKLQAQAERLDAIPGVGAVTAATVLAELPELGRISDGAAAALVGVAPCNRDSGAMQGARHIAGGRAAVRCALYMATLSAVRHDAILKAFYLKLRAAGKKPKVALVAAMRKLVVLMNRLLKNPNFQLAH

SEQ ID NO: 316274 - protein, 349 aa, unidentified
MLAEKVDYVIGVDTHRDQHTLAVVTASTGAVVAQHAVGTTVRGYAAAVAFAERYAAGVRVWALEGAGHYGAGFTRYLSSRGQLVIEVGRTARAERRLQGKDDALDAVRAARSAIASKRLTLPRAGQRQEALRVLLLTRRSAVDVRRLALVQLRSVIVTAPESLREELRRLPVGQLIRRCSRFRRSESRTPDEFAVVLVLRSLARRIEAATEEANDLEREIIGHVRGLVPELLNEPGVGPIVAAQLIVTWSHHGRLRSEAAFARLAGVAPLPASSGQTIRHRLSRGGDRQLNRALHTVILHRRQHDPATRDYIARRVAEGKTARDATRILKRYLARHLYRVMQNAPLAMT

SEQ ID NO: 316275 - protein, 413 aa, unidentified
MATTSSPTRFVALDIHRKYLVVGAVDPHQQVVLPPRRFGFEAFSAWATTHLGLCDAVVLEATSNAWLLYDQLEPLVGSVTVAHPLAVKLIAAARVKTDSRDTIKLAHLLAANLVPAVWVPPVYVRELRALVSHRKRLVNQRTQVRNRLHAVLHRHNLTVPPGKPFAAHQQEWWLSLDLSSSEKLRVQQDLSLLRSLEELVAAVEAELGRLSTCEPWVKQVPFLVQLPGLGVLSVMSILAAIGDITRFPSAKKLVGYAGLGASVHDSGETHQSGHITKEGRRDLRGVMVEAAWIAVEHHPHWKTQFERLSRRIGKQKAIVAIARKLLVAVWHVLTEQQADTNAQAQAVARKLMNWISHHGVIPGQHRDRLLLLYQHLDELGLSEKLEEIDYYGTTYRLSVRQQLLREAQKRQSS

SEQ ID NO: 316276 - protein, 344 aa, unidentified
MGEVSTIGLDIAKSVFQVHGVEGAGEVVIRKRISRTKMLEYFGDLPPCLVGIEACPSAHYWGRELQALGHTVKLMPPSYVKAYLKRNKNDANDAAAICEAVTRPSMRFVPIKTKEQQTALMLHRTRQLLVRQRTMLSNALRGHLAELGIVSAKGRNGTGELLRIIADAADNRVPPAIRGILDALARQYSAIGAEIGSIDKSILALHRSCEASRRLAEIPGIGPLVATALVAEIGDWKAFSSGRSLAAWIGLVPKQHTTGGKDRLGSITKQGNRYLRWLLVVGAMAVIRYAKMHGTKNRPWLARLMERRPTKVAAVALANKIARMAWAIMVRGERYKEPKLLMAA

SEQ ID NO: 316277 - protein, 437 aa, unidentified
MRVLYEHVAGIGVHKDMIKVAIRSPGEKPWTRKTEILEFRTFYGVLQEMARLLRRRGVTHVVMEASGVYTDPVYYALCEQDFAEVAVVNPAHARALRGHKTDAADCRRLAELFECGLLRGSYIPPAELREVRDLTRYRMKTVQARTSEIQRPGKALESAGIKLGSVASDITGKSATAMIDSLIDGERRGAVLADLAIGRMRTAGKLADLSMALTGRFTEHHALLCRLHRDRIAGLDAAVADLDDQIAGRAGRWQRELDLLKTVPGFGDVVAQTWLAEIGPAPHRHFASHEKLASWVTLCPGNNISARKRKHGRTGDAGTYIKPMLIQAAWNAIRPKGRLQARYTRLVRRFGGEKNPGAKKKAITAIAHTLLKIAYQVLKSEVPYQDLGADFYTRRESPDQQRAYLERRLRKLYPGCAITITISPPEAVLTSTVSNAP

SEQ ID NO: 316278 - protein, 427 aa, unidentified
MSEVESVKQEPQFAAFIGIDWADKKHAWSLRAVGSEKRERGELEHTPEAVEAWVGQLCQRFANRPIAVAVEQSRGALVFMLSKYEPLHLFPVPSTMSARMREALYPSGTKDDPRDADLLLDLLLQHRDKLRRLSPDTEATRLVQNLVEARRKLVDEKTAQTNRLTGHLKIYFPQMLDWFERLDTELVCALLERWPKLEELQKVPPAKLRTFFHKHHCRDEELIERRIVAIRQAIPAIRDRAVIEANSTLVNVIVRLIRSLVEGIANLDEKVKEAAAAHPDFFIFDSLPGAGAALAPRLLAAFGSQRERYGSAQEMQSYSGIAPVTESSGKKQWVHFRFACPKFLRQTFHEWAGHSIAYSVWARSYYQRLRSRGKGHHAAVRALAFKWIRVVFRCWKDGVAYDESKYLASLARRGSPLSAIVATGKTL

SEQ ID NO: 316279 - protein, 337 aa, unidentified
MEYFAGLDVSMAETRVCVMDRDGAVVFEAKVPSAPADIAAALAQAPACGRIVFETGRMAPVLYHGLSQLRLPIVCIESRQAYQALKSLATHKTDRNDARGLAHLARTGFFKPVHVKSLPAHAIRSLIIVRKKLVGQRVTLENQIRGLAVVFGVQLPRALSSAFIRRALQASDGIPGLSAAMRGLAAARSAVLAAVVAIDADIRRMVRASDACRRLMSIPGVGQLTALAFTATIDDPERFRRSRDIGAYLGLVPRRYQSGEVDYTGGISKCGDRRVRTLLYEAANVMLTRYKGSLKLKDWAFAIAQRSTMRKARIALARRLAIIMHAMLRRGTEFQPA

SEQ ID NO: 316280 - protein, 371 aa, unidentified
MKSIIYVGLDVHKESYTVCCYSIKEDKVQYQQKIGPDYKMILKYLEQTRKHYEEEVEFICGYEAGCLGYTLYHQLTDRGVNCVILAPTTMAIMNNNRVRTDKRDASNIARCLAFHTYSAVHIPTAEDEAVREYIRMRDAQKKALKVIKQQILSLVLRHGYRFDGGKNYWTIKHVAWLKSLKLGGVLQEGLDEYLITFNYLMDKIKRLEQRIEEFAEEERYREKVKKLQCLIGVKTYTALSVIVEIGDFKRFSKAEKMAAFVGLVPGEDSSGEKQRRGGITKAGNSHVRKLLVESAQSYTRGAIGHKSLDLKRRQNGNTAEVIAYADKANERLRRKFYRMTLKNKTNRNVAATAIARELACFMWGLMTDNTA

SEQ ID NO: 316281 - protein, 286 aa, unidentified
MEHYAGIDVSLELSSVCVVDAQGKIVKEAKVASEPEAVVAFFEALGFAVKRIGLEAGPLSQWLHAGLKEAGFETVLLETRHVKAALSAMTVKTDRKDARGLAQLLRMGWFQPVHAKSMASQEVRALLVGRKQLLGRLIDVELSIRGILRGFGLKVGAVTRKGFEARIRELVTGQATLERIAEAMLSARAALKAEYEKLHKAVLAIVREDAVCRRLMTVPSVGPLVAITYKSAMDDPSRIAKSKAAGALFGLTPKKYQSGEKDVTGGITRSGEVQSGRKSPWLARSQ

SEQ ID NO: 316282 - protein, 339 aa, unidentified
MQLYAGLDLHSRNTYIGIMDKEFKRVFAKRVSNNLPLIIKTLEPFQDQLKGLVVESTYNWYWLIDGLMDAGYQCVHLANPSAMKQYEGIKHTDDQHDAFFLAQMLILGILPQGYIYPKEDRPVRDLARKRLFLVRHKTSHILSLQSLIARCCGQRVSANDIRKFTVEDLQQLLKEEHIVLSAQANLDTIVFLKQQIQRLEKTIQNKVKLNKAFQQLMTVPGIGLILAMTIMLEVGDIGRFAQVGNFASYSRCVSSQRLSDGKSKGHGNRKNGNRYLSWAFTEAAHLSRRYNEHFRSYYNRKVAQANTSLATKALSNKLARICYYIMRDQVPFRQELLSH

SEQ ID NO: 316283 - protein, 370 aa, unidentified
MKKNSTRPQSPKRAAARSKGPITIGLDLGDRTSRYCAVGDNGERMSEGSVATTRKAMAQKFSGMGRCRIAMEVGTHSPWLSRLLSKLGFEVIVANARQVQLISASSRKNDRMDAHMLARLARVDPQLLRPIRHRSEQAQADLMTIRIRAALVEARTSLVNAARGFTKAMGERLPACDTDSLGVEQLEALPAVLQPRLQPLLEQIEALTAQIKKLEGHIEQIARIEYPETQLLTQVHGVGTLIALTFVLTVEDRERFQKSRDVGCYVGLRPKQSESGQSQPQLRITKEGDRYLRTLLVQGAHLILNRRGPDTDLKRWGLKLAERGGKNAKKRAIVAVARKLAVLLHRLWVCGEVYEPLRNSHPAATSNKAA

SEQ ID NO: 316284 - protein, 377 aa, unidentified
MKNVRFVGLDVHAETIAVAVAEPDGEVRSLGIIPNRTESIGRLIRKLGKPEQLRVCYEAGPTGYVLYWQLSELGVKCEVVAPRLVPVKAGDRVKTDRRGAAKLARSLRSGDLTAVWVPDAAHEALRDLVRARLAAKRDQLRARHRLSKFLLRHGRHTPEGTSAWTEKYLHWVKSAVHFEHTAQEVTLSDYLHEVEHAAERVARLERSIDTAIEALPAKMRAVIDALQSLRGIAQISAVTIMAEVGELSRFEHPRQLMAYSGAVSSEHTSGERVRRGAISKTGNAHLRRIVVEAAWAYRHRPAVGKTLAVRQRRSSPAVTAMAWKAQNRLHQRYARLIGRGKCKQQTVTAVGRELLGFIWAIGVHVERELSVRPRQAA

SEQ ID NO: 316285 - protein, 461 aa, unidentified
MGIDVSKGYADFMIINSRKKPVAQTFQLDDTFEGHRTLYNTLGAFLAKHDDATLFAGMESTGGYENNWYHSLIQFQGSLNIQTTRLNPLGVMHNSKADLKKNTTDKISAQNIAEYLVSHPEKVNYQQEDNLAGLRKQWGFIRMLTKQCTQFLNELNALLYSTYPELLSDCQDGVPNWVLKLLVKYPSAANLKKAHAKTLAKIPYVSMKRAQELIEKAKRSVAATTDLTTQQLVVATVQQILHLKKTIAGQTDLMLQECSTPEIELLKTFPGISDTSAIGLIIEIQTVKRFASAKKLASFFGVHPVYKTSGDGAGGYKMSKQGRSEPRRILYMVALAAIRCNPLIKEIYEKHKRQGKQSRAAIGICMHKILRILYGMLKHNQPFNPHVDLANRLRSVPMQNDNAIDKTSRRLQGYDQSAPVSRRQRKKRQERERSHNVIDTKSRITAPAPLADIIADILPQL

SEQ ID NO: 316286 - protein, 344 aa, unidentified
MIKIGIDPHKASHTAVALDETGRVLAELRVAATKAMLVRLLHWAERWPERILAIEGATGLGHLLAQQLVARQETVLDVPATLAARARMLARGHGRKTDGIDATSVARVAQSQSDLRHVGPEDHSTVLRLLSARRDELAQGRRTVINRLHRLLRDLHPGGAPTELSAEAASGLLRRIRPAGAVDLERKAMARALVADLRRIDRALVENRARCAAAVAASGTTVTAIFGISDVLAAKILGHAGDVSRFRSADRFASYTGTAPIEVSSGEVARHRLSRSGNRSLNNALHLAARVQVMHPGPGRDHYERKLAEHKSSREALRSLKRQLAKVVYRHLVADQVRRLDLAS

SEQ ID NO: 316287 - protein, 356 aa, unidentified
MQLHDALTIPKIFIGLDIHKKSWTVSIQTDLFFHKTYSLPSVSEDLYQYVERTFPNHEVHLVYEAGCCGFSVARYFLNLGWHVLVVNPADVKTGDKERYQKTDALDSKNLSNQLKAGVLKGIYIPTEEHEQFTTLARHRTQVTKKLRQTKSHIKSMLLFHGIKVPDQFDNSNWSKDFVAWLEELKFSSSCGDLALQGKIRLYKFIKSEYLEIANQMRSYCRKNNKKDYYLLKSIPGIGGYLASVIIAECGDLRRFNTEAQFSSYIGLVPGIYNSGDSEKCLGITPRSRSQLRSYLIEAAWVAIRKDIEMQQYYRKHQGKNVKSIIVKVAHKMARRILSVIKTETPYQINRNLEVEQ

SEQ ID NO: 316288 - protein, 358 aa, unidentified
MEAQGTKIDFTDQNIYAGFDAHLKSWKVTVMAEDIVYKTFTQPPRPEVLFNYLKEHFPGGTYHTAYEAGFCGYWIHDKLVSFGINSVVVNPADIPTTDKERVQKEDKRDSRKIARSLSSGNLTPIYIPSIKTQKDRSLLRTRAMLVKDLARYKNRIKSFLYFYGISIDDSFINPQNHWSNRFIRWLETIDTGEESGKEALNILISECKNLRTSILKITKQVRRLSLTDPYQEQVILLRSIPGIGLLTAMIILTELETINRFRNIDKMCGYIGLVPSTKSSGEKDKTGDITPRGHSVLRTAIIESSWTAIRNDPSLMRSYLSYRTRMDENKAIVKIAKKLLSRIRFVLTNKKSYTCSVV

SEQ ID NO: 316289 - protein, 345 aa, unidentified
MKYFAGLDVSLEETAICVIDEDGRIVREMRAASAPQAISDALSTSDLPLTRIGLEACSLTAWLHDGLRDEGWPAICIETRAANAAMKAMPNKTDRNDARALAQIMRTGWFRQVHVKSRQSRLWRSLLVARRTVVNEMRSIENLVRAMLREVGIKLGTPSRTKFDHRVRELAGSDAEVMAMVEPLLAILNTMLKEFARLTKQVLDIVRHEQVCRRLMSAPGVGPITALAFRATIDRPERFASSQAVGPHLGLTPARYQSGETDIQGRISRCGDELARTALYEAAHSLLVRSKKWSSLRAWGMNIAKRRGMARARVAVARKLAVILHRMWADATEFRFGKAPAAVTV

SEQ ID NO: 316290 - protein, 298 aa, unidentified
MAKAYLDAAMGNEKRRLANDATGHRQLINWIKQMEAQVQVICEPSGGYERMLIQALVGAQVKVSLVQANRVRQFARAAGILAKTDSIDAEVLCAFGQAMRPQTLTASKLQQEQLRELESQRRHLSRLLVMEQNRGARVGDSSVRRLNRRLIKQIQKQIERIDLLINEHIAGSQELSAKAHKLTAISGVGPRTAALLLAQMPELGQLNRREVAALVGVAPFNRDSGKWRGKRAIYGGRRYVRHGLYMAALVAARHNPILRAFYQRLRAAGKPAKLALTATMRKLLIVLNSALKTDPIYA

SEQ ID NO: 316291 - protein, 405 aa, unidentified
MNAVGIDISKGKSMVAIMRPMGEIARKPFEVTHNHESLFNLANQLMALGDDVRVIMEATGRYHEPVAAVLRHYGLFVSILNPIVIKQSGAGSVRKVKSDKKDALKIAKYGLDNWIVLREHTPMDTTRQQLKLFSRQYNMYMKMATSMQNNLISLLDKTFPGANDLFDSPVREDGHQKWVDFVLEFWHCNVIAELSEEDFIDRYRLWCKCNSYNFSLAKAQKVYDASWNLCPTLSICQATMMLVTSAAQGLLSVMQQRAAIKAEVINLAQMLPEYECVKAMYGVGEITAAQLMAELGDIRKFANRRSIVAFSGIDPTINSSGAYNSDSNPSSKRGSPHLRKTLFQVVSTYLKKSPPDEPVFLFLDKKRNEGKPFYVYMNAAANKFLRIYYARVKEAFVNASSLDNE

SEQ ID NO: 316292 - protein, 342 aa, unidentified
MSEYDGKQFVGIDLHRQRSVIVRQSDTGEQLSAVRIVNDPVALGLQIEQAGPHPGVLEATYGWYWAVDALRAAGADVHLAHPLGVKGFRYRRVKNDVRDAGDLADLLRMNRLPEAWIAPPQTRELRELVRYRAKLVALRSGLKAQVHSVLAKAGVLIPVSDLFGVTGRQKLTRVPLGDAYARRVISLLELIDDLDAHETRFTARIATELRGDRGYAAIQALPGIGPTLAAVFVAEIGDVHRFTDPAHLCSWAGLTPKHHESDTVVHRGHITKQGSKLVRWAAVEAIQRHPAGTKISTDRKRIEARRGRNIAKIAAARKLLTLVYYGLRDGEIRAVAHQKAVA

SEQ ID NO: 316293 - protein, 398 aa, unidentified
MSQANDLSRSLVALKQDSTLIAVIEMSQSSWLVGSLVPGVKREPLKKLDLEELGSAPEELVALLQRWCEEARKAGRAVRRIAVAYEAGRDGFWLARWLRARGIEVYVIHAASIPVERTHRRAKTDKIDIGLLKRSFVGWLRGEKGHCRMAAIPTAAEEDAKRPSRERDTLVGERTRLINRLKAALARNGIRGFSPTRRKAAALLATLRTPEGEPLGRHILGEMRRDLERLALIEQQLREIAAQGAERLTRAAAGQPDAPSDAMFCTLARVYGLGVDTADLLTSEVLARNLRDERAVARYGALTGSPDESGKRCREKGLARAGNLRVRNAMLQLAWRLRHFQKECALVQWYEASCARMAGKPAMRKVLIVALARKLLIALWRFATKGVVPQGLILRPAA

SEQ ID NO: 316294 - protein, 345 aa, unidentified
MNITTLGLDIAKNSFHVYGVDIHGKKAVSKALTRKQVLPYLANLPPCLVGIEACGGAHYWAREIGKLGHTVKLMAPQYVKPYVKSNKNDAADAEAICEAVARPNMRFVPVKTVAQQSTLSLHRVRQSTVEARTEQANMIRGLLMECGIVIPQGIRAVYVRVPEILEDAANGLDDRMRDLLRMMSDHLQLLDEKVDLLEARIVNSNRQDPRVAQLEAIPGIGPLTASALVATLGNAENFDSGRNVSAWLGLVPRQQSTGGRTTLLGISKRGDSYLRTLLIHGARSLIKYADQRQDALGAWIRKLLSRRHGNAVAVALANKNARIVWALLRHQRDFTMDYAGARVAP

SEQ ID NO: 316295 - protein, 342 aa, unidentified
MGQYVGLDVSLDETKVHVLDEQGKRVWRGACASHPAMIEATIRQHAPETVRIGLETGPLTTWLWQALTEVGLPMACLDARQAQAALNMRINKTDDNDAEGLAHLVRSGWYREVRVKSREAMLTRSLLGARTQLLGIVTELSNQILLKTFGLVVPKGAGKIFEANVRRLLEGEPAVAAIILPLLESWRAVRVRAAELDRQLLAAAREDRACRRLMTAPGVGAVVAASFVAAIETPEAFRRSRDVGAWIGLTPRRYQSGEVDYDGHISRRGDARLRSLLYEAATSILTHVHADSTLRNWGLALKKRLGFKRAAVALARKLAVILHAMWKTGTNFDARASASAAP

SEQ ID NO: 316296 - protein, 367 aa, unidentified
MKKHNTAQKSSCGMKRANGKRTIGLDLGDRNSRYCVVDEQGEVIQEGSVATTRKGLDRVLGAATRCRLAMEVGTHSPWVSRHLARLGFEVIVANARRVRLITESSRKDDKLDAKTLARLARIDPELLSPIRHRGEQAQADLMMIRARAILVETRTALINAARGLTKSYGERLPSCGTYQMGRNQAESLGPAIRAALDPLLAEVETVTERIQEYDRQLEELCKTRYPEAKLLKQVHGVGTLIALTFVLTVEDPHRFRKSRAVGCYVGLRPKRRQSGQSRPELGISKEGDAYLRTLLVQGAHHVLGPFGKDSDLRRWGLKLAAHGGKNAKKRAVVAVARKLAVLLHKLWVSKETYEPLRMANRAQIVAA

SEQ ID NO: 316297 - protein, 372 aa, unidentified
MIVHIMTYERSTLVNSEKYIGLDVHQATISVAVMDSRGKLVMESILETQAATILEFFAGLRGTLSVTFEEGTWAAWLYDLLKPHVAKLVVCNPRKNALLKHGNKSDRIDARKLADLLRLNDLQPVYHGETGVRMLRELARSYLTIVKDLSRVMNRLKALYRSWAIPCAGRDVYYTRHRSEWLGKIPEAGARRRAEQLYQQLDMLQHLRQQARRELLTESRKHAITAKLRKIPSLGPIRSALAVALIQTPHRFRTKRQLWAYSGLALETRTSGEHCYVRGQLRRSKKQISIRGLNKDHNHDLKGLFKAAATRASVQPGPFQDFYQRSLAKGIKPTMVRLTLARKIAAITLTLWKKGEDFDAEKLKSKPLERLG

SEQ ID NO: 316298 - protein, 420 aa, unidentified
MSGTVDIVYPVCCGIDVHKSFLVACIATTDERNHTTHQIRRFSTFTGDLRKLAEWLAVNNCRDVCMESTGKYWIPVFNTLEKTCNVCLTHPKYVKAIKGKKTDKKDAKWIAELFKCDLVRSSFIPPLDIRQLRDLCRYYVKLTYMSTSEKNRAQNCLTMCNFKLDDVFSDLFGMSATRILNQLLEHRGGDFDAAPLIDPRCKASAEDVQAALDGELTFAQAEKLKFIRQHREYIVCLQDTLEGLIRELALKYQPQIDLLLTVPGIREPLTAIRILAEIGADMSVFETSKQLCSWAGLTPQNQESAGKKKTTRIGRAGAYLKPLLVQIALSCGKSGKYPELKNKYQALKKRRGGKKAVIAIARKLLTAIWHILSKNEPYNAELYRKADNLPVNRELSPEQAFALLRSRGYIIREEKSPAPA

SEQ ID NO: 316299 - protein, 316 aa, unidentified
MKRAERFVGIDVSKATLEVAVRPENTRWAVSNDEEGIAELAGRLRVMKPAMVVLEASGGLQVALVAVLGEAKLPVVVVNPRQVRDFAKATGRLAKTDAIDADVIAHFGEAVRPEIRPLKSAEAQELADLLARRRQLVDMLTAEKNRLYTARKRIRKDIEAHIAWLEKRLKDVNADLSKSIKQTPAWQQKDEILQSTPGVGPVLSVTLLAGLPELGSLNRREVANLVGVAPLNRDSGKSHGKRCVWGGREDVRSVLYMSTLAAVRCNPVIRRFYERLTGAGKEHKVALTACMRKLLVILNTMVKSGATWRNDYALAT

SEQ ID NO: 316300 - protein, 436 aa, unidentified
MMRIVVKRGAGLDIHKKTVVATRMRVGEDERLVWETKTFGTMTTELLGLYDWLQEWECSQVAMESTADYWKPVFNILEDAFEVLLVNAQHVKHVPGRKTDAKDSEWLAELLIHGLLKPSFIPPKPQRQLRDLTRYRATLVQERARIVNRVQKLLEGMNIKLSSVATDVLGVSGRAMLEALVGDRLSPAEMAQLARGRLRNKLPELEKALTGIVASHQRKLLALQLEHVDFLDEQVEELNADIRQHIEEMDHLPSSENQPPESGTTDETSTGAPLPPMSYGQALIVLDTAPGVNQNIAERILAELGADMRRFATPEQAAAWTGLAPGNNESGGKRYSGRIQKGNFALRTALVQAAWAAVRDKDTYLRALYNRVVVRRGKKRAIIAVAHSLLKSIWHMLAYHEPYRDLGADYFDQRNKESKVKYHLRQLEKLGCPVQI

SEQ ID NO: 316301 - protein, 334 aa, unidentified
MSVTSSVSVTPSVSAVGSGSFFVGADVSKSRLDVHGIGKGLSVANDRRGIRRLVDRLGKSPPGLIVVEATGGYERPLVRGLLDAGLPVVRVNPLHVRRFAQSRGILAKTDRIDAAVLADFGRLNADRLRPMRPLSDNAHMLRELTARRRQLVEQCVANKSQLEHATLKSVRQSIDRTIKHLCREIALVEVEIQQVIDADERLVSKQRKLRTVAGIGPRVSRILVSELPELGELDRRQIAALVGVAPFNDDSGTHSGPRHIRGGRATVRAALYMATLVATRHDPVIRDYYQHLKANGKPKKVALVACMRKRLNYLTSILSNKTNSPAAERNEAGS

SEQ ID NO: 316302 - protein, 305 aa, unidentified
MISWVGIDISKSNLVVWVRPQNQGCEVPNTPEGFAQLVEQLSPYTIGRVLLEATGGYERKVMAALQEAGFNVLRINPRRARAFAVAMGKNAKTDPIDAAVLADFAEALHASHEKPISPEREALRELIQLREHFVQQRDDNKRRLQQAQLPAVIEVIKDHIRYLQIQIKQFGKAINQSMRKLDAEKADRLTSVKGIGTVATASLLVYLPELGELDRREIASLAGIAPYNDDSGNHSGKRQIYGGRARVRRALYMSCWVVIRYHADFKARYEALRGRGKSAKVALIACMRILLIRLNAMLRDGTEWR

SEQ ID NO: 316303 - protein, 461 aa, unidentified
MPKRRSSAKTKLDPTLHCLQPNAAGVDVGATQIYVSVPPDRDTQSVRCFATFTEDLHAAADWLQGCRIDSVAMESTGVYWIPFFQLLEARGFKVFLVNARHVKNVPGRKTDVEDCQWLQYLHTVGLLRASFRPEQDVCNVRSVLRHRDSLVQMASVHIQHMQKALDQMNLQLHHVISDITGLTGTAIIDAILQGERDPVKLAGLRDGRIKATEQTIAKSLVGDYRREHLFTLRQSLAAFRHYQQLIAACDVEIQHYLQKFESRVDTTALPLEKPKDLHKPRRNELRFDLRGELYRIFGVDLTQIPGINALTAHTMLAEVGPDLSRFANPAAFASWLGLCPDNRISGGKVLSVQTRVVKNRVAAALRMASQSLHRSQSFLGDYYRRMRAKLGTPKAITATAHKLARIIFHLLSTRQAYDESIFSQHELQHRHRKELRLRNHARKLGFDLIPTPAVSKGESVP

SEQ ID NO: 316304 - protein, 318 aa, unidentified
MSDSVFVGIDVSSQTLEVASSAQAKTWQLANDATGIEQLAVELAGLKPALVVLEATGGYEFEAACALQAAGLAVAVVNPRTARDFARAMGALAKTDALDARMLAAFARVLHQHPEHERFVKPLADAELQRLQALVLRRRQLVQMITSERQRMRVSHAAARPSIERVIEFLKTELADCDADVAAHVQRHHAELATALASVPGIGAASVAVLLAELPELGKLDRRRVAALVGVAPLNRDSGQMRGQRTIWGGRADVRRTLYMATLTAVRHNPILKTHYERLLAAGKRKKVALVACMRKLLTMLNAIAKHGSNWDPTLHHA

SEQ ID NO: 316305 - protein, 301 aa, unidentified
MFVHPTAERFGVPNDDSGVEELLARLKASSSPAALVVLEATGGFERPVAAAIAASGLAVAVVNPRQARDFARAMGRLAKTDRIDAESLARFAEAVSPAPRAIPDEEALVLGEILARRRQLVGMLTAERNRLVTATTKRVNKRIEAHLRWLEKELARTERDLEEAIEESPVWRENETLLRGVPGVGPILAKTLLAELPELGELKNKQLAALVGVAPLNRDSGILRGKRAIWGGRGGVRAALYMGALVATRCNPSIKVFYERLLAAGKPKKVALVACMRKLLVILNAILRNRTPWRPSHALTP

SEQ ID NO: 316306 - protein, 345 aa, unidentified
MTVIIGVDPHKQSHTAVAICGDEREVAKVTVRATRQQTTKLLAWAEPFEKRTWAIESAGGLGYLLAQQLVDAGEHVVDVPPTLASRVRVLGTGRSDKNDPNDALSVAVAALRSGSLRQVETADHTEIMRLLAKRNHDLGRMRARLICRLHNALADLAPGGIAKELYATDADQLLESYEPVTPIEHMRHQLAHQLVDDVRRLDALIKESHRRIRTAVRASKTSLTEVYGVGPVVACMVIGHTGDVGRFANRDHFAAYAGVAPIEHSSGGRIAHRLSRRGNRKLNNAIHIAALTQIRNPGTDGRIYFERKVAEGKTKREALRSLKRQVSNAIFRQLVLDAERGPGGH

SEQ ID NO: 316307 - protein, 371 aa, unidentified
MEHNNIFIGMDVHKKSIDIAIAYEGRDGQVLHYGKIDGTLDALDKVVRKLVSKGGCLHFAYEAGPCGYQIYRHLTAKGFDCMVVAPSMIPKQSGNRTKNDQRDALMLARLHRSGDLTAVYVPAAEDEAMRDLTRAREDAKEDEKKGKQRLSAFLLRSGYRYSGRTPWTVAHRRWLADIKMPHASQQIVLQEYIDTYEQCNLRVKRITEQICSLMPQWRMYPVVQALQSLRGVSLIVAATTVAEIGSFKRFGHPEQLMQYLGLMPSEHSSGERVKRGPITKTGNRHVRRMLVEASWAYRLRARISRPLLKRQEDLPQNIRDIAWKAQVRLCGRYRHFWAKGKAKQVIITIIARELCGFIWAIAVEAEGAITG

SEQ ID NO: 316308 - protein, 338 aa, unidentified
MPLYGGIDLHANNSVVVLLNEQDQRLYHKRLPNDLATIVEQLAPYHADIEGLVVESTYNWYWLVDGLMDAGYRLHLANPAAIQQYSGLKYTDDHSDARWLAHLLRLGVLPEGYIYPKAQRPVRDLLRKRAHLVEQQTANVLSVQNIILRNTGARLSANRIKSVSQAEVDTLLPNADQALAVSSALAVLHCLAEQIKTVETRVRTRIQSTPLYELLQTVDGIGPILAQTILLETGDIGRFPSVGDYASYCRCVDSTKVSNGKRKGQGNVKNGNPYLAWAYAEAAHFARRFNLKVQRYYQRKQAQTNVTVAHKTVAHKLARACYHMMRHQAPFDAAKAFG

SEQ ID NO: 316309 - protein, 421 aa, unidentified
MTPPNEVVWAGIDTHTDTHTIALLDERGRPLGAETFTADPDGYDRLIGMLPGPGRVAAVGVEGTNSFGAALARRLTAAGYEVREVLRPRRSVRRRDGKSDPLDAVAAARSVMAGDGTSLPKSSDGWVEALRHLNARRSQLVSAMTAIPDSTNGLLVTAPEPIRERYRGLRSETRMNRLAECRPAGGLVERSVLAALKSAAKAWKALKRQAGLLEERMRLILEEHARPLLDMYCAGAVIAATLAIVAGDNPERIRSEAAFAKLCGVCPIPASSGRTNRHRLNKGGNRQGNMALHRIAIVRLRYHKPTRDYMAKKTREGKGKLEIIRCVKRFIAREAYRALISIRNGEVGRGTPAERGAKLRELRVSRNITQQQIGEALCVPSSRISEIERGARDLPELEQRAIQWIHSTTNPKQHTQTLDNV

SEQ ID NO: 316310 - protein, 500 aa, unidentified
MKLAASSRAARRNAKNARKWKQQEQACRKAEAKVKAGASAVEMEKLEPIHRRAAGIDIGSAENYVAVPAECVGPGESAVRVFGVFSEQQDTLVEWLRSCQISTVAMEATGVYWLTLYDKLEAVGIEVYLVDPHEVKAVPGRKSDWMDCQWIQKLHTYGLLRRAFRPDAPIRRLRTLTRQRTELVAAAASQQQQMEKALICLNVQLGLVVSDLAGETGMSIIRAILVGERDPVVLVERYRSARCSKASVAEMKQALQGTYNDEDLFVLQQNVDSWDFLHKQIGECDGKIELALQAIPTARVVELKAPPLPVPAAAQQPKKKTKGTASKNAPDKDFTPILQRICGVDLTKVIGLNLLSVLMLIGEIGTDMSRWRSAQAFCSWLGLCPGAKISGGRVLSRRTRKVVNRAAMILRLAAVAVGRTDTWIGLFYRRIKARKGGPKAVTATARKLACIIYHMLKYQVEFVALDMDKYVAQAEAHRLRYLTREAKKLGYQLIEMEQAA

SEQ ID NO: 316311 - protein, 385 aa, unidentified
MTATEQFSSFVPRDYDIFIGLDVDKKKMAITCTDHGTMRRSLSMPYSASQLLNYTRKHFPGQRIAFVYEAGPTGFGLYDELTAAQHPCLVVSPSMVPSAPRNRVKTNRLDSKKLSEGLRGGQLRGIHVPPPIYRELRHLVQLRDTQVGQLKASKCRIKSLLLYEGIPFPAANEKWSARVLRELETIPCNASVRFKLDRLIDALQFHFLTAAQVQKEIRRFCKNEPGLQQAITFLTSLPGVGTITATHAVARLGDWRQIENVRQIAGFLGLVSKEHSTGDKENRGEITRIGDPRLRNKLIQCAWTAIRKDPELRAFYRQVYERQPKKVAARKAIVAVARKLTTRMYAVLKEQRPYVIRADSSIAPLTEEETAGLRERLDAAQNDEP

SEQ ID NO: 316312 - protein, 404 aa, unidentified
MISVGIDISKERSMVCILKPYGEVVASPYKVEHTEQEVGKLATRILSLDGEVKVVMEATGAYHLPMLISLKQAGIFVSVINPLAMKKYASTAIRKGKTDKLDAVRIANYGIDSWFRLTDYSAPEEIYNELKVLGRQYAHYISIKIAGKLALANLLDRTMPGIKKLVVSMNSEEPTKDKLADFVEEYWHYDNILKKSESRFVGDYCRWAKKKGYHASETKAKEIYAMARDSIPTLPSSASSTKMLTLEAARVLKEVNRTLQTILAQMQTLAITLPEYGVVRAMKGVGNVLAPRLIAEIGDVRRFHSASALIAFAGIDSPPYQSGSFTGTKRNISKRGSSLLRKTGYEIMKCLKTTKPSQDAAVYLYMLKKEAEGKPKKVAKIAALNKFLRIYYARVMEIVKAAVV

SEQ ID NO: 316313 - protein, 331 aa, unidentified
MIEKKLSIGIDISKLTLDICIIDDDVLENYCIKNKVTSIRSFVKKLKKKFGVAELELCMENTGLYNWPLYSVCEELSITAYVINPLHLKRSMGLVRGKNDKIDAERIALHARRFYDTLTPYKLPSKTIRKMQIMYALRKRIVEVKKMFNAPISELKSVAEKGVYAEMLKITNQLVKQLDNKLLRVEEELNSLITSDAQIQENYKLITSVQGVGKVLAWNLLIKTNNFKTINDPRKLACYVGVVPFDFQSGTSINKKPRVSFMADMQVKKVLHMAALRAVRLEGDLQKYYLRKVAEGKNKMSVLNAVRNKIIARVCSVVNNKKMYETNLVLS

SEQ ID NO: 316314 - protein, 304 aa, unidentified
MLYAGLDLSRKRLDFHLLDAEGATVEVGAAAPDADGLRGLTKRLDRHGGPIRAAIESMNGARFVHDRLELAGWQVEIADAQKVKGLAPLACKTDRIDAWVLAELSRRELVPAIWLPDPRVRAERERARWRLHLVRHRSSLKQRVHAVLLAHGKPCPVSDLFGVRGRQLLAGLPLPEPWYDNVQVSLRLIDELDREIDHCQSELRRLGADHRYVPLLCSVPGISWVLAYTIAAEIGDIGRFPTPGKLAGYTGLCPRVYQSASSAAPRSPRSTSPADSPKRSGTCSPATSPSLRQAPPTPWPPDGP

SEQ ID NO: 316315 - protein, 353 aa, unidentified
MLAEDYDFVIGGDPDRDTIDLAVLDTGAGRVHAHLADSADGAGYRRMLTWAGQHAPGRRIWALEGTGSFAAGLVVFLGDAGEKVVEVGALKRARGAKNDRIDAIRAARQALARDEQGAPRSGGLREALRMVFACREGVLVSRTKAINELKSLIVGAPEELRAQLRGRSLLVQLARIEQLQITTVAPVEQRLSVFSLQSVAARVRFLYAQLAELDPQLLELIRQHPAGPALLAEAGVGPVVAAQLLISWSHHGRVRNEAAFASLAGVSPLEASSGQRPRHRLNRGGDRALTRALHTVAITRMRCHPETRVYEARRIAEGKSHRDIRRSVKRALARRLYRKIEAAARLQDLTIAA

SEQ ID NO: 316316 - protein, 346 aa, unidentified
MTSAVRTVGLDVSDKFTTYCLLGSDGEVEEEGRIRTTPQAFTERFSTGDFRFVLEAGTHSPWISRLLGKGEREVIVANPRRVELISKATRKNDRADAETLARLGRMDAVLLSPVRHRSAEAQADLAAIRARAALISSRTLLINHTRGAAKAMGVRLPACDAHSFHKYVGEELPPELVMALTPLLSAIAKLTEEIKAFDRLVLWLIEERYTEARVLQQVAGVGPLIALTFILTIGDPHRFKKSRELGPYLGLIPRQHESGESSPALRISKAGDHYLRQLLVNGAHYVLGHYGPDSDLRRWGLQRTLGGKNAKKRAVVAVARRLAILLHRLWVTGEVYEPLHTSRASA

SEQ ID NO: 316317 - protein, 310 aa, unidentified
MENIIVGIDVSKDRLDVGLRPSGERFAVERNSAGIDLLVPRLKELSPRIVALEATGGFETIVAAALAAAGLPVVIVNPANIRNFAKAIGQRAKTDPIDADVIARFAEATKPEPRPLPDEATRLLADLGARRRQIIEMIVAERQRERRLTAPRLKKSITRLLKALQKELTSVDTDIDDAVRGSPAWREKEDLLTSVPGVGQIIARTLIAELPELGQLGRKEIAALAGLAPFTRQSGQWRGRSFIGGGRPVVRTAVFIGAMVAKKHNPTLKVFFDRLVAAGKPKMVALIAVARKLLTILNAILRDNRPWQNA

SEQ ID NO: 316318 - protein, 324 aa, unidentified
MLFVGIDMSKLTFDAAYYINSRSIHKQFANNPQGFGEFFSWVNKRNKEVYTCLEATGIYSFDLAQYLSQQKTNVMVVNPIITHAFSKLELNRNKTDKADAQLIARYCEHVVLTGNYNNKSYQPKGPAYEAIQRLVTRCDQLEKSKTQENNRLEASANKQASRSIKRLQKAIDNEIVQVKKNIADIVNNNPNLRQQVNLLTSISGIGERTAWSILAYIGDINFFSNSKQLASYAGLTPKITQSGTSIDKSSLSKLGHKRLRKSLYMPALVAIRHNPVLKAVYERLVNQGKPKKVAIVAVMRKLLILSYGVLKSEKPFDMNYQIRN

SEQ ID NO: 316319 - protein, 403 aa, unidentified
MNNVAGIDVSKGKSVVSVLRPFGEVVAKPFSIGHTGSELKELADYLKSLDGETRVVMEHTGRYYEPVARFLHDEGVFVSAVNPKLIKDYGNNTLRKVKTDKADSRKIARYGIDNWAELRQHTPMDTIRMQLKTLNRQQSLYTKTKTMMKNNLIALLDQTYPGVNALFDSPVREDGSQKWVDFATTFWHVDCVRNMSLTAFAERYRKWCKRHGYNFSQSKAVEVHAGAQDLIAMLPRDALTKTMVRQAIDALNAISASMERLKAEMQALAAQLPEYPVVMAMHGVGDSLGPQLMAELGDVTRFTHRNAITAFAGVDPGADQSGTHEAKSTRVSKSGAPELRRALFLVMDCLLKTQPQDDPVYRFMDKKRAEGKPYLVYMTAGANKFLRIYYGRVKEYLASLEGN

SEQ ID NO: 316320 - protein, 342 aa, unidentified
MDNIGLDLHKRESQVCLLTEEGEIVERRIQTSRERFTTVLGGRPRARILLEASTESEWVARHLETLGHEVIVADPNFAPMYATRRRGVKTDRRDARTLAEACRLGAYRPAHRASEGQRHVRAELAVRDALIRTRTRYVNVVRALTRRDGLRLPSGEPAHLETKLAALPLPPALAAELAPLRALWEPVNTQIAAADARLAHVAAAAPVVVQLMTTPGIGPVTAVAFVATLDDITRFANAHQVEAYLGLTPREYSSGEQQRRGRISKTGNARMRSLLVEAAWRVLRTKTPAAAPLRAWADRIAQRRGRSVAAVALARRLAGILYAMWRDGTDYRAPQPSGVEAA

SEQ ID NO: 316321 - protein, 368 aa, unidentified
MKNVTTYVGIDAHKKDLFVAMLIGYQKTPVTWQLANEPTAVRRLVRKLERESPGPVQVFYEAGPCGYALQRQVTTARVKCDVVAPALIPRKPGERVKTNRRDSRKLAELGRAGLLTTVRPPTPEEEAVRDLCRARDDAREDLQRCRHRLGKLLLRRGLHYPGRNWTRGHREWIDSLAWTHAAARAVVDDYVLAIDHTEARLLELDARLGELADTEPYKTPVGWLRCFRGIDTLSAMLIMAELHDFRRFSSARALMAYLGLVPGEHSSGDTHRRGRITRTGNALVRRVLVETAWHYQHRPGIGVTLARRRKGQPARVIALADKAQHRLCRRFRKLAAEHKPAGKVVVAVARELAGFLWAALQPAPAPVA

SEQ ID NO: 316322 - protein, 350 aa, unidentified
MTSLTETRPDVVGGVDTHKNTHVAAVIDATGRILDTASFVTTETGNRALVRWLRRHGDVLRVGVEGKGSWGAGLTRVLTNAHIEVVEVDRPNRQLRRRRGKSDPTDAEAAARAALAHDATTTPKTHDGNVEMIRVLRVARNSAIKARTQARNQMHALVVTAPEPLRDELAALTTNALVRRAARLRPGPITTPTAATKEALRELAHRDRELTAQIARLDDHLAQLVTATAPILTAQHGIGTETASALLVAVGDNPHRLGNERSFAALCGASPIDASSGKQQRHRLNRGGNREANRALWRIAIVRLRNDPTTQNYIARRRSEGKTSREAIRCLKRYIARDVYQALRIDFPDL

SEQ ID NO: 316323 - protein, 348 aa, unidentified
MRKHSENRAVKIMGIDLAKKSLHVYGEDADGRKAISKKFGRQKLKEYLVNLPPCTIAMEACGSSHYWARLLQSYGHEVKLIAPQFVKPYVKSNKNDAADAEAICEAAQRPNMRFVAVKEVGQQDVQAIHRMRSLAVERRTAQINQIRGLLLEYGIEIPAGRSNLLKRLPEILEDAENGLTDLFREELFGLYGELRHLDERIAHYDEKIEKIAQADERMQRLQTIPGIGPKIATALLAAIGDIHAFKNGRELAAWLGLVPRQHSTGGKSTLLGISKRGDVYLRQLIIHGARSILRWVDRRTDRTSQWAAALKVRRHQNIAVVAMANKMVRIAFALLKKGETYRAMPAAA

SEQ ID NO: 316324 - protein, 370 aa, unidentified
MKSIIYVGMDVHKASFTLSCFSVTTQETFATVKISPDAKAIKKYLDGVSLSRSEECEFVCGYEAGCLGYTLYHQLTAMNIRCVIMAPTTILRNSKRIKTDRIDAENLARCLAYGGYKSVYIPTAQDEAVRDYLRMRDDHKLMLKKIKQQINAFCLKHNKIYPGNKSKWTQAHVKWLNALEFDGYLQDAFNEYMITYRELADKVERLESQIEQLAELEEYRDKVKKLICIKGIKTHTALSLIVETGDFSRFQSAERYASYIGLVPGEHSSSEDQKRLGITKAGNRHMRMLLIEAAQCYSRGVPAKKSKDLKSRQKGASPEVIAYADKASIRLRRKYIRMELVNKKKANVAKTAVARELACFIWGMMTDNIA

SEQ ID NO: 316325 - protein, 343 aa, unidentified
MTQRQPVVEVFAGLDVSAREIKVARVQGQDQNPTLATFANHASGHQALLAFLLEKTERVRVCLEASGNYSLDLALSLHAQRQVEVSVINPRRARKFAESLGERSKSDPVDARVLCQYAARMPWESWKPPSATALRLRAIPRAMESLGVMHTQESNRGHALASSQALPALVLRERQRHQRYLENRMKQLRREARRLIARDAELDRRYRLMLTVPGIGETSALQILGELVVLSDTADARQWVAFAGLDPCIFTSGSSVEKRPRISRGGSRHLRRALYMPALVALRREPHLKRFYERLLSRGTARLQAVVALMRKLLHALFAMFRANQPYDGSKLCPSELITKAAA

SEQ ID NO: 316326 - protein, 343 aa, unidentified
MERYVGLDVSLKLTSICVVNQTGAVVREGVVDSDPEAIASFVRSNAPRVVRIGLETGPTATWLWTELKRLGLPVICIDARHAKAVLKMQINKSDRNDAAGIARIMQTGWFKEVRVKDLESHSVRAVLASRALLVKIKRDLENQIRGLLKNLGLVIGRAKFNVFAVRAEELIENSPELIAAVGPLLAARKAIEQQVGDLDRKVHKLARHDLQVRRFMTVPGVGPITALCFKATIDDPTRFKRSRSVGAYIGLTTRRHASGEVDWSGRISKCGDRMLRMYLFEAAGVLLTRVPKWSALKSWGTRLAKRNGLRKAKVAVARKLAVIMHRMWIDETEFNWSTKKAAA

SEQ ID NO: 316327 - protein, 342 aa, unidentified
MNITTIGIDLAKNVIQVHGVERSGKAVLKKAFKREQVLGYFAKLPPSLIGMEACGSAHYWARKLQEFGHTVRLMAPQFVKPYVKTNKNDAADAEAICEAVSRPNMRFVPIKYPEKQALLAIHRARQGFVKARTAQANQIRGLLAEHGIIIPQGISHIATRLPEILEDGENELPGVFRQLIDRLGSHLKELDRQVNELETQIQAWHRENPDSKKLAQIPGIGPITASALVASIGNAKNFADGRQLAAWLGLVPRQHSSGGKQTLLGISKRGDSYLRTLLIHGARAVVRVAESKLNHAHSWLGGVMKRRNKNIAAVALANKNARIVWALLANDRDYQSNYHLSA

SEQ ID NO: 316328 - protein, 408 aa, unidentified
MNTLYVGIDVSSKSNVVYLMLPNGDKHSNFSVANSHEGSTQLVKRILSALTSHSLDTVLIGLEATSVYGDNLVYFLREDATLAPFNRKIHVLNPKQVKKFHDAYNDLPKNDYVDSFVIADCLRFGRINKEVYLGDYRYKALQNLTRARFFAVQNLIKEKQRFMNVLFKKYSTMTQEKVFSDTFSTTALAVYDEFDSAEALANMDLHELTDFIIEKGKNRFPDPDAVAKAIQKAARSSYRLPKTVNDSVNQVLSISITSMKALESQIKEFDKAIKAQMELLPNVLISIPGIGPVYSAGIMAEIGDINRFDNQAALAKYAGLVWKQHQSGSFEAEVTRLIPSGNRFLKYYLYEAAFSLVRCDKEYSDFYHLKYKEVNRCQHKRALALTARKFVRLVFRLLKDNRLYVPAK

SEQ ID NO: 316329 - protein, 461 aa, unidentified
MKKTKLTGPQKGSARAKVDWKALDVVHPEAAGIDVGGSEHWVAISPDRDPEPVRCFGCFTVDLREMAKWLIDKGVRSVAMQSTGVYWMPVFEVLEQNGLEVYLVNARHTKNLPGRKSDVQECQWLLKLHAFGLLNNSFQPTHEIRIARTLWRHRGNLVAEAGSAIQRMQKALTEMNIQLGNVLTDLSGVSGLKIIGAILEGERDPQALAALARPEVKATPEDIAKSLEGNWREELLFVLKQEVELYRFYQQKIIDCDRQLRQHLESLKSTVDLQAQPLGPKPKGKTRSRNAPQFDLRTELYRITGIDWTQINGMDVLTAQTVIAETGADLSAFPSEKQFASWLGLCPTNEQSGGKILNRRTRKVVNRATGAFRNAAVTLIRSQSYLGAQYRRLRTRLGAPKAITAMARKLACLFYRLIKRGQQYVDKGIEYYEAKYREQQIRSLAKRAQKLGLQLVIPVTA

SEQ ID NO: 316330 - protein, 431 aa, unidentified
MNVEGGEDRVLESTQNNEEIIERIAALDIGKAELVCCVRVPGQGPGGRRRQEVSTHSTMTRSLLVMADRLHELGVTRVVMESTSDYWKPAFYLLEAAGFDTWLVNAKDVKHLPGRPKTDRLDAVWLCKVAERQMIRPSFVPPAPIRELRDLTRYRVDLISTRTAERNRVEKLLEDAQIKLSVVASDIFGLSGRDMMAALIAGQRDPKALAQMARSRLRTKITQLEEAFVGRFTDHHGFLLAKMLARVDAITADIADVDQRIEEQIGPFIDAGRRLDEIPGVGPATAHVIISEIGVDMSRFPTPAHLASWARFAPGVKESAGKKKGAGFTGHGNPYLARVLGEAAVAAGKTDTFLGERYRRIARRRGNRRAIVAVGRSILTVVWHLLADPTTRFTDLGSAFYDTRVNPERRKRNHVRQLEALGYTVTLASAA

SEQ ID NO: 316331 - protein, 355 aa, unidentified
MNQEKYIGMDVHQATISVAVMEGRGKLIMECILETKAGTILEFIQGLHGSLSVTFEEGTSAAWLHDLLKPHVAYLVVCDPRKNALLKDGSKSDRIDARKLADLLRLNRLNPVYHGEHGVRTLKELGRSYLTITQDLTRVMNRIKALYRSWAIPCSGTTVYAPRHRAEWLAKIVEPGVRRRAERLYQQLDLLQPVRQQARRDLLVESHRHPAVKLLRQIPAIGPIRAALLVALLQTPHRFRTQRQLWAYSGFALETRDSGEYRMVRGKLRRNRERLTVLGLNDNHNHDLKNLFKGAALSASTCPGPLYDFYVGLLAKGMRPTMARLTLARKIATITLTMWQKGVDFNANELQRQAA

SEQ ID NO: 316332 - protein, 337 aa, unidentified
MDYFAGLDVSLEKTHICVLDHNGTVVLETSAVSTPEAISSALEGAPACERVVFETGRMAPMLYHGLADLDVPVICIESRQAYQALKTLATHKTDRNDARGLAQLARTGFFKPVHVKSLPSHAVRALIMARKKLVGQRITLENQIRGLAVVFGVRLPRGLSPAFVEEVIAMSNGIAGLSSAMRGLIAARDAVLAAVAAIDADMKRLVRASDACRRLMTIPGVGPLTALAFTAAIDDPDRFRRSRDLGAYLGLVPRRYQSGEIDYTGSISKVGDRRVRTLLYEAANVMLTRFKGQLKLKDWAIAIARRSNMRKARIALARRLAIIMHAMLKHGTEFKPA

SEQ ID NO: 316333 - protein, 347 aa, unidentified
MNSVGIDLHRNRSQIAVIDGQGELSLSRRIVNDRETFLELLAGLEGESRIAVEATYGWEWLAELLEDAGYEIHLAHPLRTRAIAAARVKTDAVDAKTLAHLLRADLLPEAYVAPRELRDLRELLRHRIALTGMRSALKNRVHAILAKHGITRQHSDLFGPGGRRFLAELQLREAPRRRLDSLMALIDDFDREIEQTTAEIEQRAKADDRVDVLTQIRGVGRYTAMLIIAEVGEIRRFPDARHLCAWAGLTPTVRSSDGKARLGRISRQGSPALRWALVEAAQKCTSGGGPLRERFERIAKRRGRKIAKVAVARQILTLSYYGLRDGEIRCLAPRAKARTMRTTAVTR

SEQ ID NO: 316334 - protein, 332 aa, unidentified
MYFDHYLGIDISKATLDAALIIKEGEVVGQTKVANNSHGFNDLASWIRKLKVKLSDVLVCAEHTGIYGYDLQIWLDDMQISFAFVPALEIKRSLGIRRGKNDAVDALRIAEYAYIRRKSISLSHKPSDVIFQLRALLGERKQYVRMRAALLARKDALHQYESKESIDRREEIIDKYAEYIASVDKQMRGLMEHDDEIKRNYELISSVKGIGLVNAINTLVYTNNFTSFQTPRQYACYCGIAPFEHTSGTSVKGRTAVSKMGNQQLKCELTMAARSAIIHDPWMKQYYKRKMMSKGNAPGAHGIVLNAIKFKLIVRMFSVVKSGIPYKVMAYC

SEQ ID NO: 316335 - protein, 317 aa, unidentified
MTDRCGVGIDVSKATLDVAWSTHAGARWQTTNDEAGWVALVAHVRTLDPAVIVLEATGGYETGAASALSAAGLPVAIVNPRQVRDFARALGLLEKTDAIDAAVLADFAARIQPTPRPLPDDLQADLQALVARRRQLVDMLTAERNRVPLARGAVRKNVLAHIAWLEKQLAKTDRDLRTRIEASPLWRVRDQQLQSVPGIGPTTSACLLACLPELGRLTHRQISKLVGVAPLPDDSGTRHGYRRIQGGRGTVRTALYMATVSAITHNPTIRTSYRRWRAAGKLPKVALVAAMHKLLIHLNAMLKHHTLWRPIPTAPTA

SEQ ID NO: 316336 - protein, 417 aa, unidentified
MEEGEKASTCRNIALDIHKYYSMIGGVNKEGEEVMEMCRVEHAELEEWLGKHLMPSDRVVIESTTNAWHVYDVLEALAAEVLVANPIKVKQIACARVKTDKKDTLILARLLAANLVPTVWVPPKQVRELRQWVSHRRRLANMHTQVVNRMHSVAHRHHLNHPKGKRFDEKTTGWQKDESLSRLEKMQLELDMQTKEHLEQQIERMTRELARMSHEEPWASDMRYLMQIPGCGVVTGMSIVAAIGDIERFADPKALASYAGLVPGLEQSGVKLKGKGITKEGRRELRWAMVEMAWRAVKADPHWRKSFEELKKRMHPNQAIVAIARHLLTVVWSVLTHHEPYRHYTPERIAYKYLTWSWALQEEERHGMTRPQFARYYLMRLGIGNELKRVALNPEFPYRLASEEEVLALHPELQPPT

SEQ ID NO: 316337 - protein, 316 aa, unidentified
MNEKLVESFVGIDVSKNTLDLRIEPAGEAMHVAYDDQGIAQVWRRLAEVLPTLIVMEATGGLETRLASELAARGLPVAVINPRQARDFAKATGQLAKTDRVDAAILCAFARAIRPAVRPLKSADARELDDLVNRRHQLVEIRVQETLRLAAASSKALQKSLKAHIAWLDKRITKLDHDLKDRLQTSDAWKAKDDLLRGIPGVGDVTSMTMLAKCPELGQLNRREIAKLVGVAPLADDSGKHRGKRFIWGGRADVRAVLYMATVAAMRCNPAIKPFAQRLKMSGKPAKVVIAACMRKLLTIMNAMIKTNSPWTLPTP

SEQ ID NO: 316338 - protein, 339 aa, unidentified
MGLYAGIDLHGKNHVLIIINQMDEWVHKTRLSNNINLTLDVLQRFKNKLKAIAVESTYNWYWLVDGLRKNGYNVKLAHPAAFERYDGIKYTNDYSDAFYLAQLLRKEDLPEGNIMDIKKRQIRDLLRKRVMLVQEKTKHILSLQSLIARNSGKMLPNKKIKKLTKKNITSLFQNDFLIMNANIHINMIDNIRTELKPIEKKIFAKLKITKDFELIQTVDGIGKVLAATIILETGDISRFKQVGNYSSYCRLVKSERRSNGRKKGTNNHKNGNKYLCWAYVEAATFMIRNNEKARKFYQRKKAKTNKIVGKKALANKIARACFYILRDKVEFDDKKLFGA

SEQ ID NO: 316339 - protein, 362 aa, unidentified
MQYIAFDAHKHYTLASVEREDGRLVREQQIPHERGALQAFLQGCDPESPVAVETTGNWYWIVDEIEGAGCLPRLVHARKAKLMMGMINKTDKLDARGLNRLQRAGTLPAVWIPPSALRNQRDLPRTRMVLVRQRTRLKNRIHAALAKYGVSRSDVSDLFGRQGTRWLQEHLGQLPPQTAYAAQRVLEQIETLDRQVAQLEQRRSELFTPTAQLELLRSLPGVGFILGVVILLELGDVRRFPRSAQLAAYSGTTPRVHASGGRTRYGPLRPDVNRYLKWAFVEAANIICRRRGRAPDRHVCQLYARIARRRGHQTAIGAVARHLAEATYWILTKEQPYREPQSRPPQGPAAGIVHGGVSAPMP

SEQ ID NO: 316340 - protein, 309 aa, unidentified
MNSFVGIDVSKLQLDVCCLSSEERSWTIPNEPAAIAKFVVEMQEEQPVLIVLEATGGLEMLVSSALAVVGLPVVVVNPRQVRDFARASGLLAKTDKLDARVLAQFGRVMNPTPRSIPDECAQQLQALMARRRQILDMITAENNRLSLSPRPVREDIRKHITWLQRRLKQIDKDLDGAVRNSPIWREKDNLLKSVPGVGPVLSMTLLANLPELGTLNRRKIAALVGVAPFNRDSGTLRGRRTIWGGRSAVRAVLYMATLSAVRFNPVIRQFHERLKAAGKAPKVALTACMRKLLVILNAVIRNERPWQPV

SEQ ID NO: 316341 - protein, 465 aa, unidentified
MTRKRKSKRSVPAGRPESITIWNPNAAGMDIGAEEIFVAVPADRDGQPVQRFGTFTSELGRLSEWLQQCRIETVAMEATGVYWIPVYQILETAGFELCLVNARYFQNVPGRKTDVSDCQWLQRLHSAGLLRGSFRPAQEVCVLRSLTRHRDNLIRLASTHVLHMQKALDQMNVQLHHVLSDITGLSGLAILDAILAGERDPRVLARLRDGRVKASEETIVQALTGDYRAEHVFTLKQSLTAYRHYQKLMAACDLEIEQQLKRFDAKVDAKAKPLAPPKVRRRKIFSNEPNFDLRSHLYRIFGVDLTAVPGISVLTAHTILSEIGPDISKFRSAAAFASWLGLCPHNDISGGKILSVKTRRVNNRAALAFRMAANALFRSQSPLGDFFRRMRAKLGAPPAITAAAHKLARIVFHMLTTRDAYDEAILNKNERGFRARAEARLRAQAKALGYSLVAAPAQTAQPKTA

SEQ ID NO: 316342 - protein, 412 aa, unidentified
MKDLLEISCGLDVHKEKIVACILTGPLGKPTRSEIREFSTLIPDMIALRNWIVSKNCHHVAMESTGIYWMPIYEILEDAFSGDITLLVVNARHMKNVPGKKTDMRDSEWISTLLRAGLLNGSFIPEKRIREFRDLNRYRKSVIRDITSQKNRIEKFLQSSGFRLSSFISDIFGASGRNIILHLIEHGQIDKTALDSCLKTKTRNRIDEILMSVNGTLSEHQKAFLRILMTHYDSLKKHLAEIETSLEEDMAPFALQVEQLNSIYGISTTASCAIIAEIGIDMKPFKTAEHICSWAGLCPGNNESAGKRKSTSVTKGNPYIKSMLCEIAWVIAGKRNTYLSAWYWRIKQKKGAKKAIVALARKLLVIIYTMLKQGTLFDESCFETRRKHCEQKQLSRYIRELEKHGYHVEAQS

SEQ ID NO: 316343 - protein, 352 aa, unidentified
MTVTNLPRSVTGGVDTHLDVHVAAALDERGALLGVESFATTESGYKKLLGWLGDFGHVELVGVEGTGSYGAGLTRHLQSEGVRVVEVDRPNRQRRRLKGKSDPQDAISAAHAAQSGNALGEAKTRDGNVESMRVLRVARSSARKGRTQALNQMRNLVSTAPDPIRAELRGLSVFNLLERASAYRPGAKRDIVSLTKFSLRMLARRALILEEEIAEIDAILKPLVKETAPELVATLGIGTDAASALLVAAGDNPERLRNEAAFAHLCGASPLDASSGKNQRHRLNRSGDRQANSALWHIVLTRMVYDPRTSEYIDRRKTEGLTKKEAVRCLKRYVAREVYSLLPHQKLGLDSP

SEQ ID NO: 316344 - protein, 361 aa, unidentified
MFSERTSVGLDVHARSVMAHAVDWETGRHVAQRLVPVDADVVAWVRRLPQPAAVAYEAGPTGFGLARAFAAAGIRCVVVAPSKLERPPGDRVKTDRRDAARLARLLHIGEVPAVTVPSEEQEAARDLVRAREDVRGDLMRARHRVSKLLLRHGIVYYGGQPWNGPHERWLAAQRFDRSGVQVAFDEALDAVLATSGRRERLDTAIEVMAAGPAWAPVVGRLMCVRGVATLTAFGLAVEIGDWHRFTGATIGAYLGLVPSEASSGSHRSQGGITKAGNTHARRLLVEAAWQHQRPLTSANTAVRGRRKTATPAVRARGEAADRRLHQRWMTFTARGKTGNVAAVAIARELAGWCWSLAVMTE

SEQ ID NO: 316345 - protein, 408 aa, unidentified
MRVVGLDIHRVFAEAVMLNDGGAVRLGRIGMTRDHLEAFARKLGRDDHVVIEATGNATAAAEVIQPHVGRVVIANPRQVRLIAEARIKTDVIDATVLARLYASGFLPEVWVPDQATLARRRQVTRRNQIVRQRARLKTIIQSILHAHLVPPCPHADLLGPKGRAWLLGQALPPDEQDAVARHLREHDRLSEDLRVVEREIAHEALADADTKRLMTVPGIDMVVATGLLAAIGPVARFAGPDKLVAYLGLNPSVHQSGDGRARHGRITKQGRTHARTLLVEAAWQAVRGPGPLRAFYQRIARRRGNHIAAVAVARKLAVIIWHLLTRGEDYAWVRPALHAKKLRDLELRSGEPARRGQRGQAYDYNLSRVRLEERRRAEQAETAYRRLTEGWTRRGKRAPTGAAREERP

SEQ ID NO: 316346 - protein, 241 aa, unidentified
MALTLGIDVAVWTEHQATRARDGATVWRGRKFWTRLAYLERMWADLDLPDPAELTAVVEPTRNAWIVLAEWFRRHGARVVMVTTAQSADLRKYYSKHTKNDRIDSELLARLPLPAFAELAEDIAHETEQALFLTRQIKQIDERVANLYADADPAGIVASAPGVGAVISAVIAGRIGDPHRFTSLAAIRAYTGLVPKVSQSGVCKVESSITKAGIRCCVRCCAPLPTRLAGSIPSSRRSASG

SEQ ID NO: 316347 - protein, 412 aa, unidentified
MDVLVHRCAGLDVHRDTVVATVRVPGSGRRQRAQHTRTFATTTAGITALVDWLAEHRVTRAGMESTGVYWKPVYYLLEDQLEVWLINAEHLHNVPGRKTDVADSAWIAQMVEHGLVRPSFVPPPPIRQLRDLTRHRRTLVEERTRVVQRLEKVMQDAGIKLTSVASALLTKSGRAILEALLAGQDDPDALAQLARGRLRAKIPALRQALAGRFRTAHHGLLVAQMLAHIDFLDAAIAELDTTLDRAAAPFAAVLKRVCTIPGVSVRTAIMLLAECGADMTVFRTPAHLASWAGICPGNNTSGGKSRSGRTRHGSIALRTALTEAAHAAARTKNTYLAAHHAHIRGRRGLPKAIGATRHDLLIAYWHVVHGQVDYADLGHDWAQRRHSTEHRTRRLIHQLEQLGHTVTLEPSG

SEQ ID NO: 316348 - protein, 404 aa, unidentified
MNAVGIDVSKGYSTVTIMRPFGEIVASPFEVTHTDSELGKLADLLKSLNGETKVVMECTGSYHLPIANAIRDEGFKVYTLNPVLTRRFGNNTIRKAKNDKADSVKIANYAIIHWLELQEYIPVDELRQMLKAFSRQYDKYSKLKAVLKNNLISLTDQTFPGVNELFTSPPRKSDGHEKWFDFLCSFWHCDCICELSPKVFANSYRKWCKRNSYYFSEDKADDVYAAACGHVSVMPKNDTTKLLITQAVSQINAIAETISVVSRHMKQLAAALPEYPVVIKFRGVGDILAPQLIAEIGDIYRFSKKSSVVRFAGLEPVERQSGKLRGNEKISKQGSPFLRKTLFQVMDCLIKHAPENDPVFQFLDRKRAEGKHYYSYMCAGSAKFLRIYYARVKQFLDNYYDDEA

SEQ ID NO: 316349 - protein, 348 aa, unidentified
MTTTPLASIGIDIGKEVFHVVGFGTDGKIAFRRKIKRLSLVETFKRLPPSVVGMEACLSAHFVSRALRQLGHQPRIIPAIYVRPFVKGQKNDYNDAEAIAEAALRPNLRVVREKTQEQLDLQALHRVRSRLVSRRTATINQIRAFLIEQGIAVRTGARALRNSLMAILENRQDEISPRMRGLIADLYEDWVGLDERIETIAGEIETIGEKEANCQRLMSVPGIGPLISTAVVAAIGTGEAFERGRDFGAWLGLVPRQYSTGGRSILGRISKRGSKYLRTLFIQAAKVILMRPHNWERFSFGAWLLNATPRLHRNKLATALANKLARIAWSILRNEKVFDVPRREAMAI

SEQ ID NO: 316350 - protein, 349 aa, unidentified
MKKIIVGIDVSKEKIDASAILVTGNQLGMQKLDYQTFENRPMGFRRMVVWAKHLVKGITLDDVMFCCETTGAYDHKLCDYLFAKGLDIWRESALQIKKSSGLRKGKDDKADSLAIAEYAMRHADKAVYYVSPSQDIRELKELLLYRHKLEQEKASTTVRVTGLKATAGKSPSRNFILRDAQKRIKQLEKSIKECEKQILEIYGRNEEMKKSYTHITSIKGVSIVNATAMIAYTNNFKNITSSRKLASYYGVAPFREKSGTSIDKKAKVNCYSNTMLRSYLTMAAKHTIKANGIYFDYYNRMIAAGKCYGIAINNVKNKLLNLSISLVKNDMDYEACHEYKRLHGKAELA

SEQ ID NO: 316351 - protein, 356 aa, unidentified
MMKKILKEVLGVDIAQKELVVTVGRMFDDLSIDLYAHKVFKNNEAGFVALLNWIKKLTSNEFKVRFVMEATGIYHQKFAFYLYNHGREVTIVLPNKISNYIRTLENKTITDKSCSEAIAQFGLERNLDQWHKPKKIFHKLQQLTRERDQIVSERVTVKNQVHAEKSEVEPNERSLQRLNERIYLLNKQEKEIKADLEMIVNGDVNLNTEIKRICSITGIGKLTAIIVLAETNGFELIRNKKQLTSYAGLDVKEKQSGTSVKGKPKISKKGNRHLRKAMYLPALVAVKHDKKFGEIYLRIVSKDGIKMKALVAVQRKLLEMVHVIYKNKQEYQKEYSALKESSALNLKDQDATLASS

SEQ ID NO: 316352 - protein, 376 aa, unidentified
MQAVQQQGYESGTVLYMAMELSNRSWKLGFSNGQRMRRKTIEARDRQRLVEEVASARQRLGLDQDAPVVVCFEAGRDGHWIYRWLSAEGFEVLEIDSSSIETAQGRKHVKTDRVDVEKLLDLLLRYCLGFRQAFRVVRVPSQEAEAAQRLHREDEYLLRQRLRVSNRIKGLLATQGVVEVPLKRGFVSWLEEVRTWDGGGLSSELQVELRRLYAQYALMDGQMAEVAQAYEQELHGDTAVADKRRKLERLKSIGPKTSRVLSAEVFSWRVFRNAKQVGGMSGLTPTPSHSGDIQREQGISKAGNRRVRRVMIELAWLWLQWQPDSVLSQWFNRRFAHGGKRSRRIGIVALARKLLIALWRYVEWGVIPEGAVLKAA

SEQ ID NO: 316353 - protein, 372 aa, unidentified
MKQNIIHIGLDVDDTQYHGAAFNKETGEVIEFKSRPTLKGLIQQLDRMERHFKGHKIKLCYEASYVGYCLQRDLISNGVHCDIVSPSSIPSPRGKAIKTDRIDAGYLAQFYANDLLTIVQPPDEEQEHDRDLLRSRQRLLQQQTQLRKHMQAVLRRSGLHYKAETGNKSHWTKHHYGWLERTINGLSGSLKVNLLLLLRELKGLNQILVEYGQQIEVLASTARYQESVQSLTCYKGIKNTFALTMITEIGDIKRFPHPRQLVSWTGMDIREYSSGGKHNRFGITKHGNRYLRTAFVEANQRGYRTARIGKDVKARRKDIAPDLISIADRCLRRLNKKGNRLLLAGKHPNKVKVACAREMVGFVWESLNKVAA

SEQ ID NO: 316354 - protein, 360 aa, unidentified
MTTQTTAVPKLFIGIDIHKKQWSVHFRTDLFDHRGFSMPPDPEKLFQYVTHNFAGHQVSAAFEIGCCGFWAARHFLNYGWEVAVVNPADIKRSDKHRYQKTDAIDCRHICQQLQKQDLKGIHIPTEAHEQLCSLLRQRNHVTKMLRKQKSFIKASLLYAGIHIPEQYDNPNWSHAFLDWLKSINWSYSTGQYSLHSKLRILEVLHKEYLEVANQLRAWCRRHHHKDYYLLKSIPGIGGYLAAAVLAELGDLRRFNNERQLSNYIGLVPGIYQSDDTTKPMGLTPRCRSLLRSYIIEAAWIAIRRNPELQTYYRKHIGKNPKAIVVKVAHKMVRSMLSVIKNEKPYQINHSLENKQQTNAA

SEQ ID NO: 316355 - protein, 409 aa, unidentified
MRYYLGVDWADQTHAVWVVDESGAKITAHAVAHTAEGLGEWGRALDEWRAQGIDLWAAIERPDGRVVDFLLDHGVVVYPVNPKALDRARDRFRQSSAKSDPFDARVLADFLRTDHAHLRALLPSSEAAQELKLLTEDCQRHIRQQTRLVNQLTATLKAYYPRALEVAEVTSALAREFLPAYPTPAAVTALTERQWQRWARAHGLSAARAGDLWAVLRQPHLPVPAHVVRAKARLMQTLMEQLMPVVAAVAQYRKAIDDFFASMPAAQWARTLPIGKHGITAPTLWARLGDAPGRWESFRHQQAHAGAVPVTKRSGKQQVVHFRFACDKALRHVVDQVAFLSLLSSAWARAYYDQQRARGHSHRQALRALGAKWLKIIFVMWQRQVPYDEQYHLATMTRQQLQQGQTQFA

SEQ ID NO: 316356 - protein, 358 aa, unidentified
MVLKPITITNRKQGFELLHNTLKQLRQDCLIAMEDTGHYALNLLTFLHQNNYKIYTYNPLLIKEFTKSLSLRKTKTDKKDARTIALKLLSDPNRALFMHDNRQEELKIMTRHMNRLKKHQSDWKVQYTKCLDIIFPELHQVVTKHSDYVYELLKRFPSPEKMVTAGFDKLIEIKRLTAKHALDILELAPNSIGTTSFAREFELVEIIENIQHYEKLIKQAEKKIDELMAELNSVITTVPGISNRLGSVILAEIRNINTFTNPAQLQAFAGLEPSIYQSGQLDTQGKMVKRGSSHLRWALIQAAIKVARYSPTFKAYLRIKLEQGKHFNVAISHVAKKLIRVLFRLLQNNEAFEEDKLR

SEQ ID NO: 316357 - protein, 381 aa, unidentified
MTTPATRNVQESTTEGTLFVAFELSEKTWKLGFTTGHGQKPRERTVPARQQERVLDEIAQAKRRLGLPESAAVVSCYEAGREGFWLHRFLQAHGITNHVVDSSSIEVNRRRRRAKSDGLDVRKLLSMLIRYADGERQVWQVVKVPTVEAEDQRHLHRDLETLKQERASTMTRIEGLLSSQGLRVTSLTKLPEQLEALRLWDGSPIPPGLRRRVLRVYAHYTFLSAQIAEVEAERRAQLQASTEAQIDQVRQLMQLKGIGINGAWLLVMEFFGWRAFKNRREVGGLAGFTPTPYQSGDSAREQGITKAGNRHVRWMTTELAWSWLRFQPDSALSCWFRQRFGSGGKRLRRIGIVAVARKLLIALWRFLETGVIPAGAVLKAE

SEQ ID NO: 316358 - protein, 429 aa, unidentified
MDEVDDVDLVVQRVAALDLGKAGLRACVRVPHPHRPGRRMQEVRSYATTTAQLLEMVAWLRHWHVQRVVMESTSAYWKGVYYLLEAEEFECWLVNAREVKNVPGRAKTDRADAVWLAKVAERGMCRPSLVHPPEIRRLRDLTRYRRALVQDRTREQQRAEKLLEDAQIKISAVLSDLHGVTGRAVMDALIAGQRDPQMLAQLAKSRARKKVGQLEEALHGFFTDHHATILQMMLDNCDRLTAQIAALDAKIAEAIRPFSRQAARLADIPGVNVVAAAELVAEVGIDMTRFPTAAHLVSWAKFCPQTYQSVSKSISKGHGKGNPWLAGTLGRIVFANCRSETFLGARYRRLARRRGKQKAIVATGNSVLTVVYHLLSDPDARFCDLGPNYYESRINKHRRVRDLATQLQALTGQRIAIRDGKAVITDTAA

SEQ ID NO: 316359 - protein, 338 aa, unidentified
MQIGLDIAKNVFQVHGINAAEKVVVRKQLRRGQVIAFFKALPPCLIGMEACATAHYWARELTKLGHQVRLMPAKDVKAYVKRNKNDAADAEAICEAVRRPTMRFVAVKSAEQQGRLMQHRVRDLLMRQRTQLINALRAHLAELGIAAAQGREGIKELLAIVAQDGDKRLPVDAHASLIVLAAQLQAVQTMIGSIEKRIVAQHRSNEDSKRLQTIPGIGVLGASTIVAVLPDPKVFRSGRDFAAWVGIVPRQESTGGKQKLGPISKQGDRYLRRILVVGACAILRRARQQPEKYPWLTQLLARRPFKVVAVALANKMARIAWALLAKGGTYRAPQLAAA

SEQ ID NO: 316360 - protein, 312 aa, unidentified
MNNDTIGVDVSKDHLDAYRLADGASRRFANDKGGHKALIKWLAQTPLNRVVFEPTGPYHRAVERALGASGVPFVKVNPRQARRFAEATGKLAKTDRLDAAILARMGALLELQARPAPSEVLLELKELYVAREALVKDRTAAKNRAKILTVPVLKRHNAQRLEQIKRHIAAIEAAIRKQLQADPDLAQRFAILTSIPGLSAITAFALLIEMPELGALEPGQAASLAGLAPMARQSGRWTGRAFIRGGRADVRQALYMPALVAARFNPDMKAKYAHLIETGKPAKVALTAIMRKLIVLANALLKANRKWQPKCP

SEQ ID NO: 316361 - protein, 392 aa, unidentified
MIYVGIDVAKDKHDCCIVDSDGVIINDCLRICNSSEGFELLYTSILSALSGQNISNVKIGLESTGHYSTNLQNYLYAKGFRLYILNPLATNLFRKAQTLRKTKTDKTDALVIAKMLFSDDAKSYSPVSYQIQELKSLTRHRYRMIGYRSKLKISITRLIDIIFPELPKHVWSIHQNSSYCLLTELSNPKDIASCHLTKLTNILNKSSQGRYGKAKAIEIKEAASCSIGMSVSSLSFELKQTIRLIQSVQTEIDALDAQINKVVIETNTPLMTIPGISYTLAAIILSEIGDIDRFTTPAKLLAFAGLEPSTYQSGKYNASHTPMVKRGSTYLRWAMLTASRTVTMRDETFALYLSKKRDEGKHYYVAMSHVAKKLTRTIFYLLKTNTAFVPQM

SEQ ID NO: 316362 - protein, 323 aa, unidentified
MVQGSVLVHNTIPNEPKAIKDHMLHLKASLKFTTRNTVVGMENTGIYGNHVINKLKTLKIDTVVDPPLRIKNSSGLIRAKTDKKDAERIALYLYKSRDILRLRIPRRPIIEQLAGLSALRKRLQSLHIAMRVPLKENTGFVKKGLIEQNNRLCSRSFDALRLDIKDVEDSIEATWKADEETNRLMTLMQSVPCVGPVVALEILICTNEFKSIRTIRQFASYAGIAPFPYQSGTTIRKKTRVSKIANKKMKALLHNSAVLAKKFIPDIKAYYHRKTDIEGKHKMSVLNAIRLKIAARVYSCIKNNRLYEKIYEYKPVKNLAPPI

SEQ ID NO: 316363 - protein, 380 aa, unidentified
MEKACGLDVHKDSVFACILDEQGKKIFEKRYGTLTPDLMALRETLVEEGCGRVAMESTSIYWMPIWHVLYGDFSLTLANPYFIKQLPGRKSDVKDAQWIAECLQKDLIKSSFVVDGALRQMRQYSRQHRRLTRNRVRVEQQLDNQLQRCNIRFSNYVSNQGNNVSMRKIIKAIIAGERDPTQLCRSVHGRTQNKHGKQVITDSLSGVIEQVDVQMLIQCMEQIDLIEKQQATCLNHLEELANKYFAQEISLLCTIPSIKTLSALFILSEIGNDMSAFSSASSLVGWAGLRPRNEESAGKIHSRKTLHGNKYLRQILVEISWSAARSKKSFLGKKHSVLAKRMKPQKALIAITRKMLVIIYNVLKTKQPFDPNRNMQAITA

SEQ ID NO: 316364 - protein, 323 aa, unidentified
MFYLGIDVSKAKLDCMLLDSSTGKVKSKSLANTPIGFNQLLEWLDKQKAINPHVVMEPTGVYHEGAALALADAGLIVSLVNPAQLRAFAQGLGVKTKTDKEDSMVLARFGALQKPAAWQPPSTSARRLKALLARRDAVSDDLQRERNRKEAADFGQAPEEVKSSIDQSISFIDMELKRLEQMITEHIDDDPDLRTKKDLLESIPGVGPRVSGHMTALFAGRTFARAEQLAAYLGLVPVQWESGSSVRGRPRMSKAGPAYLRKILYMPAISARRWNPHIKALNDRLLAKGKSKMAIIGAAMRKLAHLCFGVIHSGKPYDPKFAM

SEQ ID NO: 316365 - protein, 338 aa, unidentified
MSLYCGIDLHANNSYVVVSDLEDEVVLGGRYPNDLGRILRALEPYRVELSGIAVESTFNWYWLVDGLSEAGHTVHLVNPLAAQQYKGLKYTDDRSDARWLAKMLRLGILPTGWICPPGDRAVRDLLRKRVQLVRQRVASRLSLRNILERTTARRLSGNALERLSEEELSDWIEDEHVLLSMTTTLAVIETLNEQIKLLEGVVFEQARKASAFSVLTTIPGVGPILASTIQYETGELSRFAGVGHYASYCRLVRSERLSNQRRKGQGLRKNGNAYLSWAWHEAAHFAVRYQPRARKWYERKRSRTCALVAIRALAHKLARAAYFMMRDQVAYEPARLFG

SEQ ID NO: 316366 - protein, 342 aa, unidentified
MDEIIRIGMDTSKHVFQLHGVDAAEQPVLRRKLRRKQMVEFFEKLPPTVVAIEACGASHHWARLLGSFGHEVKLIPPQLVKPYVKRGKNDAADAEALCEAMSRPTMRFVPVKSEQQQAGVMLIKVRDRLIRNRTQLANAIRGHAAEFGLTAATGTHHVGPLLDRIAADQQLPELARRLFAIEAAEYRQLEAEIETIEAELMAWHRADECGRRLAKIPGVGPIGASLLTMKTPAPELFKSGRDFAAWLGLTPRDHSTAGKVRLGVITRAGDEALRSTLVVGATALLRHVRKGQGSNASPWLLRLLERKPPKLVAVALANKIARIAWKMMVTGEPYRARLPEAA

SEQ ID NO: 316367 - protein, 338 aa, unidentified
MEQQREYVGIDLHRRRSVIVRITESGEVLETVRVDNDPLSVVRAVMHDDPNPEVALEATYGWYWAADLLQAEGATVHLVHPLGLHWDSRRVKNDERDATELAKRLLRGDLPEAWIAPPELRELRELVRYRAKLTALRTSAKAQVHAVMAKEGVLPTYGRMFGPAGQRLLDEMPVQGVYRDRVESLRHLLEIYERELVLVESHLSRRLKGHQGFSAIQAIYGVGPIMAAIFVAEIGDASRFPSARHLCSWAGITPSHRESDVKVHRGHITRQGNNLVRWAAIEAVARYHGGAPIEATFERVAKRRGTMIARVAAARKLLSLVYYGLRDGEIRCLSREAS

SEQ ID NO: 316368 - protein, 387 aa, unidentified
MSIVDARGREVRRATIEHNAAGLRELLELLSRAGAREVAIERPDGPVVDTLLEAGITVVVISPNQLKNLRGRYGSAGNKDDRFDAFVLADTLRTDRSRLRPLLPDTPATATLRRTCRPRKDLVAHRVALANQLRAHLRVVFPGVVGLFADLDSPISLAFLTFLPVSTARTARTGCRSSAWPAGWPPLATAAVLHDRLTGAPRGATGDEGAANAHITRAMVAALTSVATQIKTLDAQIAEQLSLHADAHIFTSLPRSGTVRAARLLAEIGDCRARFPTPESLACLAGVAPSTRQSGKVKHVGFRWAADKQLRDAVCDFAGDSRRANLWAADRYNRAIARGHDHPHAVRILARAWLYAIWHCWQDGAAYHPANHRALQALLNQDQDRAA

SEQ ID NO: 316369 - protein, 418 aa, unidentified
MKIVYPVCCGVDVHKNVIVATIAITDKSNITQYVMESFSTINADLMRFRTWLLSYQCFNVCMESTGKYWIPVFNILEEASIKVLLTHPKYVRAIKGKKTDKKDSKWIADLFKFDMVRSSFIPPQDIRALRELARYRYKLVCVRSSERNRYQNCMTVSNIGLASVLSDPFGKSASDIMRYVLSSSVFDEEHCKRLIQKSAKKKTELILESIRGSRIEADQRFKMNEAAAHMEYLEQAILRTEAELYTRIQPHYPRVEHISNQLPGISQLSAALIISEIGVDMSVFESAKHLNSWAGLAPANNESAGKKKSVRISKAGQFLKPLLVQCALAAVKSNKQPYFATKYRKLKKRRGHKKAIIAIARMMLTCIYHMLQTGETFNPSDYDNFDKPVIRKVVLNYENAIAFLAAQGYDVSSISKIA

SEQ ID NO: 316370 - protein, 346 aa, unidentified
MTIVEDACVITGGVDTHADMHVAAALDRLGGLLGVREFPATAAGYAGLLGWLSGFGTVALVGVEGTGSYGAGLARHLAAAGIRVVEVDRADRQDRHRQGKSDPLDAVSAARAALSGRAAGAPKGRDGAVEAIRALMVAKRSARNERTQAINQARALIVTGPDELRARFARHSAAALAEAIAALRPRPGDAAEYAVRVALRELGRRVEFLDAQLERLDDLIVPLVTARAPGLLSLYGVGPDTAALLLVAAGDHPERLRSEAAWAHLCGVAPIPASSGKVRRHRLNPGGNREANHALWRIVITRMSWHPETRAYVQRRIKEGLTKKEIIRCLKRYVAREVYHHLRAGG

SEQ ID NO: 316371 - protein, 349 aa, unidentified
MLATTEQTIRVVGIDIGKNSFHIVGLDDRGAIVLRQKWSRGQVQARLANLPPCLIGMEACVGAHHLARRLQALGHDARLMPAKYVRPYSKGQKNDFRDAEAIAEAVQRPTMKFVIVKTSDQLDLQALHRVRARLVSQRTGIINQIRSFLLERGIAVRQGQRFLRAELPRILTAACEVLSPRMARVIEALADDWRRLDGRLDELSAEIQALADADSACERLMSVPGIGPIISSAVVAAIGTGEAFTKGRDFAAWLGLVPRQMSTGDRTILGRISKRGNRYLRVLFVQAAWVVLIKPTSWHRHGLKAWIEAAKKRLHHNVLAVALANKLARIAWSVLAHGRAFEVSRPQAA

SEQ ID NO: 316372 - protein, 391 aa, unidentified
MICVGIDIAKDKHDCCILDSDGTVRADCFTIPNNMDGFKQLLQTIRNCTKKSDKIKVGLEATGHYSYNILGFLLDNGLPTYVINPLHTNLYRKSLSLRKTKTDRVDARTIATMLLSDVDLKSYTDIAYHNEELKSLTRYRFEKVRERAKLKQSVSRLVTILFPELEKLVPSLHGASVYALLSEYPGAKQISEVHLTKLTNLLVAASKGHYGKEKATLIRETARASIGSVMPAKSLELKHTIKLIQELTSEINEIEDSIQKIIDELNPPILSIPGMGVNSAAVILAEIGDFSNFSSPDKILAYAGCSPSTYQSGKLTNCYAHMEKRGSRYLRYALYNATKYVCHWNPVFAEYLAKKRAEGKHYNVALSHSMKKLVRLIYALQKSGKTYLAAA

SEQ ID NO: 316373 - protein, 356 aa, unidentified
MSKRSRQAKIEQHQYVGLDVSLAETSIAVVNESGRMLWRGKVDTTPEAIAEALQLHALLAERIGLEAGQLSSWLYQSLKALGLPVICVDARHAKAALSLRLNKTDPNDALGLAEIMRVGWYREVVVKGQVAQALRALLVARAQLVSQVTTLKNCVRGLLKIYGIVLPKKLRAGFVAGVREAIAEHTTLEPVLDPMLCTISGTVDQLHAYDRAVHRHARDDDTIRHLMTAPGVGPIVAMAYATAVDTPARFARSSSVGVYFGMTPRRYQSGEVDTAGRISRCGDGMVRGLLYEAAKVLLARSAKPSDLQAWGRKLARRVGAKKATVAVARKLSVILHRMWTTGEPFRWTAAPAPATA

SEQ ID NO: 316374 - protein, 350 aa, unidentified
MTVYIGCDAHKRYSVFRGVDEKGQAGTSHRVENSRGVFRGFLTKLPAGSPIAVETIGNWYWLVDEIERAGHNPHLTASGKAKLMMGQINKTDKLDAKGLAVLLRNGTLPEVWIPPGELRDQRELPRTRMMLVQMRTRLKNRIHATLEKYAVQIDGVSDLFGVKGRGLVEERLKELPPFTQESMRAELRLLDDTNREIAICERRIKEVVAETPEMQLLMTMPGVGALLAVVLALEIGDVERFGGPEQLASYSGTVPRVHSSGGKTYHGQTRPDVNRYLKWALVEAANCIVLHQSTYEGRHAVRLYSRIRDRRGHGKAVVAVARHLAEASYWMLKKKEPYQEPSSSTREQTR

SEQ ID NO: 316375 - protein, 430 aa, unidentified
MKQYELLHSLFVGIDVSMKENVVHAMPFSPEDHPGHAHLRFSAPNTPAGSVGIVEKVSDFLKFYPDVIQVVIALEATSVYSFHLATFLSVAHFNGHIPAIVYSVNSKEIHAYKKTFTDVGKDDYVDAMVIADYARSNKIRSRPWKGPELLGLRVLTRLRFRIAKLMGIVKNSTGNSIYLECSGLMTGENPFCNVWTTTYQELLTTFQGPDEILSLSDEELLNFITEKGHGRFSHPLDVVEKVKKAARNSYRLDKRVYEPLTSGLSVSFFIIHSLEAAIKKLDKSIETMAKSFSSDSYQILLSIDGVGPVIAGGLLAEIGDIKRFKTDDALAKYIGLTWRGKQSGQSESPVKHLSKAGDVYLRYYVLLATGQIINYSAKYREAYERIRSRKTLFPHRAALNLVARKIVRLIFTLLDKHQLYSDNKVMVTLE

SEQ ID NO: 316376 - protein, 347 aa, unidentified
MDHVGMDLGKRESQLAILTEDGELINMRIRTERHRLVEMFGRRPKARILMEASTESERVARCLEDLGHEVIVADSNYAPMYAQRTRRVKTDRRDAHALAHAGKAGTYRPAHRTSTERCELRARLAVREAVVRTRAAWITRIQSLVRREGSRLRAGAPETFLTRVKELALPPTLTTVIAPLLELLGPLNKQIAALDEELERIVAADEVPRHLTTVPGVGPVTATAFVATVDDVTRFRGAHQVEAYLGLIPCEWSSSEVQRRGHITKAGNGRMRWLLVQAAWCILRRRKRPETAALRDWAERIAGRRGRCIAAVALARRLAGILFAIWRDGTVYDATKVRGPLPARRAA

SEQ ID NO: 316377 - protein, 358 aa, unidentified
MPGRSFNQEKNMDQIIIGVDTHKSCHIAVAINTQGKRIGTMTIPTTRQGYRSLEAWATGFGPVKAFGIEGTGSYGAGLSRDLQTKGHTVLDVIRPNRQLRYLHGKSDILDAESAAKSVLNGQATALAKTQSGASEMVRHIKIARDSAVKSKSQTMITLKTLIINAPAELRASLDQIRGPITLVRHISALRPGEITSPLASAKAALRALAQRWLALHEEIQIHEAELERLVADKAPKLMKSHGISTLTVAEMLILVGDNPERIRSEAALAKLCGICPIPASSGKTTRMRLNRGGNRQANAAIYRVAIVRMRDDDRTKAYAARRTAEGKTRREIIRCIKRYIVREVYTALCATKSTQFST

SEQ ID NO: 316378 - protein, 347 aa, unidentified
MNFYNNLHPYYCGIDLHARVLYVCIIDQDGQTRVHKEISDSPEMLKQLLEPYLGNVVVGVECMHCWYWVSDFCEEIGVDFILGHALYMKAIHGGKAKNDRIDSFKIANLIRGGNFPLAYAYPKEMRATRDLLRRRTKLVRHGAHLKAHVSNTTSQYNLPAHKVNLKNVGAREQLKSTFPDRVVQRNIDLDMAVLDCYAKELSKIECFLEQQAKQHNPVHWHLLKSISGIGRILALTIIYEIGNIERFESVQKFASYARLVKCKAESAGKSYGTQGNKIGNAHLKWAFSEAAVLYLRGNEKAQKYLLKLQRRMSKAKALSVLAHKLGRCVYFMLKNETVFDESRFLKS

SEQ ID NO: 316379 - protein, 353 aa, unidentified
MGIVVALDVHRKQITYKTLDRETGEVERGRLAPAARADVREWLARFAGCEAEFVLEGTTGWRFVVEEIERAGHRAHLADPAETAAKRGRKRRAKTDKADCDLQLRLLLAGELPASWIPPAHILELRTRVRMRKTLVDQRTAWQQRLQAQLFHQGVRAGLRPRTRAGREALARVELSPAGRELVSLALRMIEMIDRELAPLDRELRAFARRQPGCRALIDRLYGVGPISATAILAELGDARRFGSSDDAVRHSGLDVTVYQSDSKRAPGHLSHEGPELLRWALFEAAHQAARPGSPDHGYYLQVAERIDHNRACLSVARKLCRRAYHILRELGDEALAPVEGDRYAEEAIAAAA

SEQ ID NO: 316380 - protein, 347 aa, unidentified
MAAVMIGIDPHKGSHTAVAIGADEGPLGELRVRASAGQARRLLAWAVAWPERTWAIEGAAGLGHLLAQQLLAAGERVLDVQPKLGARVRLLAAGAVNKNDPNDARSVAVAALRSASRREVAADDHAAVLKVWAKRHRDLGRARTQVACRLHAVLCELIPGGVSKRISAALAGQLLEGITPSRAVEAARCELAAAFLDDLRRIDAQMRDAKNKLTAAVQASGTTVTEVFGAGPIVAATVIGEVRDVSRFASQDHFAAYNGTAPVEVSSGRRKIYRLSRRGNRRLNHAIHMAAVTQVSHRHSPGRAYYDRKLAEGQTPKEALRSLKRRLSDVIFARLQADAHRAAAGPR

SEQ ID NO: 316381 - protein, 441 aa, unidentified
MAKLYNLNAAGIDISTKEYVVAVPEDRNEDYVRTYGTFTKDIHLLAKWLKECKIETIAMESTGVYWYHLYTVLLDYGFEVYLVNAQHVKNVPGRKSDVEDAQWIQELHTYGLLRASFQPDNLTRSLRNYVRQRKSIVQQMTTEIQRMQKALEQMNIKLNNVIRDICGKTGLAIISAILQGERDIDKLAELRDWRIKASKETIINSLEGNWREEQIFNLKMAYEHYFFLQKQLSKCDAQSQSVLEIMAQSNSDQTSEKSKITTNKNKKNKIHFNARDYLCRTLGVDVTNIHGIQEITALTILSETGANLKEKFPTEKQFLKWLNVVPDNKITGGKVISSKVRKKKNRAGQAFRDAASSQWKAQNPIGDYLRGKKAKSGGKQAVVATARKLASIYYKLVTEKEEFDTEILKRNSEFFLKTKLKQLTILKTRLENSLNYQDIYV

SEQ ID NO: 316382 - protein, 373 aa, unidentified
MASISYNGLSHKSKRKDAIMNKQSKQLNFAGQVFYIGIDVHKKDWKVTIRHNRMHLKTFSMNPSPEGLSSYLQKNYPGGKYYSVYEAGFCGYWIHRKLTALGIENIVINPADVPTSQKEKVNKRDKVDCRKLARELENGSLHPIYIPTEEQTALRSVARLYQQAIKRRTQIKNRIKSFLFFNGIEFPDMDKTRRWSGQFIDYLKMLEFEHHWDHYSLNRHLDDLEIQRRITRDILREMRREYKQNIIMQKLKSICGLGIVNTFTFYAELFDIERFDTLDQLASFIGLIPSVSASGDTEIIKGLTFRHNRYLRHILIEAAWVGIRKDPALTQKYNELIKRMSSQKAIIRIAKKILNRIRYVWLNEKEYVYGVVA

SEQ ID NO: 316383 - protein, 332 aa, unidentified
MMAQNDCVVVGIDVAKDKVDASIRSLSQRQTFPSTTEGRRTLIRWLRKHKVGKAAMEASGGYERDWAKALREARIEVRIVDPKRVRSFARSAGRLAKNDAIDAEMIAWFAETFGEAPSQAYDAARDKLVQIVRARQSLLDLQTSLQNRGEHAAPEVVQKMQARLLKTIALEVAKLEAAITAMIKATPHLAELAEIIESVPGLGKITSAGLVAAMPELGQVSNNIAAALLGVAPYDDDSGQRRGDRHIKGGRRKVRNLFYMACLGAATRHNPMLKAFYDRLIAKGKEPKVALTACMRKLICILNTMIARREKWDATRYKMSDPARLPPSACPA

SEQ ID NO: 316384 - protein, 382 aa, unidentified
MPMRQVCGLDVHKDSVFVCIINENGVVFQEKYGVLTPELEQMLAKMLEYHVEEVCMESTSIYWMPVWRVLENYVSLKLVNPYFIKQLPGKKSDVKDAEWIATCLLKDLIKGSYVPDDLIQQLRQYDRRISDLNAECVRKLGKLDAALQRCNIRISNYVSTTDGKSYKEVVRLISEGTRDPAELTKVIHGRTINRVGKDVILASLTGVISNTDIDVIRQLREEVALAERHKDECQSKMDAICQQYFPQQLKNLQTIPGIKGRSATAIIAEVGTDMSSFEDAAHLVSWCGLKPRNEESAGKIKARSTTHGNRYLRKTLIECSWAASKTQGCYFNKFSYHQVVVRRKNKMKVQVAIARKILTAVWYVMHDNVAYRDYTPDIAPAE

SEQ ID NO: 316385 - protein, 349 aa, unidentified
MQITTIGLDIAKNVFQVHGIDAAEKVIVRKQLRRGQIIAFFEALAPCLVGMEACATSHHWARELTKLGHEVRLMPAKDVKAYVKRNKNDAADAEAICEAVRRPTMRFVRIKSAEQQGQLMLHRARDLLMRQRTQLINALRAHLAEFGVTAAQGREGIKELLAIVAQDESSRLPIDAHASLTVLAAQLQAVQTMIGSIEKRIVAQHRSNEASKRLETIPGIGVVGATTITAVVTDPKAFRSGRDFAAWIGIVPRQDSTGGKQKLGPISKQGDQYLRRILIVGAHSVLRRARQQPEKYPWLTQLLARRPFKVVAVALANKMARIAWALLAGWDLPGAPTCGSLTRGSAMGG

SEQ ID NO: 316386 - protein, 350 aa, unidentified
MLHAGLDLSRRRLDVCVISEPGELVEEFPAPPDGDGLRYLVKKVSHHDEPVRAVIESMTGARFVHDTLEQLGWDVRIADAQKVKGLAPLACKTDRIDARVLAMLSQRNLVPEIWLPDPLIRSEREQARFRLHLVKHKSMLKHRIHATLMSFGHPCPVSDLFGVAGRELLESLQIPPPWRETVDASLYLIDYLESEIAAIARTLRASGAEHRYVPLLLTVPGIGWVLAFTIAAEIGDIHRFPTARKLTGYTGLCPMVRQSGEKDRRGPLTKQGPKYLRWAMLEATMHALRHPVYRERYQRTKHRLGKQRGAKVAQIDIARKLTEAIWHMLTTNQPFNPATAAGGATNRLTA

SEQ ID NO: 316387 - protein, 356 aa, unidentified
MSYDVNYIGMDVHKEAIVIAVLNETGKLVMESVIETKASSILQFLHGLRGELHVTWEEGTWAAWLYDLLQPHVQHIVVCNPRRNALLKEGSKSDKLDARILADLLRTGMLRPVYHGENGLRTLRELGRSYQNISKDLTRVMNRLKALYRGWGIPCAGTQVYAARAREEWLNKLPQAGVRRRAELLYQQLDGLQDLRREVRPEFLAESRKHKAAKLLRQIPCIGPIRAARLIGLMQTPHRFRSKRQLWNYSGLGIETHDSAQYRFVSGQVQRSKKPQQVRGLNRNHNHEMKEIFKSAATRASCGRGPFHDFYTGLLAKGMKPEMARLTLARKIAAITLTLWKKEERFDVEQLKTQAA

SEQ ID NO: 316388 - protein, 378 aa, unidentified
MKASKPGSSPVGEWVYNVVGIDPHKRTLTATVVDARGGILASEHFRVSGDGHRALEAWARSFGPIARWGVEGASGWGRHTAVFLCGRDHDVRDVCPTRTARSDRARQRGKSDMLDSERIARETLAHPLLPRAFKRAGDGQGPDEQRELLALWHNARRSILTSRQHLLNEAESLLADLPLDVREQLPDSKAVRPRLAVLAQRNRRRRHDAPTTLRLRLLDAHHARIAQLDREENHAVKQLEALVRVSASTLGELCGLSTRSVAELLVEVGDPRRFTEGGFARFNGSAPLAASTAEGPGEPVRHRYNPGGNRRVNAVLHRMAVTQLRCEPRAQAIYERARAQGHTKREARRILKRHLSDVIHRRMMRDLKAASASALLAA

SEQ ID NO: 316389 - protein, 360 aa, unidentified
MGEPLIHHEDKASRERRGSPSKTIDAANGCKRIKPRITRTQSNFYLTRRENYIMKIGIDVSKKELAIYANEKYSVIVNTEEGLNLFLKNHAEYTQGLWVFESTGGYERILKAFLLKANIGYRQVHANRIRDYAKSTGIFAKTDKIDARVIAAYAQERNLTAQNEEVKRDEKLTELSTRCEQLKSNLTQEKNRLETCGKIMGASVKKHIKWIEKEIKSLDKFISEYFKTNETLKKQEALISSVPGIGRVTTTQLIANLPEIHTHDINVLRRLVGIAPINKDSGSVTKKRCIGGGRKSVRNALYMAAISAIRCELSLKIYYQKMINKGKPVKVAIVAVMGKLLAIVKSVVLRGTPYVENFAR

SEQ ID NO: 316390 - protein, 412 aa, unidentified
MRAVALDVHRDFCEVAIVEDGRPRSAGRIQTRPEALELFARSLDPRDWVTLEVTGNAWAIAAILEPHVARVIVVSPTDTGIRQARAKTDRLDARTLAKLLWAGELDGVWTPDERVRAMRRRLARRAQLVRARSRVKNEIHAVLMRCLKDRPPASDLFGIKGRRWLADQQLALCERETVDAGVRQVDFLDTEIAHVERLIAADALGWPEVKRLMTVPGVNVIVAATFMAAVGDIRRFGDRRKLTAYLGLDPRVRQSGAGPANHGHISKQGSNSARHALVEACWSTVRQPGPIAAFYQRVRSRRGHSIAIVASARKLACLFWCLLTRGEDYAYAQPSLTQKKMRRLELAAGAPRWQGGRHVWSTNDAMRQAERALAEQAELAYRRSVADWHATRPATAGASATQGHASQEPSKS

SEQ ID NO: 316391 - protein, 375 aa, unidentified
MTTHQRTTRYVAGIDLHKRPLVMTIMDHDGTVVYQSRTHRRKQAWLAKVLAPYGTDITVCVESTYNWYWVRDWCAAGGIAFALGHAYYLSKLSASKQKDDNRDAYSIAHRMRLSDVPVAYALPKEIVAVRDLCRRRLKYVRMRAGVRNHIECVHDQYLLEERHEELLNGPERAIYQPVWDSLDADQEVSTYLEHLTQKLERTIARHTRHLQNRAWELLMRIRGVGAVIAMTLLLEIGEVKRFKSVQAFSSYARVVNARHESGGKCAGRGNNRNGNPYLCYALHELVETSRRYVPEIAAVFNALKRKRGVRHAHRVLAHRWAEVIYFMLKHETEFSLEKFVHPYRGCVSTAGPSNRLDAQTVREPEEMIGSQRASA

SEQ ID NO: 316392 - protein, 333 aa, unidentified
MMNMHSQGRVASGAPRPNAGIDVSKEHLDVHLLDIDLRVDNDASGWDALIAKLKESDVDLVVVEATGGYERGVVTALHRAQVTVARVNPRQARDFAKSMGVLGKTDRVDARCLRDFADMLARHKDRHKYITLPADPEREQLASLMTRRRQLVDMRVAESNRLEGATVRTVRSIRSVIKTLDKQLQDIDGDIDQQLERHFKPQKELLDSVRGVGPVTILTLTSALPELGRLGRRQIAKLVGVAPLADDSGKRNGVRRTWGGRSEVRAVVYMATLTAIRHNPAIKAFYSRLVAAGKPKKVAIVACMRKLLTILNAIVRDKAPWSDAAGLISQRSP

SEQ ID NO: 316393 - protein, 388 aa, unidentified
MQTVADRHEGPNAIRTDLGAIFVSLELSRSRWLITSLSPDGGEKMSKHAVRGGDVSGLLERFAQLRKKARARTGKVFPFVVIQEAGLDGFWIDRVLRKEGIESHVVDPASITTSRRRRRAKTDGIDGEALVRALLAYKRGEPRVCAMVKALTPEEEDRRRLCRERKVLIGERVRHVNRVKGLLFSQGISGYEPLRHDRRERLDTLQTGDGRLLPDHLKAQVRRELDRLELLLEQIKAVEAERDVLLAAQQGAAPAPAAMLLNIKGIGPEFAAILWSEGLFRHFDNRRQVASYAGLAPTPWQSGSVDREQGVSKAGNPRLRTTLIQLAWLWLRNQPQSALALWFKERVNRNGGRLKKTTIVALARKLLVALWKYVTAGVVIEGAIVKSA

SEQ ID NO: 316394 - protein, 342 aa, unidentified
MFYAALDVSLRSVAICIIDEVGKVRLERSAPSDVPDIVRCFEEFGEPIHQVGLEAGTLTQHLTYGLTEAGFEVVCMEARQVNAALSAMRNKTDKNDARGIAQLLRSGWYSRVHVKSVESHYTRALLSSRKVMQRKCLDLENEIRGLLKVFGVKLPIRLRGGAFEVAVRDMIENDPALSHALLPMLEARQMLLETFLELDRRVRKAANQDAITTRFMSVPGVGYVTALSFKAAVDDPARFKSSRTVGAHFGLTPRRFQSGEKDNPGRISHAGDADVRATLYAAANAMLMRSIAWSSLKAWGVRLMKTKGRRRAIVAVARKIAVLLHRMWIDGTEFRFGSEAAA

SEQ ID NO: 316395 - protein, 411 aa, unidentified
MSDSIFVGIDVSVKSNKVCILDSLGNRLAKMTVHNNSHGSSQVVDRVTDILCKTGCTKVSFGLEATSVYGEGLIFYLKQDKSLKNYDTKVYLLNPKQVHNFKKAYSDLPKTDDVDAWVIADCLRFGRINLSETYFDERHKALQRLTRARYHVVQNIVREKNRYLTNLFLKFSGLYQENLFSNKFGATAMEISNGAFSLDEIAHMPVDKLAQFINASGKGKFADPETLAADIQKAARSSYRLPKTIEDSVNRVLAVSTVSIKSYLEQLKSLDKSISALMETIPNTLTSIKGIGPVYAAGILSEIGSISRFKDQASLAKYAGLSWSRYQSGNFDSDNTHLINSGNRYLRYYLIEAANLVRRHDPEFKRFYELKYRETPKTPHKRALALTARKFVRLVYALLRDQRLYIPPRVE

SEQ ID NO: 316396 - protein, 496 aa, unidentified
MKMYTVAGGVCQGRIRRVMRMQLGFKAGLGVTRRENCCHASQEVKHVEETCVRFHTPRTSCVECKEEVKGDTDMQVVHERCCGLDVHKKTVVACILVTSPQGVVQKQVRTFSTMTVDLLALADWLKSSEVTHVAIESTGVFWKPVFNLLEADFSVVLVNAQHIKAVPGRKTDVKDSEWIADLLRHGLLKASFIPPEPIRVLRELTRYRGSLIQERAQEVNRLQKTLEGANIKLAAVATDVLGKSGRDMIQALIDGETDAQALAELARGLLRKKLPQLQEALLGRVQPHHRTLLRHILAHIDFLESLLEQLMADIETQLSPYKEEQELLTSIPGISGTAAAIIIAEIGVDMEVFPSDKHLASWAGVAPGNRQSGGKRLSGAITGGNPYLRSVLTQVAWAVSHTKDNYLSAQYHRLARRLGRKKAIVALAHSILVIIYHVLRTKKPYTDLGADFFDKLDTTRIQQHHTRRLEQLGFTVTLTRHPRQLNCVGSVLLTGI

SEQ ID NO: 316397 - protein, 393 aa, unidentified
MVCVGIDVAKDKHDCFIISSEGEILADVFTIPNNAEGFDTLLQAILRSTRPEDKIKVGLEATGHYSYNILGFLLDKGLPTYVINPLHTNLYWKSLSLRKTKTDRVDARTIAAMLMSDVDLKSYTDTAYHNEELKSLTRYRFDKVHERAKLKQSVSRLVTILFPELEKLVPSLHLASVYALLIEFPGAKQVAEAHLTHLKAVLYGASKGRYGRDMATTLRDAARCSVGSVMPAKSLELQHTIRLIRELDAEIEDIETAIQSMMDEIQSPITTIPGIGVRMGAMILAEIGDFSRFDSPDKILAYAGMSPSTYQSGQLSLSGTYSHMEKRGSRYLRYALYNATKYVCLWDTTFAAYLAKKRAEGKHYNVALSHAAKKLVRLIYALEKSGLPYSSAI

SEQ ID NO: 316398 - protein, 351 aa, unidentified
MKFYRTTTEYNCGIDLHSRQMYICVMDKEGNKLVHTNVTGNDFGYFLSRVQPYRGDLTVCCECTFNWYWLADACAAAEIEFVLAHALYVKAIHGGKNKNDRIDSEKLAHLLRSNLIPPAYVYPAAKRSVRDLMRRRTTFVWKRTELLHHLTCMPLVQGQAPVAKCQHRVRERWFEQLRPRFDEPMRKISAEADMYLIKEYDKIIDRLERVIVKETRKEQGRDFALLKTIHGIGDILALTILYEMDTVDRFPRVQDFCSYCRLVKGSVASAGKIKGLRGAKLGNPYLRWAFGEAAVIGKRSNPDLNRYGKQLEAHNPKPVVNAILANKLARSVYFMLKHGKGFDPKLFAKGL

SEQ ID NO: 316399 - protein, 354 aa, unidentified
MSEKHNSVIAVIGIDIGKNSFHVVGLDGRGAIALRQKWSRGQVETRLANMPACLIGMEACVGAHHLSRRLCLLGHDARLMPAKYVRAYSKGQKNDFRDAEAIAEAVQRPTMKFVATKTADQLDLQALHRVRERLVSQRTGVINQIRAFLLERGVAVRQGRHFLRAGLPGILATGCEVLSERMVHLIEDLAGDWRRLDERIKGLSGEIGALARQDAGCERLMSVPGIGPIISSAMVAAIGAGDTFTKGRDFAAWLGLVPKQFSTGDRTVLGKISKRGNRYLRVLFVQAAWVVLVRSKNWERYGLKPWIEAAKRRLHRNVLAIALANKLARIAWSVLAHGRNFEAGKVAAAATLPA

SEQ ID NO: 316400 - protein, 343 aa, unidentified
MSIMILGIDLGKNSCSVVGVDATGAIVTRRTMRRQTLIDYVTKLPACIVAMEACCGAHHLGRLFTGRGHEVRLMSPEYVRPYIKAQKNDDRDAEGIAEAASRPTMRFVDLKSQQQLDIQTLHRVRSRLVAERTNLINQLRAILLERGVIFPAGRRKLELGVDSMLAEDVKLLSSRVQQLVRELRAEWQELDTKIGALNTELIQLARNDAATRRLTTIPGIGVLNATALVAAVGNASSFAKARDLGAWLGLVPRQYSTGGKPRLLGISKRGNTYLRTLLIHGARASLPSLSKSDTPTGRWLKAMMERGVHRNVMVVALANKLARIAWAVLRKETGFDRSCPAVA

SEQ ID NO: 316401 - protein, 355 aa, unidentified
MKYYTSSTQFNCGIDLHARQMYVCVMDRDGKKLVHTNIKNNDFDFFLKLLAPYKHDLTVCAECMFGWYWLADACQAAGLHFVLAHALYLRAIHGGKNKNDRVDSEKIAHLLRSNLIPPAYVYPADKRPLRALLRQRLFYVWRRAELLARIASHQLAHNRAPIRQTRRVRDDWEQQLLAAESHPLRQLALQNDVAMIGHFDRQLVQLEAELQRQAKATAARDYTLLQTVPGIGQHLGLTILYEIGDIERFPTVKDFLSYSRLVKGTVASAGKIKGLRGAKLGNPYLRWAFGEAAVIAKRDPGLIGPLAQRLEARMNGNKFKANTVLAIKLARAVYYMLRSKTVFDPDRLVAALSRN

SEQ ID NO: 316402 - protein, 320 aa, unidentified
MQTRLVINTFIGVDVSKASLVTCVHDSSTHCTLGNERSAITAWLKSLPAGSAMGVEATSTYHELLADLAHRLGLLVYVLNPKDVRHYAKGVGMRGKTDRVDAALIARYIAHEHAKLHLYCPASLEQRQLQRLLTRRAKLSRARVSVQQSLQGLPGLKVPLRNLLERFDALIAVIDARIQALVNACPQRQRACQRLRSIKGVGPVVGPALLNTLERFVFERADSFVAYTGLDPRPDDSGKRTGRRRLSKHGPSELRRLLYNAAMAAVTSSVWKPLYQHYLDKKLSRTEALVIIARKIARTAWSVYTHNTIFDPQRLTSGLT

SEQ ID NO: 316403 - protein, 338 aa, unidentified
MKQYVGLDVSQKETSVCVVDGEGRVLFEGTAKSTLGDLAALIRKRALQAERIGFETGAMASWLWHEFRRFDLPVVCIDTRHAKVALSVRMNKSDQNDARGLAELVRVGWFREVRVKSEESQRVRSILVARSRLVSIRRDIENQVRSMLKEYGLLFTRAIGSQFRQRAAELIEGGHQLHSVVEPLLSIHDKVCVEQIKLDDEIRRLARADETTRRLMTVPGVGVVTALTFRHTIDDPSRFRSAATVGAYLGLTPRRKQSGETDINRKISRWGDRLLRTYLFEAASVLIYRTKRWSSLKAWGMKLIKRIGMKKAKIAIARKISVILHCIWVDGTAFEWGN

SEQ ID NO: 316404 - protein, 361 aa, unidentified
MFTERTSVGLDVHARSVVAAAIDGDTGEVFRRRLTPANDDVIGWVRSLPAPVAVVYEAGPTGFGLTRAFATAGIRCEVAAPSKIQRPAGDRVKTDARDAMLLARLLRLDEIVAVTVPTVEREAARDLVRAREDVRGDLMRARHRVSKLLLRQGIVYYGGKAWTGTHLRWLRKHHFDTPGLQLAFDADHEAVLAAEARRDRLDAAIEAMAADSEYTPVVHRLGCLRGVATLTGFGLAVEVGDWERLTGSSIGAYLGLVPTESSSGQSRSQGSITKTGNTHARRLLVEAGWQHLKPYRTPGATMRARWELAPAAARARGDAGNRRLHERWLHFNDRKKNPVIANVAIARELAGWCWSLAVMDD

SEQ ID NO: 316405 - protein, 420 aa, unidentified
MKVVYQTCCGVDVHKSFLVATIIKTTSGVQPSYQKKRFPTFNNSILEFKQWLLDNSCRNVCMESTGKYWVPVFNLLEDELSVTIANPKWVKAVKGNKDDTKDSKWIGDLFRLGLVPGSYIPCRPIRILREFTRYRYKLTSCRSSEKNRFQNALTVCNVALDSVVSDIFGKSATSVIDYLLQQSDNSINHEEISSRLLRSLKKKSESVIESIEGYQMTESQKYRMRLVHAHMDYITSTISDIDSMIDSLVEPYENAVQLLCTIPGVDRNSAITIISEIGTDMTQFSNSKRLCCWAGLTPSNNESAGKKKSVRITRAGVYLKPALVQVAHAAVKSNKSPYYKAKYERIMKRRGKKRAIIAVARMILTAIYHMLSTGESWNPTDLYKIDMPEPLKNKQKEKAVKQAMKLLIAEGLIKESQLTS

SEQ ID NO: 316406 - protein, 467 aa, unidentified
MIPSHTPKGNRENLFISDYQKRNLLLRYIVIGAPTPNTLNKEVSMDKNDDSRLEEFRQLKREIRGSTQHLVVGIDVAKERHYAFFGTPAGKTLLRRLVFDNSKEGFEKLCFQAEILKTQHGLTKVVFGVEPTADYHKPLGEYLIRQGHPVVLVSGNAVKNNRELLDSRWDKNDMKDAANLADLITQGKCLFYEYASPPLRELRSLLSLQRRLKKQEQGYRVRTRNHLIAQYFPELDPYFGYSEGPAIVKWCLDPKELVSLPFEEFVRMVSSRTGGQKQRRRLEEIRKKAASSIGCEAHPSVAFEGRMLVGEVRHLQDLLRETHANIRAVCLHFPEYFFLLTIPGFGPDISAKVLGAIGNPHRFENHRQVLKLAGLDLSADRSGKKQDVAPVISKKGKADLRYGLYQAAFIASTRNKQFMTYFTNKLKGREREKGIGTIMRVKLAAKMLVIAWTLMKKQEKFDPGCIA

SEQ ID NO: 316407 - protein, 571 aa, unidentified
MTTATAAQCCTRIGVGFDTARYAHHVTFLHADLQAAGKPFYFSETAQGYQQLEQAFQQVAQRHPEAHFHIRIDAAGQYAANLEAFLRRLPYATTISVGEPARNRKYREAIYPKRKADPVDSLAMARFALHEHPPATAELPPAMQALREIASRLESQTRQSTRLTNQLHNLLARVFPELALLAKNLQAQWVVLLLEKYPTAEHVARAQLRSLTAIPHLTADKAQALQAAARASVASFRGPLAQQLVTNLVRSLRQSQAAEKELHDLLVQQYLALPQSNLINTITGIGDATAAILTAKILDINRFATPEKLDNYFGVFPEEDSSGTDKQGRPKAPGQLVMSRKGNDLVRKYLWLAAGTACQHNPAVRALYHRLAARGISGGVAIGHCMRKLLHLVFAVWKTGKPFNPDHYPWENPPARPGNAEKAAGHSQGTGPAEKVVTAATATVAAGAPPVKQPTQAPAPRTAPVDFAALRQRVTMEQVLHHIGILGELRGSGPQRRGRCPIHAQPGDRRRTFSVNLQKNVFQCFDPECNAHGNVLDFWAALRGLPLVQAARQLADTFDVCNAPDTEKRNP

SEQ ID NO: 316408 - protein, 411 aa, unidentified
METTYQVVGIDVHKSMLAVVVADAAAEGEFQFERRKFGTTESELRRLAQWLTERNAREAVMESTALYWRPVWQQLEGQCDLYLAQAQSNRAPRGRKRDFADAERLLRRHVAGELILSFVPGPEQRLWRTMTRAKHQLTRDRVRIHNQLESLLEDGRIKLSGCVSDLLGLSSRRMLKALAEGERDAARLASLADPKLRATPEQLQDALYAAPTLSTLHRQILGLFLSRLELIEHQIEVLDKSVGQALLAHQDAVLRLAEVPGYGVDSAQQVIAEVGPAAATFPSPEQLSSWVGTCPGREESAEISKNNRSPKGNRMMRRVLNQVAHAAVKTKGSVFQALYRRLVIRLGHNKAIWAIAHRLCRLTWKILHQGVRYLELGTRSNSKTTKARANKLIRELRSLGYQVQLSQMATP

SEQ ID NO: 316409 - protein, 410 aa, unidentified
MRRIRDRVAGLDVHRDSVVACVQLFENGEVRVEKTRFKTTLGGVRALAGWLADREVTTVAMEATGVYWKPVFYPLEGLFAELWLCNAQHVKNVPGPKTDMADAEWLADVVAHGMVRPSLVPAEPIRAVRETTRYRKTLVITRGQEIQRLDKVLQDAGIKLSSVASTVLSKSGRAMIEALIGGERDPEALAEMALRRMRAKIPELVEALEGRFRGHHALLCRQIIDHIDFLDRQIGQLDETIIEALRPFEPAIELLCSIVGWQRRTAEVFFAETGGDMTKFATAAHLAAWTRLAPANHESAGKRRSLSQRPGNSWLGRALIEAARAAARTKDTYFAAQYRNIARRRGPNKATVAVAHSMVVAAWHILTSGDPYQDPGGDYFQRRRDPQRQTDRLVRQLRDLGYDVNLKPAA

SEQ ID NO: 316410 - protein, 407 aa, unidentified
MQTLVERGCGLDVHQATVVACLLHVMREGRVEKQLRSFGTTTRELVSMREWLLSGDCTHVAMESTGVYCKPVYAILEGAFQIVVANAQQVKKVAGRKTDVKDAEWIADLLCHGLLRSSFVPPRPIRELRDLTRYRRKLVESQAAERNRLLKLLESANIKLASVATDVFGVSGRLMLKALVEGRASLAEMAELAKGKLRSKIPQLQLAVEGKLEEHHRFLLQLQQDRLDAAERDLATLEQRIQQKLEPYAAQIALLQEIPGVDWTLAAVIIAELGIDMTVFQSVSQLASWAGVCPGNNESAGKRKSTQIPKGNVYLKTALVEAANAAARSKGTYLRDKFYRLKARRGYKRAAVAIAHKILVSIYHMFSCFLSKSLTTIWGIFTSTSSIRTTSLATWFVAWNVWATQSP

SEQ ID NO: 316411 - protein, 307 aa, unidentified
MTLPQPVIGIDIAKHHLDLFDPATGQSQRIPNHPAAIAACLDSLSRDHLVVFEATGVYNAALRERLAQAGIRSARLNPSRVRAFARALGQNTKTDALDARLLALMGASLPMRREEAPDPTRERLTRLHRRRDALVETRAAEQTRLADARDPEIRASLEDHIAWLTHAIAALERAIGAHLEAHPPLQKAVRLLSTAPGVGAVTAGLAVALLPELGLLSHKRIAALVGLAPFNCDSGQRCGERRIEAGRRRVRRALYMAALSAARTHLKPFYQRLLAAGKPKKVALIAVARKLLTILNAMMRSQSPYHP

SEQ ID NO: 316412 - protein, 347 aa, unidentified
MSITIIGLDTAKAVFQVHGVDGAGQVVTRRKLRRNELTAFFEKQAVCTVVMEACGAAHHWARVLTGLGHEVKLIAPEAVRPFVKKGKKNDAADAAAICEAASRPGVRFVPIKILEQQGILALHSARSLLVKQQTMLANAIRGLAAEFGLTVPLGMGKLRELMALVDADEAVPEKARQVLSALFDQCRALDESTEALEAEIVAHARHDDTARRLATIPGIGPITSSLIAATVADIGVFQSARHFAAWLGLVPRQHSTGGKTRLGRITKAGNREIRRLLVLGATSMVHRAPGWNSAAGAWTRGVLERRPVRLVTVALANKMARIAWAVMTRKEVYHAKGRIAAAAEAMA

SEQ ID NO: 316413 - protein, 320 aa, unidentified
MAKQKSQSFIGIDVCKQQLEVAAHESDYQFRCPNKASAFGELRAELIALRPALIVLEATGGLEMPVANTLQAAGLPVVVVNPRQVRDFAKALGQLAKTDRLDARVLAHFAAAIKPPLRPIKAKEQQELDALNRRRGQLIEMLTDEKNRRGSAASDSVRDKIKEHIDWLEECIADLDEQLKALLQSSAPWQAKDEILQSVPGIGPVTSFSMIADLPELGTLNRQQISKLVGVAPLNRDSGQQRGTRHIYGGRAHLRSVLYMAALTAVRHNPTIKEFYQRLRANHKPFKVAITACMRKLLSIINVMVRDGSCWQIKAPPLLP

SEQ ID NO: 316414 - protein, 358 aa, unidentified
MQYKVKTISFQGQNIYIGIDAHLKSWKITIMLDHSIYKTFSQDPGAGILYDYLRRNFPGGNYYSAYEAGFCGFSIHRELEKYGIKNIVVNAADIPTTDKERKQKEDKRDSRKIANSLRNHELEAIYVPNRDMEELRSLVRYRKTLVKDIGRNKSRAKSFLHYYGIHIPTELDSASQHWSARFTSWLKTLETTTACGGFVLSEIISTTEHLRLRLLKVERQLREISKSSPLAKTIKLLRSIPGIGLIVSMTLLTELGDVKRFLKLDNLCSFVGLVPTTKSSSDKEKTGNITPRSNKILRNSIVESAWVAIGHDPSLALRYNELCKRMKPSEAIVRIAKKLLNRINYVLKNEKEYVYSII

SEQ ID NO: 316415 - protein, 355 aa, unidentified
MEGTKYIGMDVHKDSISIAVLNSSGKLVMECVIETKAITILEFVHGLRGSLHLTFEEGTWAAWLYDLLKPHVAKLVVCDPRRNGYLKQGSKSDRNDARKLAELLRSNMLRPVYHGEHGVRSLKELARSYLTITKDQARVMTRVKAVYRSWAIPCAGKQVYGQRHRLEWLDKIQESGVRRRAEIYYAELDALRSLRLVVRSELLLESKKHNVSTLLSQIPSIGPIRAALLIALLQTPDRFRTKRQLWAYSGLAIETHDSAENMYVNGQLQRSKKKSSIRGLNSNHNHDLKNIFKSASAVAAVKSGPFQKFYAAQISKGIRPEMARLSLARKIAAITLIVWKKGVSFDAKYLNPQTA

SEQ ID NO: 316416 - protein, 428 aa, unidentified
MTHSEIKSTEFAAYIGIDWADQKHDICLREAGSNRIESLQIDHKPDSISNWVSGLRQRFQGRPIAIALEQKRGALLYSLMLYEFIILYPVNPHALASYREAFKTSGAKDDPVDADLLREMVYLHHDKLHPWTPDDPLTRELSLLVEYRRRLVDDKTRLTNRLRALLKQYFPQALDWAGELDTLRALEFLTRWPQLEAIQVATPEQVRDFYQQYYRLREKLPERLAEISAAQPLTRDKAVNNASITMVKGLLETLRGLIAAIEAFDQRIETCFEQHSDKDIFNSLPGAGAILAPRLLAAFGADRARYQSAKEIQCFSGIAPVTERSGKTKFVRRRLACPKFVRQSFHEFAKSSINWSVWARAYYDQQRRRGNKHHEAIRSLAYKWARIIYRCWQDHKPYDESVYIAKLELRGSPLAKLIPTAAEQAEAS

SEQ ID NO: 316417 - protein, 338 aa, unidentified
MMCYVGIDLHATNSVVVVIDDADRVLYQKRLRNDLPLIVGALEPYRTTVYGIAVESTYNWYWLVDGLMDAGYHVHLAHAPALPQYSGLKHADDQHDAQWLAHLLRLGLLPTGYIYPKAERAVRDLLRKRSQLVRHKTMVVLSLQSLLTRLTGTRLSLPRLRKLTPEDIRALVPFPAHVQAVASSLTVLQCLEQEVHTIEDQVREAGRTQSGYALLQTVPGIGPILAGTILLEVGDLQRFATVGHFASYCRCVGSEHVSNGKRKGAGNTKNGNKYLSWAFIEAAHFAIRYEAVIRTYYQRKQARAHPLVALKAVAHKLARACYHMLRHQVPFDLHRAFR

SEQ ID NO: 316418 - protein, 344 aa, unidentified
MKSLPKSKLDDNISMFVGMDLHKNYLQIAVMNEKGKVLENSRIDNNLKQVGKFFDNLNDEKTCIVMESSCVWYNIYSYLSEKKHLNVVLSNPIKTRAIASAKIKTDKLDAVKLANLLRGGYIAECYVPDRRIMDLHELVRHRAALVRMRTKLKNKIHSIVLMKGIQISNKHCPFTHLYNEELKALNDYRINGYLHLIESLDYEIKAVSKEIWTLAKEDEMASLLMTIPGIGYYSALLIVSEIGDINRFPDSHHLCSYAGLIPSTHSSGGITYHGSITKIGSKYLRWIMLECVHTHIRTNKNSNISQFYTRLAKSKGNSKAAVAAASKLLRIVYCVMKEKRNYQS

SEQ ID NO: 316419 - protein, 344 aa, unidentified
MDNHTQYSGFAGVDLAKKVMQIHFVTEDGEITDKSTKRAEFLDFFRNRGKCLIGMEACGSSQDWARKLEAMGHEVHLMSPKAVKPFVSGQKNDHNDAIGIYKAMFNGVRRVPVKSTEIHDLQTLRRIRSQVTKDKVKEINHVRGLLAEYGIVMGKSLKAFNKDISSALERLKERGDVSPLVAEELRTTVEAIKTKIKRQKKLDQEIEQLARGCKSYENFLKTPGVGPVTAAMLCVLLCDPSIFANGRQFAAYIGLAPRSRGSGGKNYVIGIPSKFNCDCESRAVFVECAQAIARCKNKSPWVEGILRRKPKKVALIAIANKLARQVWAMANKGESFKQMAILTA

SEQ ID NO: 316420 - protein, 342 aa, unidentified
MDHTTIAVDVAKSVFEVAVSDRPGHVSRRERLTRGRFLEFFANRPATTVLMEACGSAHHWSRQINQLGHKVVLLPAHCVRRYVMGNKTDRGDAKALLEAYRNDQIRPVPVKTINQQALVSLHRIRSGWMATRTARLNTVRGLLREFGITIAVGARQVLPRLGELLEDAESAVPDALRGVLFEAGEEIRELERKIRSVERQLKALAHEMPLVGRLQSIPGIGLLTSTALVAFVGDAARFPTGRHLASYLGLTPRERSSGLVRRLGRISKRGDAYLRMLLIHGARAVLWHAKKPSQQDRLRSWGLAVEQRRGHNKAAAAVANKLARICWAVWTREREYTKQRAA

SEQ ID NO: 316421 - protein, 395 aa, unidentified
MSFVINGEIMGRRRLVCAPQDLVEVLGEAHGLAERHGSPRVVIAFEPAGHYWCLAAEAFERAGVPYILVHPVSVKRAREESRYTPEKTDPRDADLIAHLASQGRFTDTRLPATTDEDALWHLAKEYFRVRKMAAAERTRLHNFWHRMLPEFFSVIKDPTGQTALAISAAMGPLSELATLSSRAWLARVRRAAHGTHIVSSRAAALLPLLQDAHRDPVRRSGEGIPLRIRHAAERRRLLESQKEYLHAELVRRYQARPESVFLDSVPGSNPLYSALILALVGDFHRFDDPRAIVKLAGSEVNHYASGDWQGTSRISHRGRSALRAAAYQQARQLVANNEDFRTRFHTLIHRTTRRPLTLQAAYVAVMNSYLRIAHGLVTRQEFYRLLTDREYPAAS

SEQ ID NO: 316422 - protein, 542 aa, unidentified
MRLEGSGAEALDGGEDVVGGLGPAKGLGSGVVGVDVGVDRRLELGGRAVDAAAQRPLGEAGEKAFDLIEPGRAGRREVHVPTGSLGEPVADQLGLVAAGVVEHHVDREVGRDAGVDGIEEAPELLRPMAGKAAPDHRAGGDVERGEQRGRAVALIVVRAPLGLAGPQRQERLGAVERLDLMGWMAPSRHRRAKLVAVEQHQGGAIQMEITTIGLDLAKHVFQVHGVDEAGHAVVKRRLRRAQVITYFASLRPCLIGMEACATAHFWARELRSLGHEVRLMPPQYVKAYVKRGKNDAADAAAICEAVTRPSMRFVPVKTEEQQSALTMHRARELLVRQRTQLINAVRGHLAEFGLVGAQGPWNVPLLLASMQEDRRVPVLARQVVQLLAAQLDELGKRIAEVDTRIMAWHKSNPVSRRLVTIPGIGPLIATAIAATVPDPNVFRGGREFAAWLGLVPRQTSTGGKQRLGRISRLGDKYIRQLLIVGAQTVLLRSKAARSDAWIQGLLARRPRLVVAVALANKTARVVWAVMAKGQSYRQAVPA

SEQ ID NO: 316423 - protein, 312 aa, unidentified
MDATVIGIDVAKDRLDVCVRPSGESFVVARTGAGIEDLAERLKKLAPRVVAVEATGGFETVVAAGLAAAGVPLLIVNPAQVRAFAQALGKRAKTDPIDAAVIAHFVEATKAQPRPLPDETTRLLADLVTRRRQIIDMMIAEGQRDRRLANKRLKNSIARLRRALEKELAEIDSELDDHVRGSPAWAAKEDLLASVPGVGPIIARTLIAELPELGSLDRRKIAALVGLAPWTRQSGQWRGKSFIGGGRKTVRTALFMAAMVAARHNPVLKAFRDKLVAAGKPKLLALIAVARKLLIILNAILRDNRPWQPKTA

SEQ ID NO: 316424 - protein, 377 aa, unidentified
MGDYSEAFVGLDTSKLRNAVAIADAGRGGEVRFFGEIENTPAATAKLVRKLSARYERLTFCYEAGPTGYGLYRQIKALGYECVVVAPSLIPKRPGDKVKTNRRDALSLARLLRADELTTVWVPEGRHEAMRDLTRARETVMLDLRTKRQHVSAFLLRLGRPYPESRKTWTKAHAIWIASQKLEHPQQRLVLEEMMLAIRQAQERLQRIEQAIAAAVPEWSLAPMVGALMAMRGMDMVSATTLLAEIGDLSRFRTPTELMAYLGLVPSENSTGDTIKRGPITKAGNRRARRMLVECSWSYQHPPRVGQAKQTKVDAAPPAVREIAWKAQCRLYRRYRTLIRKGKRKTIAIVAVARELAGFIWAVARAVTATPVVAGTA

SEQ ID NO: 316425 - protein, 377 aa, unidentified
MTDAPLICTVAIELSRARWVIGALPPKQTKVSVGAVRGGDTERLMEHLNKIEARLTREFGQTVEIKVCFEAGYDGFWLARFLRDRGIDIYVLDASSFLISRRGRRTKTDRIDVEAMTFTLRAYLAGDPSVCRDVPVPTPEAEDAKRISRERTRLASERTRHVNRIRGLLALHGIRNIKGLWGGGWRSQLDSLETGDGRPLGRYIKAEISREFERLHLVLDQVKALEAERRDALLDSASPFPDRAKVATLTKLAGIGELSATLLVAEVFHRQYASRRHLASYLGLAPTPYASGEVQRDQGISKAGNKPARTLLVEIAWAWLRHQPTSELASWYRARFAENGARSRKVGVVAMARKLAIALWHFVEHGVIPAGAVVNAR

SEQ ID NO: 316426 - protein, 419 aa, unidentified
MRSIQAKKVRIVNNETLIVTVDIGKAKNFGYCRCPNGIDIKPFGFHNNGHGLKYFWDKITQMKKAHNLKTVVIGFEPTGPYGEPLVHYLRKKKVKLIQVNPMHTKRVKELQGNSPNKTDQKDPKVIADIIELGHALTIVLPEGTAAELRRLTHSRERAMQRRTSFFNQLQNLLFVIFPEFSQVMKNVKTKSSMYILEHCQTPEGIIKYTLKNLTVTLRKVSRGQIKEERARELYTAAKTSVGINEGRKSILFEIKEILSMIKATELFIAEIEKEMSHHLKDIPYSKFIISMKGIGEITVAGLIGEVGDFREYNTISEILKLGGLDLFEISSGSHKGQRRISKRGRPLMRKLLFFAAINVVRKGGIMREYYQGCLDRGMLKMKALIAVSRKLLGLIFVLVRDQSEYIEDYVEKQKLKKAA

SEQ ID NO: 316427 - protein, 465 aa, unidentified
MGKGSGLTRGDRRRNARREGLREMLPRDGAVIGIDLAEDKQAIAVVDHDGRVLARKTVRVKAFRLGDALEWAVAQARAKGFAAVTVACEPTGPRWLQVQRLCAERGLPLVCIQPLVSHIARQQQDYTTHKTDEADCVLIARLAAELHCYIPEELDEAWAQLRHLGRRRAQLITSATASVQRLRDFLSVAWPVAAEACAHPFDSVTWLAAVQVVMSRCGGQPEKLAAMGPAAFTAAVRGALGGWGGQRVAGQVCRAVFGALTDTEGVIITHRRGLLRRCAGELDDLQRVRAQVREAEADMAAVLGELGLSRLGDIPGLTVAGAAAVLAETGDPRRYDSSSSLARHAGLSPAENASGAFEGQARISRRGRPGLRLAVWRAVWPLLIHNPVMAAKYAAMTAADAAAQASSDRGSRQASAAAAARARRAKARVACAASLLRWIYSMVVHGTGWDPAIASGTASCPAEAA

SEQ ID NO: 316428 - protein, 347 aa, unidentified
MRFYTKQHKFYCGIDLHTKKMYLCILDDTGEIRLHRNITTDRNVFLKAIEPYREDIVVAVECMFTWYWIADLCTKEGIPFILGHALYMKAIHGGKAKNDKIDSHKIAALLRGGMIPMAYVYPERMRATRDLLRRRNHFMRKRAELYAHIQNTRSQYNLPDCLGRIAKPQNREGIIERFDHPCVQKSIAVDLEMISAYDPLIAQLERSIITTAKHHDPVAYALLQTIPGIGRILGLIILYEIENINRFPAVQDFVSYCRLVKCTKESNGKKYGSSGKKIGNAHLKWAFSEAAALFLKDNEPGKRYLDRLTNKYGKAKALSILAHRMGRAVYLMLKNKQAFDQNKFLGL

SEQ ID NO: 316429 - protein, 435 aa, unidentified
MIPAVLTHCAGIDIGKRGLAVCLMIGPAEAEPKVEVREFSTFTADIEAMKAWLVQAGCTHVVMESTGSYWKPVFNVLEGSLVVCLANPEDVKGRKGHKTDRKDAKWLAHLLRHDMIRASFVPPRAIRELRDLTRRRKQLLSNATSERNRIQKTLEDANVKLGSVLSDVFGVSGQRMLEAMLEGRGSPQELAEMARHKARQKIPQIIESLSGNRFSEHHRLMIRMSLEHLRMLERQIIAIDEEVVQRIQSLGLERMLNLVAAIPGLGHDSAAAILAEVGPDMKQFPTGKQLSSWAGVCPGNKKSAGKNFSGHTTRGNRWLRSTLTECAWAVSRAKKSALRDKFWRWAAGSKKKAVVAVAHGLLLQVYQVLQTQQPLAQAPSPPIDEQRRKRIVRHHLRCLGRLGVSTGPKRISADGVTARPGRPSKARTKKPEAPG

SEQ ID NO: 316430 - protein, 425 aa, unidentified
MMKIESTEQIDFAAFVGLDWADQQHAVCLQASGSTKVETCILKQTAQSIGEWANQLRTRFEGKKVAVCLEQSRGALIYTLMSYDFLVLYPVNPQTLAKYRKAFRTSGAKDDPDDAALLMELVKLHRERLRAWVPDDVQTRTLQMLVESRRKIVRERTRLTNRLKSLLKAYYPQALDWAGELKSLQACDFLKKWPTLEAVQRAKLFELQRFYRQHGCKNEAVIAERIKQIRGSDLLTRDQAVIKSSAMVVVTIVNQLPCVIRAVEQFDQEIARVFQQHPDHELFNSFPGAGSALAPRLLAAMGSDRARYESAEEVQQFSGIAPVTERSGKSKWVHRRLACPKFVRQTFHEFAKQSIVWSSWAHAYYDEQRARGKHHHAAVRSLAYKWIRIIFRCWKDRTAYNEQAYIAALRRRGSRLILSPVSSDS

SEQ ID NO: 316431 - protein, 482 aa, unidentified
MKKTNIYQNQSQQLLHLFEEAGSGEKVMCVPMDYAKNDHLVMFCNGHGDILRKPFSVKNTPEGIAYIDEQVTRFCRRRGIQKKHVFLGGEDANSFAKNFVSTLRSKGYVVANVNAHDAKKQRVNLQASTDRIDLMGIATMLLNCRANCCPAQSGIYRNLRTLVRHRRRLVQMLTEVKNRVHAIVDELFPGFLNEKNTGIIPFTQTSLYLMQDRFSPKQIRRRRRQKLIEILKRLGTSKAEYTAAKLQQYAAKVLHVPVEYVDAMQLSLAQHVKHIRCLKQSVAQMDKEIALNLAQTQGAFLTSVRGIGLVLAAGVTAEIGDLNEQKPLNNLTSYAGIVPRVKQTGGSNGKTYTGPVAKRCNRILKDYVVKSAYHLGLHGPPDLMADYKRRDASGQHADFGIGRRYLRMAISLMRTSQVYLPPNLRKADSTLQQRAGYYLTNWPYLKEKWEKVGALEAAFANNRPLGLWRQIVQELYDIKLKL

SEQ ID NO: 316432 - protein, 419 aa, unidentified
MSNVMDSTKLFAGIDASKKSNQCCLLDHSGEVIEEVNVANNVTGAHELEATLAKHAQKLESRELKVATEATSLYDFHILEFLAESQILACHNLKLYRFNPRPVKAFKDSLKLMNKTDPEDAYAIAEYLRFRGKKAEEYRASMEHLPLQRLTRFRWHLVQQLVRERNYFLSQLFLKFSAFGKKEPFSDTFGATASSVIEEFMTPDAIVNASDEELIQFVVKHGRNRFPDPEEIVTKLKYVARESYRLRPALAENVHRILCLSLANIRALKASLKELDQTIHKQLSAFSITLTSIKGIGDVYAAGIFAEIGDINCFPSEAQVARYAGLVWKRHQSGNFQAQKTRLDKRSNAYLRYYLVEAADSLRRHNPQYRAYYQKKYAEVTEHQHKRALVLTARKLVRLVDALLRTNRLYQPKMPVESA

SEQ ID NO: 316433 - protein, 391 aa, unidentified
MSMYFIGIDISKYKHDCCIISAANQKVVSKVIIKNNKAGFNELLTIIHSLANPADIRIGFESTAHYALNLELFLENSLLTFMEVNPVLISEYKKSKTLRRTKTDSVDCESIARWLMTVEYKPHSKGFYHAYSLKSLTRLRDRLIRQRSFYLVKITNVLDHTFPEFKPFFNERLSKTALYLLENYGSAEKMARMNSASYDKLRCISRGKFSIQQFLRLKELAANTVGVNNSIFDLELNTLLTLYKSLSDEINTLETEIIKLIEEVHPHYMSIPGIGPISSAVIYAEYGDISNFSNPGQMLAFAGIEPGINDSGTESHGGRMVKHGSSQLRYVLLNACLPLIRFDLTFATYYEKKRAEGKKHRVAITHVAKKLIRVIYALERQDVDFNAQKLR

SEQ ID NO: 316434 - protein, 315 aa, unidentified
MGTQVFVGIDVGKDVLFVAVRPFGDTLEIPNREDGIADLVKRLRSLEPTLVVMEATAGYETPVAVALYRVGIPVVVSNPRLIRSFARATGRLAKTDKIDAGVIAHFAEVIRPAPRRMDEPDEARLGQLVTRRKQLLRMIVMEKNRVSKGPMEMRKDIQKHLDWLAKELERIDQALADFIQKSPIWRAKDEILQSVPGIGKVGSHALMSDLPELGKLNRKQIASLVGVAPMNRDSGNYKGRRSIWGGRAQIRTVLFMVAVVASRCNPVIREFYQRLCNAGKPKKVALTACIRRLLAILNAMMLNGTRWGEFKPAVT

SEQ ID NO: 316435 - protein, 454 aa, unidentified
MSTIHTTNTISTPLKDTPPALSGASIDQPRPEPVFAAFVAIDWGDEQHAVALRVAGQTQTEHTTLAQKPEALTEWIGGLRQRFAGGSIAVILEQKRGALLYALQPHEHLVLYPINPQMSASFRRAFYPSGAKDDPGDADLQLDILLQHRERLTAWRPDEATTRQLALMVEARRRFVADQVRVTNRLRDAIKSYFPQALELAGEDLNSPMACAFLQKWPTLAALQQVKPAVLRKFYYAHHSRSEKLIAQRLQLQAQAQPLTTDAAIIAAQSLLVQGLAQELATLNPILARYEKQIAQLFATHSDFALWNSFPGAGPVLGPRLAVAWGTQRDRFADSQAMSSFSGIAPVKEASGKQLWIHMRWACPKFLRQTFHEMAKCSLKFSAWALCYYQMQIERGKGHHAAIRALAFKWQRIMWRCWQDHAPYDDAKYVASLKRSAADLYARLAAAPATETGE

SEQ ID NO: 316436 - protein, 337 aa, unidentified
MTRYVGVDLHRRRSVIVVLEADGTELWTHRIDNDPVTLGLEIEEAGPAPEVVLEATWGWYWAADVITQAGGKVHLAHPLGIAGFENRRVKNDRVDARLLADLLRMGRLPEAWIAPGSVREQRELVRYRRKLSRLRAGLKSQVHAVLGKEGLIPPLNHLWGPGGARWLDETDMAEAYETRVRSLRRLIKTYDNEITKLDARIAKEFKGHPGYETIQTISGVGPVFGAIFCAELGDVTRFASAKHVCSWAGLTPRHRESDAKVQRGSITKQGPPLVRWAAIEAVSKNHGDDPIKDLYRRVAERRGTNKGRVAAARKVLTLVYYGLRDHEIRSLAPPEAA

SEQ ID NO: 316437 - protein, 402 aa, unidentified
MDIFFAGLDWASQSHAVCIIDAQGSVRERVEVAHSASGLAELVRRLKHWRSPPVAIERPSGLIVDTLVEGGFTVVPIHPNAVKATRPRYRSHGAKSDASDAYLLADLLRTDGHRFKPLRTQSDDIRALRCLVRGRDDLVATRVQLANQLRSLLESFWAGAAAIFADVDSPIALAFIERYPTPESAAHLGPKRMAAFCAQHAYCGRRKPEELLERLHSAPGGVCGEMEMQAKGELVRSLAVCLQRLVEQIRLLSSRIEHDVASCDDGRILMSFPRAGRLCAAQILAELGSVRERFESDEQLAAEAGVAPVTYASGKSKVVAFRWACNHRLRAALTCMADNSRHANPWAAATYAKARARGCDHPHAVRILCRAWVRVIWRAWTDHKPYDPARHGAANALQITGG

SEQ ID NO: 316438 - protein, 358 aa, unidentified
MQKYNISFKGQKIFIGIDVHKKNWDVAVAPEVGFVKRHSQKASAKVLIDFLKKHYPDGNYMAVYESGFSGFSTYYALKEVGIDCIVIHAADVPTTQYEEVMKTDRLDSIKLVKSLKAGLLRGIYIREKENLDDRSVIRIRKSIQKELSRYKVMVKHILHNNGVTLPDCFEKPTTHWSGAFMTWLKRDVTLLSSTRNSLDLLIRQVETIRANMLNATRMLRSLSRIERYKHRCELLMTIPGIGVVVAMSILTEIYNVNRFHNEREFAAYLGLIPTSHSSGEKIIHGEKTFRGNKQLGPMIIEAAWSSIAKDPGLGSLYLRYRERMKPQEAIIRIARKLSNIILAVLKSEKEYVPYHMGN

SEQ ID NO: 316439 - protein, 340 aa, unidentified
MKLYAAIDLHSNNSVMALIDEQDRVVYQKRLPNELALILMELSVYRCEVEGIVVESTYNWYWLVDGLMAEGYKVHLANTAAIQQYNGLKYTDDHSDARWLAHLLRLGILAQGHIYPRAERPVRDLLRKRSQLVRYRTMNLLSIQNLMTRNTGSSLSAKEVKGLDVQQIEELLPNSDLALAVKANLAVLMSADEQVKLLEQTVLQRVQLRSQFRFLKTAPGIGEILALTIMLETGEIGRFPTVGNYASYCRCVGSQKISNDKKKGKGNTKNGNKYLAWAYVEAAHFAIQHHFRIKSFYQRKQAKSKSIVALKAIAHKLCRACYYVMRDQVAFDISKAFGKK

SEQ ID NO: 316440 - protein, 419 aa, unidentified
MSLALREAKFFTGIDWAAEIHAVCVMDAAGTIVAQFTIAHSADGIATLIRRLARFGDPAEMQVAIERPNGRLVDLLLEAGHPVVPVKPNAIKAWREGEVLSGAKSDAGDAAVIAEYLRLRQHKLTVAVPYSGQTSALRTVIRTRGDLVQTRVATANQLTALLEDCWPGAAVIFADIESPIALAFLARYPTPESARNLGEKRMAAFCSSHGYTGRRTAAELLERLRSAPAGTLEQARTVALRDAVLALVTVMTALGAAVKSLGQSAAARLGEHPDGEIFTSLPRSGQISAAQMLAEWGDCRQAYEHPDSVAALAGVTPVTKESGKHRAVYFRWACNKRFRQAITAFADKQPARQPLGREDLQRRPRRRQGPPARHPHPGPRLDPRHLPLLGRRRPLRPRPARRRPAAARQPAGRLNAPAA

SEQ ID NO: 316441 - protein, 343 aa, unidentified
MQTVTTIGLDIAKSVFQVHGVDAGGQVIVRQQLKRRYVLTFFRKLSPCLVGIEACGSAHHWSRELQALGHTVRLMPPAYVKPYVKRQKNDATDAEAICEAVTRANMRFVPTKTPEQQSGLVLHRTRHLFIRQQTSVINAIRAHLAEYGIVAPVGRQGVVELLTVVADPNDRRVPEIARACLAALGAQLRRMKEQILEFDRLIRAWHRSNEMSMRLEEAPGVGPVLATALVAAVADPKSFRSGRNFSAWIGMVPKQHSSGGKNRLGNISKQDDRYLRGLFVAGALSVIRYAKIYGAKHRPWLTALLARRPTKVAAIALANKIARMVWVMMARGERYNEPVALAR

SEQ ID NO: 316442 - protein, 428 aa, unidentified
MNSIREKRLRQMDQETLIIGVDIAKKIHVARAFDFRGIELGKSIEFTNDFLGFNRFKEWVQLIKKATIKTRLFVGMEPTGPYWFSLARDLKKNDISIVTVNPKHVKDSKELDDNSQTKTDYKDAGVIAGLVKDARYSKPNLLEGSYEELRNAKKLLGIIDKDVSRTKNQVINWLDRYFPEYVHAYKNWESKSFIRFLKEYIFPAIIAKKTIEELYTFLPKKQRRGVGRRKISCLITVAKKSVGVREGLEVAELEIIYLLKKYEEFEKQKEKLMKKIEEISKELPEVKKLVKIKGFGLKTASIIIAELGDLNNYKDAKQVIKMAGLALIEHSSGKHKGKVKISKRGRSELRKTLYLAMVGMVGKNKVFKKLHEYYTCRSKNQLDKKASIIALCRKLLRIIFTIITKDLEYDEEKILEDINWPKEFLISA

SEQ ID NO: 316443 - protein, 343 aa, unidentified
MDHFAGLDVSVKDTSICIVDDTGRITREVKVASEPDALLAVLMNASRRFKRIGLEAGPLSQWLFSALAEAGLPVICVETRHMRAVLKAQINKTDRNDARGIAQMMRVGLYRPVHVKTLRSQKLRMLLTHRKLLQSKAIAIENDLRATLRNFGLKVGMVGTAKFEARIKELVENLPDLTVLVEPLLVVRRVLREQIAILHRRVLAAVRDDAVCRRLMTVPGVGPVVALTYRATVDVPARFRRSKSVGAVFGLTPARDQSGERDRPGAISRCGDEMMRAMLYEAAQAMLLRSAKWSWLKAWAMQIARRRGMKRAIVALARRLAVILHRIWVDGTEFCWTREVAVA

SEQ ID NO: 316444 - protein, 418 aa, unidentified
MNKIMTKNKRINTQQMIAALDIGGEQNWAIFRSPKGQNCKAFPFDQTREGYDFFYKKLLEYKTIYNAPSVIVGLESTGVYGEPIIHYLYEKNVEHVLVNPVHSKRIKEIRDNSPHKSDKKDPKVVADLIQFNCVLSTLIPRGLAADLRYLIQARERAISSRNIFVNQLQHLVWRVFPEFIRVIKHLNSKTALHLLKYHPRPEDIFELGVEELFLLMRKVSRGRYSYEKAKELYDYAENSIGLKEGVSALLMEIQVLINNIECQDQNIERFEKKIESVLSKVRQSRYILSIKGIGHIMTAGILGELANFETINSAAEAEKIAGLNLYEISSGKHQGQKRISKRGRQLLRKLLYFAALNVIKHDGVFRETYQRYVDKGKPKNKALIAVARKVLRVVFALIRDAKEYDKNYYHDQRILKAA

SEQ ID NO: 316445 - protein, 421 aa, unidentified
MENTAARKRKQVPERYLIIGIDPHKKRHAAVAITQDFTIRDKSKFDNTREGLETMLRRTRTEMVKADCRGVMFAIETGGHYWRNIAYFLDEQGIPFRFINQYTLKRRREGKDLNHKKNDYRDSEVAAQLLCTGEFTESTIPQGVYAELRTAHNAYRRLVKERTRITNLVKGLLDGLFPEFTQVFKDPCGLTALSVLSTCPIPKVIACMTEDEFVAAIEAKHQGRLMRKKLRELHYKTKTSIGIAAGARSVSAEILFLIEKHELIRRHICIIERTLVRLVDETEEGKYLLSIRGLNYVAAAGLLAELGCFKLYRSAKQMIKMAGSNPTESESAGKRGSHTPMSKQGRPALRYCAWTSVIPMLRLNPDFRAWAKQRRERPAHANPLNGREIVGAALNRLFRLIFAMVKNQTYYLSPQLVQVTG

SEQ ID NO: 316446 - protein, 319 aa, unidentified
MQLNSMIHGVDVAKDELVVQHLGDRAVRRLANSASAIRTWLRGLPEGSVVAMESTGRFHRLVAQLAFEAGMQVYVLNARNVHFYAKGLGMRSKTDRVDTGVIARYVAEHQDKLHPWRPQQSLPSRPEELIRRRALVVTKREALRQCLRECPELKEAWSQLDRAFVEFLRRLDKQVKQLIEADDKLRAAQKRIQTVVGFGPLGSALLASVLQRIPFASSDSLVAYSGWDPRPDDSGRKHGKRRLTKAGPAYMRRQWYMVGLTAARTKALKPAYQALRARGLATTEAAIILARKLLRAAYAVWKTGHPFDLDRFIGKTKSA

SEQ ID NO: 316447 - protein, 336 aa, unidentified
MNYIGMDIHKQFTVAVVKNKEGNLIDSNRFDNSNENFKSFLAPYLPEETEIVMESTSVWESIYDIIDKLGYKAKLANPSRTRAIAEARIKTDKIDAETLCDLLRASLISESYIPPAEIRELRNIIRARKSLAQGKAKIKNKIHAILIKTGLKLPYTTLCKSALAWIIEEIETKHFNMKSIVVSYMNILESYSIEIRRIDEKIADIAMRDKKVQLLKTIPGVGNIFGLTIIAEIGDISRFENSSKLASYAGLVPGIKQSGNTLRFGRLVKQSNKDLKTCLIEASWVLVRTKEASKFKWFYGNLSKKKGKQKAICAVARKLCCVVYAMLSKNKEFMLL

SEQ ID NO: 316448 - protein, 453 aa, unidentified
MPKPKFTSPQNLTRTNPGAAAIDIGSTMHMAAVNPENADTPIRAFGTFTHDLHDLANWFKACGVTSVAMESTGVYWIPAFEILEQHGFEVILVNARYAKNVPGRKTDVSDAAWLRQLHSYGLLRGSFRPDAQVATLRAYLRQRERLVEYAAAHIQHMQKALMEMNLQLHHVVSDITGVTGMKIIRAIVSGERDPDVLASMRDVRCHSSMATIRAALIGNDREEHVFALSQSLELYDFYQLKMLECDRRLEAAIAALAVEHEAPLAPLPKIRTKTKQVNAPSFDVRAALYGLVGTDLTQIHGLGSSLALKLVGECGTDLRAWPTAKHFTSWLCLAPGNKISGGKLLSSRTRRSSSRAAALLRLAATTIGRSDTALGAFYRRLAGRIGKQKAVTATARKIAVLFYNALRHGMRYQDPGAASYDEQHRGRVLANLQRRARSLGYHLEPTTDSAGVS

SEQ ID NO: 316449 - protein, 477 aa, unidentified
MNRKQGDNLQPPKAKPKRRRRNKGMCLEDRPVLEPNAAGIDVGAREMFVAVPPGRDEKPVRVFTTFTEDLERLTDWLEQCGVTTVALESTGVYWIPLFEILEQRGIRPCLVNARHMKNVPGQRTDWHECQWLQYLHSVGLLRAAFRPGQDVCAVRTILRHRNELVAAASQHVQHMHKALTQMNLQIHHVISDITGSTGRAIVDAILAGQRDGAELAKLRDPRIKAETETIRKSLEGNWRPEHLFTLGQSRDLYRIYQQQIVNCDLEIEKMLQGFAPRIDPGERPLPPDRKQNRAGSKRRRKNGHPHPEFDLRTEAYKLFGVDVSQIPGLEENALPLFSEVGRDMSRWPSAAHFVSWLALCPDNDISGGKLLWRGARRVKNRAGHLFRMAAYALHRSLTPLGNYLRRMKAKLGPQAATMATAHKIAVIFYTMIKNQVEYDETIWNARDAEREKRLQAKLKRQAKQLGYELVPIEPQAA

SEQ ID NO: 316450 - protein, 351 aa, unidentified
MYYAGLDLHRKYFTLCVLTSEGQVVCDHRRLPAELEPLMSLLREVGGPVTVTVEATLQWAWLHDRLTAAGFTVQVAHPQQVKLICHARCKTDPIDARKLAELTRVNLLPSIWVPSPAVRSWRQLIRGRAALVRWRTRAKNRIHGCLAAENLRVATTDLFGRAGREWLAHAPVSPTARRDIEVQLAVITALETQITGYDTDVKRIAQQPEAQRLQTIPGIDVFGAALLLAEIGTIQRFHSAHELAAYAGLVPSTRSSGDKTSHGGVSGASNRWLKWILIEAVQTLKQVPGPVRFHYERLLRAKGKPKATVAAARKLCTYIYWMWTQGLTYAAWLETETKRVGCPMQTLASSA

SEQ ID NO: 316451 - protein, 405 aa, unidentified
MKQPATLHYAGIDWATRTHAVCVVDQTGAVRARFQVPNTGKSFAGLCKRLAKLGVAGVAIERPDGPLVEAMLDAGLKVVVITPRQVKALRSRYAASGAKSDPADAYLLADVLRTDGHRLAPLTPDSEPTKVLRALSRTRKDLQEARVALCNQLTAQLERCFPGAIGLFADLHSPVAVAFLRRYPTSHAAAGLTQAKLAAFLRRLHYPGRTPVATLLGRIQTAPLSGIGPAEAAGRAVCVLALLDAIQITARQERELEAEIIERLEVHADAHVFTSLPKAGHGVRAAALLGELGDVRARFPDNDCLAALAGAAPVTITSGKRRVVKFRWACDKKLRNALIDFADDSRHASPWAAKVYADALARTGRHPHAVRILARAWIRVIWRIWQDGVAYDPAKHRGAVRLLAA

SEQ ID NO: 316452 - protein, 429 aa, unidentified
MRTESTPGARGPVFCGVDTHADSHWLCVLDWRGRKVLSRQFPADAAGYEALAGAIAAAGEPACVAMEGTSSYGAGLTRHLASLGMPVREALSPARMQRRRPGQGKCDEADAERAARAAMSGSKLGTPKSQDGWVDGVRCMLAARSGAVKARTSAINTARSLLTTAPEGLRSRFRGMGGPRLMEELPSVRAEGALGAALGALADLWGAARDAALDMERAIEASLEENCPALLAMYGCGPVSAAKLAVAAGDNPGRLRSEASFAAICGACPIPASSGKTVRHRLNRGGDRQANSALHEIARQRVMRDPETAEYAERARGRGKSDREVMRCLKRYVAREAYRALMHPHEIRRPGDASELVAARRAAKVSQARAASILGTSEKYISMLERGQRELKPIRRAYEAWVEAGLPLDWDRRAFEAERKMDSKKHLAK

SEQ ID NO: 316453 - protein, 423 aa, unidentified
MKYALVRVLPEVPPGGVCAGIDWASADHAVCVVDLAGQVADRFAAAHDRAGIAGLIARLRGRGAAEVAIERGDGVLVDALLAAGLTVVVIGSRQVKNLRSRYGSSGAKDDRFDAFVLADTLRTDRARLRPLVPDSPATLALRAAVRARKDLVAHRVSARNQLRARLQVAFPGAIGLFSELDSPVSLAFLAAFPGQQAAARLDEQALAAWLATIPRRGNTAPAGVLAARLAAAPRGAAGADAAQAAVTTQLAAATAGLAGRVRALEAEIAAQLAAHPDQHIFTSLPRAGTLRAARLLAETGDCRARYPDPWSLAGLAGVAPVTRRSGTYISHEFRWNVNRQLRDAICDFADGSRHASPWAATVYAAARDRGKDHPHAVRITARAWVLIIWRCWQDGTSYDPAKHRALQDILTRQAAAGTPQPHR

SEQ ID NO: 316454 - protein, 342 aa, unidentified
MDHFAGLDVSVKETSVCIVDDAGKIIREVKVESEPDALLPVLTNPSYRFKRIGLEAGPLSQWLFSALAEAGLPGICVETRHMRAALKAQINKTDRNDARGIAQMMRVGLYRPVHVKTLRSQKLRMLLTHRKLLQSKAIAIENDLRGTLRNFGLKVGIVGTVKFEARIKELVENLPDLAALVEPLLIVRRVLREQIIILHRRLLAIVRDDEVCRRLMTTPGVGPVVALTYRATVDVPARFRKSKAVGAVFGLTCSKYQSGEIDRNGRISRCGDEMMRVMLYEAAQSMLHSKKWSWLKAWAMQIARRRGKKKAIVALARRLAVILHRIWVDGTEFRWTREVAAA

SEQ ID NO: 316455 - protein, 374 aa, unidentified
MTDIICGVDVSSTHLDARIGRAGAYARFAHTPEGVEALASFCREHGATLVAMEATDGYEKKPFALLWAHGLPCAILNPRMTRRFAEAMGVLEKTDRIDARIIAWCAEAKAVRPTEPASQTQQRLTALVVRLRQLTAVRTAQTNQRRLVDDARVLSSFEEILALVARQIRALEAEIAALIAADPLWRPLDAAFRAIKGVADRTVATLMAELPEIGLISNKAIAKLVGSAPLANDSGGSLGRRAARGGRANVRALLFVVAEIVRRYDPDFADFHRRLQGKPKKVIRVALAHKPLVRLNAKARDARKPSPQLDKPDSRSPAIGRSEERPSLDGLWRVRKGPRPSSPAVKRRGRGTGRRPVEGGLRPRVGCYGRWYYG

SEQ ID NO: 316456 - protein, 408 aa, unidentified
MQVYIGIDWSSVKHDVSVLNENGAVVTRLTIPHTPEGLEQIENLRKQVDVQPGECLIGIETAHTLLVDFFWDHGYQQIYVLPPTKIKAERPKLHTSGAYTDQGDAFLIASLLRTQRESFILWQPEGLLIRQMRSIVSLVLHLTTEITRTSNRLTSVLKRYYPAALQVFSSLDTLIAQSFIQTYATPQAAAQLTWEQFSAFARAHGHRQPRKLPGCYARLRQPQIPASTAVVAAYAHEAVILSRLLEQQLRTKGQLLKELQVLFRQHPDHEVFASLPGAGEWLAPALLAKIGDDRQRFPQSEYLLGTAGTCPVTKVSGKRRQVVFRNACDRWLRRMVTQWSPASMSQCAWAAEYFAQVLSRGHSENEGYRYLGNRWMKILWKLWQTHQVYDEAYHLQQIALRKQPKPGK

SEQ ID NO: 316457 - protein, 404 aa, unidentified
MNKPNAEVRLLPQVDKACGLDMHKDKIVCFISNKDGTGQHLEEFGTFSEDLFKIRNLIIQHRVERCLMESTGVYWISLYGILTEAGINTIVANPQHIKQIPKRKTDRKDARWLCTLALHGLARQSFVPGPTQQALRELCRNRLFYKQGQTKITNRIVKILERANIKLRSVVSNINSQTAMGIIRLLAAGNTDTERLAACCKGLLKAKKELIKQAVIGTLGRDDKLILKMLLADLDHNQSQIERLEIQISRLTAEHYKDAATCLQTISGIGELSAQIILSEIGNDMGVFPTADHLTSWCGLAPGNNESAGKRRNTTVKKGNKYLRVAMISVAWGAVRVKNSYWKPLFEKLRKHMKAQKAIVAIARRLLKVIYKTIKENKPYKEKGFDHFLDIQQKNLLKTSIKFG

SEQ ID NO: 316458 - protein, 412 aa, unidentified
MDVVVERCAGLDVHKDTVVACVRTPGKGGSREQTTRTFRTMTVDLMALRDWLVALGVTLVGMESTGVYWKPVFYVLEDDMQCWLLNARHLRNVPGRKTDVQDAEWICQLLEHGLVRPSFVPPKPIRELRDLTRYRKAQIDERGREAQRLDKVLQDAGIKLSSVATDILGKSGRDMLMALISGTHDPQVLAELARGRLRAKIPLLRRALEGRFVSHHRLIVEKILAKLDFLDETIEDLSAEIDRLIAPFAAEVELLDTITGVDRRAAECIIAEIGVDMARFGDSARLASWAGRCPGHHESAGKHKSGRSRPGSKWLAATLAQCAEAAGRSKGTYLGAQFQRLRGRRGHAKARKAVEHSILVAAYHVLDQHVPYRDLGADWFQRRRPEAHARRLAQQIEALGFRVTIEPTDQAA

SEQ ID NO: 316459 - protein, 315 aa, unidentified
MSDMPCFVGIDVAKAQLDIALRPSGERWAVPNDASGVMTLVDRVQALHPTLIVLEATGGLERAVTSALATAGLPVVVVNPRQVRDVARATGQLATTDALDARALAHCADVIRPTPRPLPDAQTQELRALLGRRQQLIGMRTAEQNRLAGTNARLTKDIAAHMTWRNAAIATLDDDLETILRASPLWRENDDLLQSAKGIGPVCARTLLLELPALGTLTRQQIAALVGVAPLHCDSGTLRGRRMIWGGRAHVRTVLYMGTLVATRFNPQIKVFYERLLAAGKVKKVALTACMHKLLTILNAMLKHRTPWQPQEVQS

SEQ ID NO: 316460 - protein, 339 aa, unidentified
MKLYAGIDLHSNNNYLAISDEDDRRQYKKRLPNQPDIILSELEPYRHDLVGIVVESTFNWYWLVDLLMDNDYQVHLANPAGIQKDKGLKYSGDKHDAFWLARLLRHGILAEGYIYPKQWRPVRDLLRKRRHLVQLRTSLINSLQGIVQRNCGCRLSGNKIKQIRMDHVTPLLANQEDLALSGTVSKDCIDFLTRQIREVETAMKNKVKLRKSFSGLQSIPGVGHIIALTIMLETGDIGRFDKVGNFSSYCRKVPTSWTSNGKRKGSGNGKNGNKYLAWAFSEAAEMFRRYDQTARSFYNRKAARTNFMVAHTALAHKLCRASYYIIKDGVEYDPEKLFA

SEQ ID NO: 316461 - protein, 340 aa, unidentified
MRITTIGLDLAKNIFQVHGVTANGEIAFNKPLRRAQMLPFFAKLEPCLIGIEACSSAHYWGRELTAFGHEVKLMPPAYVKPYVKRGKSDAADAEAICEAVTRPTMRFVEIKSAEQQAILCQHRAREIMVGQRTQLSNTTRGLLGEFGVIVRKGLNYIRSFAADMENGIAPDLPDVAHGVIASLCRQLLSLDIRISELGKAIADTAKTDHRIKLLQTIPGIGPINASAIVATVGSAHQFKSGRDLAAWIGLTPLNKSSGGKERLGKISRMGDRYLRQLLVVGMSSRVRMARSHPERVDPWALSILERKPTRLATVAMANKTARIIWAVLTRNEPYAPRTAA

SEQ ID NO: 316462 - protein, 406 aa, unidentified
MSNVRYVGLDVHKEFIVMAVADGSGAPAEVLRRFESSAPQVLAALRKLGPLSALKVCYEAGPTGYGLYRSLRAAGVDCQVIAPALIPKQNQRLKTDRRDARKLAHFLRSGDLVSVWVPDEQTEALRDLERARDDARLALRRIQQQLLKLLLRNGRVFTEGKEHWTKTHWNWIRRQRFAEESQQRVLADALQTVEQAQARLARLDQDLAECTIGWRLLPLVQNLQAFRGIKLLTAVGVAAEIGDFQRFPTAGKFMAFVGLVPSEQSSGAARRQGRITKTGNRHVRRLLLEAAWQYVGAPATVGPALAARRRHVPENVVAIADQALRRLRRKAWKMTLCKKPACQIATALARELAGFIWSAARATDVLPRTTTAGTNLQQRTRAPQPAGGGGSERVGVSLRPRRRPER

SEQ ID NO: 316463 - protein, 444 aa, unidentified
MAGSGMILIREVADAPVIMGISKPAGLKSPCGEVKIMNPLFVGIDVSSKNNVAYLMKPDGSKHSSFSVQNNLGGAKLLSEKIVSALHSMQLNDVVIGLEATSIYGDSLVYALREDGSLGRFQRKIHVLNPKQVRKFKEAYPDLPKNDWVDAFVIADHLRFGRIAKEVYMDDYRYQALRTLTRARFDIIQNLTREKQRFANYLFLKCSGIAQDKDIQNTSATTIALMEHFETVDDLANADLDELTAFISEAGRGRFVDPDATAKAVQAAARGSYRLPKTVNDTVNQAMSVSIASMRALKEQVKVLDKAIEQHLEIIPNTLTSIPGIGKVYSAGIIAEIGDIHRFNAQASVAKFAGLVWHRNQSGDFEAEHSQMIKSGNRYLRYYLLEAANSVRRCDSEFRRYYDLKLKEVNKYQHKRALALTARKLVRLVFRLLKDNRLYIPPEG

SEQ ID NO: 316464 - protein, 413 aa, unidentified
MVRYLGLDVHKHWTQVAWHLPDGSIQRERIATDPVLLRELAQRLQPSDVVALESTTHATAIAGLLKQKAGTVLISNPLRTRLIAESHIKTDKVDADVLAQLAKSGFLPTVWQPPQEVELLRRRSAYHAALGRQITRVKNRLHAVLHRHLLEVPCRDLFSQEGRAFLRKADLPADETLQVELDLHLLEVLEAAREETRKTLAQLAVAHPQVQLLMTIPGIDYPTAVGILAAIGDISRFSSPRKLVSYFGLNPIVHQSAEHCYTGRISKRGRTHARWLLVEAAHCAVRCPGPLRAFFLRIKSRKGTNVAVVAAARKLTVIIYHMLTKGEAYYAAPQRRTHEKLSRLHYHATGRKRKSGPKKGSTQSPFYGSGQRGRTVKARLDRQRLIQLQNQYETLVSERLQEAYREKLSPENS

SEQ ID NO: 316465 - protein, 354 aa, unidentified
MPLTINPVKYDLFVGIDVDQKSYAITYLDQNFQGRSLKMPADPRGLLQYFQKNFPQLRLVFAYEAGPTGYALYDYLVSQEQHCLVIHPASLKKAPNDRVKTNRLDSQRIVEQLKAGHLKGIRIPTVPFRQLRHLVHLRQTYAQQIMRTKQRIKALLLLEDIHIPDGEGRQLWSARGLQTLRGFPMQETLRFKMDFLLNDLDYVRERLLLVLRQLRSFCQKEPSIHSNLEHLRSLPGFGLIISTYTLARIGDPARLRNVRELGSFCGIVPREYSTGDQIQRGRITHFGDPTLRRLLVEASWIAIRKDTELQQFYNRLRSKNRRPEGVRVAIVAVARKLTHRVYRVLKEQRPYVIH

SEQ ID NO: 316466 - protein, 391 aa, unidentified
MPKPNDLSRSLTAFEQDSTLIVVIEMSQASWLVAGIVPGVDREPLKKVEPNGDALLGLLQRWRDEATRAGRTLKRVVVAYEAGRDGFWLARWLRAHGVEAYVIHPTSVHPTSVAVSREHRRAKTDRLDTALLKRVFLGWLRGEPKHCSMVAIPTLAEEDARRPNREHESLVGERTRLVNRIKSGLVRLGIRTFKPMLRRAPEHLDALRMPEGAPLPVNTLAELRRDLARLHLIRAQIKAIEAARLERLQQAPEQGPHAMVRLLARVIGIGVETADMLVREVLSRNLRDRRAVARYAGLTGAPDESGAKRREKGLAKAGNARVRRGMIQLAWRFLMFQSESALAQWFRSRTAQAPKTRKTMIVALARKLLIALWRLVRTGAVPEGLALRPAI

SEQ ID NO: 316467 - protein, 409 aa, unidentified
MSLVVIGMDPHKRSATIEVMAGDEAVVGGGRYGTDAAGYAAMRVAVKAWPERIWAIEGCQGIGRHVANRLLADGEQVVDVPPKLSARIRVFATGQGRKTDATDAHSIALAATRMSRLRPVAGDAQLAVLRILADRRRALGEDHTRMVCQLHHLLLELIPGGAKKDLSAAQAKALLATVHPRDAAGKARRRVAAELISDLQRIYQRKKAANKELNALLAATGSTLTSLHGIGPSGAARLLAEVIDITRFPSKAHFASWNGTAPIDASSGDQVRHRLSRAGNRQVNRALHIMAVVQLRHRDSEGRAYYDRKVAAGKTPMEAMRALKRRLSDIVYRQMILDHRAAQTGPGGHVGAATGSSAAGFNPSTGASEKSLPGPANHRPYPGKPIRSSGRSRRLSPAPARSRGQAPFA

SEQ ID NO: 316468 - protein, 351 aa, unidentified
MSEKLNTTVAVMGIDIGKNSFHVIGLDARGAIALRQKWSRGQVETRLANMPPCLIGMEACVGAHHLSRRLKTLGHDARLMPAKYVRPYNKGQKNDFRDGEAIAEAVQRPTMKFVATKTAEQLDLQALHRVRERLVSQRTGIINQIRAFLLERGVAVRQGLRFLRAGLPQILATRTDVLSPRMVHVIEALAGDWRRLDERIEGLSADIETLVQHDPACQRLMTVPGIGPIISSAMVAAIGRGEVFSKGRDFGAWLGLVPKQTSTGDRTILGRISKRGNRYLRVLFVQAAWVVLIRPKSWERYGLKPWIEAAKKRLHRNVLAIALANKLARIAWSVLAHGRNFEVRKIDEAAA

SEQ ID NO: 316469 - protein, 304 aa, unidentified
MENFYFIGVDVLKKKLNFCVMFEGKVVHEEETSNHQGAIMSVLHHLEEDYGIASGQMLVCAEHTGQYTFPLACACKAVECRLWLENAAEIKYSSGVQRGKSDKVDAKRIAIYASRFQDKVRYYERPTEDIERLKQLESERTLYVTDFAKYKGQMKDQKEYMPKSLYERKMKRLQALMDDLEEAIQSITDEMDEVIASCPVLFRQRELLMSIDGVGRVVATNMIIATEAFTRFDDPRKFNCYAGVAPFSYSSGSSQHSKARVSHRADKVMKRLLHLAAVAVTHRIGGELKKYYERKVAEEKTRCP

SEQ ID NO: 316470 - protein, 525 aa, unidentified
MARMIIGVDPHKASVTIEVVDQHGMLAATGRFPTARGGYQALIKYVKQWPHRVWAVEGTGGAGRPLALRLVRDGERVLDVPAKLAARVRVFDTGLGRKTDASDAHSIAAVAVHAHGLRELALADVDLEVMRLLVDRRDEVARLRVQIVNRLHRLLTELIPGGAAKRDLSALQARRILAPVRPRDPAGATRRRLAMDLIGDLEAVDARLKALKAELRIAVRRYGSTLMDLHGIGPAGAARLLVDVATISRFPTKGHFAAWNGTAPLEASSGEVVRHRLSRAGNRRINHVLHIMAIVQLRNDTPGRAYYRRLLARGKTSMEALRCLKRRLSDAVYRQMLADQPATVADTVAGPVADPAGPTGAGPGGHSGATTDSSADDLTTPTAASSDKSLPGPATNHATRDHHGDGRDDAADDGAEDGDVLEDEPIGPVETLDLPAVALVRRASSAAGPGLPLGSPARARRGSTVKSGPKGRPAGTRSALDGGGAGPYQRGAGTPRTADSNKAGDAAATAQDLPTRPTNEAPNTY

SEQ ID NO: 316471 - protein, 462 aa, unidentified
MSKKRTYGSADVEHVDVAALVAMLTVGCIVAVDVAKTKFVAAIAKATGEVLKIVRFSHPVQTLTFLKLVEAIRDAKLAPRVVMESTGTYGDALRYQCHVRGVAIEMSLPKHTHDFAEVVDGVPSTHDAKAAVTLVQLTLIKPGRRWTPDDDGRRDLRALLDQRSLQTKELDVYHGHLEAYLARHWPELLSLIDVREQRSWMTLLKAYPGPHRVAEAGSEAAKLLHTASHGRFSKEHIKAIVDAAGTTFGVPMRQSEEAMLRFLVENMEEHTKGIDALDDELAQRVKEDDVASRLAAVVGPACAASIVSRLGSPTLFASAGALEKAMGLNLKVRSSGEKQGQLHITKRGPAQVRQLLYFAVLRMLQADPIVAAWCKARKSYDGESGKRKAIVAVMRKLVRALWHVAKGPRFDASKLFDVRRLDLTSASAESKVSPPTSVPQLAPTRAPSRSRRRAKDISQQVA

SEQ ID NO: 316472 - protein, 343 aa, unidentified
MHIASIGIDLGKTNFHLVALGEHSKVVVRKKFSRKQLLAYTANLQASLIGLEACSGAHFIGTALRNQGHEVRLIPAQFVKPFIKSNKNDFLDAEAIAEAVARQNMRFVPIKTNEQLDLQALHRVRDRLVHRRTAVINQIRGFLLERGLTFAKGPANLRHRIPAILEDAEQNITPRMRMLLDQIWQEWKHLENDITIISEEIERISKEDAACQRLRQIPGIGPLVSTATVAAIGNGAAFSKGRDFAAWLGLVPRQHSTGGNAKLYGISKRGNIYLRRMFIHGARAVLLRVKYDTGGFGQWVHQLESRAPRNKVIVAIANKLARIAWAVLSKQMDYRATTAVAAA

SEQ ID NO: 316473 - protein, 322 aa, unidentified
MNKVKHYVGIDISKDTFDVFDNLNGHHLFSNDLKGFKSFIKVLKGSSCCVMEATGCYHQRLAVYLFDNKISVAVLNPLVIKRYTQMKLHHTKTDKSDAQMICHYAQEQSVSLWQPEPAYINQCNMLQSAVGLYFKQSTAIKNKLHSLESRGLETGILVRSLKRQLKQLNTEIEILENKMEELIKEYNQQMYSNIRSIPGVGKKTALLLIASTNGFKSFENHRQLSAFFGLAPTERTSGTSIKGRSRISKAGNPKIRNNLFLCSFTACKSNPQCSALYNRLVAKGKSKKLALIAVTNKLLKQAFAIAKSGICYDKNYRSMLTN

SEQ ID NO: 316474 - protein, 637 aa, unidentified
MSASTSAARRLRLGVGIDTARYGHHVTFLGDDLQRVAPDLPVPESRVGYQRLEQQLRRLCEKHPDAELHVRIDAAGQYAANLERFLRSLDLPLPVSVGEPKRNKDYHHAHSPKRQDDQTESWAMARYAVLERPAPSRETPPEFAVLRRIASRLEAQVRQTTRLTNQLHELLSAVFPELANLARDITVQWVLKLLERYPTAPRIAAARLDSLQGIPRLSPEKAQQLQTAARNSVGTLRGETCEALVRQLVRELRASLDDESRWKKLLTQAFDALPSGPHRRIATITGIGKVTAAAIVATAVSVERFQTPEKFVGFYGVFPQAASSGVDKFGRPNPVGKKSMCARGNDLVRGLLWNCARSAALFNPAVRTLYKRLMSPSRPDGKVPLRGDVAFGYCMTKLLRLVFAVWKTDRDFNPRHFPWEPQENAPHLDRSEPATSDAATADQTSLEETATLGQTKVGDEGESNAADAATPAQEIAKAAGHNEPQSSRDNVVTAATSSLDARTVADQHLPPSAPCASSSGSLQPYRGPLDFAELRRQVTLRQVLQHLGVLHRFRNSAGSAPQLRGPCPLHKSRNERGRTFSVDLQRNIFHCFNPSCAAQGNVLDLWAAYHGLPLHQAALHLAETFGVIPPHLENGSH

SEQ ID NO: 316475 - protein, 337 aa, unidentified
MEYFAGLDVSMAETHVCVVTGSGAVIHNAKVPSTPADIAAELAQVPTCRRVVFETGRMAPMLYHGLSQLGLPVVCVESRQAYQALKLLATHKTDRNDARGLAHLARTGFFKPVHVKSLSAHAVRSLIIARKKLVGQRVTLENQIRGLAVVFGVRLPRALSPAFIRQALQASEGIPGLSAAMRGLVAARAAVLAAVVAIDADIRRMVRASDACRRLMSIPGVGQLTALAFTAAVDDPGRFRRSRDIGAYLGLVPRRYQSGEIDYTGSISKCGDRRVRTLLYEAANVMLTRYKGALKLKEWAFAVAKRSTMRKARIALARRLAIIMHTMLRNGTEFKAA

SEQ ID NO: 316476 - protein, 362 aa, unidentified
MNRNTGMNAGQIIGTMGGKQVFGLDIAKHVFQLHTVDMSTGEIANVQIKRAKVLEHFVNKPKSLIAMEACGGAHHWARELTALGHTVRLLHAKIVRPFVSGNKTDATDARAIWLAVQQPGVKFVGIKTAAQQATLTLHRQRELLMKMRTMQTNALRGLLYEFGATFAQGRKALFKDVEQTLEDLSAQLPQMVRDSLREQVARIKAMSDDILTIEKRLGLQLKADPHMQRIAQIPGVGLLTATAAIATMGEASAFKSGREFCAWLGLVPKQTGTGGKVRLGGISKRGDTYLRTLLIHGARSVLAHAKEPGPWLAQIQARRPANVVIVAQAAKMARTIWALTAKEQSYQRGFQSVRPNASMQAA

SEQ ID NO: 316477 - protein, 338 aa, unidentified
MEKKYFVGADLHKDQTWFYVMDNEGKKIISGNVDNENGILEEFFKTIPKPFEIGVESTYNWYFFVDIAEKYADKVHLANSSELKAFAKRHKKNDKIDAQLIAKLLSRGDLPEVYIPHKEIRKIKELLRYRMNIVKERTKNIAKLKALLARNGLPSEGNYTTYKGIQAIKRSGNKLLDKIIDRYANKILELTKEKSEIEDIIEEIAERDVDIKNLKTIPGIDSFSAVLIKSEIGEIERFATFEKLKAYAGLISQTWQSSKKTIYGPLNKNRNKYLQWILIEIVQHFIASDEGRKKKYERIKRKKNHNIAKISLAKDMLLIIYKVLKEKREYYEKKEKVA

SEQ ID NO: 316478 - protein, 368 aa, unidentified
MGRKSSKLFVGMDVHKESIDITLAEEGGEVRHYGGIGGEQSALLRTVRKLESLGKSLVFVYEAGPCGFWIYRLLQERGHPCWVVAPSNTPRRVRDRIKTDRRDSLKLAGLARAGELTPIYVPDAADEAMRDLVRAREDAVTTQRQARHRLAALLLRNDIRYGGKTAWTEAHRRWIARLHLPGSAQRIAFEEYVLTVDEATASVQRLTRSMEQELGHWRWQPVVHALQACRGIQLIHAVRIVAEVGDLSRFTHPRQLMAYLGLIPSEDSSGERRHQGPITKAGNRSARRALVEAAWAYRHHAALSPLIVRRQTGLAKPVLDIAWKAQLRLCARFRRLTARGINRNKIVVAVARELAGFVWAIGQRVKLN

SEQ ID NO: 316479 - protein, 414 aa, unidentified
MYCVGIDIAKRSHVACVMSESNVLVVKPFEFASTHDGFKKLLVHLQSLSVDLSDVIIGMEATGMLFENLYRYLKELTYRVVLLNPYQTSKFREMDTMKRVKNDNIDSVMIAALIKSGRFSKGYVSDEQLQSLRELYRHKASLDDQLKAIKRQTGTLLAVVFPELEEIVSDPFNVTGLALLEKYPTAKHYDYASADRVLKTFRGIKGNNFNEAKALKLLELAKVSIYSGVAKDARAMSIRSNIALIRLLQEQIAACDQEMIELFAIQGKQVSNDERHEMSDLIDNLRTIPGVGDKTILALLAECGNLDRFTDAKALVGYLGLYPTLEQSGGTIKHGRLAKRGARLAKKAIYLASIAAIRHNKELHTVYDKYRSKGRAKKECVIIVARKLIAIIYSIYKRNTPYDPVRVFVPMPNQ

SEQ ID NO: 316480 - protein, 339 aa, unidentified
MSVYAGLDTSLDAVAICVIAETGEMLWQGKVLGDPDAVTAALQRWRDDLVRVGLEAGATSEWIGGHLVDEGFPVVCLESRHVKAALGAMTVKTDRNDAQGIAQIVRTGWFKAVHLKSAAGQRLRTLTAARKAAVRAVTANEQVIRGLSRPLGLKIGAVTRVRFEARVRQLVGADRLLLGIFEPLLRMHRCLRENLADLHRLVLRAVRVDPICRRLMTMPGIGPVTALTYRATIDDPKRFRRSRSVGAYLGLTPRRYQSGEVDRIGRITKVGDSETRTALFEAANVILRPTTRWSSMKAWAMKIARRKGARRAKVALARRMAVTLHRMWVDEQDFRWSAA

SEQ ID NO: 316481 - protein, 337 aa, unidentified
MKQYKYYAGIDISKKTLDITVIDQNKKKLIYLQVTNSQKGIKQILKKCKNEKIDLYKTLFCCENTGIYTTILSKVLQENKIDIWVENPHAINKSKGITRGKNDIIDSYRISTYALRFRDKSVLWKPNSESLEKLKQFFMLRDRILENITRLKTPLNESKNFIDKKFHTQLKKAISKSIRSLEEDLKRVERELEIVIKEDKELEKNYDLAKSVPCIGKMTSMYLLMCTNNYSKIKTYKQGACYAGIAPFEYRSGTSIRGKTRVSNMANKHLKKLLHIGSLSVLKHKKGELYKYFERKKIEGKHIMVVLNALRNKILNRVFACVNKGQLYDPGYVNTIN

SEQ ID NO: 316482 - protein, 348 aa, unidentified
MHIAVLGIDLGKNSCSVAGLDASGRVVLRRRLHRDSVVKLASRLPACVIAMEACCGAHHLGRLLQAYGHVIRLMSPEYVQPYVKVQKNDERDAEAIAEAATRPTMRFVDLKSEDQLDMQTLHRARSRLVGQRTALINQLRAMLLERGIAVAQGRHRLARYLAQALDDGNAEPVPLSLRIRLLIEDMRAQWSELDRRIASFDAEFVAATRSDEAARRLSTIPGIGALNATALVAAVGDARSFARARDLAAWLGLVPRQATTGGRPRLLGITKRGNKYLRTLLIHGARAALPSLATTEGALGNWLRGLSARAHRNTVIVALANKLARIAWAVLRSTAIYSARISDRPTAV

SEQ ID NO: 316483 - protein, 422 aa, unidentified
MNPNWNQHNYFAALDWAKDHHDVVVVDSSGKIAADFRFIHDAAGWAEFTQKTQPFAGCPITLETASGPAVDQLLLRNWTIYPVAPTAAARYRERKAPSGTKNDRHDVWSLADALRTDGHAWRPLRPQDEATARLRALCRDEITLIEQRTLLVNQLQAALREYYPAALEAFEDWTQPSAWQFILAFPTPAQLRAAGPRQWEKFLHTHKLWRPETREKRQALFAQADALCASPAVVAAKRLLAISLVRLLITLQGQLDEYRHQIRTAFREHPDHDIFGSLPGAKDFLAPRLLAEIGSVREEYPDTEALMCQGGVSPVEYQSGQIKRCRLRRACNKVLRATIHLWANSSRLTCAWAQTYYTQKRAEGHSHASALRCLGKRWLKILWRLWQDRKPYDETTYLKSLESRNSLVWQLLKTASQTNPAM

SEQ ID NO: 316484 - protein, 343 aa, unidentified
MDKIIMIGLDIAKNIFHIHGVDASGAPILRRQLRRGQVEKFFAKLPPTLVGLEACGSAHHWGRVIGRYGHQVRLMPPGYVKAYLKRNKNDGRDAEAICEAVGRPTMRVVPVKTVEQQATLSVHNTRRLLVQQRTAAGNALRGMLSEIGIVAAQGVKGLRALMQQLDQPSEAIPELMRNALLLLARQWEALDAAERALEQQITRAANADQQARRLMAVPCVGPMIASTVLAKVPDPGMFRSGRDFAAWIGLTGRDRGTGGKHRIGRISKQGDRMLRTLLINGASAYLLHQKRRGVTDPWLRDLLARRPYKVVMVALAARTARILWALLVKGGEYRARASVPAAA

SEQ ID NO: 316485 - protein, 431 aa, unidentified
MEQKRHPYLSVGIDIGADFSLMAIALPTQEIIGKPYKILHSSNRSVEGAVERIQSIGQAYELPVRIYMESTGIYHLPLYHRLKNAGLDVYVLNPLVTHANQNINIRNIHNDKLDARRIALLGLRPDLKTSIVPADDVAAVKALLREYHAMKKETSMYICRLKNQLRQIFPQYLPLFSKVNGKASLEVLSHYPSPSAVLSAGADALAKLIQEASGKGRTMAEKKAEAILSAARESLSFGHGNSGITFLIGHYVEMIRILDEKTAAILKQIKRSVQEQPDSLLARQTRLLESIPGAGFLTAVTIVCEIGDFRAFRRPKQLYSYFGLDPVVRQSGNSAGANLRISKRGSPYARRCFYILALQSVSLRKNGEPKNPVLRAYYLEKCKSKAKMTALGAIMHKLCNIVFAVLRDERPFVLRSPQEHRQNYLSLPKAA

SEQ ID NO: 316486 - protein, 405 aa, unidentified
MNAVGIDVSKGKSTVTIRRPGDVVVLAPRDYRHTQSSINDLIATIKCLEGETKVCMEHTGRYYEPVASWLSAAGIFVSAVNPWLIKDFGNESIRTPKTDKADAKKIARFALDRWAKLPQYSRMDELRNQLKTMNRQFGFYMDQKTAMKNNLIALLDQTFPGANSFFDSPARSDGSQKWVDFVYTYWHVDCVRGKSLEAFTEHYKNWCKRKGYNFSAGKAEGIYLAAADLIAVFPKDDYTKLLIRQAVAMLNVASETVETLRIKMDQTASQLPEYSVVMEMDGVGPTLGPQLIAEIGDVTRFKHRGALTAFAGVDPRPNESGDYARKSNPTTKKGSPHLRKTLFQIMDGLIQRSPVDDPVYAFMDKKRAEGKPYHVYMTAGANKFLRIYYGKVNAYLSPSVGAEDS

SEQ ID NO: 316487 - protein, 375 aa, unidentified
MAKNTRFVGLDVHAETIAVAVAEGRGQVRALGTIPNRPEAVRRLLGKVGKPSELRVCYEAGPTGYALYWQLTRMGIACEVIAPSLAPAKPGDRVKTDRRDAERLASSYQAGTLTVVWVPDPKHEALRDLVRAREAAKQDTKRAKHRLGKYLLRYGQRPPSGTRAWTAAWWQWVRKLELAHPEQNTTLLELILEVDHQSNRIERFDGAIDRAVATAPEQLRAIVAALQALRGVAQETAVTLATEFGSFVRFERAPQAMGYTGLVASEYSSGSKKRQGAITKTGNSHLRRALVEAAWHYRHRPRLNQRQKQLQRELPPKIAEIAWTAQERLHRRFWALTNKSKPSPKIVTALARELVGFVWAIGKETEQTMEAKRVA

SEQ ID NO: 316488 - protein, 338 aa, unidentified
MTYIGFDHHKKWTQAAAIDDQGKIIREMRVLNDSSSLKGFLKGLPKPLKGVVEAGPTWGWIYDTLTELGVKMIVANPSAVRAIAEAKIKTDKIDARMLATLLRVGLIPEVYVPTEEVRSQKMLWRERIWLVRMHVRLKNRIHRLLNHYHLEVPEFSDLFGAAGRRFLEELKLPEPGNRILNAQLKLLQSYRLQIEEVQRWAVKATQGHPNRAYLESLPGFGKVFAPIVALEIDDPKRFASPGKLASYCGLVPSLYSSGGKSWQGGIGKDGNHWLKWAFIEAAWAAIRSSAYFRVVYQRLRQRKTAQVSIIACARRLCEIAYHLLKERRCYEERPYRCA

SEQ ID NO: 316489 - protein, 493 aa, unidentified
MNSKSNSRKKQGGNCGGRMGRDSGKQKKENMKALSPEQEAGLKQKAEEISKGLQSYTWRDLETGGKFTHNDKLTFIRDDMLIVGCDIGSERHYARAIDAKGRELSKGAYSFENSAEGFQSAKDWALCLAAQHGKNQIVLGVEPTGHYWFSLAAWMIAKGISVVQVNPYAVKQTKELADNSQAKNDAKDPKLIAELVKNGNYGVPYLPEDVYAELRVLCTLRDQLMEDRVRNMNRLHREMKIVFPEYREAFGKIDGIFTLSVLANAPLPSELVALGEDGVKDIWHAEKLRGGGYKRAKEIVRLAGVSAGLTQGAEARKIAIVSFVGKVMELAAELEEIEAQIALKCREIPRADSILEIHGLGAATVSGILAEMGDIDRFDAAKEIQKLSGLGLVACSSGKHQGQTKISHRGRKRLRYWLFQGALSVVSHNEAFRQIHAYYTTRAENPLKKMQSITVIACKLLRIIFTILKKGVRFDPDKMLSDITHPAPLDAAA

SEQ ID NO: 316490 - protein, 351 aa, unidentified
MSQKTAATVARTIGIDTGKNTLHLIGLDDKGAIVLREKVARGRITARLANVPGCLIGIEAGMATHYVARELSALGHDVKQVPPAYAKPFRQGHKNDFRDAHAIAEAVQRPSTRCVPVKTDDQLDLQALHRVRSRLVGQRTAVINQIRGFLLEHGIAVRQGLRFLRQQLPDILAKRSDVLSPRMIRIMEDLSGDWRRLDERIEHVTEEIEVLAHGSEGCRQLMTVPGIGPLIASAMVAAIGNGAAFAKGRDFAAWLGLVPKQMSTGDRTILGRISKRGNRYLRTMIMQGARVILLRPANWAKHSFGPWLTAAANRLHHNVLATALANKLARIAWTVLMQARSYEARVEPRTA

SEQ ID NO: 316491 - protein, 426 aa, unidentified
MSESVSEQPIPTQVAACVGIDWADQKHDVVLRSVGDPAKAEHQIIKSEINALNDWIVQMHERFGAKGKVLVCLEQSRGALIYQLMAYELFELYPINPSQLAHYRKTFFSSGAKSDQPDADLLSELVMCHRDRLKAWKPDDQLTRELATLNEGRRQAIDRRTELANEIKSQLKLYLPVALQILQNDITTALAADLLVQWPTLAELQKVSPAKLRKFFYGHNCRQEKKILERLALIKEAKPLTTEEAIIRPTALRVKLLAQQLKSLLPFIAEYEKRIAELFGSHPDRFLFENLPGAGPALAPRLLTAFGTDRGRFQVVGDLLNWSGVAPIRIASGKRFSVHFRWACPKFQRQSFHEFATHSIRFCPWAQTCYQAQIARGKSHHVAIRALAFKWIRILFACWKKRVPYDPDRYLKALQSRGSEYAQTVP

SEQ ID NO: 316492 - protein, 359 aa, unidentified
MEAISNKIQDFRNQNIYVGMDVHHKSWKVHIYSDEFELKSFSQEPDIERLSDYLKRHYPRANYQLAYESGFCGFWIQRAFTAKGINCNVVHAADVPTNNKEQLRKTDKVDSKKIAKGLKNGELNFIHVPDIDLELDRQLLRSRSNLVKDTTRIKNRIKAILKLQGIEIPKSYSEGRWWSKSFIKWLSEIDFKSVSGKLTMQTQITELVFIEEQKKKIDTAIKELSKTDRYNTNADLLQTIPSIGLLTAMILLTEIGDIKRFKRLDELCSYCGIVPNCHSSGETESTGGLSRRGNSTIKTVLIECAWVAVKKDPALLLYYKQQITHMKGQKAIIKVARKLLSRIRYVLMNQKEYVLGIIE

SEQ ID NO: 316493 - protein, 309 aa, unidentified
MNHEERVYCGVDVSKDHLDVLVKGRPAQFENTAKGVRSMVARIGKAHYVLESTGGYERMAAWLLMDAGLAASIVNPSRVRHYALGMGQLAKTDPIDAGVITEFARATRPEPSEKPSKTQRLLVALVDRRQQLMDMRTAESNRLETAAGPEFRKMVEKHLRWIEKEIEALEKRIDETVRADESMEAKARCIRRIQGLGAVCTATLLAHLPEIGTLSRQEAAALTGLAPYNRDSGKSSKQRHICGGRRRLRACLYMGAISAIQHNPHLKEFYRRLVEENHRPKKVALTAVMRKLVIAANSAVKNPDFCVVV

SEQ ID NO: 316494 - protein, 400 aa, unidentified
MKTVLSVDVAKNKSMIMLMNNDGEILIDTKEIKHNLGEFEKVKEEIEEINPENLTVFMESTGTYHLPVERYFKENGFNTLVINSLTTKNNFDTIRKTKTDKKDCYRLAKLFFVNEVEYHEISKKDLYANLKAMTRQYFYLTQVNIRCKNRYKRLINICFPEFEGFFARNRIYEDTALNFIKAFPHAYIVREKRIDALYNNLRKVDARHDYYYKRLARQLKDTAINSFPGVDKDHADVKNLSDMASILQENNRLIDEIRKNMIELAKQSPYFEIVNSFYGIGEVLAAELLGELGDITRFDNHKQLIAFCGLDPSIVQSGKSINVKGGISKRGDKHARWILFNISQMVVKLGHQCPSHPVYNYYLIKKAEGKHYYESLTACSTKILRMLYSMCKNNKRFLEE

SEQ ID NO: 316495 - protein, 353 aa, unidentified
MMIIGCDFHPSFQQIACVEQETGEYEERRLSHRGEAEAFYRSLAGRSVRIGMEATGNDRWFHKLMNELGHELIVGDASAIHASAPREQRTDKRDARHIFKLLVENRFPSIWQPPVGNEEQRQLLLHRCRLVRMRTRIKNQLDSIAKNEGLTGSRVWKAKRRQQIEALPLTGWYAERRKDLLELLDEMDKRIDPLDKAVKLAAEQNAEARLLMTHPGVGPVVSLAYVLILGDWRRFPRGKQVGSYLGLIPSEASSGKHQQRMGHITKQGNTLLRWMLVEAAVKAQSKDPSWHRQYVRLSMNKHHGVAKVAIAHKMAVRLYWMLRSGQNYTQIVERGSHAGQSELAGGCGFRPIN

SEQ ID NO: 316496 - protein, 308 aa, unidentified
MTTIYTGLDIAKLNLQLHLLGRRHDLPNTAAGHRRLVKRLASLPGAHVICEATGGYERDLVAALHDARIPVSVLNPARVRHFARATGQRAKTDPLDAAILTAYGQALQPPPTAPRTPQEHHLSELIRRRVQVLALLVAQRQQAQRLTVPALRRQAQSLVRRLERDLEQIETQLTQLQAQAKALDERVQKLIAITGVGTITALGVLAELPELGTLNRRQAAALAGLAPHPRESGQWHGRRRIGGGRAPVRRALYMAALVAARSNRQLKAFYQRLRAAGKPAKVALTAVMRKLIILMNHTLKNPNFVPQN

SEQ ID NO: 316497 - protein, 342 aa, unidentified
MDHYAGIDVSLEYSSVCVVDAAGNILREGKVASEPQALVGYFEALGLIVERIGLEAGPLSQWLYAGLKGAGLRVELLETRHVRDAFKAMPVKSDRNDARGIAQLMRLGWFRPVHCKSLAAQETRSVLTARKLVQTKLHDVEMSLRGILRGFGLKVGKTTPRRFAPRIIELVADHPTLAMIAQSLLAVHAVLLREFNGFEKQVRAMSRLNANARMLMSTPAVGPIVALTYASAIDDPARFRSSKRAGPLFGLTPKKHQSGETDRSGRISKIGDTAVRAALYEAAHIILTKPIKGCSRLKSWAMRIARRAGMSKAKVALARKLAVILHRMLVTATPFNDAAAAA

SEQ ID NO: 316498 - protein, 342 aa, unidentified
MQAITTIGLDIAKSVFQVHGVDAGGQPVIRRQLKRRHVLTFFQKLPPCLVGIEACASSHHWSRELQALGHTVRLMPPAYVKPYVKRHKNDATDAEAICEEVTRANMRFVATKTPEQQSGLMLHRTRHLFRQQTAVINAIRAHLAEFGIVAPVGRNGVEQLLGIVADPNDKRLPEVARVCIAALGTQLRVLKAQVLNFDRQIMAWHRSNETSKRLDEIPGVGPVLATALVASVADPKAFRSGRDFSAWIGLVPKQYSSGGKDKLGSISKQGDRYLRGLFTAGALAVIRYAKIHGTKHRPWLTALLARRPTKVVAIALANKLARMAWAMMAKGERYKQPVALAA

SEQ ID NO: 316499 - protein, 342 aa, unidentified
MKNTTIAVDLAKSVFEVGISHHPGHVAETHRLSREQIAEFMAKQSAATVVMEACGSAHYWGRTFEAFGHEVRLLPPLYVRPYVLRSKTDRADVKGMLEASRNSAIRPVPVKSESQQQLTSLHRVRSGWMGSRTMRINAARGLLREFGFVFPLGAATISGRIRELIEDADTPVGMPLREMLNQLVLETGELETRIKSVEKQLEALAAQTPVVALLRTIPGIGLLTSTALVGFVGDVGRFPSGRHFACYLGLTPREYSSGSRRRLGRISKQGDAYLRTLLIHGARAVLVGAKSSSHPDRLRAWGLELQRRCGNSKAAVAMANKLARIVWAVWKSGKPFESRPLN

SEQ ID NO: 316500 - protein, 321 aa, unidentified
METVEFAQVVTRGCGLDVHKKTVVATIDGKGLKRSTREFGTFTSSLTKLKDWLLENGITHVAMESTGVYWKPVYHVLEPSGIKVWIVNARHVKYVPGHKTDKKDSAWLCKLLLAGLLKPSYIPPKEQRELRDLTRYRKKLIQDIASNKNRIIRILEDCNVKLSSVLSDTSGVTGTKLINKLCEGKPITMADIDAVYHKNIEASKEELWEACNGIVEEHHIYLLQTIRENNRHIEKLIDELDQQIKKVLSPYDNALERLREIPGLSRKTVEDLIAEIGLDMSVFPTEKHLCSWVGVSPGNNESAGKKKVDEPHTETNKPKPY

SEQ ID NO: 316501 - protein, 368 aa, unidentified
MNEVTTYVGMDAHKKDLFIAMLVGATPTPVTWQLANEPQAVRRLVRKLEREAPGPVRVFYEAGPCGYALQRQLTTPRVQCDVIAPALVPRKPGDRVKTNRRDARKLAELGRAGLLTAVQPPTPDDEAVRDVARARDDAREDLQRCRHRMGKLLLRRGLHYSGRNWTRVHRRWIDQLTWTHVAERAVVNDYLLAIDQTEARLAELDAKLAEIAASDPYREPVGWLRCFRGIETLTAMLILAELYDVRRFPSAPALMAYLGLVPGEHSSGEKHRRGRITRTGNALVRRLLVEAAWHYQHRPSVGVALTKRRKGQPGRVIAIADKAQQRLCRRFRKLAAEHKPTPKVAVAIARELAGFLWAALQPAPVSVT

SEQ ID NO: 316502 - protein, 396 aa, unidentified
MDVHRSFAQIAVVEDGVCRDEGRIGVRPEELRAWASGLRPDDEVALEATTNSDAIATMLRPLVRRVVVSNPRKTRAIAEAKVKTDKVDARILAQLLAADFLPGTWVADDRTRMLRRLVMRRTHLVKQRTRVKNQVHAIMARNLVPTCPHADLFSGIGQRWLDRQDLPADEWRSVEALLRQLDFHGEELTQVDRDIALEALDDPIVARLMTVPGIDVTVAISILAAVGDFNRFDSPDRLVSYLGLNPRVRQSGNSPATHGRITKAGPAQARGMLVEAAFSAARAAGPLRAFYRRVKERRGFQIATVATARKMTVLCWHLITNGEDYGFARPSLNAHKRRKLELAAGASSRRGPARGASHDYHVKRPRDQERAIAEHAERSYEVMVAHWQPGPPAARA

SEQ ID NO: 316503 - protein, 357 aa, unidentified
MQTKTEPRTRTNILRRKNQNQPRRYVGVDLHRDSFLVCVREQGEGRCQRWSLDQAQEFAGTLGPQDELAVEATGNTRWFSQQVAGRVRRVVVVNPHQFRVISASVKKTDRRDAALLAEYLEKDLLPEVRQKSAAESELAQMAQARDQLVKMRTMLKNQLHGLFSSYGVALPKKALASRRQRTALQQRPLSSLADVQRRVLLGQIEALDASITELERVLTEAARSLPGYEHLVSVKGIGSLGATILLSAIGRIEDFSEPGKLAAYFGLVPRVEQSNQTEHHGRITRRGNKLARTTLVQCALIAKRYSPFLRRFYERIQRRRGTGKAIVATARKLLTIVYYTLKNHWTFTNFPQLEVAS

SEQ ID NO: 316504 - protein, 350 aa, unidentified
MLIIGCDYHPAFQQIAFVDTDTGELQERRLQHREEAERFYRDLSAERIKVRVGMEASGHARWFERLLSELQFELWIGDAAEIRTKRVRKQKTDRQDAQLILKLMLEDRFPEIWVPSWENRDLRQLLWHRHRLVQARTRMMNQLQAVALNEGLRCKKKLFREAGRQQLEAFRLAPWASRRRHDLLELLDRLTPTIAELTQAIEEEVEKCPAARRLRTHPGVGPLTALAFVLIIGKADRFQCGKQIASYLGLVPLEKSSGDQRRLGHITKQGSTLLRFLLVEAAQVTARSLPEWRSKYYHLTMRRGRKIAKVAMARKLAVRLYWMMRKEWDYGQLTKFGSYAGKPENRDGVK

SEQ ID NO: 316505 - protein, 341 aa, unidentified
MDTVIGVDLAKNVFQLHGASMAGHLKFRKKLSRLQFRKFMAGHPSAVVVMEACGSAHYWAREMVKLGHEVKLIAPQYVKPFVKRQKNDAADAEAIVIAAQRPEMRFVEPKSEEQQARAVLFRARKRLVHQRTDLVNALRAVLYEFGHIIPQGIEQLKRIDAILEDPNSDLPELVREECRSLIDQIAYKTERIDAKAEQLKKLATRTVTAQRLQTMPGVGPLTALAIEAFAPDMAAFRRGRDFAAWLGLVPRQHSSGGKERLGRVSKEGQADIRQLLIVGAMSRLNWLGRKSIPSGSWLAQMLARKPRMLVAIALANKMARTIWAMLTRKEDYRNPAQAVTA

SEQ ID NO: 316506 - protein, 354 aa, unidentified
MTRSSSKIPTELTVVGIDIGKDVFHLVGFGPNGRIGLRRKIKRMALNATFEKLPRCVVGLEACLSAHFVSRALRKLGFEPRIIPAKYTKPFVKGQKNDYNDAEGIAEAALRPNLKCVSEKSQDQLDLQALHRVRSRLVSRRTATINQIRAFLIEQNITVRTGAGALRNSLLAILKNREDEISPRMNDIIVGLYGDWLWLDQRIDSITNQIEKISRTEDNCERLMTVPGIGPMISTAMVAAIGTGEAFDRGRDFGAWLGLVPRQYSTGGKPILGRISKRGNRYLRTLFVQAAHVILMRPKNWEKFSFGSWLEQAQGRMHKNKLAAALANKLARIAWSVLRNGNKFDTHRIEAVSA

SEQ ID NO: 316507 - protein, 402 aa, unidentified
MNAVGIDVSKGKSMVAIMRPFGEIVSAPFEIKHTASGINSLVELINSVEGESRIVMEHTGRYYEVLAHQLSEANLFVSAINPKLIKDFDNDSLRKVKSDKADAVKIARYALDKWQNLKQYNVMDELRNQLKTMNRQFGFYIKHKTAMKNNLIGILDQTYPGVNTYFDSPARSDGSQKWVDFASTYWHVDCVRKMSLNAFIDHYQNWCKRKKYNFSQSKAEEIYGKAKELVPVLSKDAITKLIIKQAVDQLNSASTTVESLRTLMNETASKLPEYPVVMAMKGVGTSLGPQLIAEIGDVSRFTHKSAITAFAGVDPGVNESGSYEQKSVPTSKRGSSDLRKTLFQVMDVLIKTHPQDDPVYQFLDKKRAQGKPYYVYMTAGANKFLRIYYGRVKEYLSSLPES

SEQ ID NO: 316508 - protein, 317 aa, unidentified
MRFYNAQHQFYCGIDRHARTMYVCILTHAGEIVVHRHMPTSPDALLKTIAPYREQLALGVECIFTWYWLADLGAREGIPVVLGHALSMQAIHGGKAKNDNIDAQKIAVLLRGGRLPQAYVDPAERRATRDLLRRRRHLTRRRAELLTHIQNTHSQSNLPELGTTSASKANRDGVAERFAAPAVPKSIAVDRALLAHYDRLLREMELAILKTAKQHDTNPLYLRRTVPGIGEILSLVLLYELHDIQRFPRLPDFVSYCRLVKGAKASAGKRDGPAGTKIGKAYLTWAFSEAAVLCLRAHHAGQKSLTRLEKKHGKGTA

SEQ ID NO: 316509 - protein, 335 aa, unidentified
MKNYLFYVGIDISKSKLDVVILEKQSPNVSNHFIVENNLKGIKEILKNLIKQKIDLTTVLFCCENTGIYTFPLSSHLSDEKLDYWIVPAIEIKRSKGISRGKNDKADAKDIALYSIRNIDKLKLSTLPETAIQQLKLLYTEREKVMKSFKIFEATKENIDFIPKQVYKSISGINNKTVKFLKTTLKAIEKEMKAIISTEIELKKQFELIKSVPGVGDKTAIYMLIATRAFTAFDNGRKFACYAGTAPFEYSSGSSIKGRTKVNHMADKKMKSILQMCALVAVKHDPQLKEYYERKKGEGKNAMLVLNNVKCKIIGRVFSVINRQTPYINTYKFAC

SEQ ID NO: 316510 - protein, 403 aa, unidentified
MNAVGIDVSKGKSMVCILRPYGEVISSPFEIKHTSSDISNFIDLIKSIDGESRVVMEHTGRYYEPLAHQLSQAGIFVSAINPKLIKDFDNDSLRKVKSDKADSVKIARYTLDKWRELKQYSVMDEIRNQLKTMNRQFGFYMKHKTAMKNNLIGILDQTYPGVNTYFDSPARDDGSQKWVDFASTYWHVDCVRKMSLNAFTEHYQKWCKRKKYNFSKEKAEEIYGKAKELVPVLPKDDLTKRILHQAIDQLDSVSKTVEQLRMLMNETAAKLPEYDIVMSMTGVGPSLGPQLMAEIGDVSRFTHKGAITAFAGVDPGVNESGSYAQKSVPTTKRGSSSLRKTLFQVMDILIKTHPQDDPVYQFIDKKRAQGKPYYVYMTAGANKFLRIYYGRVKEYLSALSESN

SEQ ID NO: 316511 - protein, 416 aa, unidentified
MGEALRLFIGDDWAEDHHDVELMDASGRRLAKARLPEGVAGMARLHAMAGEVLGEDAEDADPGQVVIGIETDRGPWVQALIAAGYTVLAINPLQASRYRERHGVSGAKSDAGDAHVLADMVRTDSHQLRAVAGDTAQAAAVKVVTRTHKTLIWERTRHTQRLRHALRDYFPAALDAFEDLDAADTLELLARAPDPAAAARLTTAQISAALRRARRRDIAAKAAQIQSVLRAPHLGQPDIVAVAYAASVGALVAVLGTLNEQVKTLQGQVEAHFGQHPDAEIILSQPGLGPVLGARVLAESGDDPARYASAKARKNYAATSPITRASGKKKAVLARHVHNDRLIDALMSQAFSALQASPGARAYYDRQRARGAGHNPALRQLANRLTGILHGCLKTRTLYDEATAWPQYAEKTKAAA

SEQ ID NO: 316512 - protein, 315 aa, unidentified
MAMPVSVLMPIVGVDVAKNELVIFQAELDLLETIPNNKTAIKQWLKALPGAVEVAIESTNIYHLEFADLAHEAGCTIYMVDGYELSHYRKGVKIRAKTDALDAKLLARYLKNEHEELHPWIPPSPLYRRLLSLFRRRSALVQARVGLVQSWSNEPLLKTAFAAQVASMQKLEVLVEKMINDHLKEAGLLAQLKRCMKVEGIGFLTGARLIAAFQRGDFRNADAFIAFLGMDLRVSKSGQKDGRRSLTKRGDPEARRLLHNAAMSASRTSTWKGFYQEQRDRGFSTTQALVILARKLARIVFALLKGQSEYQPKAG

SEQ ID NO: 316513 - protein, 428 aa, unidentified
MSENSTTHPEPEFVAFVGIDWADQKHAWCSQRAGATQREHGEVEHTPEMVEVWVSQLAQRFGPGPIAVAVEQVKGALVYMLSKYECLHLFPVPSTMSASMRKSLYPSGSKDDPRDAELLLDLLLQHRNKLRRLMPDDEVTRRIQNLVEERRNLVDEKTTQLNRLTGYLKVYFPQMLEWFEKLDTKLVCDLLERWPSLEELQKVPPAELRKFFGQHRGRHQELTERRLEGIGQAMPAIRDRAVLEAKRAMVQVSAQLLRILLEGIANLDSKIEEAASAHPDFFIFESLPGAGSALAPRLLAAFGSQRDRYGSAEEVQTHSGIAPVMEKSGKKKWVHFRWACPKFLRQSFHEWAGHSISQSPWARAYYQQQRGRGKDHHAAVRALAFKWIRILFRCWQDRVAYDENKYLAALARRGSPLSSVLTVTAATL

SEQ ID NO: 316514 - protein, 339 aa, unidentified
MLIIGCDYHPSFQQIAFVDRETGECGERKLTHKEEAESFYRDLNGRSVRVGMEATGHARWFERLLAEQNFELWIGDPAEIRAKRVRKQKNDRQDAEHLLQLLVEDRFPQIWVPSPENRDLRQLLWHRHRLVQMRTRVKNQVQAIALNEGIRRKKGLWSKLGRVQLESLSLAPWSARRRQDLLELLDRLNPKIDELSTAIQQAAEQRPEVQRLMTHPGVGPITALAFVLILGVPERFQCGKQVGSYLGLIPCEELTGGRQRLGHISKQGNTLLRFLLIESAHAVVRYDPDWRRRFLHLAMRRGRPIAKVAMARRLAVRLYWMWRKAWDYQQTLKFGSHVG

SEQ ID NO: 316515 - protein, 357 aa, unidentified
MNLVVIGVDAHKRSHTLVAADMVGRRLAEKKIGTTSEDHLKAVEWTAQWPGAKFALEDCRHVTRRLERDLLAAGFEVVRVPTHLMAAARRGSREKGKSDPIDALAVAHAALREPDLPTARLDGPAREVKLLSDYRHVLVTERTELINRLRWHLHELDPGLEIPARGLRRYCVIDDLAERLTGFEGLVAQLAREMTTRCRELTRQINDLERQLRERVRRLAPSLLAVPGCGVLSAAVIIGETAGAQRFRSKDAYARFTGTAPIPVWSGSTSGKVRLNRGGNRWINCALHMIALTQTRGLGPGKDYLDKLTGRGKTRVEAMRLLRRRLSDVVYRALILDERAVAQPADAPMKPAVLQAA

SEQ ID NO: 316516 - protein, 335 aa, unidentified
MPMLAEIIDAVVGVDTHRDTHHVEMAAPTGTPIATCSISNDTSGYAQLLAWIHDHAPGPRLVVSIEGTRSYGIGLARAATAAGLLVLECEQPNRKARRGKGKSDPIDAHLAVLTALRLDTTRLPIPRADGDRVALRILLGARHDLTVTSTAQINRLRALLRDGNDTDHQLARAALTDATLTGLARRRLPRDASREHAVRHAEVRRLALAIHDASRALKTNRAQLQSIVDDIAPGLTDRRGTGPVTAAQAIVSFSHPGRCRNDAAFAALAGTCPLPASSGRTVRHRLNRGGDRALNRAIHTIATVRMRDCPTTKAYIARRTAQGKTIREIKRCLKR

SEQ ID NO: 316517 - protein, 341 aa, unidentified
MQITTIGLDIAKNMFQVHGIDAAEKVVVRRQLRRGQVMKFFEAVPPCLVGMEACATAHYWARELTKLGHQVRLMPAKDVKAYVKRNKNDATDAEGICEAVGRPTMRFVGVKSAEQQGRLMQHRTRDLLMRQRTQAINALRAHMAELGIVAAQGREGLKELLAIIADERDERLPIDARASLIVLAAQLQALHTMIGSIEKRLIVQHRANEASKRLESIHGIGIIGASAIAATVTDPKAFRSGRDFAAWIGLVPREASTGGKQKLGPISKQGDRYLRRILVVGAHSVLRRAKQSPQKYPWLTQLLARRPFKVVAIALANKMARIAWALLASGGIYRAPRLAAA

SEQ ID NO: 316518 - protein, 464 aa, unidentified
MHTQMLSFEDSAIRNAGFSGDVGEKEADEMNGQEQIVAWIGIDWADEAHQVWEYNVGTWGKQNCAGEHSGESLQEWLIELRSRYGGKRVAVVLEQARGGLIYALMSTDFLVIYPVNPQSLAKYRKALYPSGAKSDPADAELLGEMVRQNPDRFRAWVPGDAQTRTLQLLTEGRRKLVEDMTARTNQLTSALKTYYPQALDWAGNLGSEQACAFFEKWPTLMELQKSRPFRIRQFYEKYGRPSREALNERVDQIQKAQPLTLDGPVVMANVMMVQALVTQIRPIRLAIEKYDHEIERVFQQHPDRVVFESFPGAGKVLAPRLLAAFGADRDRFQTALEVQEFSGIAPVTERSGKTIWVHRRLACPKFMLQTFHEFANCSWKFCAWSKLYYQQQRTRGNDHHAAVRALAYKWIRIMFRCWKDRTPYNDSLYVKSLTKRGSHLAKGLNKPGSDSLVEILSTVCESRA

SEQ ID NO: 316519 - protein, 344 aa, unidentified
MEHYVGIDVSLEFSSVCVVDAAGKVVREAKVRSEPEALVGFLAGLGVTVVRVGLEAGPLSQWLHAGLTAAGHEAVLLETRHVKAALSAMVVKTDRRDARGIAQLLRMGWYRPVHSKSLVAQEIRALLGGRKMLLGKLLDLELSIRGILRGFGLKLGETTKSRFAGRVRELAAGQAMLEAVVEPMLRAREALRTEAAALHQRMLAVVREHEVCRRLMTVPGVGAVVALTFVAAVDDPARFRRSKDVGAHFGLTPKRYQSGETDVVGGITRAGDASVRVALYEAANVLLTRGARFSSLKRWAVEVAKRRGARRAKVALARKLGTVLHRLWVDGTEFRWGKEPAVTA

SEQ ID NO: 316520 - protein, 393 aa, unidentified
MFLGVAGNGEALSATPSGDFAGVWLSVMRAKPVKPWSGELVGEHMVNAQRTSSSNRVTRTVADVMNVNSQGREAVTAPRLNAGIDVSKDWLDVAFGSRSERFSNDAAGMESLTALLRQENIDLVVLEATGGYEAAGAAALQAAGIAVAVVNPRQARDFAKSMGVLAKTDKVDAKVLRAFADVIARHDKRDQFLREVPDEQRLHLAALVTRRRQLLDIRTAELQRMAMAHKAARKSLNAVILFLDKQLSEIDHDLEQHIREHFRDLSKLLSSAKGIGPVTANTLAAALPELGQLDRRAIASLVGVAPLACDSGHRRGSRHIWGGRGEVRHALYMATLSAARYNPAIRAFYERLLAKGKPFKVAMVACMRKLLTILNAMVRDGTPWNAQLHVKNP

SEQ ID NO: 316521 - protein, 288 aa, unidentified
MWHVGIDLHRRTIVLAAVNDGGEAMNPITIPCADTAAIINTARALGPFRAVIEATGTYRWLYDLLHPCGTILLAHPFRLRAMIQRRTKTDKLDAQLLANLLRINQIPLAYIPSEPYQRLRDLVRCRARLGRELAEAKIQLRGLLARHNREAPFRVPFGVRGLAWFGSQDFGIGLFSAPLIVAELGEVERFRTAKQVGAYSGLTSRVHQSGAHCHRGSISRQGSPWLRWILVEAAMKTIREDAALKNFYTRVRKRSSAKIARVAAARKLAEICWKRLRRWQREHVGKAA

SEQ ID NO: 316522 - protein, 322 aa, unidentified
MTMLSCCGIDVSKDRLDLAVWPDQQSLSVSNDASGWAELVEQLRGYPIAAIGVEATGGYERGIMRALLGAGMSVRQINPFRLRQFANASGVLAKSDPIDARMIASFVAVMPTRPAQRQARALERLAEVLAVRRQLSDEKVAAENASRLLEDAMLQRLSRRRIARLATDIEQLDKRLAAIVAADSALAHRYRRLVSMQGVGPVLACTLIALLPELGRLNRKQIAALVGVAPYAFDSGKFQGRRCIWGGRAPVRNMLYMAAMSASQHNPVLKTFHARLKAAGKQPKVVIVAVMRKMIVMLNAMVRDDVDWADRSAGRHTVPTAR

SEQ ID NO: 316523 - protein, 344 aa, unidentified
MSITMIGLDTAKSVFQIHAVNEAGKPEIKRKLSRNDLIPFFKKQELCTVVLEACGAAHHWARVLTGLGHDVKLIAPEAVKPFVKKGKKNDAADAAALCTAASRPDMKFVPMKSLEQQGILALHSARSLLVKQQTMLANAMRGLATEFGLTVPKGISKLEELTVLVDADETFPVKARQAFTGLSDQCKALTESIVTFEAEIVAHARHDETARRLATIPGIGPITASLIAATVGDISMFKSARHFAAWLGLVPRQHSTGGKTRLGRITKTGNREIRKLLVLGATSMVYRAPQWNSAAGLWIRGVLERRPVRLATVALANKMARIAWALMTRKEVYQAKGRVAATAA

SEQ ID NO: 316524 - protein, 342 aa, unidentified
MNLPVRIGMDTSKSVFQLHGVDENEVVVVRRQFRRAEMIRYFERLPPVLVAIESCGSSHHWARLLQSFGHEVKLIPPQYVKAYVKRGKNDAADAEALCEAVTRPSMRFVPVKSKEQQAACMLMTVRERLVSVKSQLSNAFRSYAAEFGIVGPAGRQNVTALIKRVLEDDSLPEMARDLFRLQAEEYAAVQARLAKIEAKLMKWHREDDVSRRIATIPGVGPIGSSMLSMKAPPPETFRSGRDFAAWLGLTPKDHSTGGRQRHGGITKAGDSALRSTLIVGATALLRHIRKGRHKPTPWLASLLERKPPKLVAVALANKFARIAWRLMISGGVYNRPVAAMPI

SEQ ID NO: 316525 - protein, 368 aa, unidentified
MNNIGGVEGGRQEGWPRPQRPADGTPVWMAIDISRSKAVYCLRWNGSEQRRLSTPLGIEHVRAVVEHYRGCRLHVAYEACGFGYELAWWLQEHGVAVSVIAPSRVERIPGLQVKTDRVDVGKLARKLEKGDLKAIYIPTRPVHERRQIGRTYAQSLKERKRAQVRIRSLLQEQGQLGPLPKAGWTVYRAWLAAQELPEPIRLCVEVHQQLRHAADQQAKRMKAELYQVARSAEYRPLVKALMAQSGVGWHSAIRLVLELGDIERFRTTDALPHYLGLTPSQYSSGELDHRGHTLKCGPGFLRALLLQCAWAAVRHGRDRDLTECFERLAPRIGRKRAIVAVARKLAIKLRTRWLQHRVASVPAPTLAA

SEQ ID NO: 316526 - protein, 402 aa, unidentified
MIYAGIDIAKSSHVIGAVDERGKDAAKPMQFANSAEGFGKCAAYLEGLGAPAEEMLVGMEATGHYWLPLFSFLHAQGYDVVVINPIRTDAMRRFKGSSRVKTDLVDCILIADTLRLGEFRPSKLGDESMVELRQLTRLHQGLKESVADLKRQVIVALDQVFPEYDSIFSDTFGESSKAFLRKCPTPEECRGVRVDALGNTLSRASRGKLGREKAEEIKGIAEESCGIDRGTRTLSFQIKLLVEQIDFIEGQIEEVEARIEEGIETTEPLILTIPGIGHVLGAQIASEIGDIHRFRNASAVVSYAGINPSVSQSGKFSSSENHITKQGSPYLRRALYLAATAQLRLSTPFRDYYDKKRADGKSHREALIAVARKLVHVIYAVLSKQEPYRSDAVNANPVSRSE

SEQ ID NO: 316527 - protein, 412 aa, unidentified
MAPPARPRVVIGLDVGKSAHWACVVTREGELLASRPIPNRENAIDGLCAQYPGALVVVDQVRNIGSLALSRAKLAGMPRAYLPGLAAHGASRLFAGDAKTDERDAMVIAKTALGIPDALLAVADRPPEVEAARSLAAQRDFLTCENTRSKNRLRSILLESCPEFEAQADLSDPATLKLMAAVGGPWSISEASPQSVGALTRGCRRAKVAALAGSVESSSRPHPAAVACEDRAVRLLARRISENDAEIGSLTSEISALLSADETYRCLLTVPGIGPRTASELVISIDIADFPSHDRLASYCGLAPRNRRSGTSISSVSASRQGNKRLKNLLIFSCNCLARSRNRWGEYYARCRDRGMPHGKALKAVARKRLKVIYAVMRDKVPYAAKRPAEIAGPAGPASALPKTPIERANLP

SEQ ID NO: 316528 - protein, 417 aa, unidentified
MSSEWLPFTIKTHKGECIMNSVGIDVSKGKSTVAIMRPFGEIVASPFEINHTEEDFEKLVSQIKSLKGESKIVMEYTGRYYEPLANYLYNSGLYISVVNAILIHDYDNSSIRRVKTDKKDAIKIANYGLNRWLDLPEYIPEEELRQTLKIYNRQFTQYTKLKVALINNLISLSDQTFPGIDGLFGKTPRKDGHQKWIDFIKDYWHKDCITTKTIKSLERSYQKWCSKNGYHYQSNKVNDIYQLANQTVASMPANTNTKLIITETAKELISLIDALEKIRQEMNRIASQLPEYPAVMSLPGVGTTLGPQLIAEIGDIRRFHSRKALIAYAGIDSSPYQSGTIDIKSRGISKRGSSALRKTLFTVMDCILRHQQIDDPVYQFLDKKRAEGKHYYVYMIAGCNKFLRIYYARINAYLNSI

SEQ ID NO: 316529 - protein, 371 aa, unidentified
MKSIIYIGMDVHKKTYSLCALLKETGEIIGETKIPADVSLIIRFIENTKKSVDSDDVQIKTGYEAGCLGYSLYWQLAEKGIECDILAPSTMQRSAKNKVVKNDRRDARNIATNLANGTYKSVYVPTDEDVEIKEYIRMMHDFKIELKKVKQHINAFLLRFGHHYPGKSKWIPAHIKWLKELELSDMYREILDEYLSQLEILTEKIERFKYRLEELSQKETYNEKIGQLRCIKGIDTTAAMTMHAETSDFDRFPTANAFASYCGLTPGEDSSGESYHRLGITKQGNSMIRTTLVEAAQVLVRGTIGKKGKKVKSKQKDQDVKVIDYADKAVIRLQKKYHRMIFRGVKRNIAITAVARELACFVWGIETGHIS

SEQ ID NO: 316530 - protein, 376 aa, unidentified
MEILYTNCAGLDVHKKTVKVCLLTRTSDGQLHKEFRTYLTTTEELLQLGDWLKEQGCTHVAFEATGVYWKPVFNLLEGSFELLVVNAQHIKAVPGRKTDVKDAEWIADLLAHGLLKASFIPSGPQRELRDLTRYRVRLTEEKAREVNRVQKTLEDTNLKLGDVVSDIMGRASRLILQAIADGESDPGRLAALAVGRVRAPQERLEAALRGHVTDHHRFLLSEHLTQIRHLEQAIERVTAEITRRFTPPSPPEETTISQKEEEATQEISSDSAPPQEASSSSQAALSWAAAVVLLCSIPGIGERAAMGILAEIGITMQQFPTAAHLASWAGVCPGNHESAGKRLSGKTRKGNPWLRCLLVQAAHSASHQKQCYLAEQ

SEQ ID NO: 316531 - protein, 469 aa, unidentified
MKRKSRRAKCQKVSPFSGDLQLIEPDAAAVDVGSRSHWVAVNPQRDPNPVREFGTFTADLISLADWLAQCEAKSVVMEATGVYWVSLYELLERRGFKVYVVDAHTVRHLPGRSKSDVKDCQWLRRLHSYGLLRGSFRPPAQIRQLRNYQRSRTKIIEAAAQQQLRMQKALTLMNIHLHHVISDLSGLTGMAIVRTIVGGERDPIRLARLRDPRIRASRETIQKSLEGHWQEELLFDLKIALESYDHFEGQIAAYDEQIRQELKEVKSKVDLANEPLPATRLRACRKRPGMSQQNQLDLREELYRISGVDLTRIDGISLQTAQKVFFEIGTDVSPWSDEKKFSSWLGLSPNHRISGGKVLKRSSRKVVNPLSVALRLAARTLRNSHSALGANFRRLIAKIGMPKAITAMARKLAVLVYRMLKYGTQYVDKGMQHYESKYQETKLQYLRGQAAKFGMILLPRQAASTSVAS

SEQ ID NO: 316532 - protein, 458 aa, unidentified
MGNARARKIPAQLVEDEDYQLRHERVAGIDVAKAKADVCARLPPQRDGGRRASRVEEVPARAREILDLAARLVSDGVELVVMESTSDYWRIWFYLLEAAGLNVQLVNSRHARQLAGRPKTDKLDAQWIARLAEMGLLRPSFVPPPEIRALRDLTRTRLQLLRDRTREWQRLEKLLEGALVKLSSAVHSLARTKTARAILEAIAAGERDPKALAALAHGSVKGGRAAVEQSLDGMTLGAHHPLLIRTHLDHITLLDRSVSAIEDEIEAALRAIPAAWGVSAGGETGPDTGHDPDAAVLPAAGRLAEIPGVSPALAMAIIAETGLDMTRFPTAAHLVSWAGLAPVARQSGPRSRKPGKGQGDAYLKGYCTQAALGAAGTGTFLGERLRRLSRRTGPMRARCAVARSILVIIWNLLADPSARFTDLGPDWHERHADRDRKIRAHVRQLQAMGLDVTIAPAA

SEQ ID NO: 316533 - protein, 362 aa, unidentified
MNYRNRKNAQWREKPERTVGLDLGDRFSHYCILNAQGEVIEEGRIATTEKGLRQQFANVPRQRIALECGTHSPWVSRRLQQWGHQVIVANAREVHSITHSVSKNDRHDAEQLARLAHSDPELLKPIQHRSRARQQDLNWLRARHTLVRARTLVINSLRGLAKSAGGRLPNCSSESFPKRAAEHIPASLTPLATALLEQVAALNTNIAALDQQIETLAQRYPEIALLRTAPGVGPVVAAAYVLTLDRPDSVAHSRQMGARLGLRPKQHQSGDRDPQQGITKISNRYLRSLLVQSAHYVLGRFGPDSALRRWGLQLAGTGNQGAKKRAVVAVARKLAVLLHAMWRTGQSYRPFPPVRAVPNSNP

SEQ ID NO: 316534 - protein, 350 aa, unidentified
MKYYTSTTEFNCGIDLHAREMYACVMDRQGNKVVHTNIIGNDFAYFLKKVAPYRHSMTVVSECTFNWYWLADACFEADLPFVLAHALYLKHIHGGKNKNDRIDSEKLAHLLRANLIPQAYAYPAERRPIRALLRQRMSCVWQRAALMAHVSTNQTAEGLKPESRGTDREDWKERVLSQYAHPLHRLAATCEIDLIRSYDLQIQKLELELERQAKTHEGHAYTLLNTVPGIGRTLALTILYELDTVDRFPGVKQFLSYSRLVKGSVASAGKIKGLTGGKMGNAYLRWAFGEAAVCCKRKHPLLAPYADRLVAKHGKFKANAILAAKLARAVYFMLQKGTAFDPEKLVATSL

SEQ ID NO: 316535 - protein, 350 aa, unidentified
MYYKENDMQEKASFPIWIGIDVSKDSFTAACRSILRGDETVFPPQGGFAIERKSVKEFMRWAAGVADGFPFGIAMESTGVYSLRLAALIRSVSPAQHVAVCNAASVSLYARSFTEEKNDKADAEAIARYGCDRNPRQPRIQGKEESRLRELVRERDRLVQLKNDMENGGEGLAGADVRRLHASAVKSLGKTVKKLDKLIQETVDSSEEIKEEVARMATAPGVGFLSAACVYAELGSLKNYTRRQISAMSGVCPVNRKSGTSVDRHAMSRRGSVLLRKILFLDSHQAIRGIPAMGEFHKRMLEKPNSSRMSAKCACMRKLLLILHAMVVNGMDFNPNYESEKKMEKSNQPT

SEQ ID NO: 316536 - protein, 371 aa, unidentified
MVKIAKFVGLDVHKDTIAMAVVGGGPLETIRAPVIIPHDVPKLVKRLLAEAPAEHLRVVYEAGPTGFGLCRDLLAKGIDCIVVAPNRVPIMPGPRIKTDKRDARNLAHQLRMGALSPITLPDHESEALRDLVRAREDALMHRRRARQQLGGFVLRHGFRYDGKTKWTPKYLEWIGSLRFGSRAQMIARDFYKDRIVRLNKEIEELSEQVIAIASELTGIRATLYRWLQALRGVRELTAATIVCELGDLRRFSSPSKLMSYLGMVPREHSSGNSVWRGSITKAGNPHVRRVLIEAAWPGRLRPARPAALLKRQEGVPEPVIDIAWNAQKRLHTRYRNMRARLKPQNVVIIALARELLGFIWAIGQQVELKSA

SEQ ID NO: 316537 - protein, 408 aa, unidentified
MEQIYDRVAGLDVHRDSVAACARVPGQHKEAVSHKERFSTTTVGLGKLAEWLGDHQVHLVGMEATGVYWKPAYYALEDDFTIWLCNAHHVKNVPGRKTDMSDAEWLADVVAHGMVRPSFVPPPAIRELRSLTRYRKRQVDVRAAEVQRLEKVLQDAGIKLSSVASEVLSLSGRRMVEALISGQRDPAVLAQFAIGRMRNKIPALTQALAGRFEAHHGLAARHILDHVDFLDDRIATLSEQIGLRLEPMKPAVDVLIGVPGVSQINAEVILAETGGDMAIFPSPGQLASWAGLCPGNYESAGKRRRVSTTHGNEWLRRAFIESAHAAARTMGSYFSAQYRQLARRRGPNKAAVAVAHSLCDVVWHLLSTGQHFEDLGADYFERRRDPERETQRLVRRLQRLGHVVTLSA

SEQ ID NO: 316538 - protein, 307 aa, unidentified
MITQNYIAIDIAKESLAVAADSFSGSFTYDSRGLNKLVKHIDGIDQPLVVCEATGGYERVLMSLLFSRQIPVALVNPARVRAFAKSEGTKAKTDPIDAKVLLRFAVSKELQPTPPPSSQVQQLQALMDRRSQLTETLAREKNRLQKSPQCTLESIGKVIEFIEHELEHIELQIRAVIDSDQTMHLHSSIMQQVTGVGETTAWTILAYLGELTSLNRNQLVALAGIAPYNRDSGKYKGKRRIEGGRAKVRKCLYMAAQSAAVHNPHIKAYVDRLRKKGKPYKWAMVAAMRKILLHLRSLLKNQQLQLA

SEQ ID NO: 316539 - protein, 342 aa, unidentified
MSTFAALDVSQETTAVCVVDDAGRIIGEKKIPTCPEAIASFLTRYALDRVGIETGPMAVWLWNELHDRGLPIICIDARHANAALKVRPNKTDRNDAAGLAQIIRTGWFKQVRIKSRISYELRSLLAAREVLVRSRVKLENEIRGLLRTFGILFGKVVGGFASRTDRIIAGELDASPMMRTVISSLAKARAAILERIQELDRQVLAAARADATVRLFMSVPGVGPITALSVASAFDQASRFKRSSSAGAYLGLTPKRYESGEMSRNGRISKHGNKMTRKHLYEAATTMLTRTTRFCALKAWGLRLAKKVGFKKARVAVARKLAVVLHAMWKTNTPFRWSSVAA

SEQ ID NO: 316540 - protein, 317 aa, unidentified
MRASAAFFVGIDVSKQQLDIAVRPSGESWTVAHEEASLSALVARLRDLAPTLIVLEATGGWEVPVTGALAAAALPVAVVNPRQVRDFARSTGLLAKTDRLDAQLLAQFAEVLRPAPRPLPDAQAQELTALLQRRRQLVEMLTAEKNRLPLAARRIRPQLQAHIAWLHQQIAQFDEDLRQLIRSSPLWREKDDLLRSTPGVGPVLATTLVAALPELGTLSRRQIAALVGVAPLNRDSGTLRGRRTVWGGRAQVRAVLYMSTVVAVRHNPVLIAFYQRLRAAGKAPKLALTACMRKLLTMLNAMLKHHRRWAPVRAQHA

SEQ ID NO: 316541 - protein, 345 aa, unidentified
MKIVGCDLHTRYQQVALLDQETGELMERRLEHESGEARSFYGALAGPVRVGIEATGHTRWFERMLGELGHELWIGDAAAIRATVVRKQKTDARDAAHLLDLLLTNRFPRIWRPSLEERDLRQLVWHRQKLVWMRNVVGNQLHALAMGEGVCRKQKLFTKKGRAELESLALGPWASYRRQELLRMLDELDRSLQRLDDAVEQQAEQNPEAVRLMTHPGVGPVTSLAFVLTIGPVGRFQRSKQVASYLGLNPREHSSGGKQRLGSISKQGNPMMRSLLVEAGHTAARLDAELRQDYQRLKLRRGSGVAKVAIARKLAVRMYWMLRSPANYAQLVRMQGSPRGTLVGQ

SEQ ID NO: 316542 - protein, 329 aa, unidentified
MSDSSSIIEVIGADISLREIVLSWARTQRPCLSIANNRKAIVAWLKKLPAGCVIGMEATGRLHHLLAELAVGRGHVVYVLNPKHVASYAKGVGQRGKTDPMDAAVIARYVDRERDGLHRYVVPSALQRTLRDLISQRASVVRHAAALKESIQATGTGSNRALKRAHQAALKSLNTLLIEINNALKRATADNKELENKRKQLLRITGIGFVNSVALTHRFDRTPFANSDAVVAAYGLDPRPMDSGNHLGKRRLTKQGNAEDRRLIYLAALSASKTKLFNPIYRALLARGLATTAAIVILARKLLRIAFAIWTSGKPFNPDEVGKKACQKP

SEQ ID NO: 316543 - protein, 389 aa, unidentified
MKKNTTTRKSPKKALAKAQSKQIRQLAAKQKLYVGIDLGDQTSRYCILDEGANVVSEGQVPTTKAGLDSLFAKMPASRIAMEVGTHSPWVSRHLEAMGHEVIVANARNVKLITQSVRKNDRIDARQLARLARADPKLLSPIRHRGERAQLDLAVIRARAELMEARTMLINSARGLVKPLGERLKKCDADQVRVGLGEGLSEGARAVIMPLLKAVEGISEQIGKYDEQIAEMGKRYPEKKLLEQVYGVGPLIALTFLLTIEDAGRFAHSREVGPYLGLTPKQRDSGESQPELGISKAGDKLLRSLLVQGAHCILRKRAPESDLREWGMGKMGKGGKRAKKRAIVAVARKLAVLLHHLWATGEVYDAHYNRKAAEAAAAKAKGKSKGKVAA

SEQ ID NO: 316544 - protein, 334 aa, unidentified
MNNMTLIGIDLGKHTFHLHCQDKSGNALLRKKFTRTKLMEFLAGCPSATVVMEACAGAHFMARRINDLGHEAKLISPQFVRPFVKSNKNDFIDAEAICEAASRPSMRFVRPRTEAQQAMRVLHRVRESRVRDKVKTTNQMQAFLLEFGISMPTGVAVIKRLSPVLAENELPPYLTQLLMRLHTHYLYRVEQITEHEHELAQALRCDDTGQRLMTIPGIGPITASMLSSQLGDGKQYARSRDFAASTGLVPRQYSTGGKNTLLGISKRADKKLRQLLVQCARVFIQRIDHQSGRLADWVRIQLKRKHSNIVACALANKLARIAWAITTRQTVFER

SEQ ID NO: 316545 - protein, 400 aa, unidentified
MHLTANISVPQKNFIAIDLHSDNAVICVRRNALNKAGELVGKNIWCGLVSIRDGLDSFVKALLPYCQDFDHVAVVESTYNWYCLADVFEERGWLLRIADPSTVSQANLKSSEDRTDAQYLAERLRVGSLKHYLPLSYSSRALWDLCRYRMAMVQDCASLKIKLINLYRNQLSKNLLVADLLDRCRNHMQSNYRFDPDILEEFKDPNIRLRVAFEISRIAMLEEMIEECNAEIQKQCKDQELVKLCKTIPGCGPVLSAVICTEIGTMQRFKSAGDFVSYCRLCSTSKLSNGKSKGLGNAKNGNAYLSWAFTEVAQYASRNPVIREILQRLLRKYGGLRVKAIRTQAAKIARVTFYVLKNKQPFNAAKCFGIELTKSIKKKLTHKTLREDAAVVLPTVAGQA

SEQ ID NO: 316546 - protein, 351 aa, unidentified
MIVLGADTHKRSHTVAAIAAATGELLGERTVSVGRRGFGALLQWARTLDGDRVWALEDCRHVSGSLERFLIGRGERVLRIPTHLSAGARRSARQRGKSDPIDAIGVARAALREGLDTFPAAHLDGPELDLRLLVDHRERLVRHRVELNSTLLWHLHDLWPELRLPGGALFSKKWSTRIGRRLARAEQTMRVRIARDELRRLRELTLAINVLEREITELVTQLAPQLLVEPGFGPLIAAKLVGEIAGAQRFATAAKLARAAGVAPIPASSGNTQRQRLDRGGNRQINAALHRVIVTRARCHQPTRDYIARRRSEGKSTREAIRCLKRYLTRRVWRLLQPPNPVQDIPTPSIS

SEQ ID NO: 316547 - protein, 408 aa, unidentified
MLRLFVGDDWAEDHHDVEVLDAAGRRLARVRLPEGVAGIARLHGIIGDLVGEDDEDIEVKVGIETDRGPWVDALVAAGYQVFGVNPLQAARYRQRHTVSGAKSDAADAHVLADMVRTDSHQLRQVAGDSAQAEGIKVVTRTHKTLIWERTRHTQRLRHALRDYFPAAVEAFEDLDAADTLELLAKAPDPASAAKLTIAQISAALKRARRRDVAAKAGRIQAVLRADQLGRPPVVTAAYAASARALIAVLSVLNEQVKTLQEQVEAHFGRHPAAEIITSQPGLGPILGARVLAEFGDDPDRYVSAKARKNYAGTSPITRASGKKKIVAARHVHNDRLIDALMSQALSALTASPGARAYYDRLKARGAEHNAALRQLANRLVGILHGCLKTGTPYNEATAWSHHSETRAA

SEQ ID NO: 316548 - protein, 339 aa, unidentified
MSKLRFVGLDVHAETIAVAVAEMGGEVRSLGTIPNKLESVRKLVGKLAPIGTVKCCYEAGPTGYVLYWQLTQLGVACEVMAPSLIPTKAGERVKTDRRDAEKLARCYRAGELTAVWVPDAAHEALRDLVRAREAAKKDQLRHRHRLGKFLLRHGKRPIDAGPAWTQKYVNWIRIHACFEQAAWNATVAHYLEEIDHIAERIVKLEQAIDAAVPQAAPEIRAVIEALQALRGVAQTTAATVVSELGSLSRFRNPRQLMGYSGLVPREYSSGNRTQRGAITKSGNAHLRRVLVEAAWTYQHRPNVQGRVLRRQKALARELLGFMWAIAVDAEAQFQQTKAA

SEQ ID NO: 316549 - protein, 433 aa, unidentified
MAQPKPRRTVARRTDMSVVNPHAAGIDVGAQFHVVAVGPECAEEPVRSFRSFTADLHELARWLRQVKVTTVVMESTGIYWLPVFEILESYGFEVLLVNAREAKSVPGRKSDVNDAQWLQKLHRYGLLRASFRPRQDVATLRSYLRQRERLLEYAASHIQHMQKAMMQMNVQLHHVVEDITGVTGMKIIRAIVAGERDTDVLAQHRDRRCKASIETIREALGGHYQPEHVFELTQAVALYDFYQTQVTQCDQRIEIALKQLQAGIEPVAAPLPAARHRGKQSNDFSFDVRAALYGMLGVDLTQIHGLGPYVALKLIAECGNDMSRWPSVKHFTSWLCLAPGNKISGGKILSSKTRRSSSKAAAALRLAAVTVGKTDTALGGFYRRLSARIGKAKAVTATARKIAALFYKTRCATAWNMSIQAQPTMRNVTGSGS

SEQ ID NO: 316550 - protein, 351 aa, unidentified
MEAAYDGPQIVGMDLHRRRSVLVRMTEDGTRLGTAKITNSAAELRREIARAGERPKVVLEATYGWYWAADALMAAGAQVHLAHPLGVKAFSYRRVKNDERDAADLADLLRMGRLPEAWIAPPEIRELRELTRYRIKVVRLRASCKDQVHAVLAKLGIPVTCSDLFGGWGNTWLDGLALPQPYAGKTASLRQLISGLSAEISVLDTVIASLLAQHDGYHAIQVLPGIGPVLAAVICAEIGEITRFGHPDRLCSWAGLTPRHRESDTKVSRGHITKQGSPILRWALIEAIQRLPADTPVRAVKDNIIARRGKQARNIAKVAAARYLLTCVFYAMRDGHVRSLAARTTAQQAAA

SEQ ID NO: 316551 - protein, 415 aa, unidentified
MSLKIVYKICCGIDVHKTFVVACIASTNDKGITSYESHRFSTYTSGLKTLLQWLLKHNCKDVCMESTGKYWIPIYNILENDCSIVLAHPKYVKAIRGKKTDKKDAKWIADLFKHDLVAGSFMPPADIRQLRDLMRYRFKLTCFQSSEKNRLQNCLTVSNIQLGNVVSDTFGKSAQAILDKLLENPADTSFDLEPLVYKSLKKKLPELRDAIDGYITPEQAGKLKVIKSHYENLESRKAELEELILALAAPYQQELAILQTAPGIRSDFTAIGIISEIGTNMEAFPSAKHLCSWAGLTPTNNESAGKKKSVRVSKAGCYIKPLLVQCANAVVTSKKHPEIRNRYLRLKKRRGHKKAIIAIARMLLTALYHMLKNGENYNAELYRKSYLPPVDREITVEQAIIIARNQGYKIKSATA

SEQ ID NO: 316552 - protein, 341 aa, unidentified
MQPTTIGLDLAKLVFQVHGVAADGEVLFRRKLRRSEVIEFFRDLKPCLVGIEACASAHHWARELSGLGHTVRLMPATYVKPYARRGKSDVIDAEAICEPVTRPTMRFVEIKNVEQQSIIMLHRTRDLMVRQRTMLANALRRHLAEFDIMSAKGVWRLPDLVETATSAPVCQLPDLARECVELIVAQVEDLERRIARIDRSILAWHRKSEVSRRLETIPGIGVISATAIAAVVSDANVFKSGRQFAAWIGLTPRLNGTGGKVQLGHITKAGDRNLRRLLVLGATSLVNYARRKPEQAPWIVGLLARRPVRVVTVAIANKMARTAWALLSRGGEYRRPSMAAA

SEQ ID NO: 316553 - protein, 414 aa, unidentified
MELLHERCAALDIGKKDLKACVRTPSPTRKRSRRQEIRTFATTTNALLELRDWLLGERVSLVVMEATGDYWRGAFYLLEDDLNVILVNAAHAKGLPGRKTDVSDAAWLCQLGECGLLRASFVPPEPIRQLRDLTRYRTTLTTERTREAQRLEKELEDAGIKLSSVATDILGVSGRAMLTALIDGERDPRVLAELARARMRPKIPHLVQALTGNFGDHHAFLCRLHLQRIDSRSAAIGELSARIEEQMRPFARQLQQLATIPGVGQSIAEVIVAETGADMSRFPSAGHLASWAGVCPGHHESAGRRRSGKTRHGNRWLVGALGTAAMAAARTKDTTYLGARYQRLAHRLGKKKAIVAVEHSILTAVWHMLTNDADYTDLGGDYFARLDPQRAMRRIVRQANILGFTVRFDPIQAA

SEQ ID NO: 316554 - protein, 313 aa, unidentified
MAKRVSKITLGIDVAKDECVVYDWDSAKVLTLPNQKDSLKAWLRSLQGSVQIAIEPTSHYHMAWVEEALALGYEVYLVNPRQLAHYREAVNVRNKTDPQDAWLLARYLVHEGSQLRAYQPQCRQAQHLWALLKRRAVVVAARKQLQQSFSDISLPVQALFTQFQHLLARIDLRIGKLIRALGWSEDYRRCLSIPGIGPLNAAALVAAYHRGAFANSDAFIAFIGMDVRLRESGHYKGKRKLTKRGEAEVRRLLYCAAQPARCYQPFEDFYQRQLEKGLPKIAAKVILARKLARISFTLISNQQMFIKQAIPIA

SEQ ID NO: 316555 - protein, 323 aa, unidentified
MEEGRIQSTVAALEKHFGGEPRMRIALETGTHSPWVSRLLKSCGHEVIIANPRKIPTLTGSESKNDRNDAEQLARMAAFDPKLLHPIEHRSLERQQDLNLIHTRSVLVRARTMLVNSARGLVKSAGGRLPSCSSEAFPEKVLVAVPRELKAACEPLLKQIAQMNRTLAAMDKQIEGLAKKYPEIALLRTAPGVGPVVAACYVLTLGNPETMETNRQAGAYLGLRPRQQQSGDCDPQCGITKTGNSYLRSLLVQSAQYILGRFGPDSELRCWGLKLAASGGKRGKKRAIVAVARKLAVLLLSMWRNGKKFEPFPQLATQLAKAV

SEQ ID NO: 316556 - protein, 346 aa, unidentified
MHCIGLDVHSKATNFCVMDPNGKRVREFSLRGPLQGVVARIQVLQKELGPLRICYEASTGAGWLHDQLQGAGRQIQVAHPGKVRMIFRAKRKNDRIDARKLALLTFVDQVPQAHIPSAERRQWRSLIEFRRGQVEKRGGVKSRLRTILRSNAIQAPRGLWSKKGLEWLTKAELGDCQSLQRDLLMEELQEVRQKIGKVEAVLKKLAAQEPAVGLLMTIPGVGIRTAEAVVAYIDDPNRFRRNKSVGCYFGLVPCEDTSQKVRLGHITKEGPSTVRKYVTEAAWQGIRRSPQIRSFFERVCRDDPGRRKIALVATAHHLLRVMLSMLQTGECWRTQEVPPSGVAAAA

SEQ ID NO: 316557 - protein, 354 aa, unidentified
MLIIGCDFHTRYQQIAMAREETGELLVQRRLDHESGEAQAFYRSLQNDREPVRVGIEATGPMHWFERLLAELGHELWIGDSAKIRASEVRKQKTDERDARLILDLLLAKRFPKIWVPTPAERDLRQLLWHRHKLVTLRTMLGNQLHFLAMSQGLCRKQKLFSKKGRGELTGLALGPWASRRRAELLKLLDQLDPAIAELDRAFLEEAHRREDAVLLMTHPGIGPVTSLAFVLAIGPIARFQRSKKIASYLGLNPSEESSGGKRRLGAISKQGNTMVRWLLIETVHHAVKQDPELRQDYQRLKFRRGHAVAKVAIARKLAVRMYWMLRSGAAYAQLVRRQGSPGPTLVDASPSLG

SEQ ID NO: 316558 - protein, 339 aa, unidentified
MELYSGIDLHSSNSYLSIVDESGKRVFKEKSPNDMATILRAYEPYREQLAGIVVESTYNWYWLVDGLMAEGYAVHLANPSAIQKYSGLKHADDKHDAFWLAEMLRLDILPTGYIYPKDERPIRDLLRKRSHLVSLRSSLLISLQNIITRNCGVKMKTNDIKRLRENRVHPLLADNEDLALAGQVSKDSIDFLTRQIRAIETFLEKKLELKDAYKNLVTLPGIGKILGLTIMLETGPVSRFEKVGNYASYCRAVSSQWTSNGKSKGKGNKKNGNKYLSWAFSEAAEFARRNDEKARAYYNRKLRKTNFMVAHAALAHKLVRAAYYVMRDQVEFMPDKIFT

SEQ ID NO: 316559 - protein, 260 aa, unidentified
MKCITKYVALDVHQATTVASVRGEGGRILAHAILPTEEPAVVEFFRGMRGAVHVAFEEGTQAQWLHDLLTPLVDRVVVCDRRGEKRLGNKADQPDADELSELLRRGALRAVYHGSSHRATLKELTRAYQNLVEDSTRVMLRLKALFRARGIKVPGTRVYHPVEREHWLEKLPERGVRFRAEALYAELDVLRELRPKAKAAMIVEARRDPAWALLQTIPFFGDVRVSLLLATMQTPWRCRTKRNLWAYAGLAVVTKTSAEY

SEQ ID NO: 316560 - protein, 335 aa, unidentified
MQIKQFIGIDVSKETLDLSVVINGNAVSHYCVLNNTRQIKSVVNKIMKTFGSSYEETIFCMEHTGLYNLPLVKWLHANGCKIWLESGVHIKKTLGLVRGKSDKVDSFRIAMFAYTNRHHLKLWVPPRKVVERLGALLSQRQRMMKARKQLATANREQKLFIDKEIMHSLNVYTNRAVSVMDKQVKSIEKEILSLIKEDERLKQMYDIITSVNGIGLIIAVHILVTTNEFLSINDPKKYACYCGVVPFEHTSGSSIRGKNRVSHMANKTIKTLLHLAAVSVIRMPGELQDYYNRKVSEGKNKMCALNAIRNKLILRVFACVNQNRLYEKKYNYKLV

SEQ ID NO: 316561 - protein, 331 aa, unidentified
MSIIIGIDVSKANLDCAYLRDPDQKRAKRLSCKNEVSSFASLVSWAETKSDLSVKSLAFVIEPTHVYHEPLVQFLHNSGATVYLVNPGRVRKFAEGIGILSKNDMVDADLLTRYGLLARQLTAYAPVAQEVNDLRSLLNRLDVLERNLRSELNRQEKVGKTMVFHRLEQQSITRAVKRFKAEIITFKRAIRECIKSTPSLQQPFDLLCTIPGVGAKTAWIMIVVLASRPFMSAPEVASFLGLNPIEKRSGNSQYRRPRLSKSGSGHYRQKLYFPAMVATRKNPDIKALYERLLAADKTKMCALGAAMRKLVHICYGVMKNQAPYQAQYMPS

SEQ ID NO: 316562 - protein, 400 aa, unidentified
MLSIGIDVSKGKSTVCGMKPGGEIVYTPFEIQHTREGMSELVSLLHNSGEEVRAVLESTGSYHCPVVAALLENGIFVSVVNSLRMKRFCSQSIRKVKTDRIDAMQIALYGLAYWQELQPTKLPEDTYRELQLLARQYYQMTSMLIKAKVDFNAICDQVLPGMQELMNDHAGRHKLSDFVLRYRHTTHILEMGETRFRKDYCKWAEKKGYRNRERMAALIFATAQNGIPVLPNAPSTQIVITEAIRVLHTVEASRDAILTQMQALAKTLPEYSLVREMPCIGDTLAPRLIAEIGDVRRFHSKRALIAYAGIDAPPYQSGKFCANNRHISKRGNRYLRKTGYEVMQSYVMHKPANDPIFTFIEKKRGEGKSGKLAMVAGLNKFLRVYYGKVTELYRSLPAIE

SEQ ID NO: 316563 - protein, 408 aa, unidentified
MFFFGIDWSSDHHDLCILNAAGSAVSQLTFPHSVAGFAQVEAERRKLNVPAAECLVAIESAHNLLVDFLLEHDYALYIIPPQATDGYRNRQRSSKAHTDRSDAALLASILRTDLASHQRLLPNLPLTVQMARQVRFIETLRRAIQRQENQLRAILERVYPQAIGLFSELTAQINLAFLAAYPSAQEAQSLSLAAFSAFCKAQHYTRPRLIPQHYAHLCTPSPQPDPALAQAYRAQVRHLAQVLLPQVQARLETQHALQQLFAQHPDRDIFASLPGTGELLAPALLVKFGDHRSRFPTPAAVQALAGTCPVTAHSGKRRLVLFRHGCDKEFRRIAQQFARASHSEAGWVAAYWDEIRPHCASDSHAYRIVANRWLAIIWKLWQTHQLYDEAYHVQQRARRRQPKPGAAC

SEQ ID NO: 316564 - protein, 341 aa, unidentified
MARSIGVDLHKNCFTVCYMTKGGHELSEFRVDSEGIESFKGSLKKSDEVAVESTGNAGYFAREIKAKVKAIRIINPTQFKIISHSIKKTDEHDAVTIARYLSKGLIPEVRMRSKEEARIASLIGTRDKFIKLRTAMKNKVHNILNANGIVTKKEMFSSEKALDKVCRMDLDREYIFELRIVVDQIKSLNKSINEINKELNDRGRKLKGHENLTSIKGIGDTNATILLSVIGNVEDFADDKKLAAYLGIVPRVSISNETNHYGRITKMGNKVARTALVQSTLIAIRYNPYLRSFYERLKGKKGSGKAIIATSRKLLTIIYRTLKNDWVFEDFSNYKLAASNS

SEQ ID NO: 316565 - protein, 389 aa, unidentified
MLQPDKGKEEGERIAVGIDPCKEFLQLAILSPGQDVEFRKLPLLPSITEEIAKSTDPARTQIAIESYASYGRLFIHELLQKGYDIREVNPSVSSKLVDLFTEEHSDRRDAETIARALLLIPDLPKVSFSEEKLWLAKLSRLRKKIVKDLNGYLNRLHVALTESYGAVYRRIYRTLWTGKALTFFETYPTINDALGHQRRVRRVLGEKKWELVRQAGQWEEGFYLELLGREVRSLTRVIRVLQATRKEIDEEIKRIGEKDEEIRRLRTFPGIDYVTASTLLGEIGNIERFENEGCLSSYCGVSPVVWQSGTSKIKAKRRKRFSRRLKGVLYFISLSQIRINPESRQYYWRKRREGKTHWQAMKALSRQLIKIIYYMLKNKESYYRKEVVN

SEQ ID NO: 316566 - protein, 310 aa, unidentified
MTLSPTWIGIDVSKRWLDIDAPAGGICKRIANTADAIATFAATLPMDGTTVVLEATGAYDTTLRHELAWAGIGFARVNPQRARDFARATGRLAKTDALDAAMLAQMGAALKLHADPLPDPARERLGLLSKRRDQLVEMRTQEKLRRIEAADPFIVQDMDRHMQALDQAIDAVEAEIDTLVKSTPQLAQDRALIRTMPGIGPVTATVLLALLPELGQRSSKQIAALAGLAPINRDSGTSRGKRSIGPGRRRVCKAAYMAAVASLTSRSPLRASYDRLRQAGKPAKVALIALARKIIVTLNAMMKSRTPFHP

SEQ ID NO: 316567 - protein, 387 aa, unidentified
MYFVGIDISKYKHDCFIATEAGEVIKEPFSFSNTNEGFLQLLTILKSLDSSKEKIRIGFEATGHYHMNLMLFLERNNYSFMELNAALVKKFIEGKTLRKTKTDKKDAYQITMYLMSVEYKPHPKQFYHKFSLKSLCRLRSKLVKQRSFYETILTNVLDLTFPEFKPFFNGFSATSLYILNKYKTPERIANMKDFDSLRKCSRGKFSYAQFLKLKELAKNTVGVSNDILSIELETTLLLKKNIDKEINNLEDKIANYIKELNPPTLSIPGIGIIFCANIISEYGDMSRFKSADACVAFAGIEPSISQSGTENHDGKMVKHGSGNLRFYLLNAADYIVMHIPEFTEYYYKKRNEGKTHRVALSHVAKKLVRLIYKLETENIMFDSTKLK

SEQ ID NO: 316568 - protein, 347 aa, unidentified
MSITMIGLDTAKSVFQVHGVNETGKVEIKRKLRRSELIPFFEKLEACAVVMEACGAAHHWARILSSLGHEVKLIAPEAVRPFVKKRKKNDPADAAALCTAASRPDMMFVPVKSIEQQGILALHSARSLLVKQQTMLANAMRGLATEFGLTVPKGIDRLEELLALVDADKAFPEKACQVFTGLFDQRRALAESIRAIEVEIVAHARHDDTARRLATIPGVGPITASLIAATVVDIGLFKTARHFAAWLGLVPRQFSTGGKTRLGRITKTGNREIRKLLVLGATSMVYRAPQWNSVVGAWTRGVLERRPVRLVTVALANKMARIAWALMTRKEVYRVTGRVAAATEAAA

SEQ ID NO: 316569 - protein, 366 aa, unidentified
MREQQNNRHERTTIGLDLGDRWHRFCVLGASGQVVEEGSVANNRVALSELSSRYPGALIVMEAGCHSPWVSRHLEQAGCEVIVSNPRKTRAIYQHERKSDRRDALMLARIARMEPALLYPVRHGSEEAQQDLLRIKLRDSLVRARVGLINSLRFTLKSLGYTLANPSTERFHKVIQSALPESVVQIIAPSMQAIEELSLRIKLLDREIRTLAHTKYPETTWLEQIPGVGSITALYFVLKIGDPARFERVRDVGAFIGLCPRRDQSGENDPQLRISKRGDAYLRRLLVSSAQYILGPFAPPSALRQYGLALAAGGTARAKKRAVVAVARKLAVLLLTVWKNKSPYQAFPQQREKTRTHDLERLRCIA

SEQ ID NO: 316570 - protein, 482 aa, unidentified
MAKRKMSTFERLRSGKMNRKERKEWQQRLYAEDAGLEVIHPDAAGIDVGNASHFVAVPPDRDEQPVREFGSWTADLRRMAEWLKRCGIRTVTMQSTGVYWVAVQEILEREGFEVYLVNARGTKNLPGRKSDVQECQWLMKLHTYGLLRNSFHPPEEIRAVRTIWRQRDRLVKEAGREVQQMQKALTTMNVQLANAISDVSGVTGQAIIRAILQGERDPQQLAKLRDWRVAATETEIAHSLEGNWREDVLFELQQVVDAYDFHQKQIAACDVQLQRYLSALPMRNGPGAGERSTADAPSERPKKQRKHKLQKNQPVFDLAAELQRTMGVDVTAVDGVDVMTTQVVLSELGPDLSASFPSENHFTSWLELVPRRDGSGGKVLRQKSRKSNNRVATALRMAAQSLWRSDSYLGARYRHLKARLGGQKAVKAMARYLACLIYRLLTKGKAYVDRGAAHFQSKRTERELLAVRRKAAELGMEVVAVS

SEQ ID NO: 316571 - protein, 403 aa, unidentified
MNNVAGIDVSKGKSMVSVLRPFGEVVAKPFSVGHTGSELKELADYLKSLDGETRVVMEHTGRYYEPVARFLHDEGVFVSAVNPKLIKDYGNNTLRKVKTDKADSRKIARYGLDNWAELRQHTPMDTIRMQLKTLNRQQSLYTKTKTMMKNNLIALLDQTYPGVNALFDSPVREDGSQKWVDFATTFWHVDCVRNMSLTAFAERYRKWCKRHGYNFSQSKAVEVHAGAQDLIAMLPRDALTKTMVRQAIDALNAISASMERLKAEMQALAAQLPEYPVVMAMHGVGDSLGPQLMAELGDVTRFTHRNAITAFAGVDPGADQSGTHEAKSTRVSKSGAPELRRALFLVMDCLLKTQPQDDPVYRFMDKKRAEGKPYLVYMTAGANKFLRIYYGRVKEYLASLEGN

SEQ ID NO: 316572 - protein, 334 aa, unidentified
MENIALIGIDLGKNSFHIHCQDHRGKAVYRKKFTRPKLIEFLATCPATTIAMEACGGSHFMARKLAELGHFPKLISPQFVRPFVKSNKNDFVDAEAICEAASRPSMRFVQPRTESQQAMRALHRVRESLVQDKVKTTNQMHAFLLEFGISVPRGAAVISRLSTLLEDSSLPLYLSQLLLKLQQHYHYLVEQIKDLESQLKRKLDEDEVGQRLLSIPCVGTLTASTISTEIGDGKQYASSRDFAAATGLVPRQYSTGGRTTLLGISKRGNKKIRTLLVQCARVFIQKLEHQSGKLADWVRELLCRKSNFVVTCALAYKLARIAWALTARQQTYEA

SEQ ID NO: 316573 - protein, 453 aa, unidentified
MTKRKTGGHPDLKMVNPNAAAIDIGSTMHMAAVNPDTDAMPVRAFGTFTQDLHNLAAWFRSCGVTGVAMESTGVYWIPAFEILEAHGFEVILVNARYAKNVLGRKTDVSDAGWLRQLHSYGLLRGSFRPEAEIATLRAYMRQRERLTEYAAAHIQHMQKALMEMNLQLHHVVSDITGATGMRIIRAIIDGERDPEVLAAFRDVRCRSSIDTIKAALVGNDREEHVFALTQSLELYDFYKAQMETCDRRLEAAVEALTVRAEDDLAPLPKARIKGKQHNAPSFDVRAALYGVLGIDLTQIHGLGPSLALKLVAECGTDLRAWKTAKHFTSWLCLAPGNTLSGGKLLSSRTRRSSSRAAALLRLAATTIGRSDTALGAFYRRLSSRIGKQKAVTATARKIAVLFYNALRHGMTYQDQGATAYDERHRQRVLSNLQRRAKSMGFVLAPTPQTTGVS

SEQ ID NO: 316574 - protein, 343 aa, unidentified
MDHFAGMDVSVKETSICIVDDTGRIVREVKIASEPEALLSVLKNPAYDFKRIGLEAGPLSQWLFSALAEAGLPVICVETRHMRAVLKAQINKTDRNDARGMAQMMRAGLYRPVHVKTLRSQKLRMLLTHRKLLQSKAIAIDNDLRGTLRNFGLKVGMVGKVRFEARIKELVENLPDLAAMVEPLLIVRRTLREQFCVLHRRLLAIVRDDEVCRRLMTTPGVGPVVSLTYRATVDVPARFRKSKSVGAVFGLTCSKYQSGEVEWSGRISRCGDEMMRVMLYEAAQSILHSKRWSWLKAWAMQIARRRGKKKAIVALARRLAVIMHRIWVDGTEFRWTREEAAVA

SEQ ID NO: 316575 - protein, 400 aa, unidentified
MDKRKRYIRFCGIDVAKNKHVFCVIDREGRTILRSRSFTNTQEGYQRLLHSLKDIGSVRSLLVGMEATAHYWYSLHDFLVRHGYPVAVLNPIQTAQQAKKGIRKCKTDKVDAFHIATLLKNGEYKAALIPGELGMICRQLTRLRCRLVQQTAALKQLIWSRLHPVWPEYEKIFKDPFCATSRTLLYSAPTPTDLLSMRQDELSELIRKASRGKYAQAQAKKILHAAAHSAGMHRSLDGARIGIRTLLTQIEAVRPVREKLEQEIARLAEDLPAYIFSLPGINPVRAVSLFGETDPITTFEKPAQLVAFAGLDVSVFQTGQYEGSYRHISKRGSPFLRETLWNMAFQAIYQEGDIRDYWLRKMAGGLKHKAAITATSIKLCHVAWRILTDKRDYLPEGRPN

SEQ ID NO: 316576 - protein, 376 aa, unidentified
MDRATTAPADRLFCAVELSKNSWLLGIQFPDHQKASVYPIKGGDSEGLMAKLVAARDRWAKVSGKKPSIILCYEAGYDAFWLARFLKARGIDCLVVDSASMQVNRRSRRAKTDRIDLGKLLRALIAWCGGERHVWSVVRIPSVDEEDLRRSHRERSRLITERTAHINRIKGLLFAQGIRGINVKACYKTLQIDKLVTGEGRPLPPRLAQEITREIERLGLVQQQIAAIEHERDESPTTCKQTEKKRAQLLLLKGIGPTGSAVMAREVYYRQFSNRRQVAGFLGLATSPYDSGQTERSQGISRAGSGPVRATMIQMAWLWIKHQPKSAIAQWFAQRTEGQNGRIKRIMIVAVARKLAIALWRYLEQGLVPQGATLTR

SEQ ID NO: 316577 - protein, 341 aa, unidentified
MNAIGIDTHKATLAACRVDEIGSMMAEATFGNDPTGHQRLLDWIRLTDPSVVVGIEGSASFGAAAARFLVGAGVAVREVPPQLTRRERTTTRRLGKSDPDDALAIARVTAREPDLPPVRTADRTLDLQLLVEAREDVVIEMTRVRNRLHADLRSLLPGYGSRAANLVALRHQRLVGRLLRPLGGVQAELARRRLARLRAHGLEERAYTVRNAALVEGHPLLGLPGVGPLITARLVGEVGDVRRFRSADALAALAGVAPIPASSGQTQRLRLNRGGNRQLNRAFHIIALAQAAHHPPAQAYLARKRAEGKTRREALRCLKRRLVRPVFGLLQAGTHRASQAA

SEQ ID NO: 316578 - protein, 416 aa, unidentified
MQSAPTTLSSAPPNGLTCGIDWAKDDHAVAVVDSAGREVHRWTVEHTNAGLHGLLRRLARTGVAEVAIERSDGPVVDALLGGGLTVVVIAPSQLKNLRSRYGSAGNKDDRFDAFVLADTLRTDRARLRPLTPDSPATVTLPASCRARRDLVTHRVALANQLRAHLQTVFPAAVGLFRDLDSSISLRFLTRFDCQDRADWLSVNRLAAWLASVGYCGRVDPAVLHARLTAAPRGATGEHGTAAAHVTHALLAALTTLVEQIKALTEQIDEQLDLHADAHIFTSLPRSGRVRAARLLAEIGDCRARYPTPEALYCSAGAAPSTRQSGKHRAVTFRWACDKQLRDAVCDFAADSRHANPWAANLYQHAIDRGHDHPHAVRILARAWLYIIWHCWQHGVAYDPAQHKALQRLTQDHQAAA

SEQ ID NO: 316579 - protein, 339 aa, unidentified
MELYCGLDLHSRNTYIGILDTDFKRVFKKRISNNLDLILETLEPFKDQLKGLVVESTYNWYWLVDGLMDADYGSIHLANPSAIRQYEGLKHSDDKHDAFFLAQLLILGILPQGYIYPKKDRPVRDLARKRMFLVKHKTAHILSLQSLIARCSGQRISSNQLRTFTSEDLQQLLKEQHLVLSAQANLDSISFFKQQIHGLEKVIKNKLKLSQAFNGLLTVPGIGHILAMTIMRQVGDIGRFAKVGNFTSYCRCAPTQRLSDGKSKGSGNRKNGNRYLSWAFSEAAQMSRRYNQRFRRYHDRTAAQTNTIVAARALSNKLARVCYYIMRDQVVFNEELILH

SEQ ID NO: 316580 - protein, 349 aa, unidentified
MGEVSTIGVDIAKSVFQIHGVDAEGTVVIRKRVGRARVLEFFADLPPCRVGMEACATAHQWARELKKLGHDTRLMPPTYVKAYVKRGKNDAADAAAICEAVTRPSMRFVPIKSVEQQSVLMLHRTRDLLIRQRTQLINALRAHLAELGLVAAKGREGVHQLVAVVMECGDERLPSNARFACQAIVTQLHAVQIEISGLDKRITQIHRVNADSRRLDTIPGFGVLLSTAVVATMTDPKAFKTGREFAAWIGLVPRQNSTGGKQRLGSITKQGDRYLRRLLVVGATSVINSARARPYKYPWVIELLGRRPTKVVAVALANKMARIAWAVLAKGEPYRAPTRPWNAVVPAAA

SEQ ID NO: 316581 - protein, 465 aa, unidentified
MAARKPKGKRMSAQVVEDEDYQLRYERVAAVDVAKASGMVCLRLPPPEGRTRRTSRTWEVPATVPDIEAVAAELKAAGVQLVAMESTSDYWRIWWVVLEAAGLGPRLVNSSQAKNLPGRPKTDRLDAQWLARLAEMGLLRWSFVPPPEIRALRLYTRQLVNLTADRTRYWQRMEKLLESALCKLSAVVSGLAGSKSCRAMITAMINGARDPQELADMALGPMRDKRAALVRAFTGMQFGPEHACSAASYLRMITGLDGEIAALETRISDHLQAIPAAWGVDADGVAGPAGCGPDAAVLPAIARLDEIPGVSAQIAAGLIAEIGLDMSVFPTPEALVSWCGLAPVPHQSGPRNGRGKKGHGDSYARRLAGQAGNGAARTDSFLGERHKRIRSRPGGGGWKKASVAVGRSIMIIVWHLLKDPSARYADLGAGHYTAHTDRNRKTRNAKRQLEALGYDVILTPRGEAA

SEQ ID NO: 316582 - protein, 348 aa, unidentified
MGMVFVGHDWAEAHHDVYVEDGQGKRLAKARLPEGMEGVAGFHALVAPFVEEPSEVVVATETDRGLFVGALVAAGYTVLAVNPMSTSRYRERHSTSGAKSDPGDARVLAELARTDRHNHRPIAGDSDLAEAVKVLARAHQGLVWSRQRQLNQLRSTLREFYPTALAAFDELGSGDALAVLAIAPTPALGRRLSLSKIASALRRGGRQRRIEERAAQIQQALRSPQLEAPTVLADALGASATALVAVIVEVTTQISRLEAELAERFEQHPDAKIIRSLPGLGMILGARVLGEFGDDPNRYADAKSRKNYAGTSPITKASGGVPPVLRAPSLRRAESSSGRSPSAWSPSS

SEQ ID NO: 316583 - protein, 386 aa, unidentified
MHDSTNFPVPERTGIRGDCATLFVSLELSRSSWVATSLAPGSKKMSKHTLVGGDGRKLLDLLARLKTRAEQRIAAPVKVVAIHEVGLDGFWLHRLLEANGVESHVVDPASIAVPRRHRRAKTDAIDGETLLRTLMAWQRGEPRVCAMTVPPSPSEEDCRRVSRERATLLRERIQHTNRIRGLLFGQGITNYNPLHKNRRECLEELRTGDGRSLPTHVKAEILREIDRLELVLRQISEVEAERDEMLRPAEASSPAALLMRLKGIGAEFATVLYFEGLFRHFQNRRQLAAYAGLAPSPWKSGSIDHEQGISKAGNPRLRTTMVELAWMWVRYQPDSALSGWFRRRVGSERGRTRRISIVALARKLLIALSRYVTHGEIPAGAVMKPV

SEQ ID NO: 316584 - protein, 317 aa, unidentified
MTTPTASFVGIDVSKHQLDVAVRPRGETWTVAHDEAGLSALVARLRALAPTLIVLEATGGLEVALAGALATATLPVAVVNPRQVRDFARSTGTLAKTDRLDAQLLAQFADTVRPEPRPLPDAQAQELTALLQRRRQLVEMLTAEKNRLALASRRIRPQLQAHIEWLHKQIAQFDDDLRQLVRASPLWREKDDLLRSAPGVGPVLATTLLAALPELGRLTRQQIAALVGVAPLNRDSGTLRGRRTVWGGRAHVRAVLYMSTVVAMRHNPVVAAFYHRLRAAGKAPKLALTACMRKLLTILNAMLKHHTHWAPVSAQHA

SEQ ID NO: 316585 - protein, 372 aa, unidentified
MSTQTTIVADNRQHVYVGIDSHKKSWKICIIAGEQMHKPFSQDPEPSILLSSLHRKFPDATYHLAYEAGFAGNWIARWFLDHSVDCIVVNPADIPTTNKDRRQKTDTRDCRKIAEFLQRDTLTALYVPSEQSEDDRQLVRARTALVKKQTRVKNQIKAVLAFGGTPLPEKTVMGHWTIRFIAWLGGLFEDRPSRKQELAVYLEELLWIRQKILAVTRQIRELARSERFASGVALLVSCPGVSTVGAMILLSELIDIGRFASFDRLASYVGLVPSTHSSGESQRTTGITPRSSHALRTLLIESAWVAIRVDPALRAAYDQARKRMANNRAIIIVARKLLSRIYHVLVHKQPYQLNRISSETISSETIVSQRHT

SEQ ID NO: 316586 - protein, 373 aa, unidentified
MPKYSTAFGMDVHLRSTTVCALDADTGEAVTRRFPGNPWGEIAGWMDGFPGPSLAAYESGYLGFAPQRELAGLGVECVVAAVSKIPRSAADSASKNDRNDAARMAKAILAHDISPVWAPSPEVEGIRDLAGAYDGATARLATAKQRLLAFLAKRGFVYGGTTPAGNPRKYWTYDFLRWLDKVRPEDDGGVRTLAALRNEVEAAAEARADLLSEYRAAVDAGPIAAEVAALQSIKGCAFALAAAFSAEVGDFTRFRSGRQVTAYFGLAPSQRSSGDSVRLGGISGAGNALVRKLAVEGSWCYAAARHQPKLMPRDTGVPLEIRMHGRKGSERLLRRREEMLARGMPAAKANAATAAELVRWLWALGMMCREGAE

SEQ ID NO: 316587 - protein, 342 aa, unidentified
MEKTGLHCGVDLHGDNGMYGIMDEKGKRLFKKRVPNDLKEVLAALEPYREGLTSGIAVESTYNWYWLVDGLNEAGYKTRLANPAAMEQYNGLKNTDDETDAFFLAEMSRLDILPEGYIYPKEERPVRDLLRRRLLLVHQKTAHTLSFQNLVARERGEQISGSRIHQLWPEDVKQYFQDERLVLMGQTNIETIRFLDKQIKQIEKVVLGEVKLRPEYERLLTVPGIGKILAFTIMLETGDISRFAKVGNYTSYCRCVKSGRLSNQKKKGENNRKNGSRYLSWAYVEAANFIRRYCPEAKSWYQRKLSRSKQVVATKALASKLSKACYFIIKDQVDFDVKKIFG

SEQ ID NO: 316588 - protein, 430 aa, unidentified
MKSNTQNTKIEAVTENTLVVGIDVGSEFHYARAFDWRGIEFSRKPFKFSNTEPGFTEFKAWILHIQTEHDKDAVVPGMEPTGHYWFNLGKFLQDNGMKPVLVNPHHVKKSKELDDNNPTKNDRKDPKVIAGLIKDGRYSYPYLPDGVYADLRTASNLRFQMQSELTRIQNRISRWFSIYFPEYKDVYGKPDAKSGMMILKQAPLPEDIVTLGVEGVNRIWREAKLKAVGLKRAKTLYEAAEHSIGSREGATAARLEIRMLLEDYESRAARLQEIMTLIESLVKQIPMAEKLMEIKGVGIKTVSGFLAEVGDISRFDNPKQLQTLAGLAIKENSSGKHKGETTITKRGRKRLRYLLFEVAMSLVSKNEEFAQLHLYYTTRRINPLKKMQSLMAVACKLIRIFYVMLTKQVDYDPQKMISDIRRPEIYLQAA

SEQ ID NO: 316589 - protein, 320 aa, unidentified
MKDTIAQMHGPVTIGIDVSKAVLDVHLHPAGLRGRFTNDSDGHASLVSWATSHQPGRVIFEATGAYHRALETALGRAGLPLVKINPLQARRFAQACGTRVKTDPVDAEILARMAASLQPELTLIKDQAIDTLQEFLAARRALVKDRTAALNRCKGLTLAVLKRQSDQHLKQITAQIKAIDAECRKLTAATPRLKDRLDILTSIPGLGKITALALLVDMPELGSMDAKHAASLAGLAPVTRQSGQWRGKAFIQGGRAILRQAIYMPALVAIRFNPPLKAKYDALRAAGKPAKLAITAIMRRIITIANALLRDGRKWTKTMA

SEQ ID NO: 316590 - protein, 491 aa, unidentified
MSTRGKQSRKKKDPTLNARASKRHASTSHCQQGKGGQRRSELTIANPNAAAVDVGSQVHYAAVPEGRAEQSVRSFGAYSAQLEELMQWFKDCEIKTVAMESTGVYWIPLYQKLEEAGFEVLLVDARQVKHVPGRKSDVQDCQWLQQLHSYGLLRAAFRPEDSICRLRTLQRHRKNLVECGAMWIQHIQKALNEMNLHLHHVLTDISGQSGLAILDAILAGERNPKKLASLVDRRVKKSQAQIEAALRGDYRAELLFVVSQTLHDYRQMQQQIAQCDLNIEKQLATIAACTEPKHSPKQTPPPQQGAVVKARTRKRRPNDALELSLAGHLKRILGVDLTTIPGLNVLAVLSLISEIGTDMAKWRSEKAFVSWMGLSPNNKVSGERVLSSRTRKVNNRAATTLRLAAMLVGRTDTPLGSFYRRKRAHLGAPKAITATARKLGCLIYRLIKDGQTYQEPDLHTYELKYKNQILRSLRRRANGFGFDLVELPKAA

SEQ ID NO: 316591 - protein, 337 aa, unidentified
MKVSLIGIDLAKNIFQVCGVNQAGKAQFNRAVRRKDLSRFIAQFPDAEIAMEACAGSNHWGRTFMDAGHVVKLIPPNHVKPFVKGNKTDRNDAFAITEAARRPQLQTLLPRSLEQTDMAMLQRIRDRRISARNTLSNQLRGLLSEYGIVLPVGYSALRQGLNDVLEEAENALTPMARQLIADVQAEWQRLDDDIRRLDRQLSSHVAQHQDAQRLLSIKGIGEKTASAIVAYAGKGKAYRNGRHFAANLGLVPKEHSSGGKQQLGGITKRGNAALRRMLVQGAWSVLRHAEQNTDRLSRWACSVCERRGKHKAVVAIANKLARIAWSVLYHQTEYQAE

SEQ ID NO: 316592 - protein, 408 aa, unidentified
MRTEASVAQLGLDIHRKFSKVTARDGQGKIVWRQRLEHADRPRMRARLADWPSGAAVVLEGTFGWGWMSDELTAAGLDPHLASSSKLAAWRKARGMAKSNRKDADLLSELWSEQGRWWEVWLAPPEVREQREWLRYRMTLVRTQTALKNRIHAVLHRHGILREQSDLFGRDGRRFLELLIAPDDATLPDSARATLKGFLQLLDHVRRQIAAVTRQFRKQIKASPAAMRLKTIPGIAWVLSYTILAEIGRIERFADAKRLASYSLLAPVANDSGDEDDDPPLGRHVGHFGRRTLKWAFIEAAHGAVRSGGRFRAIYDRRTSGGKRDRNRGYIAVAHALCRVAYVCWKKQVDYTAEPPPRAGRRRGGRRRSHQAVVAQAAPAKATSRPELGQPESPLVAAAVVGRLQADK

SEQ ID NO: 316593 - protein, 410 aa, unidentified
MELIVERPAALDVHKAQVMACVRTPDEGERTEHVEEFSTTVRGLLVLRDWLKAHKVTQVTMEATGVYWKPVWHVLEDGFELILVNARHVKQVPGRKTDVQDAQWLCRLAEAGLLRASFVPPKPIRELRQLTRYRKAQVSERQREANRLHKALEDTGIKLDCVATDILGVSGRAMLDALVCGTTDPEVLAELAKGRMRAKIPALREALEGRFEAHHALLVGAILAHLDFLDEQVELLSEAIEVKLAPFGAAAVELLLTIPGIGERTAENVIAEIGTDMAQFPSAGHLASWAGQCPGNHESAGKRRSGKTRKGSKWLNQALKEAAMAAIRTNGSYLQALYRRKKAQGGHNKALGAVKHSIVCACWHMLSTGELYRDLGPDDFARRNPERQTQRLVAQLERLGHSVTLTEVAA

SEQ ID NO: 316594 - protein, 453 aa, unidentified
MSRKGIYRSVKIKDVSFESLASMAKEKGGEKGMTVGLDIAKKEIVVVLRWPDGSFERPISVANPLGIGELTELFCRLREGCEDLTIGLESTGTYGEAVRFAMTKASLEVHRVSGKGVSDYREVFDRVPSQHDGKDAAMIAELTAFGKGTPWPYRAPTEAEQERKRHVARLTSFQKQGQQWLGRLEALLARHWPELTSLLALDSATLLNICLHYGSPAKLASEEQSRAKAQLRKWGRSKLSYSKIQEVLTSARFNVGVPLGPGEEAWLKEVVGEIQKALVEVRVSRRALTKYAKSDPTMKNYVEKVGGPTLCVIWTTVGDPRKYSSSGAFLKALGLNLKELSSGNHKGVLAITKRGPGPARKALYFWALRAIQQPEIKAWYNRFTKVGRGKSDANGYRKMKGLVAVMRKLARSLWYVCQHDLPFSYANVFPEKPLQKRKKRRTRRRTQVPVPTR

SEQ ID NO: 316595 - protein, 359 aa, unidentified
MTSMPTLVPPRRVIVGVDTHKDVHAAAVLDERGALLGTALFAADRAGCRDLIDWSTDYGAPLRFGIEGTGSYGRGLAAAVRRGGHDVVEVARPNRADRHRRGKCDVFDAENAARAVLAGQARAIPKADEGIVEMIRHLKIAKDAAVKARSAAMQSIKAMLITAPAELREALEPLPDMALLRRCAALRPGELTSVTATAKHSLRAIAQRWQHLHAEITSHQHQLKILVDQLAPQLSTAVGIGPDTASALLIALGQNAGRLHSEAAFAKLCGACPIPASSGTTTRHRLNRGGHRQANAALHRIVIVRMKYHDPTRAYVTRRTTEGKTKPEIMRCLKRAITREIWARTQHLRQTTPQPLDAL

SEQ ID NO: 316596 - protein, 368 aa, unidentified
MKQVTTYVGIDAHKKDLFIAMLMGHEPKPVTWQLANEPNAVRRLVRKLEREAPGAVRVFYEAGPCGYALQRQVTTSRVSCDVVAPALIPRKPGERVKTNRRDARKLAELGRAGLLTAVQPPTAEDEAVRDLARARDDAREDLQRCRHRLGKLLLRRGLHYVGRNWTRAHRQWIERVTWTHAAERIVVDDYLLAIDHTEARLLELDARLAEIAEREPYREPVGWLRCFRGIDTLTAMLILAELHDFRRFASAPALMAYLGLVPGEDSSGEKHRRGRITRTGNALVRRLLVETAWHYQHRPSVGTALTRRRKGQPARVIAIADKAQQRLCRRFRKLAAEHKPPPKIAVAIARELTGFLWAALQREPATVN

SEQ ID NO: 316597 - protein, 418 aa, unidentified
MVSQATEYSAHIGIDWADKKHDYCIQGGNKSNREFGILTHSPDKINDWVQSLHQRFGGQLAISIELTKGPIVYALQKYNFITLFPINPLMLAKYREAFTPSKAKDDPTDAELALDLMLNYPNKIKPLSMQSEQMRKLMYLVEQRRRLVEDRRRFSNRLIYALKQYFPQLLEWFSHRDSELFCQFINRWPSLQKLKRARANTIRNFFKKASARSVPLIEQRISAIKKAQYITEDPAIIESHQLFATSVTAQIIITVRAIKVFDDEISKLFHTLPDANLFESLPSAGPCMAPRLLVAFGENRDRFDNASQVQMYAGVAPVTVRSGQKKWVHWRWQCSKFLRQSFIEWTSKTVYSSYWAGLYYAQQRKKGNSHQSSIRALAFKWIRILFRCWKTRKPYSETKYLKSLRDKKSPLLLLETVD

SEQ ID NO: 316598 - protein, 412 aa, unidentified
MRRIRSRVAGLDVHRDTVVACCQVAHPNQSVEVTKQSFSTTSKGLVELAAWLRDAGVETVALEATGVYWKPVYYALEGLFEDLWLCNAQHVKNVPGRKTDLADAEWLADVAAHGMVRPSFVPPPEIRELRELTRYRKTQVQARAKEIQRLEKELQDAGIKLTSVASGVWSMSSREMIEAMINGERDPKVLAAMAKSRLRAKIPELEEAFSGHFGSHHATVARQVIDHIDFLDRSIATLSADITKRLCPFEPAVTILCSIPGVSERTAQVMIAEMGVDMTRFPTSGQLCAWAGVAPASHESAGKRRPAGTRQGSTSLQIALVEAAKAASRSKGTYYSAQYSRLAKRRGPNKATVAVAHSILDVAWHLLTNGTLYIDPGANYFESRHDPHVEAKRLQRKIEALGFEVNLTPTAA

SEQ ID NO: 316599 - protein, 346 aa, unidentified
MLYAGLDLSRKRLDVHVLRDDGTTALVTAVAPDASALRTLVRRVAAEGGPVRAAIESMNGARFVHDSLEFAGWDVLIADAQRVRGLAPLAAKTDKIDARVLAELTRRALVPEIWLPTPEVRAERERARFRLHLVRHRTALKNRISATLMTFGHPCPMADLFGVAGRKLLDSLALPEPWQASLSESLALVDDLTARVDALEVELRDLGADDPSMQLLMTVPGVGWVLAYTIASEIGDITRFATPKKLAGYTGLCPLVRQSGPKDRRGPLAKNGPKYLRWALVEAATHAARDVRYVERYERTKQRLGRQRGAKVARVDLARQLAEAIWHVLTKNEPFHPAGPAIRLVA

SEQ ID NO: 316600 - protein, 309 aa, unidentified
MTAVGIDVGKAALDVAIFGEPKVHRFANTAAGIRRLIRLLHDRENVRVVVEATGGYEEAVLAACAESGLWIARVNPRQARHFARAIGQLAKTDNLDARMLAEMVQAFHARLRTHVPLEPWQAELRGWLRRRHQITEAIQRTRQQLAMTLPAIRPLMKKTLAALQREQTLVDTAMKQLLQVHATPAMRSSKGLGPMFQASVLALLPELGQLRRQQIAKLVGVAPLNRDSGQSEGKRRIYGGRAEVRVALYMATLSAVRWEPVMKAHYQQLRARGKVAKVALVACMRKLLTIVNARRRDELRGVELATPTT

SEQ ID NO: 316601 - protein, 379 aa, unidentified
MDHAITGTLAKTVLHGALELSKNGWLLALQFSDRAQPSLYPIRGGDTEGLMTKLMAARDRWAKVSGKAPSIVLCYEAGYDAFWLARFLKARGIECLVVDAASVQVNRRARRAKTDRLDVRMLLRALIAWDHGERHVWSVVRVPSVDEEDLRRSHRERDRLVRERTAHINRIKGLLFGQGIRGINVKSKYKTLQIDKLVTGEGRPLPPRLASEITREIARLALIQEQIVALERERDQAPTPCKVTEKKRVQLMCLTGIGPAIAAVMTREVYYRQFDNRRQVAGFLGLATSPHDSGDVERSQGISRAGRGQVRGAIIQAAWLWLKHQPKSAITRWFVQRTAGHSGRIRRIMIVAVARKLAIALWRFLEQGLVPQGAMLANR

SEQ ID NO: 316602 - protein, 341 aa, unidentified
MQITTIGLDIAKNVFQVHGIDGDEKVVVRKQLRRSQVIRFFQALAPCLVGLEACATAHYWARELMKLGHKVRLMPAKDVKAYVKRNKNDAADAAAICEAVSRPTMRFVPAKSAEQQAELMQHRARDLLMRQRTQLINAIRAHMAELGISAPQGREGIKQLLAITAADEDTRLPADARASLIVLAAQLQAIQTTIGSLERRIVARHRSNQDSKRLQTIPGIGVIGATAIAATVTDPTVFRSGRDFAAWVGLVPRGDSTGGKHKLGPISKQGDRYLRRILVGGAVSILRRAQLNPQRYPWVTRLLARRPFKVVAIALANKMARVAWALVAKGGIYRIPRLAAV

SEQ ID NO: 316603 - protein, 363 aa, unidentified
MVLKPTNGLGRKEPNDDHYGSRFHPEFQQIASVDTDTGEFQEKRLAHPAEAERFYRAVAGEKVRVGMEASGHARWFERLVTELQFELRIGDAAEIRTKRVRKQKTDRQDAQLILRLLLEDRFPQIWVPSSENRDLRQLLWHRHRMVQARTRIMNQLQAVALNEGLRCKKKLWRERGRQQLESFRLAPWASRRRRDLLELMDRLNPTIAELTQAVEYEAEKCPQAQRLRTHPGVGSLTALAFVLIIGKAERFSCGKQVASYLGLAPLEESSGNRRRLGHITKQGSSMLRFLLVEAAQVTVRSDPQWRSRYFHLMMRRGRKTAKLAMARRLAVSLYWMWRKGWEYEQFKKFGSHAGEPGNRHGVE

SEQ ID NO: 316604 - protein, 343 aa, unidentified
MQCKTIGLDLAKNTFQVCGVGEHSTPIFNRKLKRNQLVQFFAQQPPTTVVMEACYSAHYWGRELAKLGHQTKLIPAQHVTPFVRGNKNDHNDALAIVEASQRPHVRFVPVKSEYQQEILSLHRVRERLQRNRTSLVNQIRGILSEFGVIAPLGVKHLRAKLAHVIGDTSCSQGLRNIVANAYVELLDTERRIEDIEQRLKAFLVEHPCRDIIMSLPGVGLINASAFLASIDKGQAFQSPREFAVWLGLTPQLYASGDSHRMGGITKRGDRYLRTLLVHGARAALSRARNKTDALSVWGNQLVQRRGYNKAVVAFAHRLARLMWILLQRNECYQPQPVLEACQG

SEQ ID NO: 316605 - protein, 410 aa, unidentified
MEVLYPKCAGLDVHKKTVVACVRIQQGAAVEREVRTFETTTSGLLALSAWLSEKGCTLVAMEATGVYWKPVWHILADGEFELLLANAAHVKNVPGRKTDVNDATWLSELAAHGLIRGSFVPDRPTQELRSLLRTRKQLVRERSSHTQRLHKTLEDANIKLDSVISDVLGVSGRRMIEAMIAGQTDPAALASLADRRIKATPQELREALRGRLTPHHRFMLQLHLEQVDALDRAIARIDQEVVADLDSFREATQIVRTIPGFDDLSAQSVLSEIGIDMSRYPSDGHLLSWACICPRNDESAGKRRSTRMRKGSRWLKATLFSCAWAAARTKGCYFQAQFHRIKARRGAKKAIGAVAASLLRTIYHMLKDGTLYQDLGPDHFDRRHKTASTRRLVQRLQNLGFAVQLTPATA

SEQ ID NO: 316606 - protein, 440 aa, unidentified
MSRVIVGVDPHKKSVTIEAVDEQGKKVATGRFGTDSTGYRLMLRYVRDQWPQRRWAVEGANGVGRPLAQRLLANGEVVLDVPAKLAARVRVFDTGNARKTDATDAHAVAMVALRTPRLNRLTFDEELIALRLLTDRRDELSHRRVQTVNRLHRLLAQLIPGGAKRDLSALQAKRLIASVRPRTLVGKTMRRMAVEEIGDLVAVDAKLKAIKKELRAAVRARGSHLMDLYGIGPAGAARILSDVGDVARFPDRNHFASWTGTAPLDASSGEQIRHRLSRAGNRRLNHVLHIAAIVQIRHDTEGRAYYRRKLDESKTPMEALRCLKRRLSDAVYRQLVADAVPTAAAVIEHEAGPGGHSGATPQSSAADLSTPVVGSSDKPQPGPAHPTLPAQRSRSTPHAASAASPSRRRAGAVKVERPTGRTTLTATSAGAHSKATSPRP

SEQ ID NO: 316607 - protein, 400 aa, unidentified
MISVGIDVSKEKSTVCILKPYGEVVSRPFEVCHVEKELSELTSMLLRLNDDIRVVMEATGIYHLPVLSYLKEKGLFVAVINPFEMKEYRCQGLRRVKTDKQDAITISNYGIDHWYRLKNYEAEDSVYAELKLLGRQYRHYMRMRVESVLELTHLLDYTMPGIKTLLKGWNETNGKDKLGDFAEEYWHYDNITKKPEEQFIESYLKWAKEKGYHQSQDKAVKIYALAKEGIPTVPSDTPSTKMLVQEAVRVLREVDNTLMTILTQMQALAKSLPEYPVVRAMGGVGNVLAPKLIAEIGDVRRFHSGKALIAHAGIDAPPYQSGQFIGTERKISKRGSSSLRKIGYEVMRCLKTHKEPEDAAVYRFILKKEKEGKSKRGAKIAGLNKFLRIYYARVMEVYQN

SEQ ID NO: 316608 - protein, 337 aa, unidentified
MDYFAGLDISMDETHVCVLDREGVVVYESKSESTAAAIAIELSKAPSCRRIVFETGRMAPILFHGLSQLSLPVVCVESRQAYQALKSLATHKTDRNDARGLAHLARTGFFKPVHVKSLQAHALRSLISARKKLVGQRVTLENQIRGLAVVFGVRLPRALATAFIDNALRASEGIAGLSAAMRGLIAARTAVMTAVAAIDADIRRMTRASAACRRLMTIPGVGQLTALAFVAAIDDPSRIRRSRDIGAYLGLVPRRYQSGEVDYTGGISKCGDRRVRTLLYEAANVMLTRYKGPLKLKDWAFAIAKRSTMRTARIALARRLAIAMHAMLHDGTEFAPA

SEQ ID NO: 316609 - protein, 349 aa, unidentified
MNFYTNTHPYYCGIDLHTRLLYVCIIDNENNILVHQKIDDSPDKLLALLKPYLGNIVVGVECMHCWYWVSDFCEEHNIDFILGHALYMKAIHAGKTKNDKIDALKIAKLMRGGNFPLAHAYSKEHRSIRDALRRRTHIMRMSAQLKAHVASTVSQYNLPALETRLDLRNSPDREKMHHFFPDEAVQKSMDLNLNIIETMVSELYKIEHYVKTQAQSHCATDLHILKSFPGIGKILSLTILYEVGDIKRFPSVQKFASYSRLVKCKAESAGKTHGTQGNKIGNAHLKWAFSEAAVLYLKGNDNAKRYLAKLQKRMSKAKALSALAHKIGRCVYFMLKNQQVFDEERFLNG

SEQ ID NO: 316610 - protein, 364 aa, unidentified
MIAYERSTLVNYEKYIGLDVHQATISVAVMDSTGKLIMESILETKASTILEFLGGLRGTLSVTFEEGTWAAWLYDLLKPHVAHVLACNPRKNAALNQGNRNDKIDARELANRLRLNDLKSVYHGENGIRMLRELARSYLTIVKDLTRVMNRLKALYRSWAIPCAGRDVYYTRHRSQWLAKIREAGPRRRAEQLYQQLDMLQHLRQQARRELLRESRKHSIIAKLRQIPALGPIRCALAVALIQTPHRFRSKRQLWKYCGLALETRISGEYVYVQGERRRSKKQLSIRGLNKDHNHDLKGLFKGAATRASVMPGPFQEFYQRSLAKGIKPTMVRLTLARKIAAITLTLWKKGESFDVQKLKSQAA

SEQ ID NO: 316611 - protein, 321 aa, unidentified
MIVRLTGSSEVLETVRVDNDPLSVVRAVMHDDPNPEVALEATYGWYWAADLLQAEGATVHLVHPLGLHWDSRRVKNDERDATELAKRLLRGDLPEAWIAPPELRELRELVRYRAKLTALRTSAKAQVHAVMAKEGVLPTYGRMFGPAGQRLLDEMPVEGVYRDRVESLRHLLEIYERELVLVESHLSRRLKGHQGFPAIQAIHGVGPIMAAIFVAEIGDASRFPSARHLCSWAGITPSHRESDVKVHRGHITRQGNNLVRWAAIEAVARYHGGAPIEATFERVAKRRGTMIARVAAARKLLSLVYYGLRDGEIRCLSREAS

SEQ ID NO: 316612 - protein, 421 aa, unidentified
MRKADTRKVKVVKDNTLIVAIDVGMEMNHGYCTTPDGRDIKPFKFDNTREGMDKLWGMVMASKNRFQCEEIIVGYESTGPYGEPLVHYLMKKQVMLVQVNPIHTKRVKEISDNSPLKTDDKDPRVIADIIKLGRTLSIVVPEGDAAYLRRLNNSRERHVKERTALVNQLQQLVFLLFPEFKKVLKNIKCRTPLYLLNKYPTPEAISVLGKDALGEEIRKKSRGKFREQHADMLINLAKNTVGIREGVAGISMDIRHILVQLEMLKSLITEIENEMEIALGRIPYSSKLLSIKGLGIVSVAGIIGEIGDFNKFQTQGEIMKLAGLDLYEISSGKMKGRRRISKRGRSLLRKILYYAAIQTIRKNGILHDYYTRLTDRGMKRIMAIVAVSRKLLGIIYAIVRDDSEYIINFGSIKRQVIKKAA

SEQ ID NO: 316613 - protein, 482 aa, unidentified
MKPKPQEKTSKDSCRPKPGHWNEMNRKQRRETMRKIQSDDLSLEVVHPDSAGIDIGNESHYVAVPPTRDSQPVRRFGCTTAELKEMAQWLKQCAIRTVAMQSTGVYWIAVYDILEAAGFEVYLVNARETKNLPGRKSDVQESQWLMKLHTYGLLRNSFRPSQEIRTMRTYWRQRNDLVQAAGRHIQRMQKALTQMNIQLANVLSDVSGMTGQAIIQAILAGERDPHKLAEFRDPRVKASKHEIARSLEGNWQEDLLFVLKQEQDGYEFCQKQMLECDRQVEQYLQQREDRSKGTSLPEEKRKGRLKKKKGNAPVFDLRGELFRMTGADLTQIDSIDIMTATTILSEVGWDMGKWETEDHFVSWLRLCPDNRISGDKIVGKGRLPTKNRVSIALKMAASTLRRSNTYLGAQFRRFRTKLGSPIAIKAMAAKLARLVYRMLRYGMKYVDRGAKFYETQHRALQIKQLKWKAAKLGFQVVQAPAA

SEQ ID NO: 316614 - protein, 341 aa, unidentified
MKQEISVLGIDIAKRVFHAVGMENRGPVVYRKRLSRHDLMPFRAKLPPVRIGIEACGGAHYWARRFWAYGHEVQLMAPPCVKPYVKSNKNDSRDAEAIAEAVTRPTRRFVPAKDVDQQDIQALHRVRERLIGERTALVNAVHGLMHAYGMVMPNGVAKFRQAVVGKLAAEKDKLTPLSQEMLWKLVEEFAALEKQLAYDQEQLAALATTHPACQRLMTIPGIGPLTATALVAAVSDASAFKNGRQFAAWLGLVPRQYSTGGQARLLGIRKRGDSYLRKLLIHGARATLRWVGRTTDRRSQWMRQLVERRGKNRTAVAIANKNARIVWALLTSHQVYEPATG

SEQ ID NO: 316615 - protein, 557 aa, unidentified
MNASASLAGGQPDVAAIVRPYGVGLDCHSRFVSVCVLCQVGGEVLRYEAEFSTEIAQLAEARSWAMEKLAAHGIAHEPFTYVLESTGCYHIPVIHVFGGRACVVNPLLAGPYRRKTDRLDARTLAYHGMSGLWPISYFPSTDVIAFRVLVLRRRQLVRERTRLGNQVNNILLRFGHTLGSKGSLLTGELRGIAEDLCRGQLRVAHPCVSSVPMPATIGREVCAIYERWDQLRGLIASVEKEIVSFAEGMTWETFESSLPGKEMLKLLRTVPGVGPVTAAVWLAEIVTPRRFPSPKALTAYIGCDPSLKVSAGKVTEHVKRKGNGNMHACLVQTAQSLVSFRREAFGIWGYSIACKHAKGGWQKAVGAVARRVGLGLYWVQRTGTPFTYDLYNLTVRRETLQDEPLENLPFSDRVKRLFVIYSVRTTHDLVDGAENGLLKKRGFGPVAKKEIVSWLQDVRVGRKQKVPTSNARRKGRQASSPTKGCSSAGGSLPGTAANGRPTRAKARQSAIPTASSPESTSSSSTLGTKSQSRSDRTSRKSPCKSARSPAETGRKQG

SEQ ID NO: 316616 - protein, 352 aa, unidentified
MNYSQTIATPKLFIGMDVHKKSWTVHFKTDLFDYKTMNMPAEPGCLYEYVQKHFSGHEVNCCYEAGCCGYWIARSLQQFNWKVLVVNPADVPRTHKQDWQKTDKIDCRKLCEHLQKNNLHSIYIPDEQQEQLRSLFRRREHLSRQLRTIKNHIKSQLLYYGIKLPQQFDNPNWSHEMKQWIDSISWKYVTASSAMHSRLKQLDFLWREQLDISNELRAYCRKHHKKDYYLYKSVPGIGGITASAIIAELGDIRRFSRMDELASVIGLVPGIYQSSENNISLGLTRRSKSQLRSLLIEAAWVAVRTDMVLQSYYRKHAVKEPNKAIIKVAHKLLCRIRAVISSCKPYQIGMVK

SEQ ID NO: 316617 - protein, 332 aa, unidentified
MTFKEWILDLKERHEKDKVVPGMEPTGHYWFNLGKFLQDNEMKPVLVNPHHVKKSKELDDNNPTKNDRKDPKVIARLVKEGRYMIPYLPEGVYADLRTASNMRFQIQSELTRIQNRISRWVNIYFPEYKTVYGKPDAVSGMMILKQAPLPEDILTLGVEGVNQIWRDAKMRAVGKARAKTLIEAAMHSVGAKEGTMAERMEIRMLLEDYESRNNHLQEVMTLIEELVKQIPMAEKLMDIKGVGIKTVSEFLAEIGNVSRFSNPKELQKLAGLALVENSSGKHKGQTTISRRGRKRLRYLLFEVAMSLVAKNPEFRELHNYYTTRRLNPLKKM

SEQ ID NO: 316618 - protein, 376 aa, unidentified
MMGTPSAQTLVDMGVSKSFRELEEVPLMTMVGGFDVHRKQITFDYVDDDGLVHWGEIRPATRKTLRGWLGERCPSGDAEFALEGCTGWRYVVEELAMAGVVAHVGDPAEIAGLRGPKKRAKTDRADARLLRTLLVEGRFPESWIPPAHVVEVRTLGRLYCALMEERRAWQQRIHAQLFHQGCPPITALLSVAGRDALAGAELSGVGRQYVDAALRRIDELGAEIVPLRAQLVNFARHQRGCRALQARHYGIGWLCAAIIWAEIGDARRFSSSDQLVRFAGMDVTVYSSDAKRSPGHLSRQGSPELRWATFEAAKCAARRGSPDYGYYHKLAVKHDGHNGKNPTLAVERKILRRCYHTLRELGDDALSPPQPLREAA

SEQ ID NO: 316619 - protein, 401 aa, unidentified
MSRGQRRRTARPSPPPVLNPHAAGIDIGATEIYVAVPLDRDPQPIRRFGTFTQDLLAVATWLTQCGVTSVAMESTGVYGIPLYQILDTRGVEVCLVNARQVKNVPGRKTDVQDCQWLRYLHAVGLLRGSFRPPETVCAVRSLLRHRDRRIKASRETIAKALVGEYRPEHLFTLRQSLDSYRHYQRLIEACDAHVQALLTAFESAIDPALLPIPRATTSHRKPQGNAPRFDLRTELYRVLGLDLTQIPGLNTATVYTLFAELGPDLAKFPTSKHFASWLGLCPDNRISGGKILSVQTRHVKHRVAQALRLAAQGLSHSASLLGAYFRRMRAKLGAPKAITATAHKLARILYHLLTTRQPYAETRLAAAEEHHRHRTESRLRAQARVLGFELVPITPLRGEVS

SEQ ID NO: 316620 - protein, 351 aa, unidentified
MEGYAGRQYIGIDLHRRRSVIVRTTDTGEALEAVQITNSPLALAEVMKRAGEHPEVVLESCYGWYWAVDVLQELACQPDVHLAHPLGVKAFEYRRHKDDYRDAADLADLLRMGRLPEAWIAPPAVRELRELVRHRAKLVAIRSNCKAQVHGVLAKCGVPVAMSDLFGVGGTELLDGLDLPKPYLARVASLRRLIDLLDFEIDIFAKLTRGQLARDPGYIAVQTIPGIGPILAAVLVAEIGDVHRFGTAERLGCWAGLTPKHHESDTKVRRGRITKQGSRLVRWAVVESVQRLPKHTVLGAFRDQVAARRGTNIGVVAAARRQLEYVYYALRDHHVRGLQPRPTAPTAAAAS

SEQ ID NO: 316621 - protein, 425 aa, unidentified
MPERRLVGIDLGITSEHTACVTRADGSQICRRRCRPTVDSLAELEQAALAGAPAGTRLEVVIERPGPAWRRVAVYFVRRGHLVYRVSSAKAADLRRFLSRHAKSNSIDALTLAKLAYLDPAGLTPLDLGDQEQAVLDRRVRACHRLTRLASEHKTRLKDLVRQLLPDSPLKDALNLADLAVLERTGANPHRLVRLGKARLTSLIATASHGQLGELRAQRWLDAARSALALFADHPALAFDDLAEEIKTEVRLLRATQAELDAHASARDKAYARVDPDALARSLPGFGEVGAPSLVAALGSPGRFPSGRHVRSFSGLTPKSSETGETDRKGQSISKAGPNRLRTTLVLAADHARRQDPQLARVYYLQMTQRGACHTKALCVVAAKLVERALTVLQRRRPYQLRDTDNRPVSAEQAKAIIAERWTVP

SEQ ID NO: 316622 - protein, 373 aa, unidentified
MYYNTLFVGMDVHKENFTLCCYDMMQDKIFYTQKLEPDYIQILKYLTFVRKALRKEVDFVCGYEAGCLGFTLYHQLTQHGVNCVILAPTTMLKPAGKKKIKTDKRDAALIARCLASNNFSPVYVPTTQDEEVKEFLRMRDDHKLALKKVKQQILAFCLRHGYSYTATKNHWTAAHIAWLRSLKPEGLYAEILSEYLLTFQTLSDKLERLDQRIEELAAMESYREGVKKLSCFLGIKTHTALATMVEVGDFQRFASANQFASYIGLVPGEDSSSESVNRLGITKAGNTHVRRLLVEAAQSYTRGQVGYKSAALKKRQAGNTPEVIAYADRANERLRRKYYKMVLSKSKRTNVAKTAVARELSCFIWGMMTNRIA

SEQ ID NO: 316623 - protein, 320 aa, unidentified
MRNTVGLDISKLTFDATAIVGNAEYSAKFDNDSKGLNQFSDRLKSLGCQNLHICMEATGNYYEEVADYFAQYYSVYVVNPLKISKYAESRFKRTKTGKQDAKLIAQYCRSAQESELVKRQKPTDEQYRLLRMTAAYAQIKSECAAMKNRHHAAKDEEAAKAYAQIIKAMNEQLEVLKEKIKEQTEKPNCKEGVKRLETIPAIGRMTAAVLFHHLTSSKFETSNKFAAFAGLSPQQKESGTSVRGKGKLTKFGNRKLRAVLFMPAMVAYRIRAFPDFIKRLEEKKKPKKVIIAALMRKLAVIAYHVHKKGGDYDPSRYKSA

SEQ ID NO: 316624 - protein, 340 aa, unidentified
MHKSSMEVFLGCGIDVSAAQLVVALEGEAGRWLQRSFPNRAPGHQALIRWLQKTGVRVRVCLEATGRYSLDLALALHAAAAIEVAVLNPKVVHRFATTLCRSKTDPADAQVLAEYARRMPFQPWHPPQAAALELRTLTRHIAALTRQHTQQSNRLHALSASRTGSRWVQQDLKRSLRDLDRRIEKMRRAALALIAQDDELRPRFALLLSMPGIGEISALHLLGELALLAPGLSVRQWVAHSGLDPAHHESGSSVHKPSRISRAGNRYLRRALYMPALVAVRHDPHLRAFYQALLARHKAKLQALMAVARKMLHAIFGMFRGQSEYDGSRLFPALALASAA

SEQ ID NO: 316625 - protein, 400 aa, unidentified
MNAVGIDISKGKSMIAAITTDKTVILPPGEFAHTEEGLNKMIEKIFSLSGEVRVVLEATGHYHEPVAAKLVNAGVFVSVVNPVLVHEFGNNTVRRVKTDKKDALKIARYCLENWDELREFLPQEMIRRQLKLFSRQYNLSIKTIRALENNLIALLDKTFPGLNKLFASRKRKDGRQKWIDFAEKFWHVELITNQSEKSFFDEYESWCMASGYQFKPSKARQIYTHCAKVLTTLPKNTNTGLLVTTSAKQVNGMGESLALIKSELTRLAALLPEHETVISLYGVGELTASQLIAEIGDVRRFTKRGCLTAFAGVDPMPKQSGKYDKKSNPTSKRGSPSLRKTLFQVVSTHLKHSPENEVIFQFIDRKRAEGKPYFVYMTAAANKFLRIYYAKVNGFLCNSA

SEQ ID NO: 316626 - protein, 353 aa, unidentified
MAIVAEQYAFVIGVDTHAATHSLALVSAATGGVVDQAVFPNSPAGCDRALSWISRGVAGQSALVVIEGVGSYGAGLARSATDVGLLVAEPAAMTPGQRRGVGKTDALDAVRIARSVLAVESSRLRWPRAEGQRVALRVLVVAREQMTAERTRVINALTALLRTVALGVDVRKALAHSQFKVIAGWRGRQEDPVTATCRQEAVRLAKRIVALDGELAENRKALDVLVTQAAPELCALPGVGSVVAATVLTAWSHPGRVRSEAAFATLAGTCPIPASSGNTVRYRLNRGGDRRLNRALTTVVIVRMRTHAQTRTYVARRRAEGRTTKEIMRSLKRYITRQIFRTLAAAHPTPAGA

SEQ ID NO: 316627 - protein, 464 aa, unidentified
MTDPEKGSKRKKPTKAVPSALPVLQPMVAGVDVGSTQHWVCGPARADGAPNVRVFGTTTVQLNELADWLAELNVRSIAMESTYIYWIPLYELLESRGIEVVLVNARQLHNVPGRKTDFSDCQWIQLLHSCGLLRGSFRPTEAITRLRALHRQMANFVVERSRCVQWMQKSLDQMNVQVHRAVAALTGTTGMAIVRAIVAGERNPARLAMHRDRRCHKSEEEIARYLTGTWREEHLFNLAAALRLYDSLQETIASYEAHLLEQLKALQPPERQQEDVPRHPNPTKERAIRNRGEQQTRATLWRFAGVDLTRIDGISTGAAQIVLTEVGPNLAAFPSEDHFVSWLRLCPRVPISGGKPLKKRRNGLGANRIAAALRMAAVTLQRSKTALGASFRRVARHKGAAVAVFATARQLARLIYRMLRYGQDYVDVGEKAYEEKFQARRLAGITEAARSLGFTLTKNEVATS

SEQ ID NO: 316628 - protein, 427 aa, unidentified
MKKDISKTTKTQKQGNGKRKQLRETKRNVAALETAKKRKSKQRGVEQEVKQGHGNANDPAEEGQATVEFRAGEGEGYTIGIDLGDKRSRYCILDKEGKILRESSVATLPAALKTVFSKLAGCRMAMEVGTHSPSVSRLLTALGYEVIVANAREVPLIYKGRRKNDKLDAEKLARLARLDPKLLKGIRHRGAEGQGDLLLIRSRAQVVETRTGLMNMVRGLVKSRGERLPECTSEGFVVELLEGVDEAAVLALKPVMVLIEQMTETIKGYDKQVEEMAKKHAEIARLDQVKGVGPLIAATYVLTIEDPERFGRSRDVGGYLGLVPGQSDSGESQPQKRITKAGDGYLRYLLVQGAHYILGPNGPDTDLRRWGQKLGSSGGDRGKKRAVVAVARKLAILLLVLWKTEAKYEPLRNSDKQEKQAKQKVAA

SEQ ID NO: 316629 - protein, 331 aa, unidentified
MNYKEIIGIDVGKQNNELRIHSNQKNCDFKNTWAGCIKMVKWVLKNTSFEKQEILFVFEHTGIYTYHLTCYLQENEIPFILVPGLAIKRSLGITRGKDDKIDAKKIALYGYRLKDELTPVELPSQDIQNIKNLLSLREQLVKQRAGYKARVGEMKPFLKKKDNKVLFQVQEKMITDFGLQIDKVENEIDSIVKSSKELKRLYGLATSVKGIGAQTALFLMVFTNGFTQFSTWRKFASYCGIAPFPNKSGTSLRGKTKVNNLANKKIKSLLDQCAKSAIQHNQEMKIYYQKRLDEGKSKMSTINIVRNKLLSRAFAAINRGTPYVDLLKYAA

SEQ ID NO: 316630 - protein, 312 aa, unidentified
MAILSFCGIDVSKDRLDVVVLPEGRFCSVSNDAAGWAELVARLHPLAVSAIGLEPSGGYERGIIRALLAAGLSVRRINPNKLRQFARARGVLAKNDRLDARLIAEYVAIMPTRVVQRDDAVERLAEIVTMRRQLCDEHVAVENQAAHLEDAMLRRLSKRRLIRLEADIRLLDKRLAEMVATNAAFARLYELLTSMPGVGPVLAFTLIALLPELGKMGRKQIAALVGLAPYDFDSGKLRGHRSIYGGRMPIRNVLYMAALSASRYNPALKTFSNRLAHANKKSKVIIVAVMRKMITTLNAMLRDNAVWQPQSN

SEQ ID NO: 316631 - protein, 334 aa, unidentified
MENIALIGIDLGKNSFHIHCQDRRGKAVYRKKFTRSKLIEFLATCPATTIAMEACGGSHFMARKLEELGHFPKLISPQFVRPFVKSNKNDFVDAEAICEAASRPSMRFVQPRTESQQAMRALHRVRESLVQDKVKTTNQMHAFLLEFGISVPRGSAVISRLSTILEDNNLPLYLSQLLLKLQQHYHYLVEQIKELESQLKRKLDEDEVGQRLLSIPCVGTLTASTISTEIGDGKQYASSRDFAAATGLVPRQYSTGGRTTLLGISKRGNKKIRTLLVQCARVFIQKLEHQSGRLADWVRESLCRKSNFVVTCALANKLARIAWALTTRQQTYEA

SEQ ID NO: 316632 - protein, 312 aa, unidentified
MPAKLPPTYVGLDIAKDQLDYCLDETQEGHCAHTPEGRAQLIQILRTLPSPRVVCEASGGYEKLIVAELLQAGIEVCVVQPGRVRAFAYAEGLMAKTDRIDARLLRRFGEKITLRLVVPADAATTTLRELLEHRRQLTTQLTEVAGRLPLAGPTLGKLLKTQQQFLEKQIDQVEKLIAQHIDQDPELKKKSTRLQQIKGVGPVLSATVLAYVPELGQLESAQLSALIGVAPFPDDSGKNRAPRHVRGGRAQVRHVLYMAAISASRSNPILAEFYQRLHAKGKPAKVCLVAVMRKMACLMNKLIQDPDFALAR

SEQ ID NO: 316633 - protein, 324 aa, unidentified
MSDSVTVGIDVSKLTLDVHVSPAQLRQTVSNSDSGFAELKTLLSLQQVSLVLLESTGGYEDAVVCFLQSLGYDVSVINPRQARDFARSMGRLAKTDRIDAELLAQLASVIDSRPDRERFVKKITDDSRRKLACMVARRRQVVNLISTEQQRKSAASVYSTDSINKVLSFLRSELKNIDADISLHVRSHFADISGLLASFKGIGPATIGVLLGEVPELGRLNRRQISALIGVAPFNRDSGVMRGRRTVWGGRTMVRNALYMPTLSAVRFNPAIREFYTRLISQGKPRKLAQVAAMRKLLCIINAMLSSGTMFNPALHLHSVQEAQ

SEQ ID NO: 316634 - protein, 393 aa, unidentified
MHNCLAIDVAKGKSMVTLVSSSGEVLIEPYEVNHSINDFTNLLNRINQFKLDNISVIMESTGIYHRPIERFFLDNRFKVFVINPIYGKMKKRNLRKTKTDKEDCFNLVNLFLTNTFKEYSRPNQLYLDLNALSRQYFALDELCVNIKNRYRNLVYLCFPEYEELFKENTIYSSVALEFIENYPHANIISNTRIDKLQNFFKKQGFSYWKSKPIKIKEAASNSYPSVGMNDEIVSNLSQISKLVNEYQKAIDIVKYKIVFLSKKSKYFETINSIYGLGEFTTSIIIAELGDINRFNNIKELTAYCGLDPSIKQSRKSINVNGPISKSGNKYMRKILFISCLNIIRLSSKSCMENDIEIYYRKKRNEGKHHYESIIACSTKLLRKILALCKQLDK

SEQ ID NO: 316635 - protein, 338 aa, unidentified
MPLYGGIDLHANNSVIVLLDDQDQVVYQKRLPNDLPSLLQQLSPYQASLQGVVVESTYNWYWLVDGLMERGYVVHLANTAAIQQYAGLKYTDDHSDARWLAHLLRLGVLPEGYIYPKEGRAVRDLLRKRSQLVQHKTTHLLSIQNLLTRNTGRAMSGNRIKQLTVADVDGLLPEPELALAVKSNLAVMRCLETQIATIAQTVTQRVKLQAEFNDLLTVSGIGQILALTIMLETGDIRRFPAVGNFASYCRCVGSQKLSNGKRKGSGNTKNGHKYLAWAFVEAAHFAVRYNPCIKRFYQRKQAKTNTVVATKAVAHKLARACFYILRDQVPFDVSKAFQ

SEQ ID NO: 316636 - protein, 381 aa, unidentified
MKKNSIARLQVTKSQIRRMAAKQRLTVGLDLGDRSSRYCILDEAGEKASEDQLPTSKAGLDMLFAKMAPCRIALEVGTHSPWVSRHLAAMGHEVIVANPRKVRLITQSVKKNDRMDAEQLARLARVDPKLLAPIRHRGPEAQADLAVIRGRAELVEGRTKLINAARGLTKPMGERLKSCDADTVKESMADGLSEATQKVIRPLLKSVEVITQQIKVYDEQIQEIEKRYPETKLLKQVHGVGPLVSLAFILTLEDAERFEHSRDVGPYLGLTRKQRESGESAPELGISKAGDELVRRLLVQAAHCILRQGAPDSDLKAWGLTKVGAGAGKKGSKKRKKKAAVAVARKLAVLLHHLWVTGEVYDPQYNRKAAEASKGSKKAAA

SEQ ID NO: 316637 - protein, 356 aa, unidentified
MQTQVTKKIDFTGKDLFVGLDVHKKSWSVTIIVDGIEHRTFTQPPDPEALQKYLQRSFPGGNYQSAYEAGYCGYGIHRRLNDLGIKNIVINAADIPTTQKDKLHKRDPVDSRKLARGLEKNSLRGIHVFDRELEEIRTLNRTRFYLMRDLRRSKNRIKSFLLYYDIPLPGEFDNNQWTLKFIAWLKQVKLQTTAGQEAFSHLITSFEHHRQQLLILSRIVRLRISQHDKELFNLLKSISGIGPLTASTLITEIGDINRFPHIDDLASYVGLVPRVRESGETTHTGGITFRCNNFLRVLLVEASWQAIRQDPALMQYYHHRLINSKGHKVIIKIARKLLNRIRYVMKNRQPYVTGVA

SEQ ID NO: 316638 - protein, 339 aa, unidentified
MKVSTLGIDLVKNVFQLHGVGCNGQTVLKKKLTRDKFLPFLMQLEPCLIGMEACASSHHFARVLRQYGHEVKLIPPQYVKPYVKTNKTDAADAEAICEAVARPNMRFVQIKTAEQQAILVLHTERNILIRERTACANSMRAILAEFGIIMPRTLSQLYKKIPEILEEYDNELSPFVRCSVARQLEHLQGVEDQITLIEQELSRWAKTQPACQRVMKVPGVGLMTATYLVASVGNGQQFHSAKQFAAWLGLVPREFSSGGKQRLGRISKRGDRYFRYLLVHGARAVAAVIERHKDNMPWFYRLLNKKAYNVAVVAQANKTARILWSMLVQHTEYRTLSVV

SEQ ID NO: 316639 - protein, 348 aa, unidentified
MEQISAIGLDIAKQYFQVHGADNVGNPVLRRKLRRNQVLKFFTEFPRCRVGIEACSTAHHWARAIAALGHEVRLIPPQYVKPFVKRSKTDASDAEAIYEAMSRPTMRFVTVKSKEQQAALMVHRARDVLVRKRTQLSNSIRSYLAEFGLVAAQSPRNVAKLLEQMDAGDITELPAYAHDAIAALRGQLSNLTKQIDVLEAKIIADHRCNNLSRRLATIPGIGPITATLMVATISDPKQFSSARTFAAWIGLVPREYSSGGKQVLGSISKKGNPHLRRLLIIGAHTVLRWSRRGGKSGSQWLKQLLERRPANVAATALANKTARIAWAIMVSGETYRAVERSAEVPMAA

SEQ ID NO: 316640 - protein, 353 aa, unidentified
MDKYIGFDIDSKKVSVCVVESGKQDVYATIGPDIGSMKKFLLSQRQDGVRINLAYEVSGYSGYIHDQLCECVDRIAVSNPTKTTWIFRTAKKTDRIDARKLAVLLSIGELPTVHVPNKEVRQWRQTILHRRNIVKDVCRVKNRIRAVMKSAGYFKAGNKGGWWKRINILWMRQMSTGTELWQMQLGQLMDEYEFHNKQLLKVTDYLEGYLKTKPGAVLLMSIKGVGPRTTEAVLAYTDGVERFGGSREYCSYFGVVPKLDESGDSRRVGHITKHGPSVVRWLLCEAAWKSIQKSAALKSFYERVMNGDAKRKKIAIVAVCRKLLSIMRAMLTNGELFNEELVLRHCKEVDKAA

SEQ ID NO: 316641 - protein, 320 aa, unidentified
MTSRGAEKMKNDTIGVDVSKDHLDAHRLADGATRRFANDKGGHKALIKWLAETPLNRVVFEPTGPYHRAVERALGASGVPFVKVNPRQARRFAEATGKLAKTDRLDAQILARMGSLLELEARPARSEVLFELKELYIAREALVKDRTAARNRGKALTLSLLKRQNAQRLEQIDRQMATLEAAILQIVEADASLADRFAILISIPGLSNITAFALLIAMPELGALEAGQAASLAGLAPIARQSGRWTGRSFIRGGRADVRQALYMPALVAARFNPDMKAKYAHLIETGKPAKVALTAIMRKLLVLANALLKANRPWTQRTA

SEQ ID NO: 316642 - protein, 317 aa, unidentified
MEQKKSNTKVAGVDVGKRWLDVAVCGCEEPLRVANDQAGIGEAVAWLKAREVGRVGMEATGGYERALRAALEAAGFEVVVHQPIEVRLFARLKRRRAKSDTLDAALIAAATAQVDTIRAAQDPRLSRLAERLTAYEQITSQAAEMKTFLEHVTLKDVAAMIRAQIHSLERAKAKLAAQIIAEIKAQPDLLDRFKLLLSLPGVGPIVSASLLIRMPELGAMTRGQPAALLGVAPFDRDSGQFRGQRCIAGGRARPRRMLYLAALSAKRYDPSLKAFAQRLTDAGKSAKKVIVAVMRKLIEAANLVLARRQPWLKLTPT

SEQ ID NO: 316643 - protein, 412 aa, unidentified
MEVVYPCCCGLDVHKKSITACVLWAEAKGKSRKEKKRFGTFTHDLLQLADWLAQCGVTHVAMESTGVYWKPVWNVLAEQFEALLVNAQHIKAVPGRKTDQKDSEWIADLLQHGLLRGSFVPPRPTSELRDLTRYRVSLVQEINRIANRIQKVLEDANIKLASVATDALGASGRAILEAMLAGERDSARLAEMAQGKLRNKIPELQLALEGRMTEHHRFLLRQLFHHLRFTESKRSEIEQEIDKRMRPFQDEVIRLCTIPGVDRVTAWGLLAEIGLDMNQFPSSGHLASWACLCPGSFESAGKRLSGKMRKGNVSLRRCLSQAAWAISMMKNNYLSALYRRIAARRGAKRAIMAVAHALLEIAYHMLKRKEDYRELGADHFDRIDVKRIRRSLARRLERLGHKVTLEPLAQTA

SEQ ID NO: 316644 - protein, 360 aa, unidentified
MAKIKSVLTPSVVGGVDTHKDLHVAAVVDENNRVLGSEFFATTRQGYRQMLTWMTSFGTVARIGVECTGSYGAGLLRYLQNAGITVLEVTAPDKMERRRRGKSDTIDAESAAHAAFSLIRTVTPKTRSGMIEALRVLKVCRKTAVAARRIALQMIQMNIVSAPDELRDQIRSLTRMQLIRTLAAWRPDVTAYRNVQDAYRIALKSLARRYLELHDEIADLDIMIASIVDELAPELIKRNAIGYESASQLLITAGDNPQRLLSESGFAALCGVSPVPVSSGKTNRHRLNRGGDRAANSALHIIAIGRLRTDTKTQEYVAKRVSEGHSKMEALRCLKRYIAREVFILLRNQNRQINSTQITT

SEQ ID NO: 316645 - protein, 449 aa, unidentified
MTEPQEIEDEEHEQVLQRVAAVDVAKDSGKVCVRVPHESKPGRRVSRVWDVDATTRAVIELGDHLVCQGIEKVTVESTSDYWRIWFYLLEAAGLDVQLVNAREARNMPGRPKSDKLDAVWLAKLTERGMLRPSFVPPAEIRQLRDYTRLRTDLVQERTRHWARLEKLLEDALIKVSAVASRIDTLSVRDMIEALIAGERSPRVLADLARGKMKAKRAALAEALTGRFDDHHAELARMLLDQIDQLNAQIARLTDRIGELIGAMPAARGVDADGSTGPSAGTGPDAAVIPALQRLDEVPGIGPGGAQVILAEIGLEMGRFPTAGHLVSWAKLSPRTIQSGATNRSGKTGKGNPYLKGILGEAAAAAAKTDTFLGERYRRLVKRAGKLKALVAVARSILVIIWHLLNDPAARFRDLGSGYYASRTDTGRKARGHIRQLEALGYTVTLTQAA

SEQ ID NO: 316646 - protein, 317 aa, unidentified
MRASAAFFVGIDVSKQQLDIAVRPSGESWTVAHEEAGLSALVARLRGLAPTLIVLEATGGWEVPVTGALAAAALPVAVVNPRQVRDFARATGLLAKTDRLDAQLLAQFAEVLRPAPRPLPDAQAQELTALLQRRRQLVEMLTAEKNRLPLAARRIRPQLQAHIAWLHQQIAQFDEDLRQLIRSSPLWREKDDLLRSTPGVGPVLATTLVAALPELGTLSRRQIAALVGVAPLNRDSGTLRGRRTVWGGRAQVRAVLYMSTVVAVRHNPVLIAFYQRLRAAGKAPKLALTACMRKLLTMLNAMLKHHRRWAPVRAQHA

SEQ ID NO: 316647 - protein, 430 aa, unidentified
MKSNTQNAKIEAITEKTLVLGIDVGSEMHYARAFDYRVIEYSKKPFKFSNTEAGFATFKEWVLDLKERHEKDKVVPGMEPTGHYWFNLGKFLQDNEMKPVLVNPHHVKKSKELDDNNPTKNDRKDPKVIAGLVREGRYMIPYLPEGVYADLRTASNIRFQLQAELTRIQNRISRWFNIYFPEYKTVYGKPDAKSGMLILKAAPLPEDILTLGIDGVNQIWRDAKLRAVGKARAKTLIEAAEHSVGSKEGAVSARMEIRMLLEDYESRNIRLQEVMGLIEGLVNQIPMAEKLLEIKGVGIKTVSGFLAEVGDIRRFNDPKELQKLAGLALVENSSGKHKGKTTISRRGRKRLRYLLFEVAMSLVAKNPEFRELHNYYTTRRLNPLKKMQSLMAIAAKLLRVFYAILTKGVGYDPKKMVNDIRRPAAYAQAA

SEQ ID NO: 316648 - protein, 370 aa, unidentified
MHKITTVFVGLDVHKESIEIASADGIRGGEVRHVGRVGGDLASLDRAVRSLNQPNQSLEFVYEAGPCGYAIYRHLIAQGFACQVVAPSMTPRRPGERIKTDRRDCIKLARLARAGELTVVHVPDAQDEAVRDLVRARGDAVRNQRDARHRLKALLLRHEIRYVGKTAWTDAHARWLARVKLPHPAQQIVFQEYLDSVRESTQRIARLTQALQQIVADWRWQPVVSALQSLRGIQLVHAATLVAEIGDIQRFSHPRHLMAYLGLVPGEHSSGSRRRQGSITKTGNSHARRALVEAAWQYRLPARLTPIIAKRQIGLPEPIRALAWKAQLRLCARFRRLSARQLHKNKIVVALARELTGFVWAIVRQTRAPM

SEQ ID NO: 316649 - protein, 459 aa, unidentified
MKTIRVCVGIDLGRRSPHKAILLAPAFSEGPKLPKRAFSFSHDKEGFLTLRDHILKYTDSFEGVAINCEPTSGVWLDIVTFFSQQGAMTFTTRTDVVSSVRKTHNKFAKSDRLDSKTLANMPWSFPERLIPFLPIRPAIIRLRALSGQRFRLVNDITRWKNRFIALMESVWMPLIIPLDKETLLSHSLDLFLDKFPHPLDLIRYGRSRFDRWYDQTVHQNTAPETRENLWTGAQKSADLWNLLGKTQEEQEAFCEMLSRTRRILAYLKQELDQIEKEIEQARKQVPESNVLQLLPGVGDVISVSLSSRMIPIERFSCAKKNSAFTGLVGRKKSSGKREIKGLRITKSGPRQIKRDLALAADVAMHLDPQLAAFAIRLLDKGKHYNKVRIAVGRKIAVRAYSLLKRYANGEINVLYEFRDLENNPITKEVAKEIAQTLWLNHEEKQKGSSLNPLNLVAAN

SEQ ID NO: 316650 - protein, 343 aa, unidentified
MLSHTTVRPVYAGIDFHKKSITVALGDAQGNLIGATQKLPTDAKLIRRFFLRYPNLQCAVENCRGFDWFIQLLTDMGNKVLVSNPYKTRLIAESTCKTDDIDSTVLMQLLARNYLPTCYIPSVPVRLTKERLRWRKQLVGSSTRFKNRCTALLDKENKGHAPRYSAIGMEVIATLELEPERKDLVASHLDLIEHIEECRSAEDRWVAEKAANCLECSLLKTIPGFGDVTALTLWAEIGQITRFPNANRFVSYVGLNPRLYSSANTRRLGSITKHGSQEVRALLVQAAWTAIRKSFVLRKRFQALAKRRGKKIAIVAIARTLAEIAYHILRTKEAYDESKLALG

SEQ ID NO: 316651 - protein, 364 aa, unidentified
MDVHLRSTTVCALDAETGEAVTRRFRGNPWGEVAEWMSGFPGPSLAAYESGYLGFAPQRELSALGVDCVVAAVSKVPRSAADLSSKNDRNDAARMAKAILSHDVTPVWVPSPEIEGLRDLAAAHDAATARLAAAKQRLLAFLARRGYAYGGTTPAGNPRKYWTYGFLRWLDGIHPDDDGGIRALAALRNEVEAADETREALLAEYRAAVAAGPLSAEVEALQSIKGCGFALAAAFASEVGDFSRFRSGRQVTAYFGLAPKQRSSADSVRLGGISGAGNALVRKLAVEGSWRYAQAGHQPKLMPKGSGVPLEIRMHGRKGSERLLRRREEMLERGMPQAKANAATAAELVRWLWALGTMCREAGE

SEQ ID NO: 316652 - protein, 340 aa, unidentified
MRALYAGLDLHGNNNLLGIIDEEGKRVFKKKVPNDPQLVRDVLEPYKGEIVGIAIESTYNWYWLVDTLMEEGYQVHLANPSAIQRYSGMKHADDKHDAFWLAEMLRLGILPEGYIYPKEERPVRDLLRKRGHLVRLRTSLVNSLQNILSRNLGLSVVANEVKRLREDRITPLLGESEDLAMAGRVSKETIDFFTHQIRRIEAMVERRMLLKEGYRYLLTLPGVGKILALTIMLETGPIVRFETVGDYVSYCRKVPSEWTSNGKKKGSGNKKNGNKYLAWAYSEASDFARRFYPEPRAYYNRKMQKTNPAVAHSALSHKLARAGYYIMKDQVPFQPEKLFG

SEQ ID NO: 316653 - protein, 354 aa, unidentified
MKRTTKYVALDVHQATTVASVRKDSGRVIARSVLPTDGGAIVEFVRGMRGAVHVTFEEGTQAQWLHDLLAPLVDRVVVCDRRGAPRHGNKGDHVDADQLAELLRRGGLRAVYHGSAHRAGLKELTRTYQNLVEDSTRVMLRLKALFRARGIPTAGTAVYHRQQRARWLARLPDGGARFRADALYTELDVLRQLRPKAKAAMITEARQDPAWPVLRTIPFLGPVRVALLLATMQTPWRFRTKRNLWAYAGLAVVTRSSADYALVAGQPVRRRRAPMTRGLNPNHNRVLKDVFKGAATAATARPGPLQDVYHNVIARGTREELARLTLTRKLAALTLRLWKKGERYDPTKLTTPAR

SEQ ID NO: 316654 - protein, 344 aa, unidentified
MRITVVGIDLGKNVCSLAGLDGSGQVVVRRRVRRENVLKLVSQLKPDIVAMEACGGAHHLGRLLRDDGFEVRLMSPEYVRPYVKAQKNDDRDAEAIAEAATRPTMRFVELKSAEQLDVQVLHRARDRLVAERTALINQLRAVLMERGIVIPQGWHKLSHALAAILESDEAALSARVRALITDMRSEWGELDRRIHAFDNEFAARAREDEDARRLATIPGIGVLNATALVAAIGKGQSFARGRDLAAWLGLVPRQQTTGGKPRLKGITKRGNVYLRKLLIHGARAAMTPLSGTHTALGKWLRGLRARAHVNIVVVALANKLARIAWAVLRTGHSFEARGSLTTTL

SEQ ID NO: 316655 - protein, 325 aa, unidentified
MSDSVTVGIDVSKLTLDVHVSPAQLRQTLSNSDAGFAELKTLLSMQQVSLVLLESTGGYEDAVVCFLQSLGYDVSVINPRQARDFARSMGRLAKTDRIDAELLAQLASVIDSRSDRARFVKKITDDRRRKLASMVTRRRQVVNMISTEQQRKSAASLYSTDSINKVLSFLRSELKSIDADISLHVRSHFADISGLLASFKGIGPATIGVLLGEVPELGRLNRRQISALIGVAPFNRDSGIMRGRRTVWGGRTMVRNALYMPTLSAVRFNPVIREFYTRLISQGKPRKLAQVAAMRKLLCIINAMLSSGTMFNPALHLHSVQEAQQ

SEQ ID NO: 316656 - protein, 375 aa, unidentified
MKSITYVGLDVHKNSFTVCCYQPKVVKDKNDKVDYHHKMNPDYKELLDYLNGVKHFYGEDTYFVCGYEAGALGYTLYHQLTSAGIKCIILAPSTMGSNVKARIKTDRRDAENIARCLAYGNYSEVYVPTQTDSEIKEYIRMRNDKKEALKKLKQQLLAFVLRNGYRYEEGISHWTVKHVKWLRSVEMTPLLRETLDEYLISYDHLINKLERLEERIDEFANQVDYKEKVKKLTCLLGIRNYTALSVIVETGDFNRFDKASNFASFLGLVPSEDTSGEIVKRGKITKAGNTQVRKLLVESAQSYTRGVIGHKSKELNRRQKGSPPEVIAYADKANERLRRRFHRLTNNKVSRNKATVAIARELACFMWGLMTDNIA

SEQ ID NO: 316657 - protein, 401 aa, unidentified
MAAVRDKAWVGIDVGKTHHWVCAVDVDGKTLLSTKIANDEAEIVSVITAVAALAQQLVWAVDIIGAPSALLLALLARAGQGARYASGRVVAAMSAAYAGEGKTDAKDAYVIAETARLRRDLAVIDADTNLVRDLAVLTGHRTDLIADRVRMINRLRDLMTSVFPSLERAFDYSSHKGALVLLTGFAAPDRIRRMGHNRLSAWLRNRNVRGSAEVAAHAVAAAKAQSVVLPGQDLTASIIAELAAGILALDERLKAVDAQIEQTFAKHPQAEIIQSMPGFGPFLGAALLVGAGDLRAFPSAGHLAAAAGLVPVPNDSGRRTGNLHRPLRYSRRLRHVFYLSAQTSMMRTGPNRDYYLKKRGRGSTHTQAVIALARRRIDVLWALLRENRTWMATPPTLAQAA

SEQ ID NO: 316658 - protein, 339 aa, unidentified
MGLEDSKKTWKIAVRCDKMLIHRVSMPAKHQIVVQYLRNKFPECTIHLIYEAGFRGFNLFDRLTEEGIDCMVIPPHLVTEPKVSRVKTDKRDANRLAMIRENHDFKEPCCVPDKERREDRQISRTLWGMQKDIVRTRNRIRKFLDFNGIEVSFPERWGEEEFRALKELPLGDSLKKSLTALITLLEQLWAHKEALHAALRTLCSKERYKKAFGIAMSLPGIGWFTAIRLILELGEDLSRFTSGKKIASFVGLTCSEYSTGETERKGRITGMGSGLIRAALIENSWMAIRKDSVLLAKFTRIWKGKGSKKKAIVAVARMLIVRLRACVISGTPYAIGTVK

SEQ ID NO: 316659 - protein, 449 aa, unidentified
MKILALDLGKFNTMCCFFDTKTRKHSFLNAPTERNYLNTLFKNHKVDLVVMEACGPSGWINDLAISHGLKTLVCSTNEDAWKWSNVKRKTDKDDALKLARMAAMNELKAVHMPSETHREFRSLVKYRKTLDCRINKMKCTIRAWFVNHGISIDTGEKAWNTGRERINSFRKPLTDCQTDELWKGELDLELTQFDALTVQLESVVKKLEALGKADPRIQRIRTIPGVGPRTAEILVACIDDPHRFNNGREVSAYFGLVPRQYQSGETDRNGRITKRGNPLARTILVECAWASLRYNEWAKGVYDRICGKQKTRKKKAAVALARKIAVLAWAMLRDEKDWAPTHMIQVTESFGKMKRELKQSLQSMKPKENSDQRKSRLRREAREAKAVADRPKKSARTATAKRSRSKTTVVPNVAPPSNPTKRTTPKSTARTNLKPKPKPRRAGKLVSAV

SEQ ID NO: 316660 - protein, 391 aa, unidentified
MFLLGIDIAKLNHVASCIDSSTNEVVFSNFKFKNDFKGFSALLNKIKSFDAKNLIIGLESTSHYGENLINFLFIHDFKVALINPLQTSHLRKANIRDAKNDNLDSLNIAKSLVFAKLNFVSKKNIECFSLKKLTRFRSNLIKQRSKAKIQLISLLDLLFPELQYLFKSKIHSKAIYSLLKKYPSAEEIAALKDDEISNLLYASSKGHFKKEKSIELKSLAKTTVGIKDTSISLHLIQLIELIELYTKQIKDIEIKITDIVNNLDTTLLSVPGISVIACAIILGETNNFENFSSSKKLLAFAGLDPKIRQSGNFNASSCRMSKKGSPYLRYALIFTAWNIVRHSEKFDKYYSLKRSQGKSHYNALGHVAHKLVRILFTLIKKNISYQEERLE

SEQ ID NO: 316661 - protein, 338 aa, unidentified
MNKHSLIAIDLAKNIFQVCVMNSSNRVLMNKPFNRKTLSEFMIKQSPTIVAMEACYSSHYWARLFESFGHQVKLLPAQHVKPFVRGNKNDHNDALAIGEASQRPDIKPVPIKTVAQQDIQSLHRLRERCVSQRTSLTNQTRGLLSEYGIVFAQGFKAFKQTLAMLLDPKDTQLSVPLKEQMRYVLQEFHRMSERLLELNQSLAQIAKDNPHCQRLMSIPGIGYVNATGLYSAIGNGSQFKNGRELSVWLGITPKQFASGNKQVMGGITKRGNRYLRKQLIHGARSVMTQCKKRDDHLSNWIKQLVIRRGPNKANVALANKMARLSWTLLQKNQMYQAQ

SEQ ID NO: 316662 - protein, 316 aa, unidentified
MSDGPWAGVDVAKATLDLAVADHRRTYPNDEQGWAAIVRAVQPAGATVILEATGAYELGLAAYLEAHGVPFAIVNPRRVRDFARASGLEAKTDRLDAPLLQRFGATFAPPRTVLPDADHEALREWLARRTQLVEMRTMERQRVARTRLVDLRAHIQGHITWLTAEIAGLDADVHSRLRAHPRWQAALALLVSVPGIGWLTAGRLLARLPELGTVPTPQLAALVGLAPFACDSGPHRGRRHIRGGRADVRAALYMAALSATRRRGPTNVLRTYHHALRARGKAPKVALVATMRKLLTIVNAILHQQTAWRALSANTT

SEQ ID NO: 316663 - protein, 323 aa, unidentified
MSSFVGVDVAKNTFDVATHLPNGKHKTKAKLANETKGFKEFEAWLHKQVEPSALIVMEATSVYHLELAEFVYNKGYRVCVVNPATTNAYAKSELRRIKTDKSDAKLIADFAKEKHEKLQLWAPEPLKYRQLKAMVRRLDDLQEMEQMELNRLDVSDEKVKNSINSVLCHIEKEIAETHKAIKKHIDDDPDMRQMRDLIVTIDGIGQKTLERLLAELGDLRKYANPRQLVAAAGLNPKLQDSGLLKGRTVISKIGSARVRAGLYMPGLVALKHNKAIMDMKDRLKANGKAPKQIICAAMRKLLHFVYGVLKSGQPYDPKLALAQ

SEQ ID NO: 316664 - protein, 289 aa, unidentified
MQISTIGIDLAKTVFQLHAVDADGKTVIRKRLRRAEVLSFVSGLEPCLIGMEACATSNYWARELAKFGHTVKLMPPAYVKPYVKRGKNDATDAEAICEAVTRPNMRFVPVKSADQQAVLMLHRTRALLIRQQTMLANAFRAHLAEFGIVVAQGIRHVRALIERVFGEGAPAINLPALARTALRPLVAQLMELRSRIKTIEKELLAWHRTSQESQRLETIPGVGFITATAIAATVTDPSHFQSSREFSAWLGLTPRQNSSGGKDRLGRVAFSRGSWNARRGAREVERSGT

SEQ ID NO: 316665 - protein, 457 aa, unidentified
MNQGKRHKASKSGRRIQTRQGPVHQGLVHPHAAGIDVGATEIYVAAPPAGEEQEVRGYKTFTEDLHRLADWVQERGVDTVAMESTGGYWIPLFQILEARGIEVCLVNARHVKNVTGRKSDVQDCQWLQHLHAVGLLAASFRPEQEICALRTVLRHRAEVVQDASGHIQHMRKSLDQMNLQLHHVISELAGMTGLAILDAILAGERDPYKLAGLRDARIRASEETIVKSLVGDYRPEHLFTLRQALEAYRFCQKQLAACDDQIRQMLQEMDSFEGGDGGSPAPWANDGFDLKSELHRVPGVDLTQVPGLEVKTAQVLLSEVGVNLAKSFRSAEAFVSWLGLCPDNRVSGGKVLSAHIRKVHNRVANALRAAARSLHHSDSPWGAYYRRMRAKLGAPKAIVATAHKLARIIYHMLTSRQAYDPSVFDEMERKRVQYVKAKLQAQARALGMQLIPAKAAC

SEQ ID NO: 316666 - protein, 374 aa, unidentified
MTSMPQTVATNQSDTDTDAFAEEVVLGVDTHKDTHVAAVVTVLGRVIDSKAFPTTTAGYRSLLGWARGLGLVRRAGVECTGSYGAGLTRYLLTEGVEVVEVNHPDKATRRRRGKTDTIDAQAAAQAVISGRATATAKTGDGPAEMVRMLKLAKDSAVKARTQAINQLKAVLVSADAGLRDSLASLTTPILIRRCAGLAPTDEERDGDTADVARYTLALLATRIQRLTSEVDELNRRLTAVIGAHTPRLLERMGIGPDNAAALLITAGDNPDRLGTEASFAALCGTSPVEASSGKTQRMRLNYGGDRQANAALYRIVLTRLRWHAPTRAYRDRRLAEGKTRREIIRCLKRYVAREVYPLLRPAPGNAEQQLPAAA

SEQ ID NO: 316667 - protein, 344 aa, unidentified
MNEVITIGVDLAKNVFQVHGVDAEGDVVIGRQLRRSRVLPFFKKLPPCLIGMEACATAHHWARQLIGFGHEVRLMPPHYVKPYVKRGKNDAADAAAICEAVTRPTMRFVSVKGTEQQSVLMQHRSHELLVRQRTMLINAIRAHMAELGIVAPVGVPQIKKLFRIIADTDDARLPSLARTCLESLARQFLSRHDEINTAEKRIHAWHRSNEVSRRLETIPGIGPITASALAASITDPEVFKNGRELAAWIGLVPRQTSTGGKQRLGKISKQGDQYLRWLLVAGAMSVIRHAKRRGTTNLPWLAGMIARKPTKVAAVALANKTARIAWGVLMRGGTYQKPVAVQAA

SEQ ID NO: 316668 - protein, 351 aa, unidentified
MNILAMDLGKSNTVICYYDSENGKHKYGKVRTTPQQIHDLLAEHKPDRVVFEICSAAGWVYDIAAAIGIEVQVANTNHQAWRWKNVKNKNDRLDALKLAQLSAMNQLPVVHTPKHSVRQKRAIIQYRQRLVRQRTRIKNNIRAILDKEGQSMAAGRSGWSMASIKRLMEISLPLERCDIDNLWRGQLRVELEIMEKVESCIVEVEKKLDAFGKQDKAIQLLQTTCGVGPRLAEAVVAFVDEPDRFATGKQVGSYAGLTPRQYQSGDMNRQGKISGAGNKVLRSLLVEVSWLGLRHNKWMNETYHRILRGSPSRKKIAITAVARKLLVRCWAMLRDNQPWRDNEIKADKQAA

SEQ ID NO: 316669 - protein, 306 aa, unidentified
MKKPAHHLITEVQRRQAKVEITIGIDLGDVWSHYCTLNQDGEVVDRGRFRTTPKAIEKWFTDVAPARVAMEAGTHSIWISSQLQQLGHEVIVANVRELRAISHSDRKSDQVDAEKLARYARLDPNILRPIAHRTVQQQEALTLVRARALLVRLRTAAVNAVRGLTKACGYRMPASATTCFAQRSLAVMPHGLAQALGPVLQQIAEMTVKIKQYDRQIQQLGQTEYPETQALLKVHGVGHLTALTFVLTLGCKERFGRSRDVGCYLGLRPRRSQSGDHDPQLGIPMPATHTSEGKTKNKPLTPVTCS

SEQ ID NO: 316670 - protein, 340 aa, unidentified
MSCYVGLDASKRHTSICVVDKTGRMLKEGLVETTPAAIANFLRGDRLRYSRVGLETWTLAPWLYEGLARRGLPVICINATHAHNVLKTQPNKTDKADARGIAELMRIGSYRTVHVKTVESQRIQIVLTARRLLKAKQVAIQNAIGGLLLGLGLKLERGRKTTFEERVRKLARKDATANCVLEPLLEVRALITAKIEEIDVSIRETAESDPVCQVLMTAPGIGALGALAFKSAIDVPSRFPNSRSIGPHLGLVPRTHQSGETERRGRISRRGDSEVRRMLYLAALTVLRRDMKTSWLKRWGEQIVARRGSKQAAVAVARRLSIVLHRMWVTQTPFRWELTA

SEQ ID NO: 316671 - protein, 410 aa, unidentified
MAESAVAGVDWAKDAHEVLVADGEGERLWGETVAHDEAGIARLCRTLVTLGVIRVAVERPDGLLVERLLDAGLTVLAIHPNMVAAARDRFRAAGGKSDRFDAFVLCELARTDSHRFRALSPDSDQTKALRALTRGREVLVEQRVALCNQLRAELERFWPGAAQIFRELDSPISLAFLERYPSPIDAHRLGEKTLARFLARHHYSGRKHPGELLAKLRAAPAGRADELEADARRGLVLALVAALRPIVEQIRLLTSEIGHALHAHPDGAIFASFFKSPDSVICAATLLAEIGDDRARYPTAEHLAADAGMSPVAVESGRKKVACFRRGCDHRLRDATSTLADATRHWHPWAQDHYLRARGRGHDHPRAIRTLGRAWTRVLWRCWQDGVAYDPARHHGLQKHTQIAIPNLTG

SEQ ID NO: 316672 - protein, 420 aa, unidentified
MPHEEELDWYVGFDWASEKHRVCLVDHTGRVVGERDVGHDGAGLTELCEWLIDKTRAEPGRIAIAIEMPHGPVVEMLLERGFAVHAINPKQLDRFRDRFTVAGAKDDSRDARVLGDSLRTDRRAFRRLAIDDPVVIELREWSRMADDLQQERNRLANRVRGQLWRYYPQMLQLSEDLAAGWFLALWDYAPTPAKAAKARQASVARILKAHRIRRLDAAEALRILRQKPLTVAAGATEAATAHIRAVAARIRLVNQQLKTAHRKLDELCAKLEPPTESEPGQTSEQRDVAILRSLPGVGRINLATLLAEAWQPLQRRDYSVLRAVSGVAPVTRRSGKACIVLRRLACNKRLERAVYHWARVATQHDPVSRQRYAALRQRGHSHGRALRTVGDRLLFLACTLLQRQVLFDPDYKHPDVAAAA

SEQ ID NO: 316673 - protein, 310 aa, unidentified
MERSYVGIDVAKERLDVHVRPGGEAFAVARDHDGLADLAGRLRVLSPALVVLEATGGFEVTVAAALSSAGLPLAVVNPRQIRDFARATGKLAKTDALDAAAIAHFAEAVHPEPRPLPDAQAQELGELVARRRQVVEMVVAERNRGRQLHSPRLRKRIERHLDTLQKELAEIEADLDDSIRGTPVWRDKEDLLTSVPGVGSKIARILIAELPELGMLDRKRIAALAGLAPFNRDSGTLRGRRTIWGGRSGVRSALYMAALVASRHNPLIAAFYRRLRAAGKPPKLALTACMRKLLTILNAILRDQRPWQNA

SEQ ID NO: 316674 - protein, 399 aa, unidentified
MHYLGIDISKNQSYIAHYEDQKLINEFLFTHTKQSFQKLKVYVSSLDNPIIIYESTGVYSRTIYDFCTDNRFKFYELNPLEANFKMKSLRANKTDKADAHKLALLGANLPSLTSKHQNRELYDELKEYARFYLELEKQENILKVQLLETMHQTFPFFEKLFKNRYSTISLNLAHIFPHASMVSDLTKKEITEVISNASLKGMSAIKIENYVDNLIQLANESFPCVSKDHFLVKKVRFIAKSLLHLQEERKHYNQEMINLARQLPEFEILLSIPGFGRLTTALFIGELGDIRRFSSHKKLNAYVGIDIRRYQSGQSHYRDTINRRGNKKARKLLYLIVLNIIRGQSRFRNHINDYYYKLKSQPYGKPHKTAIVACINKLLKTIHYLIMNNCTYDYEMSPH

SEQ ID NO: 316675 - protein, 410 aa, unidentified
MKVFCGIDWAERHHDVALVDDLGNLLAKARISDDAAGYSELLDLLAAHGDTQATPIPVAIETSRGLLVAILRSGTRQVFAINPLAASRYRDRHGVSRKKSDAGDAFVLANILRTDMPMHRSLPADSELARAIAVLARAQQDAVWNRQTIANQLRSLLREYYPAALDAFVTGRKGGLAHPEARAVLAVAPTPAAAAKLTKPQIRAVIKRGGRQRYVEAETKRLQDIFRAEYAHQPALVEEAMGKQMLALLRQLDAAAHGADDLADAVETSFQQHPDAEVITSFPGLGTLLGARVLAEIGDDRNRFKDARALKAYAGSAPVTRASGKKRYVGRRFVKNDRLTHAGFLWAFAAITVSSGANAHYRRRRDRGDWHAAAQRSLFNRMLGMLHHCLQHQVPYDEQRAFAPLLEPAA

SEQ ID NO: 316676 - protein, 347 aa, unidentified
MEKIIRIGLDTSKHVYQLHGVNAAEESVLRKKLRRKEMEAFFQKLAPTVIAIEACGGSHHLARSLAVFGHEVRLIPPQYVKPYVKRGKNDAADAEALCEAMSRPSMRFVPVKTAEQQAALMLVGLRERLIRNRTQLANGIRGYAAEFGLIAATGLCKIGPLLERIGADASLPALARELFAIQAKEYALIEAELKVIDAKLMTWHRDNACSRRLSQIPGVGPVGASMLVMKTPDPRLFRSGRQFAAWLGLTPKDHSTAGKVRLGVITRAGDEALRSTLIVGATALLRRVREGSSRKSSAWLLDLLRRKPPKLVAVALANKIARIAWKLMVSGETYRANTAPPVAASAA

SEQ ID NO: 316677 - protein, 368 aa, unidentified
MQEPITGFVGLDAHAESMAVGFAEAGREAPRFIGTVGPKLAELKKALGKLGEPRTLLIVYEAGPCGYGLARELLALGYRYAVVAPSRIPRRPGERVKTDRRDALKLASLARAGELVSVTIPDERDEAIRDLSRARVDAVRARLKSRQQLKALLLRHGRRYTGKSSWTAAHQRYLAEVSFAHPAQDIAFEEYRQGVSEGESRVQRLSHTLGQQVECWRMQPVVYALMTLRGLDLVAATTVVAELGDLKRFAHARELMGYLGLVPSEHTSGPKRRLGAITKTGNTHVRRVLIEAAWNYRFPARVSRALQVRQENQPPTIRAIAWRAQLRLSHRYRRLKARGLQHNKICVALARELAGFVWDIGHHVGPSG

SEQ ID NO: 316678 - protein, 354 aa, unidentified
MIIIGVDFHPEFQQIASVDTDTGEFQEKRLGHREEAETFYRGLATAGQKVRVGMEASGHARWFERLLAELKVELWIGDAAEIRAKRVRKQKTDRQDAQLILRLMLKDDFPQIWVPSWENRDLRQLLWHRHRMVQARTRIMNQLQAVALNEGLRSKKRLWRERGRQQLESFRLAPWASRRRRDLLELMDRLNPTIAELSQAIEQEVEKCPAAQRLRTHPGVGSLTALAFVLIIGRADRFQCGKQVASYLGLVPLEDSSGNRRRLGHITKQGSSLLRFLLVEAAQVTVRSQPEWRSKYFHLAMRRGRKIAKVAMARKLAIGLYWMWSKGWHYEQWTKFGSHAGQPGNRDGVQSNTE

SEQ ID NO: 316679 - protein, 407 aa, unidentified
MVSVGIDVSKGKSTVCILKPYGAVVVSPYEVNHTETELSELISLIKSLHGEIRIVMEATGIYHFPILHSLKEFGFFVSVINPLIMKKYASTAIRKGKTDKLDSIRIANYGLDNWFYLTDYIAPENAYHELKLLGRQYSHYIAMMIQSKLTLDNLLQRTMPGVKTLLQVKNSEKPTKDKLSDFAEEYLHYDNIKSKSEVQFVADYIRWSKKKGYRTNESKARKIYAIAKSGIPTLSSNTPSAKMLMLEAVKVLREINRTLETILTQMHKLASRLPEYPVVRNFNGVGNVLAPRLIAEIGDIRRFHNGGSLIAYAGIDSPPYESGSFIGRKRKISKRGSSLLRKTGYEIMKCLKSVKPKEDNAVYLYMLKKEAEGKAKPVAKIAALNKFLRIYYARVKEVYDLKAISLA

SEQ ID NO: 316680 - protein, 353 aa, unidentified
MAVYIGVDLHVRTETVCWMNTADGEIHQHTLDHSRDDLRAFYAQFTAPAVVGIESSGYALWFHQLMEQAGHRLLVGDAYAIRQFARRRQKNDRRDAELLLDLLRREEFPVVHRPAPPSQDTLALLRYRHRLVRMRTMVKNGLQAVALNHQLRLGFRLFTVRGQQRFAALPLSGAYATQRQQSQVLLTTLEAQIAAVNQELATRAAADARVVRLRTHPGVGLQTALAVVHTLEPVTRFDRARRIAAYCGLDPSEHSSGEVTRYGHISKQGNRLLRFLLVEAAWSAVQHEEDLGRFFRRLRARKKPHAVAVVAVARKLVLRLYRMLQEGIDYEEFRRRGRDARRARKWTSPAQRG

SEQ ID NO: 316681 - protein, 416 aa, unidentified
MNAVGIDVSSRKSTVAVLRPLGEVVCLPFDVTHDIAGLASLVEKLKALDGETRVVMEHTGRYYEAVEKALHEAGFFVCAVNPLLIKEYGANSLRRVKTDKADAVKIARYALDNWADLRDFTPMDAIRYDLKTLNRQFQLASKQRTASANNLIALLEQSFPGIRKCFDSPVRSDGTQKWVDFAHSFWHVDCVRKQPFAAFCERYRKWCKRHAYLFKQSNAEEVYALAKRAVVLTPKSKVVKVLVQEAANQLSSISRSVEVYRAEMDRLAAMLPEYPVVMAMYGVGKSYGPQLMAEIGDVRRFERKQALVAFAGIDPMPNQSGDKNVRSNKSSKRGSPYLRKTLFNVIRTYLQCAPQDEPVFQFLNRKRAEGKPFYVYMLAAANKFLRRYYAKLRDYFASLDTLQPVAPIPTILKATL

SEQ ID NO: 316682 - protein, 391 aa, unidentified
MSVDAPRPAQPAIRTDLGAIFVSMELSRKTWLITSLSPGGGEKMSKHLVPAGDVFGLLRRFAELRRKAAARTGRDFPVIVIQEAGLDGFWIHRVLQSEGIESHVVDAASILTSRRRRRAKTDRIDGETLVRTLMAFKRGEPRVCSMARAPTPQEEDRRRVCRERRTLVGERVTHVNRIKGLLFAQGVFGYEPLRKGRRERLEDLRTGDGRSLPVHLKAQIMRELDRLEVLLEQLKTVEAERDALLKPASDEAASPAAMLARLKGIGPETAAVLWSEGLFRQFDNRRQVAAYAGLAPTPWQSGSIDHEQGVSKAGNPRLRTTMVELAWLWLQNQPTSALSLWFHERVRRLGGRMRKTTIVALARKLLIALWRYTTAGVVIEGAVMKAAPATT

SEQ ID NO: 316683 - protein, 376 aa, unidentified
MKKLRFIGLDVHAETIAVAVAELSGEVRSLGTIPNRPESVRRLISKLGKPEQLRVCYEAGPTGYVLYWQLAQLGVHCEVMAPTLVPVKTGDRVKTDRRDAEKLARCYRAGDLTAVWVPDAAHEALRDLVRARLAAKRDQLRARHRLGKFLLRQGRRAPEGMTAWSGKYLSWVKQQRFEQAAQEATLLDYLHEVEHAAERIVRLERGIDAAVESMPESVRAVIAGLQCLRGVAKVSAVTLVSELGQITRFAHPRQLMGYAGMVSREHSSGERVRRGSISKAGNAHLRRIVTEAAWSYRYRPNIGTTLAARQSGSSETVKAIAWRAQHRLHGRYRALLARSKAKQKVITALGRELLGFIWAIGVELERVQHQEVRRAA

SEQ ID NO: 316684 - protein, 309 aa, unidentified
MEKVYVGIDIAKDSLDVAVHASDKQWHYSNDPAGITSLCKMLVKLSPTLVVFEATGGYEMPLYLSLDEAGLPAALVNARQIRDFARSTGKLAKTDSLDARVIAHFGCAVQPIPHPVPDTQELKVAQARRTQLLEMITAETNRLRGVPTALRRRIEAHIAWLKQELADTDRELKDMIEKDPIWREKDSLLQSTPGVGPTLSATLIAQLPELGILDRRQIAALVGVAPLNRDSGMMHGRRTVWGGRANVRAMLYMATLVATRFNPVIRDFYLRLCAAGKAKKLALTACMRKLLTILNAMLKHHVPWSYSPC

SEQ ID NO: 316685 - protein, 428 aa, unidentified
MKNNAARKLKQIQSDYLLIGVDPHKKTHVAAAMTYDLVFHTRFRFANSHEGFQNLVQRAQDLVSKTSSAGILFSIEAAGHYWRNLGYFLDDQGIQFRLVNPFTLKRIRDGRDNNRRKNDYHDAEMAAELLRNGDFVETRLPKGVYAELRALNSTHHRLVEERARMKNLLKGLLDGIFPEFTQVFKNICGMTALQVLASCPIPRTINSIKLEDFVDIVKKGFKGRAPKVRKLHDIYLLAQNSIGIDVASDSVSLEINFLVKRLQLLGDQISETEDAIITTLKSIPDASYLMSIHGISYLSVAGILAELGPLEMYHDAGQLIKMAGTNPTEWESAGKHGSRTPISKKGRPGLRWCLWTAARSLLRHNPDFRRWAKERIERPAHLHPLKVREVFGAVVNRLLRVVYALVKKQTYYQIPILQEAAKFELITV

SEQ ID NO: 316686 - protein, 348 aa, unidentified
MSQKLSTAITVIGIDIGKNSFHIVGHDERGTIILRQKWSRGQVEARLANMPACLIGMEACVGAHHLSRRLKALGHDARLMPAKYVRPYSRGQKNDFRDAEAIAEAVQRPTMKFVTTKTADQLDLQAMHRVRERLVSQRTGIINQIRAFLLERGIAVRQGQRFLRAELPRLLSTPPEVLSPRMVRVVEDLAGDWRRLDERIEELSGEIEAIARRDVVCERLMSVPGIGPIISSAIVAAIGTGEAFSKGCDFAAWLGLVPKQMSTGDRTILGKISKRGNRYLRVLFVQAAWVVLIKPKSWDRQGLKPWIETAKKRLHHNVLAIALANKLARIAWSVLARGRSFEVTSPAA

SEQ ID NO: 316687 - protein, 312 aa, unidentified
MNSDTIGIDVSKDHLDAHRLTDNASRRFANDKAGHKAFLRWFAEKPAERIVFEPTGPYHRAIERAIAAAGVPFVKVNPRQARRFAEATGKLAKTDRLDAAMLARMGATLQLQPRPPRREVVLELKELHVAREALVKDRTAAKNRGKIFALPLLRRQNAHRLQQIERQIEDVEAAMRDIVQADHELAARFAILTSIPGVSAVTAFALLVEMPELGTLEAGEAASLAGLAPITRQSGRWTGRSFIRGGRASIRQALYMPALVAMRFNPDLKAKYQQLVGDGKPAKVAITAIMRKLIVLANALLKANRPWQPTPA

SEQ ID NO: 316688 - protein, 356 aa, unidentified
MSRDIKYIGMDVHKEAIVIAVLNGGGKLVMETILETKASSILQFIHGLRGELHVTLEEGTWAAWLYDLLQPQVQQVLVCNPRRNALLKEGNKSDKVDARKLAELLRTGMLRPVYHGENGLRTLRELGRSYQTISKDLTRVMNRLKALYRGWGIPCAGSQVYARRYREEWLHKIPQAGVRRRAELLFQQLDGLQALRRNLRPEFLAESRKHKAAQLLRQIPCIGPIRAARLVALMQTPHRFRSKRQLWTYSGLGIETHDSAQYRYVGGQLQRSRKPQQLRGLNQNHNHELKEIFKSTATRASCGTGPFHDFYAALLAKGMKPEMARLTLARKIAAITLTLWKRGGRFDAEQLKPQAA

SEQ ID NO: 316689 - protein, 377 aa, unidentified
MNRIIKIGMDVHSSNYTLCAMEPVIGAEDRVFANIQVTPDYKNILMFIENLKLKLGSKDTYDIECGYEAGCLGYSLYNQLTSAGVKCVILAPTTMLTQQGQRIKTDSRDALMIAQCLSYGGYHAVYIPTEEDDSVKEYLRMRDDHKQALKKVKQQINAFCLRHGYQYDGTKWTIAHIKWLKKLELSSMYQETLNEYMASYDEQTAKIERFDARIEEIASQSRYTEKVKKLGCLLGIQTHTALSLIVETGDFNRFAKGNIYAAYLGLAPGEFSSAEKINRLGITKAGNGHLRKLLVEASGGICKGAIGHKSKVLRQRQQGNSAETIAYADKANTRLRSKYYRLIRHGKKRNVAVAAIARELACFVWGMMTDNIGVTMA

SEQ ID NO: 316690 - protein, 363 aa, unidentified
MLHVGLDVHERSSAVCILDENGKKVKEHSVRGHPRRVITWLRRHIDTPFQICFEASTSYGYLYDELRRIAHRVVVAHPGRLRLIFRSRRKNDRVDAAKLAKLLYLDALPAVYVPSAEIRSWRGMIEHRHRCVRSRTRCKLTIRALLRTHGVETLGRRRLWSKRGRAWLESVELPDEISWLRLEGLLADLDHFDARIGRLESILERIAEKHPAVALLRTIAGVGIRTAEAFVAYVDNPDRFRRSKSIGCYLGLIPRQDASSDTNRLGHITKEGPGTVRQMLAEASWQAIRRSPTVRAFFERIAQGRKDRRKIALVATAHYLAGLAGGSDDHGLTEPVLTDGAPRRTSLMPTVAEALCLLRTPSE

SEQ ID NO: 316691 - protein, 343 aa, unidentified
MTEVVKYIGLDVHKETIAVGVADGERGREVRYVGTVANEDDAVRKLVKRLMAPDTSLSFCYEAGPCGYGLHRLLTKLGQACIVIAPSMMPRRPGDHVKTDRRDAMTLARLLRAGELTAIWVPDEAHEAVRDLIRARRSAQDDAIGAKQTVRSFLPRHDRRFGGKAAWTKMYWRWLSEQRFDFPHQQLAFEEMQKRVLEAQARVGRLEAALGEAVKAWRFAPLIRNLQVLRGIRLVSAATLVAEVGDLTRFDNPKQLMAYVGLVPSEHSSGARTKRGRITRAGNAQARTMLVEAGWSYRLPAREERRYRERVVGLAEEIQAIGWKAQVRLCQRYRRLAARETPA

SEQ ID NO: 316692 - protein, 336 aa, unidentified
MTIIRIGLDTSKHVFQIHGVDENEKPVLRRQLRRSEVEKFFAQLPPTRIGIEACGASHHWARLLRGLGHAVLLMPPQYIKGYVKRGKNDAIDAEAICEAMSRPTMRFVPVKTAEQQAALTMLGVRDLLIKQRTMLINALRGHAAEFGVTAAKGPNKIVELLQRLATGEGVPALAREMLGMLASQLEAVNGKLKAIEARLMAWHRQDQTSQCLATIPGVGPIAGVSFALKIPDARAFRSARHFAAWIGITPRENSTAGKHRPGKISHEGDESLRRLLVLGATAVIQRAKRGRASPWLLGLLARKPKKLAAVALANKMARVIWAMMMSGEVYRRPQEA

SEQ ID NO: 316693 - protein, 351 aa, unidentified
MKIIRIGLDLAKNVFQVHGVDLQGKTGLRRQLRRNQMIEFFRKQSPCLIGMEACASAHYWARTLMAMGHEVKLIAPQFVKPYVKGNKNDANDAEAICEAVSRPNMRFVPIKTVEQQDIQALHRIRQELVHQRTAKVNQIRGLLGEYGITVEQRVPALRKKLPEILEDAENGLTAEFRVLLDGLREDLVNLDTRIGSMDQAIQKLAQEHAGAKRLQQLRGIGPITATALIAAIGNGSMFERGRDAAAWCGLTPAQHSSGGKDRLLGISKRGDAYLRTLLIHGARAVIKAAKDKEDRLSRWLQSLCARRNKNIAAVALANKTMRMAWALLTSGADYDPLFGLKPEEQAIAEPA

SEQ ID NO: 316694 - protein, 425 aa, unidentified
MFSRVKIACGLDVHHSKIVGSIVTSYGTHETRTFTTNIDDTLKLKDWILTHKCERVAMEATGIYWYPIYNLLEEYVTVQVANPLFIKGIPGRKTDQIDAEWIGMLCLNGLIKPSIVPKREVRKMRDLVRTMTSLTHERTRHKNRIHKIMVRAGIRIGAHLSNLYGPSGLKILIGLLEGKSIDTILLDLKSTKITKKRDELVQSICGTLDENDVYLIRLELDSIEFINHQIEDLKPRLTYLMTPMNDDINILMTIPGIGQDSAMKILAEIGDIHLFPSGKHLVSWAGIAPGMNESAGKKTPGHITKRGSKYLRTFLIEPAHAIARMKSDNQLKRYFSRMVGRLGYKPAIIALARKLLMIIYHLLANHEPYFEENFSKKKPIKLPVASPPSMTADQILNIMSDAIANMSEVDRAEFVRKLNRIRTPG

SEQ ID NO: 316695 - protein, 355 aa, unidentified
MKRSAKYVALDVHQATTVASVREQGGRVIARAILPTEQAALVEFFGGMRGSVQVAFEEGTQAQWLHDLLVPLVDRVVVCDRRGEVRRGNKGDQADADQLAHELRTGGLRATYHEGGADRATLRELTRAYCNLVDDSTRVMLRLKALFRARAIRTSGKRVYGVKDRAEWLEKLADRGARVRAEILYAELDVLRALRPKAKAAMVAEARRDPAWAVLRTIPFLGPVRVALLLATMQTPWRFRTKRNLWAYAGLAVVTHTSAEHEFIAGRAVRRRRAPLTRGLNPNHNRVLKDIFKGAALAAIGRPGSLRDFYQGMLARGMRPELARVTLARKLAALTLRLWKRRERYDPTKLTLQAT

SEQ ID NO: 316696 - protein, 347 aa, unidentified
MNYIGADCHISSLDFAVVNEKGNITQKAKVETSALEFMKFVKSIPKPRKIYIEEGELADWLLETSLKFGEKLIITDPKINKWIGKAGKKDDKIDAEKLAQLARGKYIKEIYHPVNKRRRFKELVFAYHDTVKSQTRIKNKIKASFRREGIRCSGDTVYSDKYRKEWQKKLPTNMVVRLIVNQLWTQLDQIRAAKETLKRHIRIQGKQFSEIKKFIKVPGIGLIHASTISAIIETPHRFANKKKLWMYAGLGIAERKSGEKVYSKKLTREYNRLLKNAVKQATEAAISARDNQFRRQYLKLTIEKGIATHKAKLTVARSLLAAIYGMWKKGEAYDPQIDNKRFKENNK

SEQ ID NO: 316697 - protein, 361 aa, unidentified
MNYIFVGCDSHDKTLVTKVAINREKAERKVFSGNHSGRRKLIDYLKGRSASLGAKVVVAYEASGNGFILCDELKAAGFECHVLAPTKIERSAKQKRNKNDDRDADHLLEILRGYYLAGNRMPEVWIPDLQNRDDREAVRHRLELGQRVTAVKTQIQMLLKRHGVEKPSGPVKSWSKGYRQWLQALAESDERQGMRTALGSLLRYLDFLEGEIREMSQAMKQLAEAPRWKPIIEALVQEKGVGLTTALKYATDIGDFTRFRRGRQVGAFYGLVPSSNESGENKDRKGHITREGSASGRQVICQSTWSRVRHDKQERAVYLRLVDKNPKKKKIALVACMRRLTVRLWHIGYAAQLKMPGATRS

SEQ ID NO: 316698 - protein, 331 aa, unidentified
MNAHVGIDISARSSAMGWRQNGKAAGNGDIQHTPKGRKAAIEKLLRLKPLSVVMEATGIYYLDLAIELHAAGLPVSVINPKSFHNFAGLMLQNSKTDQIDAQLLAEYGERMGPRLWVPPTADQMMLRAIGRHINRLIGHRTRAKNELHALHATETSIALLIEDEKDAITALNTRIERLKQAARDAIAKCPDLSLQFRCMMAAPGVGEASAIAALAELTTLPVTLRAAQVSRHAGLDVRLTQSGTSVNRPGRMSKCGNAYLRAAMFMPALTAIRCAPYVKAFYEALVGRGKKKMQAIGAVMRKYLTGLWACMRAGEDFDTAKLFSKIHLLKA

SEQ ID NO: 316699 - protein, 390 aa, unidentified
MVCVGIDVAKDKHDCFILNSEGEVLADVLTIPNTMGFRCLLEKVQSVATSQDKIKVGLEATGHYSYNLLGFLLDSGLDTYVLNPLHTNLYRKSLSLRKTKTDRVDARTIAAMLMSDVGLKPYTDTVYHNEELKSLTRYRFDKVRERAKLKQSLSRLVCILFPELENLVPSLHIASVYALLDEFPGAAQVAGSNLTRLKFLLADAFKGHYGRDMALVLRDSARNSIGSVMPAKSLELRHTIHLIRELDREVAEVEASIQGIMQRLHSPITTIPGIGFRMGAMILAEVGDFSRFDSPDKLLAFAGLSPSTYQSGQLNNCYAHMEKRGSRYLRYALYNAAKYVCHWDPTFRAYLTKKMAEGKHYNVALSHAAKKLVRVIFALQKSGQSYLTAH

SEQ ID NO: 316700 - protein, 350 aa, unidentified
MLYTGIDYHRSFSYLTTMDEKGKIIGQKKLPSNGEIVDFLKELGKDMEIAIEASPSWYWLYDHLENQGFLVKLSHPLKTKAIAYAKVKTDKVDSATLAHLLRSDLLPLSYVPEKTVRLNRELLRYRASLVKIQTGVKNKIHMILAKNNVSHSYTDLFGKAGMDFLHSLALAESYKIALEGYLAVLDSVRQEIRKASKKVRQLAVKDPDAILLMTIPGMGYYSALLTKSEIGDVRRFRSAKQLCNYAGLVPSTYASGNTCFHGHITKQGSRWLRWILVEAAIHAVKRPGVLRRFYFKIERKKGGQIAKVATARKLLEWIYHILRDGKTYPEVEEIADLLSRGELGNYSGRA

SEQ ID NO: 316701 - protein, 330 aa, unidentified
MKSWNVILGVDVSKLTLDISCAEQNLHIRIGNCSKGFGEFIKWCKTNYIDLKEALVVMEYTGGYEYRLVQFCDSKSIAFCRLPGMEIKQSMGMVRGKNDKADSFRIGRYGEEKRDRLTPSKPLDNNILTLKQLLSFRKRLVREKAGLQSTSKEREHMYDVKKTDTIMHIAQAKMKADEKYISLVEQQIRELIKSNNELFQNYRIITSIKGIGEINGWMTIAHTENFTSFPDARTYGVYVGVIPFGYTSGTSINGRKRVSHLANKELKSELTQAAKSAVIHDRELHDYAERKLKNKSYGLVLNNVKFKLILRMFSLIKRGEMYVDNYQRSA

SEQ ID NO: 316702 - protein, 428 aa, unidentified
MTTKSSSPPAAATADGPLVIIGIDWADQQHLVSVIEPGGRATGRTLDQDPDAIAGWVRELQTRFPGHTLAIALEQSRGALIHALLNFEGIQLYPINPKQLARYREALDPSGGKTDPRDAELLARFLLHHQDQLRVFRPDAAETRRLAHLAELRRRLVDDRKRLTQRLGSLLKLYFPLILKLFGKTLHGELALEVLRRWPTLAELKRVHPKTLRAVFAEHAIRQEPKQTELIRTIRAATPLTQDAALIEPHALYVQTLVRQLAELNQAIHQFDDELARAVARHPDEPIFRSLPGAGDALVPRLIAAFGSDRDRYESAEEIQTQSGIAPITKRSGKSCLIVRRHACPKFLRQTFHEFANCARQWSGWSRAFYDLKRAAGMKHHAAVRALAFKWIRILFRLWKTRTTYSETLYLKQLQQKHSPLLKSLQSS

SEQ ID NO: 316703 - protein, 313 aa, unidentified
MLESLVYVGMDVAKATLDLQARTQPRAQSRQFANTSAGQRALVRWLQTLGPTRVVCEPTGGYERAAVEMLQAAGVAVSVVNARQVRDFARAQGRLAKTDRLDAAVLADYGVCLRPPARAALSRAQRQLAELVARRYQVQQLRTAEHNRLEQVSHPAVRRQLQRHVAALDRQLEQIEGWIAELVRADESLAQKVARLCLVVGVGRITAVVLLATLPELGTLNRRQAAALVGVAPFNRDSGSRRGHRLIAGGRAAARRALYMAGLVAAFSNARLRAFYQRLVAAGKAPKVALVAVMRKLIILLNHVLHDPTFQPT

SEQ ID NO: 316704 - protein, 340 aa, unidentified
MRLIGCDLHASRQSIAMLDRDTGAVIEKTLKHESEAVREFYASIPPPVVVGIEATGSMGWFLRLMEELAIECRVGHPTAIRKAETRRQKHDRRDASLLLQLLAEDRFPAIWMPSTEYRDLRSLLLHRHQWVRMRTRVQNALHAILLAHGVRRGHTLWNRDGQALLASLPLPPHTADRRSELQALYQHLQAHIDRLDDRVEHVANERARATLLMTHPGVGPVRALATEVFVGEPARFLDGKALASYVGMIPREYSSGKRQRLGALSKQGNPFLRFLWCEAAAHAVRRDPDLQRFYRRKVVQKGFAKARVAAARKLGIRLWIMLRDQIDYTEFCRRGLARQS

SEQ ID NO: 316705 - protein, 420 aa, unidentified
MKELIVSDFSALIGVDWADKKHDVCELIPDTQKITFSVISCKPEALNDWALSLKKRYPGKQIAVACELKKGPLIYALSRHSHITLFPVDPSTVAKYRKAFTPSGSKNDPTDASIITEILSLHMNKLTCIKPESSDIRALSQLVVYRRKLVQDRVDLSNRITATLKNYYPQVLDWFKEKDTIIFCDFICRWPSLPIVKAARKTSLQAFFNKHNSRYPTVNEKRISEIKSAMPLTDDSGVVEPNRIFLEILVPQLKLLIESIMRMDSEIRKYYKRQDDRIIFDSFPGAGPQLAPRLLAAFGNNRDKYKSAAEIQKYAGVAPVIEQSGQQSWTHWRYSCTKFLRQTFVEWAGQSVRFSFWAKAYYDMQISKGKPHNTVIRALAFKWIRIAFRCWKTRTPYDESKYLKALKKRGSPLLEYAING

SEQ ID NO: 316706 - protein, 324 aa, unidentified
MAQSVLGIDVSKQTLDVSIVVRDKPRHQQFANSDEGLRALLGWLAHARVGQVHACLEATGPYSMKAALALHDAGHLVSLINPAQIRDFARTKLGRNKTDKVDCGHIRHFGEMFRPPAWTPPSPALRRLCELQTMRAGFVASKVEWTNRAGSSAGDATASALAQATIAHFEAQIKAVNAAIEATIDGDDELRRKRALLLSINGVGEVLAAAILTELPGPDVIADSGQAVAYAGLNPRRFQSGSSVNQPTRISKIGNGTLRSALFMPAMTAIRHNPAVAALAERLRAQGRLKKKQIVIAAMRKLLVLCFGVLKSGKQFDARMAMPG

SEQ ID NO: 316707 - protein, 321 aa, unidentified
MNESDGYWGIDVAQATLVVAQFGQGPSTTYPNTSEGHETLLALFSTARVQRIVLEATGGYERGIVATLGAADLPVVVVNPRQVRDFARATGQLAKTDAIDAQVLAAFGARVQPELRPLPTTEQVVLRDLLTRYHQVQQMLGAEQTRLLQALGRQAQRPLRKQLKRHIAFLERALHELDADLDDQLRQSPLWREQDDLLQSVPGIGNKTARTMLAFLPELGTVTAGEIARLAGLAPLNRDSGTRRGHRRTGGGRPRIRAVLYMATLAAIRCNPLIRTTYQRFLKAGKPKMVAIVACMRKLLVILNAMLKTKTRWQSLVTTTT

SEQ ID NO: 316708 - protein, 393 aa, unidentified
MAVMIGVDPHKRSHTAVAIDHEDVQLAAIEVRASTCQVAELLAWAVRFEDRTWAVEGAGGVGSLLAQQLVAAGERVLDVPATLAARVRVLGSGRSNKNDPNDGYSIAVAALHAPRLAEVTRADHATVLRLLAKRNRELSSARTRTACRLHALLVELVPGGISKEITVKRAVQVLAGVTPSDPVEITRHELALEHLEDLRRVEEQIRASKRRLTSAVEASATTVTEVFGFGPVGTAIAIGHTRDIGRFPSRDHFAAYNGTGPIEMSSGGRVVHRLSRRGNRQLNHAIHIAAITQIRHRHSPGRGYYDRKLAEGKTTKEAIRALKRRISDALYMHLRADAAKAGPGGQAGTTQSSVTGIAPRGPALRKSHSRTRTNATTRRAHTPRPNKRTRTRS

SEQ ID NO: 316709 - protein, 388 aa, unidentified
MIYVGIDIAKLNHFASAISSDGEELIKPFKFTNDNDGFHLLISKLDLLDKDSLIIGLESTAHYSDNLVRYLVAKNYKVCVLNPIKTSTMRKNNIRKTKTDKVDTYIICKTLMMQESLRFVTFYDLDLMDLKALGRFRQKTIKQRTRLKIQLTSYVDEIFPELQYFFKSGLHQKSVYALLKEAPTPEAIASMHMTHLAHLLKVNSHGRFNKEMAQQLRVLAQKSVGASDSSLSIQVTHTIQQIELLDSQLERVEAEMTEIMKFNDSVIMTIPGIGYINGGMILGEIGDIHRFSSPNKLLAYAGLDPSVYQAGNFQAKKTRMSKRGSKVLRYALVNAAHNVVKNNATFKAYYDAKMAEGRTHHNALGHCAGKLVRIIWKMMTDNLEFNLN

SEQ ID NO: 316710 - protein, 355 aa, unidentified
MENNKLDFSNQDFHLGIDVHKKSWQVGIMCNNNLLKKLSMEPNPHQLGEYMRRNYPGGNYFSVYEAGFSGYWIDRALKEEGIQNIIVNPADIPTKNKERVRKTDKVDARKLARELSNNQLEGIYIPSYLQEELRSLSRLRVQLVREQTRVKNQIKSMLMFYGKKIPEDFEKKGWSKRFLKHIEEFEFNTAAGKDCLQINIERFKMDHELLKEVLRNIRKNFREYGFEDLWNRLMSIPGISFLTSIALITEIMDINRFKRLDELCAYVGLVPSMRDSGETEKTMGLSKRQSKYLRNLLIESAWAAMKADPALTMSFNQLIRKMPKQKAIIKIAKKLLNRIRYVWKNGQVYQKAVVA

SEQ ID NO: 316711 - protein, 443 aa, unidentified
MQVVYQRCAAVDVGKDVIAVAVRLPGDGPDGRGTFKRTFKTFYGVLAEAARWLMELGVTHVAMEATGIYSMPVYHALVEHGDFEKVLVCNAGHVKNVPGRKTDFSDAEWLVHLLECGLLAGSFIPPAEIKAARDVIRYRAKVAQQRVSEIARLGNVLQDAGIKIDSVASSIATKSGRAMIEALIDGERRGPVLAELARGKMRAKIPDLAMALEGRFGDHHALMCRLHLDHIDHLEAMIARLDTQIEAMMTPFRAARDLLTTAPGIGPLSAAAVISEIGAGVREYFPDAAHLASWTGLCPANCESAGRRRPARRRKGNEHLQSILVECAWSAVRHDGYLKSLYHRHVMKWGGYRSQTAKKKAIIVVAHALVVIIWHLLATGKPYHELGAGYFTRRLDPGRETRRLIAKLELSATASPWTPPPDTARRRTLTERSPARVHCRLPS

SEQ ID NO: 316712 - protein, 358 aa, unidentified
MAGKVTETAVVGGVDTHKDLHVAAVVDQNNKVLGTQFFSTTRQGYRQMLAWMTSFGALKRIGVECTGTYGSGLLRYLQNAGLDVLEVTAPDRMERRKRGKSDTIDAECAAHAACSGIRTVTPKTRNGMIESLRVLKTCRKTAISARRVALQIIHSNIISAPDELREQLRNMTRMQLIRTLGSWRPDASEYRNVTNVYRISLKSLARRYLELHDEIADLDVMIAAIVDELAPELIKRNAIGYESASQLLITAGDNPQRLRSESGFAALCGVSPVPVSSGKTNRYRLNRGGDRAANSALHIISIGRLRTDDKTKEYVARRVAEGHTKMETIRSLKRYISHEVYTLLRNQNRQINSTPITA

SEQ ID NO: 316713 - protein, 313 aa, unidentified
MSEKFVGIDVSKYAFDFNVNGNNKVEHFNNDVKGIKKCSKALVKLAPALVVIEATGGYEMDLAMALQQAGLAVAVINPARIRNFAKAAGILAKTDDIDAKAISFFASALKPPTTAMITESTRKIKSLIARRGQLIRMRTAEMNRRGHAVDKFVDKSLEATIKLLDKQIESIDKEIKDCINNDPEMNTKADIAESMPGIGEVTASMLVTELPELGSLTRRQIASLAGLAPIARDSGTFKGKRMTGGGRGDVRAKLYMPTLVAIQYNPAIREFYQRLLKAGKTKMTAVTACMRKMLTILNVMVARKEYWKSELYA

SEQ ID NO: 316714 - protein, 389 aa, unidentified
MLLDHPSDGLAAIRTHIGAIFVSLELSRKNWLVTSLSPGKGEKMSRHSVTAGDVAGLLALFAELGRKAEAGTGQSYPIITIQEAGLDGFWLHRVLQQNGIESHVVDPASIAVPRRRKRAKTDKIDGETLLRTLLAYKRGEPRVCAMVVAPSPEEEDRRRLCRERQALIAERIRHVNRIKGLLFAQGISDYKPLRRDRRARLEALRTGDGRELPSHLKAQIGRELDLIELLLKQIKSVEAERDALLAAARKPASEAAAPNPVTMLLALKGMGANFAAVLWSEAFYRQFANRRQVAAYAGLAATPWQSGGIRHEQGVSKAGNPRLRTTMIQVAWLWIGHQPNSALTRWFKERSPQGRKRAIVALARKLLVALWKYVTQGVVIEGAVMKTAA

SEQ ID NO: 316715 - protein, 367 aa, unidentified
MDAPCTGVECAKMEVLLTPQQGTPMSEITVIGLDLAKHVFQVHGADPDGRPVLRKRLRRGQVLEFFASLSPCLIGMEACAGSHYWGRELQALGHEVRLIPPQYVKPYVKTNKNDAIDAEAISEALTRPTMRFTAVKSAEQQSVLMLHRTRELLVRQRTMLVNALRGHCGEFGIVAAQGLSRAGDLIKRIEDPADTALPDLARQALQCLTSQIRAIQEQIALIEKKLLAWHSSCEASRRLAEIPGVGLITATAVVASVGNATQFRSARQFAAWLGLVPQQHSSGGKERLGHISKRGDGYIRRLPVHGARAHLSWSRRKKQIRSAWLTGLLARRPTNVVLLAMANKTARIAWAMLSRGERYQEMFAAAA

SEQ ID NO: 316716 - protein, 330 aa, unidentified
MYLGIDTHKRYSQVAVVDDDGNLQDEIRLPNDRLSELAEQYAGGEAAIEASGNYRPIYEMLDEHLDVTLVNPSKNRIIADAAVKTDRVDAKRLAQMLRADMLAESYVPPDEIRVLRDLVRTRKSLVESRTAEKNRVRAVLTRTDNTYDSELFGPTGREFLAELSLSDTNRAILEAHLSVIDAYDEQIEQIEEKIERKVLESPAAQRLLTIPGVGQYTAAVIVAEVGEVERFDKDKQLVSYAGLDPVVHQSGDKEVRGSISKEGSAPLRWALVQCANIAVRCDEYLGNFYTRLKQRKNHQIAIVATARKMLVSIFHMLTRKEPYDPPGVSA

SEQ ID NO: 316717 - protein, 373 aa, unidentified
MKKVRFLGLDVHAETIAVAVAEPDGEVRSLGIIPNREESIRKLVKKLGPAEQLQACYEAGPTGYVVYWQLTALGIKCEVVAPSLVPVKAGDRVKTDRRDATKLARSYRAGDLTAVWVPNEEHEALRDLVRAREAAKQDQLRARHRLSKFLLRHGRRVPAGIKVWTQRYQDWVKEQVHFEQPAQEYTLLDYLHEVEHVGDRIRRLEKAIEEAVKLAAQRMREVIQGLQALRGIAQISAVTVVAELGEISRFPGARQLMGYSGAVSSEHSSGKRIQRGQITKTGNAHLRRIAIEAAWAYRHRPAIGAALRKRQEGLSEEVKEIAWKAQHRLHKRYRNLLAAGKEKQKVVTAVGRELLGFIWAIGVQVERSSRPVA

SEQ ID NO: 316718 - protein, 344 aa, unidentified
MGEVSTIGLDIAKSVFQVHGVDGAGAVVMRKRISRAKMLEFFAALPRCLVGMEACPSAPHWGRELQALGHTVRLMPPSYVKAYLKRSKNDANDAAAICEAVVRPSMRFVPIKTKEQQAGLMLHRTRQLLVRQRTMLSNALRGHLAELGIVSAKGRRGISQLLGIITDATDNRVAPAVRSLLDVLARQYSAIGAEIRSIDKSILTWHRSCEASRRLEEIPGIGPIVATALVAEIGNWREFRSGRNLAAWIGLVPKQHTTGGKDKLGNITKQGNRYLRWLLVTGAMAVIRYAKKHGTEKRPWLARLMERRHTKVAAVALANKMARMAWAIMVRSERYKEPKLLLAA

SEQ ID NO: 316719 - protein, 420 aa, unidentified
MNQTQMYFAGVDWASEKHDVWLTDAGGKRLGMRTFTHSGEGLAQLCAWLTATSGAEPGQIHVAIEVPHGPVVEALLERGFNVYAINPKQLDRFRDRFTLAGAKDDSRDAETLASSLRTDGRAFRKLAFDEPALVELREYSRLTDELTQEKNRLANRIRQQLWRYYPQIAQLDADLPEWVLDVWEAAPDPAKAARLSKRTASSILKKRRIRRIGADEVLGILRTQPLSVAPGVTDAAKAHIRLLAERLRLVNKQIKEAHGQLDRLGAVLAAPAPDSEGEAEPGQPPRQRDAAILDSLPGIARIGRATLLAEATEALRLRDYHALRILCGQAPVTRRSGKSRIVVRRYACNPRLANALYHWARVASQIDEKCKAKYAELRKRGHSHARALRSVGDRLLAVACAMLEKGTLFDPAFGSAKTAC

SEQ ID NO: 316720 - protein, 345 aa, unidentified
MKHYAGLDVSLKETSICIVDETGCVCREMKAPSHSEDLARALQDPAWRLVRIGLEAGPLSQWLFSGLAEAGLPVVCIETRHTKAFLKAQVNKTDRNDARGIAQMMRVNLFRPVHVKTATSQHRRALLTARKLLQEKAIAIENDIRGLLRNFGLKVGMVGTVGFDARIRELVDGRPELADIMVSLLAAKRTLREEVTRLHRRVLEIARDDSVCRRLMTVPGVGPVVALAYTSTIDVPARFRHSKAVGAALGLTPVLHQSGESNRVGRVSLCGDGMMRTLLYEAAQVMLTRVQKWSWLKAWAMNVAKRGGLRKAIVALARRLAIVMHRMWSDGTEFRWTRDDGMACA

SEQ ID NO: 316721 - protein, 410 aa, unidentified
MKVAGIDVHKKVLMVVVVDASTPEEKPARRRFVTMPSELHRLLTWLREQGVEEAVMESTAQYWRSVWLELEPHMRLHLAQAFSNRAPGGRKHDFKDGERLGRRLIADELILSFVPSGEQRIWRSLTRMKLQLTRDRVRLQNQIECLLEEMRIKLSIVVSNLLGASGLRILHALANGETDPKRLAQLGGERLQCTEEQLVDALTGRAQPVHGAMLALQLERLQLIDQQMERLNSMIAAAMKPQQDAVMRLAEVPGLGVDSAQQIIAQVGAQAGTFASAAELTSWVGTCPGKQESAEQNHSRRSAKGNKYMRRVLNQAAHAAAAKKGSHFQIVFRRLLPRLSYQSAIGAVAHRLCRVVWKILHEGVRFLEKGAEVHPREKKKRAQMLARALRQLGYEVTITPLNQLVPKPAV

SEQ ID NO: 316722 - protein, 397 aa, unidentified
MPCMLTSVMVNNSLIGKAGAGEASVASRASTSRQREFGRVLAIKAVTKQEPRRRYGTSPNSRLSRRKTASSYLQVREKTMSDEKVYVGIDVSKDTFNVASCPNVLKTSLPNTPQGHSQLCKHLKEFPIAIVVMEATGGYEKPIIAELLEAQLPAVVVNPRQVRDFARGMGQLAKTDSIDAEVLAKFAQLVQPAPRPHKTAQMTDLAELVHRRRQLNNLRTQESNRLAMAHHQKVRKSVQQVIMVLDHQIAQIDELISEHIKSDDNFSQKDKILRSTPGIGPQTSAMLLSQMPELGSLNRQEIASLAGLAPFDRSSGKWIGKGHIWGGRKDVRSVLYMAALSARNCNPVIRRFAQRLEDEGKAFKVVITACMRKLLIILNTMIRNQTLWTDEIILKNP

SEQ ID NO: 316723 - protein, 376 aa, unidentified
MIKTDVQYPTVHLAIELSRSVWLVAARLPGVEKPSLHRIGGGDTAALLALAETLRARAAAKLGAPVRVACCFEAGRDGFWLHRLLTAEGLAAHVLEPTSILVSRRARRAKTDRLDALGMLRVLAAYLGGDRQACSMVRVPTPEEEDAKRPHREREELVRERVRLENRIAALLATQGVRERPSLRNWERDLAALRTGDGRPLPPHLRAELDRLRRRLVLTLELTREVEAERDAALAAEPRDAVGRKIAALCRIRGVGPNFAAVLTREVFYRAFANRRQLAGYVGLTPVPHQSGEADRDRRISRAGNPRARTTPIQLAWLWLRYQPDSAPARWFRDRVGALRGRTRRIAIVAMARKLLIVLWRYAETGLVPEGVEVAA

SEQ ID NO: 316724 - protein, 411 aa, unidentified
MRLFVGDDWAEEHHDVEVMDAGGRVLAKRRLPEGVAGMARLHELVGQQLGEDAEDAEVVVGIETDRGPWVAALIAAGYVVFPVNPLQASRYRERHGVSGAKSDPGDSHMLADMVRTDSHQLRPAAGDSPQAAAIKVVARTHKTLIWERTRQTQRLRHQLREYFPAALEAFEDLDATDALELLGKAPDPARAAKLTRAQVSAALKRARRRGITGKTDAILAALRGEQLAQPPALTAAYAATVRSLIAVITAVSEQVKILQGQVEAHFGRHPDAEIYLSQPGLGAILGGRVLGEFGDDPHRYTDARARKNYAATSPITRASGKKKIVAARYIHNGRLIDALMAQAFAALNASPGARACYDDLRNRGIEHNDALRRLANRLVGILHGCLKTRTLYDEETAWSHRENLPQSSVAA

SEQ ID NO: 316725 - protein, 359 aa, unidentified
MDNHTSLTADVTGGVDTHKDLHVAAVVDERDRVLGTRSFPTTRQGYRQMLAWMRSFGRPVRVGIESTGSYGAGLLRFMQAAGIEVMEVTAPDRHDRRKRGKNDDLDAQNAAHAAFAGHRTVTPRSRDGMVEALRVLRVCRKTAVNARRIALQMIQNTIIAAPDGLRDQLRQMTRMQLIRTLAALRPDLTTYRDLEAAYRISLKSLARRYLELHDEIADLDVMIGAIVNELAPELLARNSIGQNSAGQLLLTAGDNPERLRSEASFAALCGVSPVPASSGKTVRHRLNRGGDRAANSALHIIAIGRLRTDDRTEAYVARRVAEGHSKLEAIRTLKRYIAREVYGVIMQRQKQINATGIAA

SEQ ID NO: 316726 - protein, 339 aa, unidentified
MAIVCGLDIHRTQVTFDWVDVDTGEGKRGKLAPANRETFRGWLEQFAGQQVDVVVEGCTGWRFIVEECRAAGVTPHLADPAEASVRIHGVKRRAKTDKVDAKGLRELGVQGRVPESWIPPAQVLEIRTAVRLYHDLMTDRAAWLHRIHATLFHQGAVAQTQLLRGDRDRLHDSELMSPAGKEAVQSILRVVEVLDGEINRIRQQLQRFAAKQPGCKELQKEYGIGKLTSVIIWSEIGDCRRFSSSDGAVRHSGLDVTVYSSNGKRSAPHLSRQGQPLLRWALYEAGRCGARPTSPDHEYWQAVANRLGRKRAGISVGRKLTRRCHHRLRALGDDAFAEV

SEQ ID NO: 316727 - protein, 366 aa, unidentified
MIVIGADTHKATHALVAVDAGTGRIRGGREIKAEEPGHLAAVRWARELDDDRAWAIEDCRHVSRRFEQALLAAGERVVRVPPHRMGASRKGEREPGKSDEIDALAVARAVVKDGVECFPVAYLNDQAMEIRLLFDHRADLVAERTRIVNRLRWHLLELSPELERSCKRGSLSKSRVLDRVERGLRKLPAGARVRVAREQVRELRRLSREIDALHCELGALVRAHRPQLLAELGCGALTAAILIGRTAGNERFRSEASFALQSGTAPIPCSSGKSIQHRLNRGGDRHLNHALHIIAITRAQRDPATKEYLDRKEAEGKTPKGALRALKRHLARHFHRLLAEPAADQQRAAVDPNSTGVAPSPMVCIS

SEQ ID NO: 316728 - protein, 536 aa, unidentified
MACGPHRGYDPRAFAPDTVSKVIHGRAKRAPTAKRSEAVNNFAAMNFENNLRPGNNGSGRKARGRTRFACPNPTRIKPRTPADPGAFIKKSERTTPQEGHRIRTTNDKGRGPCANKPMNDTISWESIIYYAGFDWAKDHHDVVVVNPQGKIIKDLTFEHSAEGWAKWKELVAAYPHLAVAIETSQGAAIEQLLTSGVVVYPVNPKSAERYRDRKAPSGNKTDFLDAWSLADALRVDGHGWRALKPLDPLIQELRLLCRDEVDLIAKRTELVNQLQAALHEYYPAALQAFEDWTATPSWSFVQQFPTPELLRQAGRRRWEKFLHVHRLYRPEVNEKRLEIFAKAHEFCGPVAVTRAKSRLALALIKLLHALETQLDDYRKEIRQLFNEHPDHELFGSLPGAGEKLAPRLLSELGSDRSLFISAQSLQCYVGTAPVSFESGQVRQVYVRFMCNKSFRHAVHLWADLSRKSCSWAQVYYQQLRAKGKSHASSLRCLGQRWLKILWKMWQTKTCYDPDFHMANQLKHGSWVLAVKPAKSV

SEQ ID NO: 316729 - protein, 335 aa, unidentified
MLDEAGEVISEQKLGTTPKAMKEVFATMPRSRVGLETGMHSPWVSRLLSELGHEVIVAHARNVRLIGESRRKDDRLDARTLARLARIDPQLLSPVKHRSAQAQADLTVIRARASLVRARTALVNAARGLTKSSGERIHGCSPRNMDVEKAQTLSPQLQAALGPLLQALEGLTEQIAKYNRQIEEIAKQSYPQTALLKQVKGVGTLIALTYMLTLEDPHGFRKSRDAGCYLGLQPGRRNSGQSEPQMHISKEGRSVSANVAGAGSASHPRPVWSRQRSSTMGAEIGRTRRQGGKEKSHHSDRPQTGGAAASAVGQWRSLRTAAQYEANDVGSRLVE

SEQ ID NO: 316730 - protein, 341 aa, unidentified
MQVTTIGLDIAKNVFQVHGIDATEKVVVRKQLRRGQLIKFFEALAPCLIGMEACATAHYWARELTKLGHQVRLMPAKDVKAYVKRNKNDAADAEAICEAVRRPTMRFVAVKSAEQQGRLMQHRVRDLLMRQRTQLINALRAHLAELGIAAAQGREGIKELLAIVAQDGDSRLPADAHASLIALAAQLQAVQTMIGSIEKRVVVQHRSNEESKRLESIPGIGVIGATAIAATVLDPKVFRSGRDFAAWIGLVPRQDSTGGKQKLGPISKQGDRYLRRILVVGACSVLRRARQQPEKYPWLIQLLARRPFKVVAVALANKMARIAWALLAKGGTYRLPQLAAA

SEQ ID NO: 316731 - protein, 397 aa, unidentified
MYIVGIDIAKRKHEAAVIDGEGTVIIKPFSFTNNCSGYNRLLAMLTKAKLPLDEVSFAMEATGHYWLALFTRLQKEGFRVQVINPVQTNSIRSFYIRQAKTDPRDALLIAEVIRFGHFSESTLHPENIYELRELCRGRHAIVSMQADVKRKVVALLDQVFPEYETAFTNLFGDTSMAILQTCPTPKELSKMPLEELCHLIEVSSHKRFRMAKAQELQALARNSFGFAMAGDVFSTMIRLYAKHLVFLKQQVQEMDRKIAEIMDTLDTPITTITGIGPTLGAYILSEIGDISRFSSAAKLAAYAGIDPTMRQSGEYNGVRNRMSKRGSPYLRHAIWLAASSAVLHDPALKLYFQKKRDEGKPYMASVGHACRKMVSIIYAVMRDNKAYTPYIPNEISA

SEQ ID NO: 316732 - protein, 339 aa, unidentified
MKHWIGIDVSSETLDFALLDEHGTHLESTQVKNESKAVIKLMSAWRKRHGVAMEHSLVCLEPTGHYTLMLLNLIVEQQWKAWLAHPLDIQQSMGIKRVKNDKVDALRIAQYARTFREKARLFTAQNLKLDKLKHLLTRRQHLVRVRAMYKKHISDLNRYMDRDIQKVFDQLDKRLMAASDRAILRVEQLILAQIRGDQQSSTQYDLLRSIPGVGPQLAAYLIALTDGFHRFTDPRELSCHAGVAPFERSSGSSVRGRTQVSHKANKTLKTLLHMAALANVQREGELRTYFRRKVAEGKKPILVVNAIRNKVVHRICAVIRKGEAFKPFLENSKPRLEMT

SEQ ID NO: 316733 - protein, 380 aa, unidentified
MSESMALVGLDVHQAQTVAAVLDRVTGELDVKRLRGAPGDVVPVFLEQLGRPVRAVYEAGPTGFTLARAATARGLDLRVIAPGSIPRAPGDRVKTDRRDARRLVRLFAAGELSFAWVPSEADERFRDLVRCIDDARKDLMRARHRLSKFLLRCGLRFGARQWTQPHQRWLGSLTFDDALSRTVFIDYCCAVDAVAHRRRTLIAVLEDAVAASSHAETVARLRCFRGINTLTAAGLCAEVGSFERFAKPALLSGFLGIVPCEYTSDQKRVQGQITKAGPTHARRLLVEAAHHYGAVRASARSSAPATTARTHASSESRGARSGACISAGRTSARHAASRPEPSRSPARASSRRSAGRPRPWTDPFINIQPRAAGGCRGAHE

SEQ ID NO: 316734 - protein, 358 aa, unidentified
MLYLGVDVHKRSCWVTVLDGDGQELEQRKLGMERATLLGYFGKLPQPAQVAVEATCNWYYFLNVLEPLGLELHLVHPQKTRAIARARIKHDQLDSRILARLLHAGFIAEAWIAPRPVRELRQLVRHRTRSVGWATRAKNGVHGVLNRQGISAPVESLFGAKGRAFLQAAALRQLDRWEVDDQLARLDLLAAQIQELDQEIRARGRGSAAAQALEQIPGIGPFIALLLVAEIGDLRRFPTAKQLVSYLGLAPSLYASGERRWTGEITKQGSSLLRWALVQAAHVAARSPRFQEFYARQQERHGTAKAAVALARKLATISYYRWRAAEAHGPPAPAGKSSGVHLGSSRSAGSEHRPFKSD

SEQ ID NO: 316735 - protein, 342 aa, unidentified
MDEYDGRQFVGIDLHRRRSVIVRQSESGEQLSAVRIVNDPVALGLQLEQAGSDPEVVLEATYGWYWAVDVLQACGAHVHLAHPLGVKGFRYRRVKNDVRDAADLADLLRMGRLPEAWIAPPQTRELRELVRYRAKLVAIRSGLKAQIHAVLAKAGVLIAASDLFGVTGRQRLAKVPLGAAYAQRIGSLLQLIDIFDSHEARFAAMIAEQLDTHTGYHAIQQVPGIGPVLAAVFVAEIGDVDRFTDPAHLCLWAGLTPTHRESDTVVHRGHITKQGSKAVRWAAIEAVQRHPTTAKIAADKHRIEARRGKNIAKVAAARKLLTLVYYGLRDGHIRALDRTRAA

SEQ ID NO: 316736 - protein, 448 aa, unidentified
MPEQTWYAALGLAACVGLDWAMDKHAVTVKDLDSGQRERCQLGNTPEAVELWAGGLAVRFGGRPVAVALEQSRGAVISMLSKYAHLLLFPVHPKALADYRKALHPSGAKGDPTDGDLLEEFLELHGRGLRMWQPDTEATRSLQWLTEERRKFVGDQTRFTQRLRVHLQRYYPQIVQWFDEIDTPLVLAFLRRWPTLEEVKKAKPATLRRFFQQHNCRQQSKIEERIQAIASAVAATLDAAVILSGRLAVATLVEQLEAIHTGIAAYDRQIAEITLAHPDNELMDSFPGAGPAMRPRLIAALGTRRDRYLNAAEIQRCSGIAPLIERSGRQYWVHWRWACSKFLRQTFHEWASHSLAFSAWAREYYQAQRDQHKGHHAAVRSLAFKWIRILFRCWKDRTPYDEAKYLQALIARKPKQSRDLQSKLDRGKQPEFIWTSRNGFNKLVGFNY

SEQ ID NO: 316737 - protein, 420 aa, unidentified
MDELTDEPCELVQRVAALDIGKASLVCCVRVPRETRPGARRQEVRTYDTVTPALLELRDWLVCQGVTRVVMEATSAYWKPPFYLLEDDIECWVVNARDVRNVPGRPKTDKLDAVWLAKLAERGMLRPSFIPGRAQRQLRDLTRYRRTLVHERTREKQRAEKLLEDAQVKLSSVISDIFGVSGRAMLAALVAGQRDPHALAGLARGSLRGKTGVLRQALTGHFTDHHGFLLAMMLDRVDALSAQIGQLSARIEAAIAPFAAQVAQLDEIPGVGITGAQEIIAEIGTDMTRFPTAGHLVSWAKFAPTARQSAGRSKAATTGKGNPWLGGTLGEAATGTIRTSTFLAARYKRIVRRRGKKRALVALGNSILTIAWHLLAEPGSRFTDLGPDWHDRLAPQRRKRQLITELERLSGQKVTLTSTA

SEQ ID NO: 316738 - protein, 347 aa, unidentified
MRFYTTQHPFYCGIDLHARTMYVCILDQNSEVLVHRNMQTRPETFLNVIAPYRPGIVVAVECMFTWYWLADLCADEGIPFVLGHALYMKAIHGGKAKNDKIDSQKIAALLRGGMLPQASVYPAAMRATRDLLRRRMHLAHKRAELLAHVQNTNSQYNLPAIGKKIAYKANRDGVAERFADPAVQKSIEVDLALITYYDELLGDVERTIVNTAKHHDANTLYLRQTVPGIGKILSLVLLYEIHDINRFPRVQDFVSYCRLVKCAKESAGKRLGTSGTKIGNAHLKWAFSEAAVLFLRDHPAAQKYLARLEKKHDKGKALTVLAHKLARAVYHMLQRQVAFDREKFFQR

SEQ ID NO: 316739 - protein, 343 aa, unidentified
MQVTTIGLDIAKNVFQVHGIDAAEKVVVRKQLRRSQVLEFFKALPPCLVGMEACATAHYWSRELTKLGHQVRLMPAKDVKAYVKRNKNDAADAEAICEAVRRPTMRFVQIKSAEQQGQLMLHRTRDLLMRQRTQLINALRAHMAELGIVAAQGTAGLKELLKIIAGERDARLPVDAHASLVVLAAGLHAVQTMIGTIDKRIIVEHRSNEASKRLRSIPGIGLLGASAIVATVQDPKAFRSGRDFAAWIGLVPREDSTGGKHKLGPISKQGDRYLRRILVVGAHAVLKLARQKPEKYPWLTQLLARRPFKVAAVALANKMARVAWALLAKGGTYYRARTVTAPI

SEQ ID NO: 316740 - protein, 318 aa, unidentified
MMAQDDLVVVGIDVAKNKVDACIRALCVRRTFPSTAQGRRKLVCWLRKHKASAAVMEASGGYEREWAKVLREKAVEVRIVDPKRVRNFARSAGRLAKNDVIDAEMIAWFAGTFAEASSQGHDAAREKLAHIVNARCALIDLQIKLQNREEHPAPEPVQKMQARLLRAREIAELEAAIAAMIKATAHFAELAEIIESVPGLGPITSAGLIAAMPELGQVSNQAISALLGVAPYDDDSGKRRGERQIKGGRRKMRNLFYMACLGAATRHNAVLKAFYDRLIAKGKERKVALVACMRKLIVILNTMIARRQKWDASRYAVS

SEQ ID NO: 316741 - protein, 388 aa, unidentified
MQIITDRPHAPTAIRTDLGAIFVSLELSRSTWLITSLSPGGGEKISKHTVRSGDVAGLWARFSQLKDKVQVRTGQVAPIIVIQEAGLDGFWIHRLLQDEGVESHVVDPASIATSRRRRRAKTDKIDGEALVRALLAYKRGEPRVCAMVRAPTPQEEDRRRICRERKTLTAERIEHVNRIKGLLFAQGISDYEPLRRKRRERLEALRTGDGRLLPEHLKAQIGRELDRLELTLQQIKSVEAERDAMLSPSDEGTPAPGAMLKNLKGIGPEFAGVLWAEGLFRSFSNRRQVAAYAGLAPTPWRSGSVAHEQGVSKAGNPRLRTTMIQLAWLWVRHQPRSILTLWFHQRVQLNGGRVRKMLIVALARKLLIAFWKYVTAGVVLEGAETTVA

SEQ ID NO: 316742 - protein, 358 aa, unidentified
MRVYIGVDFHARQQTLSYLTTEDGEIHRLRIEHNTEDVGHDNVRAFYTGFAGEVIVGLEAGGYSQWFEDLMEELGHQLWVGDAAEIRRLAPRKQKNDKRDADLILDLMISGRFPRLIRRSAHSRQVLSQIGYRHKLVKMRTMAKNSLHAISVGAGMSSRLQLHSERGRARLERLKLMPATARQVTELIELVDHLSEKVKRVEQWLRQEAAKDRRALLLQTQPGIGLLTSLALVHTLEPVDRFASARKVTAYVGMDPVEDSSGDRRRIGSISKAGSRQLRFLLGEAAQVAIRYDQDLRGFFQRLVKRRNKAKAIVAVSRKLLVRSFIMLRDQIDADEFLRRGVEARSSRSAHRPLCLKP

SEQ ID NO: 316743 - protein, 370 aa, unidentified
MSIKRILAKTIDTDLEYEVIGIDLAKSCVSAVLLSVDGEVIGIDRLNYQELEKIAQVLSPTTFALEPCAEMNYLVQKFEDWGHRCIVINGKHVQDYVESHFSNQKTDLNDAQALAFLARDSQLRTVTAKDREQQKYASLTTLREQYLKQYRQTIVSLKGICQAWGLSISKGISGKARLKDLIENHAEFPSELRAELINMVTHAQSAQRDLNNITKTLVELAKKDKACQLIQTVPGLGPICSCRLRATIGDIKRFKNPKDFPAYYGLVPRSIATGHNEKKGKITHRGDKTMRSLMVQGAGCVVIMATKGTLGSKQLTKWILKKQKEKMPWGKLVCAVAAKLLRIVRAILISGKPYNSKIAGVARCSLPQAA

SEQ ID NO: 316744 - protein, 411 aa, unidentified
MEIVYKRCCGLDVHKETVAACVMIREGEKVQKEIRTFRTMTSDLLVLHDWLLAHRVTHVAMESTGVYWKPVFNLLEGSFEVLLVNASHIKTVPGKKTDIKDCEWIADLLSHGLLKGSFIPPQPIRDLRDLTRYRKSLSDERTREINRLQKLLETANIKLSSVATDVMGVSGKAMLEAILSGSTEPEVLADLAKGRLRNKLSLLKEALQGRFRPHHRFLLGQILSHLDFLDEAIGEMSKEVEKRLDLFLQEIELLKTIPGVKQRMAEVILAEIGADMSRFPTHRHLASWAGLCPGNNESAGKRKSGKTRKGDRWLKRGLTESSWAVSRAKETYLSALYHRMVRRRGKKKATVAVAHAMIVMAYHILKHKLPYSELGADYFDRLNVSYIKHHFTKRLEALGYKVTLEPLQAAA

SEQ ID NO: 316745 - protein, 339 aa, unidentified
MKLYTGIDLHSNNNYLAIIDDNDNRVFKKKLPNHPETILATLAPFREQVEGVVVESTFNWYWLVDLLREAGYHVHLANPAAIQKYKGLKHSDDNHDAFWLAHMLRLGILPVGYIYPKDDRPVRDLLRKRGHLVQLRTALINSLQGIISRNCGCSLHAKKIKAVKEDFITPLLAGQSDLQLSGTVSKECIDFLTGKIREIEHSIKSSMMEKTSFLALQTIPGVGNILALTILLETGDISRFSKVGSFSSYCRKVPTQWTSNSKNKGKGNTKNGNKYLAWAFSEAAELSKRYSDSAKAFYNRKAARANRMVAHAALAHKLARASYYIMRDGVAFDEKKLFA

SEQ ID NO: 316746 - protein, 357 aa, unidentified
MKYVGIDVHKKMCQAAVLDDEGESLDETRFPNDAKGIEEFALKLTTFKDDVRAVVESTGNLWIQVHDRLEKHGFTVALSNPGKTRLIAEAKVKTDKVDAKTLARLLRAEMLATCYVPNEEERSRRELLRHRLNLVKTQTEVKNRVHSLLDRHGLHMPDQTPFSKKNIEWLKERSLSTTDDAILRSDLALLEILNEQIQLIEEKIAALAVEDQQVRLLMTMTGIGYFTAMLILTEICTIERFSSEKKLSSWMGLAPSVHQSGEKTRIGGIALGNKRLRWVMVQCAHASVRFDPRLKSLYERYSKRKGEGKAVVAVAHEMTRIVYFMLKRNEPYRGENRRLTERKLKNMEKRALDGLRN

SEQ ID NO: 316747 - protein, 390 aa, unidentified
MYIVGIDIGKNNHEATIIDETGVIIGKSIKFTNSHSGANKLIEQVTKNIGDNDVVFGLEATGHYWLSLYSFLLEKGYVINVINPIQSDSFRNLYIRQTKNDTKDSFIIAEVIRFGRFTTTQLADEKILSLRQLCRFRLSLVDSVSELKCRIITVLDQVFPEYEKLFSDTWGISSKKLLEKYQTPEEILALDTTKLAEFLKEHSRGQLGFAKAEKIQEAAKNTFGIKFAQDAFKFQLKQLIKQVLFIEDQIKDLDSEIEIYYNQFDSHLESIPGIGKVTAAIILSEIGDITRFKSAKALVAYAGIDPTVKQSGQFLSNNNKMSKRGSPYLRRALFLCASTCTLHESPLNDYYTKKRNEGKHHLTAVGAVAHKLTHIIYAILRNNKDYEPMS

SEQ ID NO: 316748 - protein, 422 aa, unidentified
MRVPFRRFVVRTGGRRLAPHRAKRDFIGECFPQGRSGRSCVRLVSVLRRAYKLLPFDLWEIIDVQIADRMSVETKITLGVDTHKDTHVAVALDGLGRHLGTLSVPTNTAGYRELLGWARELGIIKQVGVEGTGSFGAGLARLLKAEGIPTREVIRPKRRDQYRSGKSDPIDAEAAARAVLAGSATGEPKDADGQVEMIRALRTTRRSAVKARTQAANQMKALLVSAPEELRAQLRDLSTARLVCRASRFRLGENPHSVMAATKLSLRSVARRYQHLCEEIHELDMQLDRLVAEAAPELMAVDGVSTDTAASLLITVGDNPERLNSEAAFANLCGVAPIPASSGKTVRHRLNIRGNRDANRALYVIALGRMGRDERTKAYVAKRTAEGKSKREIIRCLKRYMARELYRILVQPLSPLPSVSAP

SEQ ID NO: 316749 - protein, 319 aa, unidentified
MAQNELVVVGIDVAKHKVDVCIRSPLLRQTFENTAQGQRKLVAWLRKHRVNKAVMEASGGYERGWVRLLRQAGIEVRIVDPRRVRSFALSAGRLAKNDAIDAEMIAWFAETFSEAPCQVYDAAHEELLALAKARISLVDLKARLESQSEHAAPSLVQAARRRLLKNLVGEIAKIEAAIAARIKATPHLAERAEIIESIPGFAETTSANLVAGMPELGQVSNEVAAALIGLAPYDDDSGKRRGERHIKGGRRWVRNAIYMPCVGAATLNNPVLKVYYQRLIAKGKEPKVALVACMRKLIIILNTMIARRQKWDSSRYALG

SEQ ID NO: 316750 - protein, 423 aa, unidentified
MDKNDDTRLEEFRQLKREIRGSTRHMVVGMDIAKERHHAFFGTPAGKVLLHRLVFDNTKEGFEKLCFQADILKTQHCLARVVFGMEPTADYHKPLGEYLIEHGHSVVLVAGTAVRKNRELLDGRWDKNDTKDAANVADLIAQGKCLFYEFPSLSLRELRSLLSLQRRLKKQEQGFRVRTRNHLIARYFPELDPYFGYSEGPAIVKWCLDPKELTSLPFEEFVRMVSSKTGGRKQRRRLEEIREKAASSIGCESHPSVAFEGRVLVEEVRRFQDLLRETQAGIRAVCHHFPEYFFLLTIPGFGPDISAKVLAAIGNPHRFENYRQVLKTAGLDLSADRSGKRSDVTPVISKKGKADLRYGLYQAALIASTRNSAFMTYFTTKLKGRERENGIGTKMRVKLAAKMLIIAWALMKKQEKFDPGCIV

SEQ ID NO: 316751 - protein, 343 aa, unidentified
MEYYVGLDVSLAETSICVVDDDGKIVCEGTVISQPAAIAEFIETKAKAALRIGLETGPTATWLWHELHALGLAVICIDARHAKAALSMQINKSDRNDAYGLARIMQAGWYKEVQVKRLGCHEVRAVLNSRALLVKIKRDLGNQIRGLLKNLGLIIGKANGNVFSCRVENLVAENPHLQQAVRPLLAVREMVSREISDLDRRLLVLARDDVESRRLMTVPGIGPITALAFRAAIDEPARFKRSRSVGAYFGLTPRRYASGEMDWSGRISKCGDSLVRTYLFEAAGVLLTRVPHWCKLKAWGLRLVKRIGFKKAKVAVARKLAVILHRMWCDGTDFQWLEEEATA

SEQ ID NO: 316752 - protein, 445 aa, unidentified
MSESLITAASEPEWAAFAAIDWADQKNFWRLLPAGSQRQEQGELDNTPEAVEVWAAGLQQRFSGRRIAVILEQSRGALVYMLAKYPHLVVFPVHPTTAARYRETFCPSGAKADSSDTASLLDLLLRHRERLHQLRPDTVETRLLQFLVEERRRTVDERTRQSNRLVDCLKLYFPQVVQWFDDLASPLVGDLLELWPGLEQLQRAHPGTLHKFFHEHNCRGEKRMEERIQAVYQAIPATQDAAVLEAGAMRARGLVRLLATLRDQIAVCDRRIAELVLAHPDGGLFGSLPGAGPALIPRLIVAFGTQRDRYQAAYQVQCYSGIAPVKEASGKTERVHFRLACPKFLRQTFHEFATHSIRYSEWARAYYEHLRDDEKKSHHAAVRALAYKWIRIIFRCWKDGKLYDERVYLDSLRRRGSLLGAGLKAATRPEWKTLGGFQKLSENNA

SEQ ID NO: 316753 - protein, 343 aa, unidentified
MQIHSVGIDLGKATFHLVALGAVGKVIVRKKFTRKQLLAFTANFPASLIGLEACSGAHFLGRALRKQGHDVRLIPAQFVRPFVKSNKNDFVDAEAIAEAVERKNMRFVPIKTDDQLDLQGIHRVRDRLICRRTAVINQLRGFLLERGMVFAQRSANLKAAMADILENAEADLTPQMRSLINMLWDEWKLVEDQIKKLDLELERISAADAGCTRIRQIPGIGPVVATAIVAAIGNGAAFRKGRDFAAWLGIVPRQYSTGGKAKLLGISKRGNIYLRKILIHGARAAVLRVKRDRAPIGPWLEALDARAPKNVVVVAMANKIARIAWAVLSSGEDYRPMGNIVSA

SEQ ID NO: 316754 - protein, 342 aa, unidentified
MSFYCGLDLSARDCYVCVIDDNLSILVQEKVKNELPRIIALLEPFKENLQIVVESTFNWYWLVDGLQEQGFDVCLAHTLGLYMITGAKVKTDRRDAFALAKLLKAGVIPKAYIYPKETRPTRDLLRRRSKLVQLRAEEYGSLRRLLLREGILDHSRNEIKHTVEEDLQEWFQHPMIKLHARFQLERIDLFTTQITELESAILVAAKERPEYTLLITVPGIWKILAMTILYEVGDISRFKDARHFSSYCRVVPGVAQSGSSSRRGRGSKQGNPYLKCAFSQAATFAVRYYPNIRRCFDRHLSHHRGRARKLIAYNIIAHKIAQAVYRVLRDGTKYREDLMFDN

SEQ ID NO: 316755 - protein, 414 aa, unidentified
MDIVHTHCAGLDVHKKTVVAAIIVPNPAGGLYKETRTFGTMTADLLALSDWLLAQGVTHVALESTGEYWKPVFNILENEFEVLLVNAQHVKAVPGRKTDVKDAEWLAELLRHGLLKASFVPPLGQRELRELTRYRSTFVKERATLVNRVHKVLESANIKLASVATDVTGVSGRAMLQALLEGNATPEVMAELAKGRMREKRAQLAKALEGCVKPHHRFVLTELLCQIDSLDETIGRFDEQIVAYCRPFEEAVTLLDTIPGVARETAEIIIAEIGTDMSRFPSADHLAAWAGVAPGNNESAGKRRSGQTTKGNHALGVALNHAANAASHTKDTYLAAQYHRLATRRGKKKAIVALEHSILIMAYHIIQRKEPYHELGGDYFDKRRPEATAQRLVKRLEHLGFQVSLQQMQVPVAA

SEQ ID NO: 316756 - protein, 366 aa, unidentified
MKKNNTTAMGRKQIFKEPKLTIGLDLGDRSSHYCILDEAGNVILEHNLPTTPKGIQQVFRKIPRSRIALETGTHSPWVSRQLTELGQEVIVAHARNVRLIGESSRKDDRVDARTLARLARIDPDLLGPVRHRSAQAQIHLTVIRARAVLVSARTALVNAARGLTKSYGERLKKCGTEQIDRESSQGLSQELRDALDPLLREIASLNERIAEYDRRIEQIAKEVHPEVALLKQVKGVGTLIALTYVLTLDDPHRFRRSRDAGCFLGLRPGRRNSGASEPQLHISKEGDRYLRTLLVQGAHYILGPFGQDSDLRRWGLKLAERGGRNAKKRAVVAVARKLAVLLHKLWVSGEVYEPLRNNHKVVSAVA

SEQ ID NO: 316757 - protein, 339 aa, unidentified
MKLYAATDLHSSNNYLAIIDEHGERRFKQKLPNNPSIILEALKPYKEEITGIVVESTYNWYWLVDMLMAEGYKVHLANPVAIEKYSGLKHADDKHDAFWLAEMLRLGILPEGYIYPKEESPIRDLLRKRGHLVRLRTSLVISLQNIINRNCGRELDCNSMKRLKTDHVAPFLEDNEDLALAGRVSKEGIDFLTRRIKEIESAVEHKVKLQAPYANLQTIPGIGKIIALTIMLETGHVERFADTGNYVSYCRKVHTKWMSNGKQKGKGNRKNGNKYLAWAFSEAAELARRFDSKAKAYYQRKKQQTNFMVAHNALAHKLARAAYHIMKDNVSFMPEKLFA

SEQ ID NO: 316758 - protein, 308 aa, unidentified
MHYLYYVGLDVSKETFDASLVAFEDANEMAHRKFANSRKGICSCLHWVEKRHGIRLVDVIFCAEDMGSYISEMAVCASDRTLNFNFSLISPLVIKYSMGIARGKTDRVDARRIAEYAITHYRKIALYLPAEKELCQLRTWLILRAHLAKQRVAKLVLLEKLDYKEKFADVSIQRSMLQEEIAYAETHMKTIEREMKELIAADSNICRNYKLLTSIKGVGPITAIVMLCSTLNFTKITDHRKFACYCGLAPFEHSSGTSVCGGCHTSSMANRDIKVQLNRRALIAIRCDPQLKAFTNAKWLKVNINSAS

SEQ ID NO: 316759 - protein, 399 aa, unidentified
MISVGIDVSKGKSTVCILKEYGEVISEPHEINHTEADLKALVESISELNEETRVVMEATGAYHLPLLTYLKNHGIFVAVINPLIMKKYSAIGLRKGKTDKLDSIKIANYGIDNWFKLTDYEATDEVYSELKLLGRQYSHYIAMRIESKLVLSNLLDRTMPGIKNLLKNRSDKPEKDKLNDFVKEYWHYDNITKKNEKQFINSYFKWAKKKGYHQSETKAKQIYALAQEGIPTLSSSTPSTKMLVLEAVRVLSEIDRTLSMILSQMQELASSLKEYNVVRNMPGVGDTLAPRLIAEIGDLKRFYNKKALIAYTGIDSPPFESGQFVANKRRISKRGSALLRKTGYEIMKCIKSAKPKDDPIFLYMLKKEAEGKPKKVAKIAALNKFLRIYYARVKEVYNT

SEQ ID NO: 316760 - protein, 465 aa, unidentified
MSIILGVQMSVAFSSTEPYLCENHFLYFLVDNFQSKPFNKNILRKGVIMLKIVYRNCAGIDVHKKIIVVTIAKTNEQDITEYQTKSFLTFTEDLIKCRNWLLSNNTKDVCMESTGKYWIPVFNILEKDCNCVITHPKYVRTILGKKTDKKDSVWIADIFKHGLVEPSFMPPEDIRQLRDLMRYRNKLVYNRTGEKNRFQNSLTVSNVQIANVLTDVFGKTSQSILKLMLEQPNLTLEDIKPLLRKNLKSSPEDILKSINGTFDECQSSKMAICLKHYDSINECIEALEEQILKIAIKFKTEINLLLTVPGIKELSAIFIIAEIGTNMNVFVDDKHLISWAGLSPRCNESARKKKSVKITKAGVYIKPLLVQCALCAIKDKTCPYIKARYESLKRRRGHKKAIIAIARLLLTSIYHILNTGEVFDYERFDKLLNRNFKSQQKAKNTPEEMISYLTSLGYEVTMQNT

SEQ ID NO: 316761 - protein, 370 aa, unidentified
MYYIGIDISKFKHDCAVIDDSGEIVTPSWSFTNDAEGFSQLKLLLNSLDTETGIGLESTGHYGMNLKMFLESNNFSFMEFNPLLINRFVKSKSLRKTKSDSIDCMMIAHYLMTVEYKPYPSSFYHTEKLKSLTRFRDSLIRFRSRQLVELTNILDKVFPEFKPFFGSRFSVTALYILSNYSSPEKIANMNSKSYEALRKLSRGRFSTVDFAKLKQLAKNTIGTTEDYLLLQMQIVLDIYRQLDSKVDETEVSIKECVSDMNPPMLSVPGIGIESAAVILAEFGDFSKFKNASQMLSFAGLEPGYFQSGTSETTGKMVKHGSSYLRYALMNCAQTVVNYEPTFAMFYSKKRAEGKPHRVALLKSSLRSILL

SEQ ID NO: 316762 - protein, 387 aa, unidentified
MHKPHDDGKACLTAFVQDSTLTVVIEMSLRGWLVAGMVPGVNREPRKKIAPNPEVLLQLLYRWRDEAIRAGKEITRIAVAYETGRDGFWLARWLRARGIDAHVIHATSVAVSREHRRAKTDRIDTAMLQRGFLGWLRGERGHCSMAIVPTVAEENGRYPHRERETLVKQRTSTVNGMKSILIQFGVRNFNPVLRKAPEKLGSVRTPEGIPLPSNAVAALRRQMERFRVIKEQIKAIELTRLQRLQRDPAEKFNAMVFLLVRIIGLGIETAEQLVHEILSRNLRDRKAVARYAGLTGSPDESGSKRREKGLSRSGNGRVRKILIQLSWRLLRFQPESDLVRWFKTRTANAQGSRKPMIVALARKLIIALWRYVNTGLVPEGFQLRSAA

SEQ ID NO: 316763 - protein, 413 aa, unidentified
MFFAGVDIAKRQHEVCVLDPDGHQVLTMPVPNSQAGAERFLRALQGQCGQAPENVRFCMEATGHYWLALYGFLTHRGYQVHVVNPIQSDAARDLYIRKSKTDRKDAFILADLLRMNQTAETLLASESVLKLQALSRTRFAFVDPVAALKQQVLGILDRIFPEYPNCFSDVFIKSSRELLKSYSTPDELAAADLTELAQFLTTHSHGRLGLGHAKNLQQYAKGTFGISIAIDAFALEIKLLLAQIEFLEEQIQTIEEAIQLALEDYRAECPCDRLPANCHHVIETVPGLGPVLTAAIIGEVGDIGRFANARKLVAYAGLDATTRESRQFMGTRNHLSKRGSPHLRRALWLAAISARRFNPELRAYYEEKKAQGKHSMVATGAVARRLVHMIYSVWSQNRPFDPKYRWVHPGSSD

SEQ ID NO: 316764 - protein, 437 aa, unidentified
MAKLLRFAKTVAVTLAATLRNCFLKREELPPGAVVIAFDPHQHQHRAVAGQVGGALLEKPFTVYNSRQGFDFLLKKIAHYLKQTGAPEVYLVFEPTADFFRAFGYLLEDLGYHVHLVNSNQVASMRQALFHNGDKTDDIDAFVILELAVQGYSFQARLHREEFRNLHKAGRERHDLREKQSALQMQITALVQEVFPELRQAFKNLFGQTCLALLETTPLPAPIVALGEDALTERLKAASNRRWGRKKALQLLELARLSIGVTAANEAVVARLQRLVASWRGLHQQLQQVATEMETYLPDAAQPLLRIQGLSTVLVATLLGEIGDWTFFAHATQLVKLAGMSPQRWASGDHQKAPHLSRKGQPLLQYTVYLCALSLVQHNPAFRAYYQSLCQRGKPKMVALCAVGRKFLHVVFAMLQHGTEFDPHLVGAGQNQPTPAD

SEQ ID NO: 316765 - protein, 371 aa, unidentified
MITLGVDAHKTMHVAVSVDEGGRPLDTWEGTNSQSSWQEMLAWASQWESRQWGIEGTGNYGRGLAQHLVAVGETVYEVNPRLTAQGRRRARKQDKNDRLDAQAVARALLRDVPELPEVVLEDEAAVLELMNRERDRLRTQVDRLRNQLHNRLFQVDPQYRKSFPSLSKLAAIQNLEQYTAAADTPLASVRGAAVRRVASLLRLVLEQHQQITGEIESLSGTRYGALTETQGVARLTAGILAGILGTRRFATEGQFASYSGASPIETSSAGRVRHRLNRGGNRRLNRVLYLIALTQWKQKGAGRNYIQRRMEQGKSWLEAVRALKRFIARAVWRLWQRHYAIKHPPNPDPTSPQPGPSKYSQHCPLPQPQLT

SEQ ID NO: 316766 - protein, 342 aa, unidentified
MSTVTTIGLDIAKSVFQVHGISATGEVLIRRQVRRGQVLKFFASLPPCLIGIEACASAHHWSRELQSLGHQVKLMPPAYVKPYVKRQKNDMADAEAICEAVTRPTMRFVETKTCEQQSILMLHRVRLMQVRQKTMLTNAIRAHLAEFGLVAKIGREGVDELLLMISDGDERVPELARACVLALAEQLVLVKRQILEMDRRITACHRASEVSRRLAEIPGVGPLLASALVAHVPNPKAFSSGRNLAAWIGLVPKQNSSGGKERLGGVTKQGNRYLRSMLTIGALAVIRFAQRHGTRRPWIVQLLARRATKVAAVALANKMARMVWAIMVRGERYREPVVGQAA

SEQ ID NO: 316767 - protein, 341 aa, unidentified
MKVVYSTCCGVDVHKTFLVATIIKTTKGVQPSYQKKRFSTFNSDIRRFKQWLLDNSCFDVCMESTGKYWIPVFNLLEDQINVTIANPKWVKAVKGNKDDTKDFKWIGDLFRLGLVLGSYIPCKPIRILREFTRYRYKLTSCRSIEKNRYQNALTVCNVALDSVVSDIFGKSATSVINYLLEQFTNSVNHEEIDSRLLRSLKKKSDSVIESIEGYQMTDSQKYRMRLVRAHMDYITSTRNDIDTMLDSLITPYENAVQLLCTIPGVDRNSAITVISEIGTDMTPFSNSKRLYCWAGLTPCNNESSGKKRAIIAIARMILTAIYVLMKYGIRPIYTRLICLNL

SEQ ID NO: 316768 - protein, 416 aa, unidentified
MKYYTSTTEYNCGIDLHARQMYVCVMDRQGKKLVHTNVLNNDFKYFLKLVEPYKHDLTVCCECMFGWYWLADACQAAGLTFVLAHALYVHLIHGGKNKNDRVDSEKLTHLLRSNLIPQSYVYPADKRPLRALLRQRIFYVWRRSELLARIYSHQLAHNRTPAKQTRRVRDSWEEQLLAAEDNPLRQIALKNDLAMIRHFDHQIFQLEEELQRQTKQVACREYALLQTVPGIGETLGLIILYEVGDINRFPTVKDFLSYCRLVKGTVASAGKIKGLRGAKLGNPYLRWAFGEAAVIAKRDHFRIRPLAQRLEARMGGNKIKANTVVAIKLARAVYFMLKNKTVFDPERLVASLQKCFGPGRRQPGGLTGCAKKATPPSAADHVSCASSTAVCVGQASSPAPLIGTCGQRLDSVSAKA

SEQ ID NO: 316769 - protein, 350 aa, unidentified
MMIGVDYHPSFQQIAFLMEETGEYSEQRLNHSDGEAEKFYRDLQRRGVHVRVGMEATGYSRWFERLLAELGFEVWIGDPAEIKAKRVKKQKTDRQDAQLLLKLMREDRFPRIWVPSPENRDVRQLLWHRHRLVQMRTRIMNQLQALAMNEGRRWKSKLWSEQGRAELENLALAPWASRRRHELLELLDRMNPTIEELTAAAEQEARKRPEALRLMTHPGVGPLTALAYVLIIGTPSRFHRGKQIGNYVGMIPSEDSSGGKQRLGHISKQGNSLLRFLLVEAAQAAVRNNPDWRRRYIHLAMRRDKSIAKVAMGRRLGVRLYWMWRNGCEYSPSMEFGSYAGQLGTGHGVK

SEQ ID NO: 316770 - protein, 347 aa, unidentified
MTEAYDGRQVVGMDLHRRRSVLVRMTEDGRKLETVRIENSPAALRAVLARAGKNPRVVVEATYGWYWAVDVLEEAGAEVHLAHPLGVKAFTYRRVKDDERDAADLADLLRMGRLPEAWIAPPEIRELRELTRYRHKLVGLRTSCRDQVHAVLAELGVPVTHSDIFGVHGQAWLDGLRLPQPYAGKVASLRQLNGELSGEIALLEQVIGDLLAGHEGYRAIQALPGIGPVLGAVIVAEIGDIRRFPGPGQLCSWAGLTPRHRESDTKVSRGHVTKQGSRMLRWAVCEAIQRQPAGTRPWQVKDAIIARRGIQARNTAKVAAARELLTLVFYSMRDGHIRRADRPGQAA

SEQ ID NO: 316771 - protein, 310 aa, unidentified
MDATYVGIDVSKEKLDVHLRPSAEAFAVARDGQGLHELVERLRGVEPELIVVEATGGFETIVTAALAAAALPVVVVNPAQVRHFAKALGQRAKSDPIDAAVIADFAAAVKPQLRPLPDAAARLLAELVGRRAQLVEMLAAERQREERVANARVRKSLKRHIAALAKELKTIEDDIDGLIRSSPLWREKEDLLKTFPGVGETLARVFLADLPELGQLNRRKIASLVGVAPFTQQSGQWKGKSMIAGGRAAVRSAVFMAAMSAIRCNDVLRAFYQHLLALGKPKMVALIAVARKLLTILNAMLRDQKPWQHA

SEQ ID NO: 316772 - protein, 348 aa, unidentified
MNHVGVDLHKETSLFYIIDKNGKKISSKNVLNKPDILKQYFEQIPKPFILAVEATYNWYYFVDIAEQYAKKVFLANSYELKAFAKRHKKTDKIDARLIATILQKGFLPVVTIADKHTRQVRELLRYRMKLVTDRSRNISRLKALLDRLGINSNGDFTTYKRLKAISAENTTTIYKKLVANYIERVTELTQKLKSIEKDVSAVSCNDQHIVNLMSIPGIADFSAALIKTEIIDISRFASFNRLCAYAGLAPRVSASANKIFHGPLNKNRRKNLQWILLENVYHFIKAIPEMQEKYEIHKQRKGHNTAKVALAREMLKIIYHVLKEHRPFYFSSKNCQIQSVAASALSGV

SEQ ID NO: 316773 - protein, 354 aa, unidentified
MRFYKQPSDQQPHRFYCGVDLHARCMYLCILDAAGQTVLHKDYPADAGAFLAAVAPYRDGIAVAVECMFAWYWLADLCHEHGIPFVLGHALYMKAIHQGKSKNDRLDAAKIAGLLKGGLLPQAYVYPRAMRATRDLLRRRSFLVRRRADLLAHLVNTNSQYNLPPLNKKLVYPANRGELKLAERFTEPSARKMVECDLALVDAFDGQIHELERHLVKTAKVHDAQAYARLQSVPGIGKVLGLVLLYEIHDVRRFPEAGHFLSYARLVRPRQESAGKASGFGNKKIGNAHLRWALGEAACLYLRSSERAKRWHSRQAQKHGPAKTLGILAAKLGRTVYHLLRTKQVFDENRFFAS

SEQ ID NO: 316774 - protein, 345 aa, unidentified
MTSMNFIGLDIHKKTISYCVKDNSAKVLSEGTIPATRQGLQEWVGTLAKPWTVAMEATMFTGWIYDYLRPHAAAVKVAHPLMLRAIAVAKKKNDRIDAGRIADCLRCDFLPECYMAPMEIRQRRRTLRYRKLLVRQNVQLKNKIAQLLMESGVTYNKEKLHQQGYFHRVLPANPEIDPSLWPLLKLTREMIERTQKTERALLRSLEADPLLAARVERLMTIPAIGHVTALTWVLEVGEVERFHSVKQVISYCGLCSGEKTSADSSRRMPISKQRNRHLQTVLLEAAHLAPRLNPELAVLYEREAAQSNRNQATIAVARKLAAYLLAIDRGERAFVTHQVHSRVAA

SEQ ID NO: 316775 - protein, 335 aa, unidentified
MEFEFFIGIDVSKNELDFSVQQGKCFLFHKEIINEPEAIKALLKEISKLEGFSLSNAVFCMEHTGIYSNHLLSCLYQKKANICLESATQIKKSLGNLRGKNDKVDSMRIAAYAYKNRDELRLWAPRREEVQQLAHLSSTRSRLIKAKKMLKTPLKEYGSFVKKKAAKQNTDICNKALNGIEASLENVEKSIMVIINADPELKRLFTLVTSVVGIGKVTAIQLIVTTNEFKDINNAKSYACYAGLVPYLEESGIFKGKGRVSHMANKKVKTLLHMAALVAIQYNDELRLYYERKVNVEKKNKMSVINAVRNKLVQRIFSCVNQNRKYEKNYLKLVA

SEQ ID NO: 316776 - protein, 381 aa, unidentified
MFNLPHYVGLDYHQKIVQVCVMDQKRNILLNQAVENDLEAVFRVVAPFGSNIHAAIEACTGSADFAEELREKYQWNVELAHPGYVARMKQTPDKSDWTDAKLLADLTRAGYIPRVWLAPKNIRELRDLVRYRHGLVQQRTQTKLRLRALLRNHRIHCPHNPWTIKGKTWLLEPNDAITAHLRFLLTELYDTLTFLLGKIGKVQDQMQERIEGDTVVQQLLKQPGIGMITAITMRGLIGRFDRFRTGKQLAHFCALCPRNHSTGGKPTTGGLIKAGDDILRQMLIEASHRLIRYDTAWRIMADRLRKNGKRPCVIVAAVANRWIRKLFYQITEMKQIDGVTVGFSRHEQESVLKDKNLSEAGPEYDRLTESSMYGIQTDTLP

SEQ ID NO: 316777 - protein, 345 aa, unidentified
MAARAKKTLYCGIDLHSNNAMYVVTDQTDKVVFKKRIPNQLPVILSALNPFKRKLVTVAVESTYNWYWLVDGLMEQGYPVVLANPAAIDQYDGIKDVNDLTDAAFLAHLARLGILPTGYIYPKEERPVRDLLRRRTLIVRQRTATILSLQNMFMRQAALNMNWRKIRKLTPEQRADVLGDNEYLLFVTESQVDLIEVLNKKIIQFEKKVLEHAELKPEFELLLSIPGVGLILGLTIMLETGVIDRFKKVGNFTSYCRCVRANKQSNGKSKGKNNSKNGNPHLAWAFVEVVHHAIRSCPKAKQFYDRKKSKRNGALASKALAAKWSKAAYYVMKRQEAFDLKRVFG

SEQ ID NO: 316778 - protein, 439 aa, unidentified
MPDVPWVHRKKGGASMSKKNSSPAGLQALYARVCGLDLHKKLIVACVRVLNTKDGTVQSTLRKFGTMTPDLIELRQWLTEQKVTHVAMESTGIYWQPVFNLFEGHFKLLLVNAQHLKKVPGRKTDMKDAEWIAQLLQCGLLKASFVPDRQQRELRDLTRQQTKLVQQRNAVDNRIQKVLETANIKLGSVASDVLGVSGRKMIEGLIAGEKDVTALAQLAQRQLRGKIPELQRALEGELTDHHRFLLRQLLEQYDFLEKKIASVSERLGAVAPPSFRAAVEQLDAIAGVGERGAQALLAETGTDMSRFPTHKHFASWAGQCPGNHESAGKRRSGKTPAANRHIDAVLTEMAHAAERTKNSYFKSQYHRLAGRRGKKRATGAVKHSLLVTVYFMLRDNKPYKDLGVDYFNKLNPQQRIRYHVRKLQELGQEVELSPMADAA

SEQ ID NO: 316779 - protein, 434 aa, unidentified
MISHLPHDNCWVIHLLEANKMTDQDNANLNAVYVAIDVAKNKHDILIRYTNGKQHSFKIYNTMAGYQKLIDAAKKYSNEMIICGFEPTADYHRNLAYWLSTLGCEMRLISSLSCARAREMLYKTWDKNDRKDTHVIMYLLENQHSQPFYDPLLENIMDTQEICNTYQQVSLARSRCWHSLLNHYLTLYFPEIERFLHNSRSEWFCRFLLKFPTPNSITRYRQDTFIKRAWDVVGRKVSKQGFLENLYELAGNSIALPVEINSPAVETFKLQIARYMDLTKHRSQLEAQADQLLSSRKDYQLLRSLPGIGPVIATIILAESGDLMRFKHYRQYLNFCGFNLCSKQSGKHVGKYCLSKRGNARLRYAYWLAANSAIRSTENSFRNKYTRYIKQDPENADLKRKARTAVAIKMARVAHAIVKKGQHYQGYYEYRCET

SEQ ID NO: 316780 - protein, 372 aa, unidentified
MKQNIIHIGLDVDDTQYHGSAFNKDTGEVIDFKSRPTLKGLLQQLDRMARHFKGRKIKLCYEASYIGYCLQRDLISNDIHCDIVSPSSIPSPRGKAIKTDRIDAGYLAQFYANDLLTIVQPPDEEQEQDRDLLRSRQKVMQQRNQLRKHLQAVLRRSGLHYKAETQYKSHRTKHHYFWLARTIDGLSGSLKINLELLLRQLNALNEVLIGYGQQIEVLANSPRYQSTVQSLTCYKGIKNIFALTMITEIGDIKRFSHPRKLVSWIGMDIREYSSGGKHNRFGITKHGNRYLRTAFVEANQRGYRTARIGKDVKARRKNIAPELINIADRCLRRLNKKGNRLLLAGKHPNKVKVACAREMVGFVWESLNKAAA

SEQ ID NO: 316781 - protein, 408 aa, unidentified
MKDSRKRYIGLDVHKHYLIAIGVDDEMKVVLPVRRVELSHLEAWMKKTLTKQDDVVLEMTTNTWQLYDELSAYAGRVIVVHPPHVALITRSQVMNDKLAASILARLLAKGLLVGIWVPPQEVRELRGLVAQRKKMTGLATQAKNRLHAVLQRHHLVSPEGNLFHAAQPRWWLALPLGALEKVNVQSDLETLQFAEKQLRRLTSMLEEIANQSNEVTRLLQLPGFGVVTAVTVWAAIGNIQRFADPQHLVGYAGLGTKVHDSGMTTRTGRITKAGRRDLRVVLIEAAQVAANSHPHWKAELARLQPRLGRNKAIVAIARKLLVAVWYILAQHKTDRFAQPAAISQKFLKFAYQLGKENRPAGQSAAQFVRQRLDALQLGQDLTRIAWGTKKPISLPPSTNKVSDVPNTK

SEQ ID NO: 316782 - protein, 353 aa, unidentified
MKPKTESDTALPMVIGVDIGKEVFHLVGFGGDGKIVFRRKIKRLGFAAVFEKVPPCIVGMEACLSAHFVSRTLRTLGHEPRIIPAIYVKPFVKGQKNDYNDAEAIAEAALRPNLRFVQEKSQDQLDLQACHRVRARLVSRRTATINQIRAFLIEQGIAVRSGPRALRTSLCAILENRKDEISPRMARLILDLYKDWCHLDERIDTVTGEIEELSRIEAKCQRLMTVPGIGPVISTGLVAAIGSGEAFERGRDFGAWLGLVPRQYSTGGRSVLGRISKRGSKYLRTLLIQAAKVLLMRPRNWPRYSFGAWLKTASERLHRNKLAVALANKLARIAWSVLRHDKAFDTHLETAAI

SEQ ID NO: 316783 - protein, 327 aa, unidentified
MNYSHFVGLDVGKKTFDASLMSADEKELSHKSFDNTPTGIQSLLDWIAGYHLSLSKLLFCAENMGSYVTELSVSSVSMGFSLALVCPLTIKKSIGLQRGKNDRIDAKRIANYAALHYRKLELYKLPDKDLVRLRGWIIIRDNLVKQKVSSIKLLETFSQMAKLANVTEAISFLEEQLKSIKEKILEVEKDMEQLIAVSTSLYTNYRLLRSIKGIGIINAIVLLCVTDNFQRFDNPKKFACYCGVAPFEHTSGISIRGKTQTSSLANKEVKVYLTRAAITAISWNPQMKAYYKRKIAEGKHKNAVRAKIIARSFAVIRRQTPFVTLAV

SEQ ID NO: 316784 - protein, 319 aa, unidentified
MAQIDPVVVGIDVAKAKVDACIRAFMLRQTCPSTAQGQRKLVAWLRKHQVTKAVMEASGGYERDWARVLRQAGIEVRIVDPKRVRSFALSAGCLAKNDTIDAEMIAWFAETFSEAPSQTHDAAHEELQALVKARLGLIDLRMRLEGQSEHAAPGLVQKAHAHVLKSLASELAKLEAAISAKVKSTPDFAERAEIIESVPGLAETSSANLVAGMPELGQVSDEIAAALIGVAPYDDDSGKRRGERHIKGGRRWVRNAIYMPCVGAATQNNPVLKAYYRRLIAKGKEPKVALIACMRKLIVILNTMIARRQKWDPNRYALS

SEQ ID NO: 316785 - protein, 394 aa, unidentified
MILVGIDIGKNKHTFSIIDKNSGEILLSPSDFSNNLKGFLFLIQKLSSYTKSELLIGMEDTGHYHFALLKYLLNRRYTVALINPTTTDLTRKLQGGITKNDPLDSLTICDVISSNHRNKPYRVTTLNRFDLYEQKQLTRHHHNLKEELNTYKNRLQKCIDIVFPEFNSLFHSKYGIVYMNILKAFSSAKAIANADIRSIRKCFEFKGQGKRISLSAEQLKLTAKSSIGIPSVAEEIQIRHLVSQIELLEKQLSEIDKRIEEFSLKNNSPILTIPGISHFSGTSIISELGDICNYTKASQIIKFAGVAPYHYESSQFTAQHTAITKKGSKYLRKTLYQIILPVISNNEVFYAYYTKKLNEGKGHRCAQGHCIRKLLRVIYHLLSTRQPFNPKLLV

SEQ ID NO: 316786 - protein, 454 aa, unidentified
MDVLIDRVAGLDVHRDTVVAAVRVGGRGGGRRGEVRTFATTGAGLTRLAGWLSEQRVSLVGMESTPDYWRPFYYLLEARGLTVWLVNARDVKNVPGRPKTDKLDAIWLAKLNERGMLRPSFVPPPEIREIRNLTRLRLDLTAECTRHRLRVEKLLEDALIKLSTVLSDIFGVSGRAMLDALVAGERDPKKLAALARGRVKATQAELATALTGQFTEHHGYLLSVLLAQIDGLDRRIAELTERIDTAIAALPAPAHAAADAARGGETGPDGDATTGTGQGGGGAAARPGLDILDRLDEIPGIARHAAQVIIAEIGTDMAQFPTSGHLNSWAKLTPQTIQSGAKSRTGRTGKGNPYLRGALGEAAMAAAKTKTFLGSRYRRLVKRRGHLKALVAVARSILTIVWHLLNDPTARFHDLGVDYHASLQSRERRKRNALRELKSLNLSAQEITALLAAA

SEQ ID NO: 316787 - protein, 343 aa, unidentified
MTKLNVIGVDLAKNVIQVSVLSPSNQELRNSALTRRKFSEFLGRQRPSLVAFEACATSHYWARVAQRQGHEVKILPAKAVFPFRQGHKTDENDALAVAEAARRPNVKLAPLKTVEQQGMQAIQRSRELLVHERVSLANHLRGLLMEFGMVIPQGFASLYRLLPEILEDGENELPDLYRPTLNLLYGRLCDLREDLERLNREIEVLVQANPVCRRLTALEGVGPIGSVLLYATLGTGEAFTNGRQFSAYLGLTPKQFSSGGKVNLVGISKRVANRRLRAVLITGARAYVYHMKEPKTAKDRWLWAIVERSGKCKAAVALANKNVRTAWAMLTQNTEYQHYPIAA

SEQ ID NO: 316788 - protein, 327 aa, unidentified
MTRMICGVDISSATLAARIGRDGIAATFANTTDGIAQLAGFCQSHGVELVAMEATGGYEQRSFAQLSEHGLPVAVLNPRAVRQFAQSMGALEKTDAIDAGMIAWYAETKRPQPLCLAPATQLELRARVTRLRQLTEVRTAQSNQQRLVTNAAVRKGFSAMLRFLDKQIEELEQAIAALIDADPLWHQLNRAFRTIKGVASRTVSRLMAEMPEIGTLSNKTISELAGLAPLANDSGKRQGRRAVRGGRAAIREILFIVGSVVARYEPDFIAFQQRLRAAGKPPKVVRIAVAHKLLVRLNAKAREVRTGLALAKGTPACLQFGESQLCS

SEQ ID NO: 316789 - protein, 402 aa, unidentified
MNAVGIDVSKGKSMVAIMRPFGEIVSTPFEIKHTTSDIHSLVELINSVEGESRIVMEHTGRYYEVLAHQLSEANLFVSTITPKLIKDFDNDSLRKVKSDKADAVKIARYALDKWQNLKQYSVMDELRNQLKTMNRQFGFYMKHKTAMKNNLISILDQTYPGVNTYFDSPARSDGSQKWVDFASTYWHVDCVRKMSLNAFIDHYQNWCKRKKYNFSQSKAEEIYGKAKELVPVLSKDAITKLIIKQAVDQLNSASTTVESLRTLMNETASKLPEYPVVMAMKGVGTSLGSQLMAEIGDVSRFTHKSAITAFAGVDPGVNESGSYEQKSVPTSKRGSSDLRKTLFQVMDVLIKTHPQDDPVYQFLDKKRAQGKPYYVYMTAGANKFLRIYYGRVKEYLSSLPES

SEQ ID NO: 316790 - protein, 337 aa, unidentified
MAASRRVVIGADTHRDTNHLAVITEAGKPLADAEFPTSPAGYDDAVRWARSFGTVVIAGVEGTSSYGAGLTRVLQAAGIEVAEVSRPDRAARRRQGKSDPLDAYTAARSAVAGHGLAVPKDAHTAALRALLTARRSAVKAHTAATNQIHALLVTAPAELRERYRRYSTAAVVKALARCRPASHSDPTAVAVLTAAKALVQRAEFLERQKQDLTAQLDVLVLQINPALRAAYGVGPDTAAQLLVTAGTNPHRLRNEASLAALCGAAPVPASSGKITRHRLSRGGDRAANNALYRIALVRMSGHPQTRDYVQRQAANGRTKKEVCGCSNAPSSVKYSDC

SEQ ID NO: 316791 - protein, 346 aa, unidentified
MQPVIGCDAHKHFSVFVSVDQHGQASRPVRVDHDRDLYCSYLRSLPAGSEIALEATGHWYWIVDAMEEAGHHPHLANPFEAKRRMAKSNKTDALDAKGLAILLRCGTLPESWIPPGELRDQRELLRTRMALRDLRTSLKHRIHAGIDRYGLQADAISDLFGTKGRIYLASILKVLPAETAHMIALQLNSIDQLEDKIEAIERRIAEQLKTSPEMRLLRTVPGLGPILAPLVWLEVGDVERFPRAEHLASYAGLVPRIIASGGHIRHGGTCRNVNHYLKWAFVEAANCAIRIKAHRQNHIGLLYQRLYPNKGHGRAVVAVARHLAEASYWVLRKKQAYRAPQPRIAG

SEQ ID NO: 316792 - protein, 347 aa, unidentified
MLHVGLDLSRTRLDVHAMDEAGAPLAVTTAVPDAGGLASLAHRLAEFGQPVAAVIESMNGARFVHDQLELRGWDVQIADAVKVKGFAPLACKTDKIDAWVLAELSRRDLVPAIWLPTPGIRAERERARWRLHLVRHRTALKNRIHATLLAFGHPCPVSDLFGAAGRRLLESLALPEPWAGDVTAALRLIDDLDTEIDDCEAALRELGATHAYVPLLMTTPGIGWVLGYTIAAEIGDIGRFPTPKKLVGYTGLCPSVDQSGGHDWRGALAKNGPKYLRWALIEAATHAARHPVYADRYERTKTRLGKQRGAKVARVDIARKLAEAIWWMLTTNRPFAPAGARHAALAA

SEQ ID NO: 316793 - protein, 359 aa, unidentified
MNSIAPEAHQRKIIIGIDTHKYAHVAVAIDHLGVRVGERHVPANREGYARLEAWAASLGRVSAFGIEGTGSYGVGVASSLRRNGHRIVEVNRGDRRSRRSNGKTDTLDAEAAARAVLSGEAAAVPKSADGAVEMIRQLKIARDTARKGRTSAIVTLKALIVTCPDELRETFEGSTDKSLIDRCANLRPGAVTSPTAAAKHALRALARRYQALGAEIAAHDAVLDELTKNHAPTLREGFGIGVDTAAEVLIVFGDNPDRVRSEAAFAKLCGACPIPASSGMSNRFRLSRAGHREANAALYRAVIVRMRFHQPTIDYVARRTTEGLAKRDIIRCLKRFLAREIYQRVMTDHRLRHTTLTPA

SEQ ID NO: 316794 - protein, 339 aa, unidentified
MEYGAIDLHTRRSQIRIVTADGTVVLDRRIDTRRSEFCRLFESRARMRILLESSTESEWVADCLEQVGHEVIVADPSYAAMYGSRSRRVKTDRRDVAALADACRRGVYRVAQRVSREAQRRRQQWRMRAHVIRMRTQTINALRAILRQAGVRLPSGMACTVSARVARLEREPELQPAIRPLVDTLAALAPIIARAETWVRDTAAHDAVAQRLMTVPGVGAVVALSYQAALDTPTRFGGHAGRASAYLGLVPGEHSSGERQRKGSITKAGPKIPRSLLVQAAWTLWRHGGRAPQLHRWVEQLAARRGRRIAVTALARRLSRILYALWRDQTVFDPLGLAA

SEQ ID NO: 316795 - protein, 544 aa, unidentified
MARRKGGSRRQGRIHRQKVNSAFLERARAVGAERFGILTVDPAKQRSVVKLTNFYGLELMAPQVVEHTDRDLKALVETVKREQQEHGLGDLVVGVERTGRYHAPIRRALQAHWTVQMLHPFATKQLRQPVDPGQKTDPNDLNAMTRGMIVGYGAEEPDLPERWLEWRLVSRERENFVRKTATLRNQMKERLEALLPGYAALFGAFWQAPVARAVAERYPSAPALLQAGADAILEALRRDGQMTRRDTVARLLEWARNAPTPDPCAILNHRLLRGEFALLRHLESALAAFERELVQYLVDTPFVLLISIPGIHVVSSASYGAELGPLEHYLTPKNISGRAGLYPSRYQSDETDHADGPLVSRRNARLRDAIMEIAHNLIRCNHYFEAWAEVRRRQHWPARKLDLAVATRFVRISFRMISGRMVFRHPCAQGRDAILDKLLDFGLRHQIPPRDIQDLLQRALRQIPQDAFEEEARALIGRLPRRDRRDPPRPDTSGREPVRLGDLLRQVIHHLAPHLSLELPRSATEQPTHTGGLPNHRLSAAEGS

SEQ ID NO: 316796 - protein, 341 aa, unidentified
MSMVTYVGLDVHLNSIAAAWGRLQEKPRNLIVPNTPAGLEALVKAVGPGQVWAVYEASSCGFGLFDELTRRGWKMSIVAPTHIHRSVHARKRKTDLRDARRLWELILGHGELGMDLPVVWIPPMKIRQDREVIRRRLKLGENLSRVKNGILSLLRIQKATRPESLKTLWSQKHIAWLRGLPLDPTVRPVLASLVRELDFFIQELADLNAQVEALAQEDPYREQVERMTQVKGVGTVTAMTYLLELGDVHRFGNRRQVACYLGLVPSSFESGEANNRKGHITHLGPARVRKVLNQAAWTLVRHDPRWREWYQAVATRRGALKAIVGVARRLGIELWRRAKSA

SEQ ID NO: 316797 - protein, 408 aa, unidentified
MQVIHPVCCGIDVHAAQLTACLRQVSEEGQITMELVEYGTTYSELVAFRSWLQERQCPVVALESTGVYWKPVYHVLSEGVDVHLANSRDVRQRPGKKTDKNDATWIAELLAHGLIKPSFVPPPTIRALRDLTRTRVSLVQTRTQSKNRVYKILEDTNIKLASVVSDLFGKSARRMLDALVAGERDPQKLSAMALGTLRRKIPQLEVALEGQFTEHHARLIGGALELVDVLGRQIAEIDQELDELLSQMAPQLEQLESIPGVSDITARDIVAEIGLDMSRFGSAARLASWAGLSPGNNESAGKRRKGRTRKGNKYLRRVLVQCAWATRKTSTFLGRTFRRLEARLGSKKAAMAVAHKIVVIIYHLLLEGTFYEEERYDRLLPRQEERERKRALKALERLGYAVTLDKVA

SEQ ID NO: 316798 - protein, 347 aa, unidentified
MEYVGIDLHKKESQICLLMETGEVIERRIRTESQRFAEVLGGRPRARILVEASTESEWVARCLEALGHEVVVADPNFAPMYATRTRKVKTDRRDARALQEACLLGAYRPAHRLSDAQRHVRGRLAVRDALVRTRTGYIALTRALLRRHGWRVPTGSAETFMRRVVALPLPGRLLSEIAPLLAVMRPINQQLAYSDGAIEAVTRPDERVRRLRTVPSVGPVTAAAFVATIDDARRFRRAHEVEAYLGLVPRELSSGESQRRGRITKAGNTRMRWLLVQAAVSILRCRHAHTDALRTWATGIAARRGKKIAVVALARRLAGILYAMLRDGTTYVPRAVSRRAAQAAVLV

SEQ ID NO: 316799 - protein, 371 aa, unidentified
MSTRKNIMHVGLDAHASDINVAILGPGACEVSEQWQIAHDDRSLRKLSKRLLTMGFSELRAVYEAGPCGFALQRKLGQLGIECVVVAPSLIPVKPGERIKTDRRDARKLAKLAQADLLTEVHPPTEEEEALRDLTRAREDAKKDLMSARHRLSKMLLRHGLCFRETRNWTRKHREWLRRLRFEHPHAQQTLENYLLSMEQIEERVKMLDTRIEAAAAEEAYAKQVGWLRCLRGVDTITAMTILAELHDFRRFRTPRALMAYLGLTPSEHSSGSRVKRGGITKTGNGHVRRVLIEAAWNYRHRPAVSALLRKRREGQPAAVLAIADRAQHRLHKRYYHLKEGYKKPHNVVAVALARELVGFIWSILTHQGIS

SEQ ID NO: 316800 - protein, 323 aa, unidentified
MDSVVTAILGLDVSKLKIDCALLLNHKVKSKVCRNNPEGFNALVEWLAKQGVGRVHVCCEATGTYSDAVALFLHEQGHVVSVVNPAQIAAYAQSQLSRAKTDALDARLIARYCEREQPAAWTPPPAEERLLLVLLRDLQDLQAMQQAEANRLENAHPGVRERIERHLEFLAREIEQLRKKIEQHIDHHDNLRGRRDLLDSVPGLGEHTIPWLIAYLGDGQRFDGAKRAVAFFGLCPKPRQSGSSVRGKAHIAKTGHADLRRALYMPAMVAYSRCKAFAPFVQRLRAAGKPPKVIIVALMRKLVAIAQAILKSGKPFDLTLHHA

SEQ ID NO: 316801 - protein, 350 aa, unidentified
MKKNSKRVERQPAETIGIDLGDKVSRYAIVDEEGVVVEEGSFRNTVESIAKHFGKRGRARVALEVGTQSAWISREFTQLGHEVIVANARQLKWITSSDTKNDKNDAVKLARLARADQNLLAPVEHRTAEQQAELAVIRARDALVRSRTLLVNTARSLAKGFGLRLPATITLTFGARALAGLAEHLHNALRGLLEQIDVLGARIREYDLRIASMAARHPEVERLASVPGVGTLTAATFVLTLGRRERFAHSRDVGSFLGLRPRQKQSGERDPQLGISKSGDKYLRKLLVQCAHHILGHFGKDSSLRQWGLSKSDGSPGKKRAVIAVARKLAVLLHRMWVTGQIFQPFPKMV

SEQ ID NO: 316802 - protein, 404 aa, unidentified
MLYAGVDWASRSHELAVVDSNGQVVTSFGFAHSEQGVLGMLGRLAALAPPEEIRVAIERPNGLLVERLLAAGHSVYPVHPNAFAAARPRWGASRAKSDPGDAYRLADYLRTDGHRLRLLQPAEPYLAELRALCRLRDIHQKACMAASNQLGSLLELYWPGARYLFAHLHSPVALAFLTRYPTPESAAHLGEGRMAIFLKREGYSGRRSASELVERLREAPQPISPLDPEILAVLVEAQVGLLRTLRGTLADLEAALKVRLAGCEKARLLASLPRVGEVNLAQIVAEVGPILERAESVELVSAEVGASPVTRASGGYRNVSFRHACNTKARKALTTFADNSRRASPWAAEVYRRARERGCRHPHAIRILTRAWLRVIWACWHSGRPYDPAHHGVTRPLILAEGLT

SEQ ID NO: 316803 - protein, 408 aa, unidentified
MERYYLGVDWADEFHQVWVSDPEGKKVSEKKVEQSVGGLTEFGRFLDESRRKGVELWAAIEKPQGRIVDFLLDHGVVVYAVNPKALDRARDRFRMSQSKSDSFDAYVLAEFVRTDHGHLRALKPNSDVAQELKLLTRDQQRLVRQKTRLLNQLTTTLKEYYSRPLEVFSDLESNLALDFLKQYPTPQALSRLTRRQWNRFSKREHSLGEQRSKELWDKLQQPQLEVPEHVVRAKARLLEVLVAQLITLRDAVESYNERVRSFFASMAAAELVRLLPGAKTGTIVATLWAELGDAKDRWQSFRHLQAEAGVVPVTQASGKSRVVKFRFCCNKILRHAAYWLAFVSLNRSEWANHYYRDQRAKGHSHHRSLRALGAKWLKIIFVMWRDHKPYDENYHLANITRQKMGQAA

SEQ ID NO: 316804 - protein, 380 aa, unidentified
MDHAIAGTPTTKTVLYGALELSKNTWLLALQFPDRVQPSLYPIRGGDTEGLMAKLMAARDRWAKKSGKAPSIVLCYEAGYDAFWLARFLKARGIECLVVDAASLQVNRRARRAKTDRIDVGMLLRAVIKWSQGDHHVWSVVRVPGVDEEDLRRSHRERDRLVSERTAHINRIKGLLFGQGIRDIKVKSKYKTLQIDKLVTGDGRPLPPRLASEITREIARLALIQEQLAVLDRERDQAPTPCKATEKKRVQLMSLTGIGPTIAAVMTREVFYRQFDNRRQVASFLGLATSPHDSGDVERSQGISRAGRGQVRGTIMQAAWLWLKHQPKSAITRWFVQRTAGQSGRIRRIMIVAVARKLAIALWRFLEHGLVPQGATLASR

SEQ ID NO: 316805 - protein, 354 aa, unidentified
MRKMQEYIVKGNRIFIGLEDSKRTWKVCVRCDRVIVHETSMPAKYEVLRSYLEKRFPECEITVMYEAGFQGFWLYEYLVEDGFECVVTPPNKVSCPKSDRVKTDRRDARLLAQNLESGLYVSCHVPDRERREDRQISRTLEQVKKKIKAQKNQIRRMFDYHGLNDGLPEKKTWTDRDYRSLRTMELPYSLKVCLDADLTILEMLFAVKKDLLEKLRALCTKERYKLGVQTKQSIPGIGCETAIRLTLEWGDLDRFRDGKRMASYIGLTSSESSTGDTERRGRITKQGNPPVRGWLIECAWRAYNKDPVLLTKYRRVVHNTGSAKKAIVAVARKLVVRMWSLEHNHQTYQRGVIE

SEQ ID NO: 316806 - protein, 365 aa, unidentified
MLYVGMDVHKETISATVAEEGRKGEVRFLGTIPNTPTDIAKLVKKLSKDGDRLEFCYEAGCCGYVIYRQISELGHGCTVVAPSKIPRRPGNRIKTDRRDSENLAALHRSGDLTAVWVPDETHEAMRDLVRARMDSAMHLTRARQQLLAFLLRHGRSYTTGKNWTMRHRAWLAKQVFEQAAHQIVFQDYIEAVWTAQERKEALTTRIVTLVPEWSLGTLVEALRGLRGLEMVSAATFVAAVGDLSRFETPQTLMSYLGLVPSEQSSGNRIQRGGITKTGNSEARRMLIEAAWSYQYPARIAQEKAEVLVRLPKAVRDIAWKAQTRLCTRYRRMHARGKKPTVVAVAIARELSGFIWAIGQEVRATA

SEQ ID NO: 316807 - protein, 351 aa, unidentified
MFEDFLSTKAPQCGCPHNIQYGEPRDVKYRGFTAYLNKRQAAELPQTKEDPPMESIIYVGIDVHKDTYSLCSFDMRKDLFFSQHTMKASTANVVSYLKKISESNGNAITICGYEAGPTGFRLCLDLQRQGFNCVIMAPTSIAKTAKDKMLKTDRADAQMLARTLAYHSYKQVVLPTENILAIKEVVRLRASVLKSCKKAKQNLLSFLLYHGISYPGGGRESYWTVKFFTWLKTVTFASDYLTYCFEEYVSEVSRQIQRLDQLNAKLKELEGDREISDGVKKLKCISGIDTVTAVSLIAETGDFSRFKSAKEFASYTGLIPDMQTTGCIQRCVHSSIINLCMVLQVLLAQVS
